United States Patent Application Publication US 2005/0228172 A9 - sequence listing, part 188

SEQ ID NO: 847932 - DNA, 626 bp, Homo sapiens
ggccaggagtttctcccataataatgcctggggttgcccagttgtctctattattagaattgctggggtctgcaaaaagtccctatcattagaagactgggggtccccccaggtgtctctgtcattagaatgcctgtggttggctagtagtctctcccgttaaaatgcctggggtcgcccaggtgtctgtgtcaatagaacgactgaggttggtcaggagtctctcccattagaatgcctggggtcgcccaggtgtctctattattagaatgcctggggtctgtcaggagtctcttttattacaatgcctggagtcaccaaaatgtctttatcattagaatgcctggagtcggacaggagtctctttacagaatgccgggtgtcgcctatgtgtttctatcatttgaatgcctgggtcggccaggagtccctcccactagaatgcctggcttgcccaggtgtatctatcattaaaatgtctaaattcgggtaaaagtctctcctattagaatgcctgaaattgcccgsgtgtctctatcattagactgcctggggtcagccaggatgctctctcattagaatgcctgtggtcacccaggtgcctctatcattacattgcctaaaac

SEQ ID NO: 847933 - DNA, 528 bp, Homo sapiens
ccttcttctgccccacctcttatctcctaccttcaatcttgccccaggaaaggacagaccatactttggggattccagacctaggttcgtccttggagagttagtataggctcagatatgagccaygcctacttaggggcttcctactttgggtcattcccactgacaaaagcaaaggctttcaggcctccaaattaatggagatttcgcaacaaaaccctgaacaccacctgaaacccaccaacttagcccctggtctgtgtgcatatctatccagcaaggagctgagctcctctccacagagatgctgtgcaaatataagggttggaggctctctcagctgacaggcagacctagattgtgaagctgggattttcctcccaaggcttcagctctgacagcagagggtggaagctgcctcatctcaggactccagcctggcaactcctactggctgcagctgcgcagcgaacctgatgggatctccctcggtggctcctggggatcctggtccctccctgtgactgt

SEQ ID NO: 847934 - DNA, 628 bp, Homo sapiens
agaagttaaagggaagaagaaaggawctttgtcttgtgggacaaaacacatgctgaagtgatggggcaccatggtcccatcagatgcgttggagtttgccttctgttccaatcataaagccccatctgcacagtggcaagccctttccaagggttagtccccatgtgtttgaggtttccaggcaagagccacatcgagcctccataagcaggcactgtgaaccctcaagactgaacagaaaaggaccacatcccctgttcctactcctggcccaatgctaaacttcagtaggctattcccctaattctggagcagataggaaaggcagatggaagagaatgtacactccttcgtagttcatctggacagtaatcaggagctgacccagggtgggcgtttggaaggactcagcctccgtcctgcctggtgctgggatcagcttacacagctcctgtgtccacagggcacagagaatacattgtccataaggaggattattctgtacaagaagctcagacaaagggagaggttgtttccagctgcctgggggaggtgagaggggggtgggaaaagggaccagccttgcactggggcattcctgcagagttcagcttcttctctgtggcag

SEQ ID NO: 847935 - DNA, 611 bp, Homo sapiens
aaagaaaaaaatcattttgcagcrtattggtttccaatgctactttaatcatccttgataccttcctttttgttactttcctcctatgtcctgacttataattaatcaccagttcttttctgtcctatcctaaagatcccttgaaatacaactaagttcactgtttagttcagctgactttttgttttccataataagactttcaccgtgaaagatagtggtggttttgcatcctggcattatctcatcaagacccagtctcacacagttcacagaatggctactttgagtagctctagtctaagccactgtcatctcccctagttgttagtctgcggtgggagggtgctttctaaatcacacagtagccagagggaattttttttttttttttttttttgagacggagtctcgctaggctggagtgcagtggcgtgatctcgactcactgcaagctccgcctcccgggttcacgccattctcctgcgtcagcctcctgagtagctgggactacaggcacccgccaccacacccagctaattttttgtatttttagtagagacggggtttcgctgtgttagccagggtggtctcgatctcctgacctcgtg

SEQ ID NO: 847936 - DNA, 638 bp, Homo sapiens
tggaaagtggtagaacagttacgcaaacccttgtctggataacactctgaagctcatgcttcccccactttacttacaaactaccaaattgtggtatctgtgcaatgttttgggatgctcatacacatcatatgtaagcaaagaaattagtcacaaatatagaaaaaacaggtaaaaagtgaaatttcccatcttcccttattatttcatcttattttttgagaggcataatctatatttatatattaggcaatgctctaacaaggacatagcagcttctacatgaaattgtaaaccatctgcgactctttacttgtgatacattcatagtaaagccctcggtagccaagtatagattttcacaggcacactctttcattcttctttaagttatttttcatatatttagtatatattttctttgaaaataattaaaaaacaacaagaggtcacatttccagttccatggaaacccttgggttataccctggccctgacatttcttggtccgatagtctgtgaaatcacattaggagagttgcaaagacaaagaactgagtgaatgaaaagagccaggcayggtaaggaaagaaacgaataggcaataggaaaaacaaaaaggacacagtacatagcaa

SEQ ID NO: 847937 - DNA, 501 bp, Homo sapiens
ttaacaaataataatcccacctatctaatcacagtcatagaccaattaatttaagagtaataactggaaattaaactttggtactatgatattagttgtgcagtttggacaaacacttaagactcaatttcttatgtgcaaaatacccacttcacatggttcatatgagaattaaacaggaaaaccaagaagtatctaataaaatgtatgcagcataacaggtatcagtaaatattagttatttccctgtccccaatttgcttctaaagtcactaccatctggctttgaacactgatgattcagtcaaattgtcctaattaaggtatccaatcatcttgtcaattttccatttctgtggcacaagacatttactatcaactgtacttgccktcatgaacatgtttccttggtttctaaggctctttcccctcacacttgaacttcccgtcttctcaccatccctcactcctgagggatccatctacgtgcttatagtccca

SEQ ID NO: 847938 - DNA, 501 bp, Homo sapiens
ttaacaaataataatcccacctatctaatcacagtcatagaccaattaatttaagagtaataactggaaattaaactttggtactatgatattagttgtgcagtttggacaaacacttaagactcaatttcttatgtgcaaaatacccacttcacatggttcatatgagaattaaacaggaaaaccaagaagtatctaataaaatgtatgcagcataacaggtatcagtaaatattagttatttccctgtccccaatttgcttctaaagtcactaccatctggctttgaacactgatgattcagtcaaattgtcctaattaaggtatccaatcatcttgtcaattttccatttctgtggcacaagacatttactatcaactgtacttgccttcatgaacakgtttccttggtttctaaggctctttcccctcacacttgaacttcccgtcttctcaccatccctcactcctgagggatccatctacgtgcttatagtccca

SEQ ID NO: 847939 - DNA, 501 bp, Homo sapiens
ttaacaaataataatcccacctatctaatcacagtcatagaccaattaatttaagagtaataactggaaattaaactttggtactatgatattagttgtgcagtttggacaaacacttaagactcaatttcttatgtgcaaaatacccacttcacatggttcatatgagaattaaacaggaaaaccaagaagtatctaataaaatgtatgcagcataacaggtatcagtaaatattagttatttccctgtccccaatttgcttctaaagtcactaccatctggctttgaacactgatgattcagtcaaattgtcctaattaaggtatccaatcatcttgtcaattttccatttctgtggcacaagacatttactatcaactgtacttgccttcatgaacatgtttccttggtttctaaggctctttcccctcacacttgaacttcccgtcktctcaccatccctcactcctgagggatccatctacgtgcttatagtccca

SEQ ID NO: 847940 - DNA, 608 bp, Homo sapiens
ttgagtgatttcctccaaaaagccactaaaaggcacccaagtagcttacaacagattttaaagctgactcttttttctttttttaagagaaatgacaatttggatgaggctcccatctgtgtattgcaaataatggatacagaaacatgattgttgaagtactcgtgagggaccttggagtctcctaaaatatggagttctgttttctagaaaagacattttaaagtctataaaatagactttaatttacaaatcaaggatctatcatagagatttctccctagcagtgatgtgggccaaatcatcagatagatgcaggtcaccttcatagaattttccacatgtgtttttcttataaaccactgtacatggaaaccaaagtctctatcaaaacaaatccctgatggattgcatatatgaccaagattgggtgatgaccatcttatagaaaaacaatgaacaatttttgaagttatttttatatttaggtaacacatatggatgatttctatctaaatagtttgcatttctaggtactttctttactcaatgtctctagttaagatgraacaccttctaggacacacacagtccttttcataatcaca

SEQ ID NO: 847941 - DNA, 607 bp, Homo sapiens
tttatatcctcaaaatgattttcatatatttgttgtatctttcatatcattcttttttttccccttatcgttcttgagatacttttttttttttacttggcttctaggactctgaaatcttcctattgtcytatcaagtcattggctggatcttcccaaagtcctcatcattttctgatctataaatattggcaggtctagagatcctttcccagaactcatccttctctacacatttatctctaggtgacatcacgtagccttctgactgtaaatgccagatacatactgataactctgaaatgtatacttccacagccccaacctccaatcttactatagattcacatcccattgtattgacatgacatctccttaaagttaacttgtgcagagttgaactccagattccctccattccaaactcgtgtgtttcctaaggacttcacaatagctcaggcaaaaagctttggaaacagccttgtctttcttgtctctcaaatccacatccaattaacagattatgctgagtttagccttcaaaatataacctgaatttcattccttctcgcccccttcaccataccttagtgtacgccacccttct

SEQ ID NO: 847942 - DNA, 661 bp, Homo sapiens
ggatccaccatgttctggcytccacctgtggcattctccaggactgtcatcctgcctcctacctgtccctctgcagattctgtcctcttttctctacaccaaagtcatactctttttctccccaagaacaatagacttgcttatatggatttcccccagccttttactaaaactggaatagtcaaaatcctctctgggcgctgccagcctgttatgttacagagagcagagggaggaggccagggccgctattgataagcgtcgcctgcaatgaagtgggagtgttcacagtgcaaactgacccatgaggcttgccagggctgtggcagggtggggtggaacaggactgacaggctcctgtttcttccagatctgcacattggcaacgtgccatgaatattttcaatatgtctgctagccagcaaccataaatatctctgtggaatgagctggggagatctagtttgtgcagaaaatcagggaacgtggaggaggatttgcccctctctgcacttttgaagggcgtgccatgtgcttctgccaagggcagaaccaaggttgcaaacttcacagagaagctaagagacgtgtagttaggtctggctgtttactataaactgtggaagtctattgactacaaatgcacaatctaaatcatagc

SEQ ID NO: 847943 - DNA, 383 bp, Homo sapiens
agggacctgatgtatagcagttgaccttctgggttccagtttaagtcccagccccaccccacttactagtttcatgaacttttacttmatcatgtttaatcttggtttcttcatttgtgtaagggagaaaatggtagtatttggccaggtgcagtggctcacacctgtaatcccaacactttgggaggctgaggcaggcggatcgcttgagctcaggaattcgagacctgcctgggcaacatggcgaaaccccgtctctacaaaaaatacaaaaattagccgggcatggtggcacatgcctgtagtcccagctactcaggagactgagacaggagaaccacttgagcccaggaggtggaggctgcagtgagccgtttttgtgc

SEQ ID NO: 847944 - DNA, 620 bp, Homo sapiens
attaaaaggcatacattagatacatgtttgcaaacatatgtctgtaagaaacagtgattatctctaggagatgaaaccggaggwtgagaataggaaagaaatcttttatttcctcctagacttttattacaccagatctttatgctgcaaatgacagaaaactgaagccgccctaagaaatgaatgaatttattggctcaatttcaatgaattctgtgagtagtttcaggttcctcttgaatcagagctgcccaatgtcactaggatgcttcttctgggtgttgagttcatcctttgcacatgtgaatgattctctctgggggtgtctgacagccttggttaccttgatggctccactcaagttagctatatggcgactattaccaagctttaccaccttgcaaagctcaaaggcaagaatgaatgcctctcttttccagaagtctttatttattggctctcaggcattcatcagttcttactggattatacgaccattcttgaatcaatcttcatcaatggtagtgattgatttgtggtcaatttcacctaaaccaaataacagaatggagtctggatggtttcccaaaagaaggtgggatgctatgcaacaaacaaca

SEQ ID NO: 847945 - DNA, 454 bp, Homo sapiens
ttagccaggatggtcttgatctcctgacctcgtgatctgcctgcctcggcctcccaaagtgctgggattacaggcrtgagccaccgcgcccggccaaggtcaaatttctgataggcaaaactgcaggaatggccaagcttcagcacactctgaatgcacttgtcaacctgcatccttcccgaaaacacttcatcccagagagtttgtctttttactttctcagtatgtgaagtgggatggtttaaaagaaaaaggtaaaaacgttcagtctgatcaatactaaccatttaatacaaactagtgacacacaaaaaaatgaaaattgctcatttggatagatgtatgctggcttagcagaaggaaatgacggtttctttgaattcaggtttagattattttccctcatagagaatggaaaatgtatcacaaaaaaatataaaaatctgaataaggt

SEQ ID NO: 847946 - DNA, 611 bp, Homo sapiens
taattcctatcaaattctatcagggctggtggctggccctagatatttgctaatgtcctrgttttgacctaagcatttttgtataattttatcccttaagcatggtgtgttgtggttaagttaaaaaaaaaaacactttgaaactattagaaagaaattacagagctggaatctcaagtaccatcccaactgttacaaggagctagctggccaggaagccgtaatgcccccattaataaagctattaattttgaaaagctttgacagctataacatcttttttaagaaagcaaaaatacttttcctttatcttaaaaatgccttcttctttgtatggagcagctgcctcaagcccccttccactgcctgttttaatttgtctttaatatcagatgtgccttatcgatttcttctgtgtatattttcattctgaataattcagaggcaagatttttttttcccattatggtcaatagcaggggcaaattttgaggataatcaattgagccctgactgacgattcctgctgttggtaaccccagaagtgaagaagggggaacagcaggggataatacgatccaacagtcaatcacagctatcagcaaaggagc

SEQ ID NO: 847947 - DNA, 645 bp, Homo sapiens
agccaagctcttttcaaaatagggtagaaaatttggaaagcttccaggaamtcagtacagggaataaataattgtcacttttaaattcagataatatggttgaaaattaattatcatagggctgacagaaataatacaagtttgcctagtctcccctcacctgcagtaggaacacattttctgtgcctgttttgacactggcccttgtccaagtctttgacacactcaatttactacaaaattggcaaccctctgtctcctaaaggtatccaagtgtaacaataaatattggtctccatacacactatgattaacataagtcagagtagacttaatcagtgtcaaattatttggcttccataattttagtattttatattttcatctctttcttaagatatttttataaaatcctgatttaacaagatgtgctagaggcagccgggtttttgcattctcttagggatgtggagatcggacccaagtgaggaaaagggacgctcaggttaacacaagcagttcaatttcaattatgtggagtaaatggtctttttcaggtctgatgatttttgaaaactatttgaaggtctgctgtgatttacatgcagtttgccttgatctgctaaaagaagggctttcatatta

SEQ ID NO: 847948 - DNA, 639 bp, Homo sapiens
taacacaaaaattatgtttagggctctcattgacttcaactccaaaccatatgttacttcttttaaaaacataatttctaaaaaaaaaaatatatatagagagagaggcaaatacagtatcttaagatgatactatatttgaaattccaagctaaaaccctggaacaagaagctggtaatattttgggaagcattctttatttttgagtagtctttctgtgtgtaggcctctaagttcccaaagatatcctttggtagcaactgacttactatgtagtagcattatttgattttaagtcatttgatttttttatctgaggagatacctttattataaaaaattttacttgaagaaatttatcttgataagcaaatgtaaggctgtcacttttgcttattggcattaaataaacatactacagtttttccatttaaaaatgtgggttatttgattatgccagagtagttacaatcaagaactaacaaacatttgtacttaatgtactgaaaggtctttgcccactttttaaaagttctcttgcagaactacaactctgtgaagtrctacatttataagccaaaacatttttaacaaagaagaaaaattcccatcattcatttaaccaaatacagtagtaa

SEQ ID NO: 847949 - DNA, 639 bp, Homo sapiens
taacacaaaaattatgtttagggctctcattgacttcaactccaaaccatatgttacttcttttaaaaacataatttctaaaaaaaaaaatatatatagagagagaggcaaatacagtatcttaagatgatactatatttgaaattccaagctaaaaccctggaacaagaagctggtaatattttgggaagcattctttatttttgagtagtctttctgtgtgtaggcctctaagttcccaaagatatcctttggtagcaactgacttactatgtagtagcattatttgattttaagtcatttgatttttttatctgaggagatacctttattataaaaaattttacttgaagaaatttatcttgataagcaaatgtaaggctgtcacttttgcttattggcattaaataaacatactacagtttttccatttaaaaatgtgggttatttgattatgccagagtagttacaatcaagaactaacaaacatttgtacttaatgtactgaaaggtctttgcccactttttaaaagttctcttgcagaactacaactctgtgaagtactrcatttataagccaaaacatttttaacaaagaagaaaaattcccatcattcatttaaccaaatacagtagtaa

SEQ ID NO: 847950 - DNA, 546 bp, Homo sapiens
tttgatacttacattatttgtgagtagaaaaatgcccctgttggggatagcgtggagcagtgagaaagtctggcgtcttcacagacstgttactcgtactgggtcttgaagggtgaataagagttctgcgcagaagaggacacctctcctgtgtgtcgggctgtgctgaaggatacgcctatttagcctgtgtctcagaagaggtgctgaagaaaccattccttaacatcagggctcctatttgaaaaaagttttcccggattgctccagcctgggtttacacgtttggctttgctccgcctcctctcggagtccccagaggctcttgggcttgccccaacctcctgagccggcggcctgatggcgagacagtggctccctgggcgctggaacgtttaggcggtggcgagctggcccatcatctgtccattaagacgagacttgaccttttgagggcaggaaggggcgacctcgcctaacccaccgggtcatctttgtgttcgggttggggagatggggtccggcccgccagcctcggctctgagc

SEQ ID NO: 847951 - DNA, 573 bp, Homo sapiens
tccagaaaaagggaggtggggttggtaggaggaatagcattgcaagcagaggagacaacatgaagacactgaagaaagaggacacrgagcaaattccagggcctgagagttggtcagagttgcaggagaacagagagtgagggaagatgggtgaaatgagaatgatgtggaaagtagagtcaaagtgggccacgtgggtagagctggcagagacagaagggaaagtaggttggaggcatgaactgggcagagtccagacagagtcagatgactgtggaggccgcaaagaggtgaaaggcagtgctgagtgctgggcactgcagtcccttgtgcacgaccactgcctgcagggatgatggcccccatgggcgtcctggccccaggcccactgctgaatgagtggtgtgaatccactcttagcgaaagaacattggcagtagagtctcactgaccccagtagtaccactgggaagaacctctggggctgaactcacggtggtgggcagagaagaggtactttgaagcagagctctaggagctgagtcagcatcactgtgtggcattaaaaaatag

SEQ ID NO: 847952 - DNA, 574 bp, Homo sapiens
agagcttagtgtctttctaactttttagggaaaataaacagaacttacaatatttcctttttttcyttttttttttttttggaaacagggtcttactctgtcacccaggctggagtgcagtggcataatcttggctcactgcagccccaacatccccggctcaagcaatccttccgcctcagcctcctaagtagctgggaccacaggtatgcaccaccatgcctggctaatttttgcactttttgtagagatgatacaatattttcttccacatatcagtgaatcaccttgtgcatcctttggagcccacattcagggctcaccctctgatctagtccttttcactgtcaaagaaggtgacaaataaagctgctaccatgtcagaatgaggattggccccagctcctgggcaaacagaattcctagaagaatgaaagatcaagttgagttcctacgcttgaaaaagaaaacattaaaaagcaattgtctcttgttaaactttaaaggctttcctatagactattaaccaatgaaaactgtgctaattttctttcctggggcaattgctattaag

SEQ ID NO: 847953 - DNA, 630 bp, Homo sapiens
aagatatggaaacaatacaagtgtccatcatcagatgaatggatcaagaaaaamacacacacacacacacacacacacacaatggataccattcagccataaaaagaatgaaatcctgccatttgtgacaacatacataaacctggaagacatcatattaagtgaaataagccaggcacagaaaacaaataccacatgatctcatttatatgtggaatctaaaaaagtcaaactcatagcagcagagagtagaatggtggttaccaggggctgagagagggaggcattgaggagttatcagccaaactatacagaatttcagttacacaggaggagtaagttcaagtgatttattgttcaacatggtgaatatagttaaaaacaatattgtattcttgaaaaattgctaagggaatggattttcaatgttcttgccacaaaaaaaatactgataagcgaggcaatgcacaatgccatttagcctgatttagccatttcacaaagtatacatatttcaaaacatgtttcacaccataaatatatactattgtgacataaatatatatatttatgtgaattaaatttgtgtcaattaaaaaatttgtgtcaattaaaaaaaaaaagacaggc

SEQ ID NO: 847954 - DNA, 426 bp, Homo sapiens
aaggtcaggagttcgagaccagcctgactaacatggagaaaccccgtctctactaaaaatacaaaattagcaggggcctgtaatcccagctactcagaaggctgaggcaggagaatcacttgaacctgggaggcagaggttgcagtgagctgagatcacgccattgcacggcagcctgggcaacaagagcgaaattccatctctaaaaaaaaaaaaaaaaaaaaaaaagacaaagggagtagcaaatacaaagaccctggggcaggattgtatctggcctgttcaaggaatgcaaggwggtcagtgtggttgggaacagagtgagcaatgtgggggtggggagtggtgggaagagaaggagtggaggagggtcaggtcatatatagccttgaaggccattgtaaggagaaagaaggagaccaatgc

SEQ ID NO: 847955 - DNA, 595 bp, Homo sapiens
agtcaaaaccacaatgagatatcatttcacacccattaggatggcaattatcaaaaaacccgaaaagaacaaatgttggagagggtattaaaaagtgcattgctggtgggaatgtaaaatggtgtatacacygtggaaaacagtatggtgggttctcagcaagttaaagatagactgtttaatatcgaatgtttggtatgatgcaacagttctacttctggttatacacccaatagaactgaaagcagggactcaaatatttgtacaccaatgttcatagcagcactactcacaatagccaacaggtggaaagaatgcagatgtccattgatcaatgaatggataaacaaaatgtagtttatacatacaatggaatattattcagcctaaaaaggaatgaagttctgattcatgctatgatgtggatggatcttaaaaacatgctgaccaggtgtggtggctcatgcctgtaattccagcagtttgggaggccgaggtttgtggatcacttgagcccaggagtttgagaccagcctgggcaacatggcaaaacctcgtctgtacacaaaatacaaaaattagcccaggattttgt

SEQ ID NO: 847956 - DNA, 643 bp, Homo sapiens
ttctgcatgtcctgttgccctttcctgagaatccttcttgggccgtcttctccaccacttcatagactggatcacattagcaaacatcttatgttgttgccgtgtacttggtttgtggcctgtcttccccctagaaggcaggtttggggatggcaagggctccatctgccctgaaagtcattccttgtgtggtgtctggaaggttcctccccaccaagagctgcctggcttagacacctcaccgcccagcactgtctttcactgggctccccacgccttccatattctccatcactggactttgtcgcctgctgctccctttgaaaccttttctatctttgtatcagcctggttaaactcttactcatgcctcagctgccccaagacctacacttcctcagtgaaggcttcccagcccctaggccaggtcaagccctctgttgttctctttcagggcacaatgtccttctcctttctagaccaccacagctgacattctgtatttgattttgtgctcatttgatcaacatctaaccctcccactaggtttcttacctcaccatcctcggtgtgaaatgccatctttgtgtggttttaatatgcatwttggtgataactaatgagggcaagcactatttttcat

SEQ ID NO: 847957 - DNA, 593 bp, Homo sapiens
gtttttgtcttccagctatacctgtttattaggtccctagaaactgcatgctttcctagtcttgctcttaaagggctccacctaggggccagtaatccaattgggagattggcaaatgaaaaatcctatagctactggatcttctgtgtagttatacatgtgttgtgtgtgtgatgtctatgaaaagctccaattagttgaccctaagaagggtaatcactagcatcaaatatttttaaaggggaaaaaaagctatggtaccttttggttcatgtgactttaatctttgagaaataaaaacaaagattattggtaaaatgcaaatgtcatcaaaatgtaaattcttttttcctggagttagattgctttgaactagataaaatggtttaaacaagttatggaagatttctaaaaaattaatcttgcaaaagaaaatctgtgtgtgaacgttgactaaattcaaaagggttataaaaggtttttgcttttttttttattttyttgagacagagtcttgctctgttgcggaggcgtggtctcagctcactgcagcctccacctcctgggttcaagcaattctcctgcttcagcct

SEQ ID NO: 847958 - DNA, 614 bp, Homo sapiens
cctccaaccttctctttctaaaattgttgagctgttgtgagtcctttttattttcatatcaagtttagaattacttgtcaatttctttctttcttttttttcagatggagttttgctctttgttgcccaggctggagtgcagtgacgcaatctcggctcaccgcaacctctaccttccgggttcaagtgattctcctgtctcagcctcccaagtaacagattacaggcacctgccaccacacctggctaatttgtgtatttttagtagagatggggattcatcatgttggccaggatggtctcaaactcctgacctcaggtgatctgccagcctcggcctcccaaagtgctgggattacaggcataagccaccactcccggccccagttacttgtcaatttctaaaacaatgtgcttgctatgatatttattaaaattgcatcaactctatcatagattcaggaaaaattaatatcttaacattattgagtcttccagttcataaatatgacctatgtctccatgtacttaggtcttttaaaatttctttatcagtgtatagatcttccacatctytggttaaatttattcctgaatatgtttgttattttgaa

SEQ ID NO: 847959 - DNA, 631 bp, Homo sapiens
attgattttactttggttcataatatttttgttttccagtgccagcctcagttttccacccctaatcgtaagtgaatgattgacatccaaacatttaaccacatmcggatgtctattatttaaaggaatccaaaataaatacttttatgaattaagtaaacatatagcactaaatagattttttaagttaaaattttgtcatttccttacctaacagtacatccttaattgtgattgtcacctacagcattttagtttcaatttttgtaaaatatatctattgctagccaattactcaagtttttaaatagttaaatcaaacaatgatttgaattttaaaaataagttcccttatgtctttatatgttgccatcacttgaatgattgatgactaagacggcaaagttatcaagagtctttaaatagcaattacaactaaacaatcaattacattatttctacccagaattccataaagccacacagtgtccgcatctcccccggagatgtaccaggaaccttccagtccagtcatgtgatttcactcatattaagaatcaatttctggggatctcaagatgaatctaacaacaacaaactacactaattgcagagttggtaagtaaaagaa

SEQ ID NO: 847960 - DNA, 450 bp, Homo sapiens
cctggtcacctgtactgcaatagtccatgacggtggtgaataagttgtcagcttcaatacagatttgaggggatcagaattgccactgtgctgaagaggctctgagtcatgtgctgcggaggtcagtgtgtcagagttgggtttcattcagagcaatccatttctacacagacattggtagaaggatggctaagggaggtgaccagtcacactgtgaactggccccatccacatccacagtttcctgatccatggttgtatgcgctctaagattcttcagactataggactttgaatgaaagatgaagtatagagattcccagaccatggtgggtgcttaactatttattggatggatggatgaatggatggacggatggatggatggatggatggwtggatagatggaatgaaggaatgatgaaccaggctgctgactaaagaagaaga

SEQ ID NO: 847961 - DNA, 635 bp, Homo sapiens
cacagcacggttctacagagcagctggcacgctgctgctgatcccgctatgatgcatccagtgcttactagatgtcacacaggaagtttttcttaaacattttgttaatatttgatgacataaaaatgttatatattatatatatgttatatatatagtaaaactccctctctagaaaaataaataaaaattgaaattcagctatatttgcctgccgggtgcagtggcacatgcctgtggccccagttacttggcaggctcagatgggaggatcgcttgagctcagaagttagattccagccctgggtaacatagcgagaacccccatttctctaaaaattgttttttaattttaaaaacattcaaattcatatatatataaatatatatataaatatatatataaacacagatgaagcataataataaagtgaatatccagaccccccatacatcttaagaaacagactattataaaaatctaaagttccctgcttattaaatccatggttgcacagtcctgtcttctttctrgaggtagccactgttgcaaatattatgtttaattctctttccttctttattattttaccatgtttatgtccttaaggaatattttcctatttttgtttatt

SEQ ID NO: 847962 - DNA, 506 bp, Homo sapiens
tttcccctgatggaggagagccgagtgcttctccatcaacagtggtatcaacagggacgtctgtctctgcttctaaggccacctgcccaactgctcttcctctccaaggcttgttttccaaacaatttgcttaatatgattcctgggtgagttgaacacaactaatcttgcttacccaggtaatcctgctgcctcccagcaggtagggttggaaacaagcccaggaagaagaaatgcctcggatgtgccgattcactgccctggcatcgtcctttctcttgcagagccagaaatgccttcagaaatgggggcaatgggagcccggcctcaggaccttgtctggatgaggggcattgttctctgagtgcccacgtgggcagagaaagtgcatgtggatgttggtgggctgtggagccccctcactgcccatgccagtggggtscaaggccaacctcgtggcactgggaaaggctggatctctcaggatctctgctaaggctgcgctc

SEQ ID NO: 847963 - DNA, 643 bp, Homo sapiens
ttctgcatgtcctgttgccctttcctgagaatccttcttgggccgtcttctccaccacttcatagactggatcacattagcaaacatcttatgttgttgccgtgtrcttggtttgtggcctgtcttccccctagaaggcaggtttggggatggcaagggctccatctgccctgaaagtcattccttgtgtggtgtctggaaggttcctccccaccaagagctgcctggcttagacacctcaccgcccagcactgtctttcactgggctccccacgccttccatattctccatcactggactttgtcgcctgctgctccctttgaaaccttttctatctttgtatcagcctggttaaactcttactcatgcctcagctgccccaagacctacacttcctcagtgaaggcttcccagcccctaggccaggtcaagccctctgttgttctctttcagggcacaatgtccttctcctttctagaccaccacagctgacattctgtatttgattttgtgctcatttgatcaacatctaaccctcccactaggtttcttacctcaccatcctcggtgtgaaatgccatctttgtgtggttttaatatgcattttggtgataactaatgagggcaagcactatttttcat

SEQ ID NO: 847964 - DNA, 550 bp, Homo sapiens
acaatggattcattcttttctttttaaatcagttatattaggcagcaagcattctttttttttttttttttgaaagagtatttggccactgcggacactaaaaatctttctattaagtaccgaatttaatatattacaataaaataatttgaaatcaaagagaagacttcctatatggcttagttgcaatctatcaacgatcatgtgcttcacagctgatgtacatttaatattctactatcctgtttagagactaaaaaaaaaattaacccctttagcaaccatagctgcaacataattgcagtcacaccttcaaaagtcattgaaaacttgagatttgaaggtgactttttagatcaaaaggtaaggtgaaagtcttgaagcagtcaatttggaaacccccaggagcagaatttggcatatcaggacaggttttttcttcttcagcaaacattatcttgggacattttggaataattttctcttttcatcttttgccatttgaaggaaactgaaaggaraaaatattctcagaactcagaaatttcaa

SEQ ID NO: 847965 - DNA, 505 bp, Homo sapiens
tatatatatatattcacttaatcttaggacaactttatatggatttggcatgattacacccattttgcagacaaggaaagcaaggactagtgcatttaaatgatgtgcccagtatcacagtctttatgtagtagttcatcaagtcagtttttgttactccaaatatcaaattagttctctagtctccatttcttcagtcagaaaaagaattaaataggccaaataatcccaaaggtgcattggaaacttgagaatgtgtaactattctataagttctattagacaccaagtttatctttctaaaattaatatagttgctagacactgcattaatcactattcagttattattttgcttctttttatagaatttatacttgattctggcatactgtctggatggctcaaaagtctattamgaaaactctaatgtgatacggtatttttcttacaaacacgtatctctatcaagcacctatgaaagtacatatattgatcattatgt

SEQ ID NO: 847966 - DNA, 734 bp, Homo sapiens
atggaggatccaacactgtgaatcaagcaggggacacatgccctggttagagcccacggggcagaccctgccaggctggagcagaggagagccctagccaaggcactccacatagagggytgtgaccccacaggcaagcctgctacccgggcacatttgtcccctgaagggtcctctcagttggtcttgctaatgctgtcaacaccctgagcccagggaaatccattaaagtaaagctctggccccagtgtccttgcagatctttcttggctatcttcacaaaaaagagtaaagtaagcaaattacaaatcaaagaaactctgaacccgtggtctttatctgagtgagactctggcggtcagaaggaaagtctcaagcattcagactgtggcaggaacccagctgtggaatcaacagctaaacccaagagcgagaggcttgaccagtgtttgcagaacacttgggtaggtaggaaacaacgtaagagcttccaaaatcaaaatcagaaacccgattccaggacttgatgactgcagtacttcctgcctatcactgtctggggcagctcagatgtacggtccagcgtgaacacacctggaggatgaggtggcgagcccctgctgctgctgccactgctggcaccatcagggcagaccaggtttgctgtccaggccaggtgtgaactggccgtggctacctttccctaaatggacctgtggtgtgtgtcctttcaa

SEQ ID NO: 847967 - DNA, 611 bp, Homo sapiens
tgctggataactccacttggatgccactggctcttcaaaattcaataagccccaaactaatatgtctgtctccctgagtagcctgcatgctcagygagagcagaggccatgtccacctcagtcatcactggagccctggcgcttaccagagttcctggcacagataatagctcttagtaatgatatactgaacaaatgaatgaatgaacactgacattccgataaagtagctgagatggcttttgggggaaacttgcacagaagcctatctttaggagctcttcaggcagacccttggcaggaacccagcagcactgtaagaactctagccagaggtgcctattttgtggcgggtcatctcctcacttgcaaattgtccctgtggcaaatataagcaattagctgttgtctattctggacttttttcccccaaattaaaagccattctgcttttatccactaccatttcattgttattaggggaagctatctatcttgtccacattaatattatctttgtggagaggatgggtatacagaagagatatacctacaaaatgtgtaaatgaactactatttgtagagagtgaaattaaaagacagtagatttt

SEQ ID NO: 847968 - DNA, 611 bp, Homo sapiens
tgctggataactccacttggatgccactggctcttcaaaattcaataagccccaaactaatatgtctgtctccctgagtagcctgcatgctcagcgagagcagaggccatgtccacctcagtcaycactggagccctggcgcttaccagagttcctggcacagataatagctcttagtaatgatatactgaacaaatgaatgaatgaacactgacattccgataaagtagctgagatggcttttgggggaaacttgcacagaagcctatctttaggagctcttcaggcagacccttggcaggaacccagcagcactgtaagaactctagccagaggtgcctattttgtggcgggtcatctcctcacttgcaaattgtccctgtggcaaatataagcaattagctgttgtctattctggacttttttcccccaaattaaaagccattctgcttttatccactaccatttcattgttattaggggaagctatctatcttgtccacattaatattatctttgtggagaggatgggtatacagaagagatatacctacaaaatgtgtaaatgaactactatttgtagagagtgaaattaaaagacagtagatttt

SEQ ID NO: 847969 - DNA, 611 bp, Homo sapiens
tgctggataactccacttggatgccactggctcttcaaaattcaataagccccaaactaatatgtctgtctccctgagtagcctgcatgctcagcgagagcagaggccatgtccacctcagtcatcactggagccctggcgcttaccagagttcctggcacagataatagctcttagtaatgatatactgaacaaatgaatgaatgaacactgacattccgataaagtagctgagatggcttttgggggaaacttgcacagaagcctatctttaggagctcttcaggcagacccttggcaggaacccagcagcactgtaagaactctagccagaggtgcctattttgtggcgggtcatctcctcacttgcaaattgtccctgtggcaaatataagcaattagctgttgtctattctggacttttttcccccaaattaaaagccattctgcttttatccactaccatttcattgttattaggggaagctatctatcttgtccacattaatattatctttgtggagaggaygggtatacagaagagatatacctacaaaatgtgtaaatgaactactatttgtagagagtgaaattaaaagacagtagatttt

SEQ ID NO: 847970 - DNA, 596 bp, Homo sapiens
actatggaaactccgttatgcttgcagtagaaatgctgccaacttcttccaaagctaaatttgttaatgtgtaccttttccggcttcctcaatgacttgcctcactgctttctttaaactatttgcccgcaacatgatttcccttggtttgacggctttctgggaggaaggttttgtaacgtcatccccaagctgctctttgctttcacccagggactcttcactggacgattccacagcatcttcttccacaatgagagggctgaggccagggagaacaggcgcagcctgggaatctgtgtgcaaagcctgcagcagttgttcgagcttctcgtttaggactgaacactgagaggaaaatatggcaatgagaaaaatactcaaaaagaatcaagatcagcagacaaagtacaagaaatttttatagagatgttttgaaagtttaatcactagagagaaaaacacyaaaattctcacctttaattttgtagatgttttggttctggaagcagctaattttaaaatctccatttagtagagatagacaactataatttaaattatggcttttgatttagagggacaatggctttatt

SEQ ID NO: 847971 - DNA, 596 bp, Homo sapiens
actatggaaactccgttatgcttgcagtagaaatgctgccaacttcttccaaagctaaatttgttaatgtgtaccttttccggcttcctcaatgacttgcctcactgctttctttaaactatttgcccgcaacatgatttcccttggtttgacggctttctgggaggaaggttttgtaacgtcatccccaagctgctctttgctttcacccagggactcttcactggacgattccacagcatcttcttccacaatgagagggctgaggccagggagaacaggcgcagcctgggaatctgtgtgcaaagcctgcagcagttgttcgagcttctcgtttaggactgaacactgagaggaaaatatggcaatgagaaaaatactcaaaaagaatcaagatcagcagacaaagtacaagaaatttttatagagatgttttgaaagtttaatcactagagagaaaaacaccaaaattctcacctttaattttgtagatgttttggttctggaagcagctaattttaaaatctccatttagtagagatagacaaytataatttaaattatggcttttgatttagagggacaatggctttatt

SEQ ID NO: 847972 - DNA, 585 bp, Homo sapiens
cccagcttacatatcttggtgatccaatgtcatgtgcatatgagaggtctctaagatagtgactatcttggagacagctaccatctcggcctccatccagcccccagtggcctgtcagctccataagggcaggaatcttgtctagtgtgtttaccaggcatggtctgctcatattcaaaatgcctgtgttaaaatcaaggaaatcctcaaccccttgctgtttgaaagaaggggtcagattagcttttcctcccactgtcttcaaagattttatccccaggaaatagaatatagctaaatgttgggaagcacataaccaattcaaaaataaattatatttagatgactaatgacaattacatttttcagtgggtcttgatgcatagaccagtgagcattatctcagtccccttgccatagtaattggttcaggaataggtagtaaaaccaaacctaagccaactggcacatgaatttctctgtccacagggattagtccartcaataagagcaaaacacagggctttgctggctgggaaagacaagtcattgatgctgtgactgcagaaattttttaaaatttat

SEQ ID NO: 847973 - DNA, 296 bp, Homo sapiens
aagattttcaattcactttgcccagctccatcagagcaatggcagctctagcattacaaaacatatttcttaaataagacttcaaggttgaaatgaccccttgatccatgggctacagaatggatgttgctagcaggcaagaaaaaaaagcatttctcttcttatacatcatcagagatcttgggtatccaggtacattgtcaaygaaaagtattattttgaaaggaatttttttttctgagcagtaggtctcaacagcgggattaaaatattcagtaatccacgctgtgaagaca

SEQ ID NO: 847974 - DNA, 555 bp, Homo sapiens
aatcatatgcagaaaaagtaaagtatgatcaatcaaattgtttaatttttcaaaatgatccttgagggttttttattccttgctcatattaagagtatagcacyctagagatataaagcttgccctctgttgttaatcttgaaattaaaaagaaaaatattgtataagtaagcaataaatgtgatttttcttcctattatctttcactatctgttttagtacatcttctcacataaattccatacggaatctggctatattactttatctaaaattcacttcttataaagaaggctatgaggccaaggtgagaggatcacttgagtccaggagttaagcttttaaaaataataattattattttggcctttaattttccttgataaatgtaagctcgatgaaaataggaactttgttcattatacaatcctcaatatatgtctggaatagtgcctgactctaaagaaatatttgtgaaatgagcaaccatatttttagacctaccattagctcaatatcactgccaattatataaagttgatcttccatagaaag

SEQ ID NO: 847975 - DNA, 649 bp, Homo sapiens
ctctttgtatttttcaagaacatatcatcattaaccatagccactatgctgtacaacagattycttgaacttactcctcctaactatatatcctttgactaacattcttccatcctgtcatttcctcaaaccaccccagccgctggtaagcaccattctattctctacttctatgggatatactttttaggttttacatattgggtgagatcatgcagcatttatctttctgtgctttgcttatttcacttaacacagtgtcctctaggttcatccatgttattgcaaagaacagaattttgctttttgataggtgaatagcattccatcatgtatataaaccatattttctttgccccttcatctgctgatagacccctaggctgattccatatcttggctatgtgaatactgctgtttatgtgcacttctctctttgacatactgatttcattttctttggatatatactcagtagtgggattacagaatcatatggtagttctatttttttcattttttgaggcccctccttactgttttccataatggctatactaatttacattcccaccaacagtgtgttcccttttctccacatcctctctaacacttaccttttgtctttttgataacagcaattctaaca

SEQ ID NO: 847976 - DNA, 649 bp, Homo sapiens
ctctttgtatttttcaagaacatatcatcattaaccatagccactatgctgtacaacagattccttgaacttactcctcctaactatatatcctttgacyaacattcttccatcctgtcatttcctcaaaccaccccagccgctggtaagcaccattctattctctacttctatgggatatactttttaggttttacatattgggtgagatcatgcagcatttatctttctgtgctttgcttatttcacttaacacagtgtcctctaggttcatccatgttattgcaaagaacagaattttgctttttgataggtgaatagcattccatcatgtatataaaccatattttctttgccccttcatctgctgatagacccctaggctgattccatatcttggctatgtgaatactgctgtttatgtgcacttctctctttgacatactgatttcattttctttggatatatactcagtagtgggattacagaatcatatggtagttctatttttttcattttttgaggcccctccttactgttttccataatggctatactaatttacattcccaccaacagtgtgttcccttttctccacatcctctctaacacttaccttttgtctttttgataacagcaattctaaca

SEQ ID NO: 847977 - DNA, 547 bp, Homo sapiens
aatggagaaaaataattcacttaactgagaagaaaaaaaaatccaagaagagaaaaaaaaaggccttttaaatatacctaaaacttgagtatccacttttaattaagctgcrcactctttaagaatatccttttaaatcccatgttactagactttagccatgccagcaggtaagatttttagctttagaactttacaaaaactaacctcacaagagaaaccaataagccttaattaggttatgagttaaccaccagtgtatgaggtattttcaaaggggtgataggcagcttttgaaagcatcattgcaatattgtgactgagatagtgaaagagatccaacccaaccaacttcattttatttccagcccccaagctgtccttgcttatcccttttgccagtttgcataggaagacagaagtcaaaagactgactggtaagcaaacaaacaacaacaacaaaaaacttttattcttttgccagcatgtcaggctttggggtttccttccccttagctcaactctaagccaagaattttaagttttg

SEQ ID NO: 847978 - DNA, 547 bp, Homo sapiens
aatggagaaaaataattcacttaactgagaagaaaaaaaaatccaagaagagaaaaaaaaaggccttttaaatatacctaaaacttgagtatccacttttaattaagctgcgcactctttaagaatatycttttaaatcccatgttactagactttagccatgccagcaggtaagatttttagctttagaactttacaaaaactaacctcacaagagaaaccaataagccttaattaggttatgagttaaccaccagtgtatgaggtattttcaaaggggtgataggcagcttttgaaagcatcattgcaatattgtgactgagatagtgaaagagatccaacccaaccaacttcattttatttccagcccccaagctgtccttgcttatcccttttgccagtttgcataggaagacagaagtcaaaagactgactggtaagcaaacaaacaacaacaacaaaaaacttttattcttttgccagcatgtcaggctttggggtttccttccccttagctcaactctaagccaagaattttaagttttg

SEQ ID NO: 847979 - DNA, 456 bp, Homo sapiens
catcttaggcagcagcgagagagagagtgcaagggaaactgtcacttttaaacatcagatttcgtgagaacttcctcactatcccaagaacagcatgggagaagcctyccccatgatccaatcatctcccaccaggaccctttctgtacacatggggattacagtttgagatgagatttggatgggggcacagagccaaatcatatcattaaatcaatcaatcagtgaatccatagatgcttaatgcaaattgttttttaccactgaggaaagaggtgaatggggagaaactaataggaaagagatttttctttgtttttttttaatcttttatttatttttatttaattattttcaataattgtaaataataattattattttttgtgcccattaacattcactgtttatctccctctcaccagtagccttcccagcctctgataaccattactc

SEQ ID NO: 847980 - DNA, 609 bp, Homo sapiens
ccagtgtgtgtttttaagccttcaccatttgagtctttttcaaatatgcatgtgtatgttcttaatgttaatatttactgcctctaacccaatttttctcttcatgtaatttcctaggtgacaatttgttcattatcttccattttaatccaatagataatattcaaatgcaaactttttcaaacttgcttttactgtagatcaattattacattttttaataccctggtatctccttctcaaaaaaaaggttttgccaccatgagaagtttcaaaatacaagatgcagcaaattgactttatccagagtatgacgctgcaacacaccactgttgcgtgtgatatcaagcaggtatttcccctggcagtggcatacccatgattggaatgttgagtggatacaaagcagactatatcactggtaaccttattctacaacttgatgtatgcacattatgggagaagaaagaaatgatattcatggtgattcttacartttactgttcaaaaatattatttgaagtactctggggaggagcttgattagaccaaatagatagaaaatgtaatacagctccactaggcagaatagattcaatgacttgatga

SEQ ID NO: 847981 - DNA, 518 bp, Homo sapiens
ttttctttgtgacataacatatggtctatccttgagaatgattcatgtgctgcagaaaagaatatgtattctgcagctcttggatgaaatgttctgagaatatctattagattcattyggtctatagtgcagattaagtctgatgagtctttgttgaatttctgtgtgaaagatttgtccatttctgaaactggaatgttgaaatctccagctattattttattagagttaatctctctcttcaactcaataatatttgctttattgatctagatggtctagtgttgggttcatacatatttctaaatgttatattcttttactgaattgactatcattatatagtgatcttttttgtttcttcttatagttttttctttaaatctattttgtttgctataagtacagtgactcctgcttttttagtttgcattggcatagaatatctttttctatgcctttatttttagtgtatgtgcgtctttataggagaagggagtttcttgtaggtaacagat

SEQ ID NO: 847982 - DNA, 650 bp, Homo sapiens
agcactactgtagttttcataccactgttgagaaatattattcttgcctgggtgcttaaagaattgttaaaaagtcctatgagctagagattttaataatttcttcctattgcctaacccttcatggagaacttgctttatcctcagccctatgggacagctctaatcactgtatgaccctcctcttttgggcacagataatgggccatagatggataactgtccagagctggactattaatcatcttatccaggaatctgtaactggggaattagactgagcgtgctacctgcaggaagttgaattcagatagtgtaggctcaagtggtgacgtttcctttgggtgcagccattgtcaaccatgtataaacaagtaaataagcagagaagccagtttgcagagaaatttgaatgaagtagtcatagagtgaaaatgagaggtagctgtgtgtgtgtgtgtgtgtgtgtgtgtgcgtgtgcgtgtgtgtgagagagagaggaacgcccactggaggcattgctatagagcacatggcaaggtgcactatcttgagagtagagaattttcttctctgtaactcccctctttactggctcyagcaactctagccagcccagtgcctggtcccgtctgtgcatgtctagggga

SEQ ID NO: 847983 - DNA, 634 bp, Homo sapiens
aactgagaatggctatgatgagaatatatacagtgtattatatacatatatatctacaaacacacattgtattagtccattatcacattgctttaaggaaatacctgagactgggtaatttataaagaagagaggtttcatcgcctcaacggttctgcaggctgtgcaggaagcatagtggcatctgcttctgggagacctcaagaagcttccaatcatggtggaaggtgaaggaggagcaggcgcatcacatggtgaaaggaggagcaagagagaaagagggctaggggccacagttttaaacagccagatcttgtgagaagtcactcacctattgtgaggacagtaccaagaagataatgctcaatcattcatgagaaatccaccccgtgatccaatcacctcccatcaggccccacctccaacatgggggattacaatttcacacgagatttgggtggggtaaatatccaaagtatatcacacgtacacgtaaacatgactataaaagacatagagttatttctrtcactttcctatgcctcctcactaaaacttgatgatataattggaaaagcaaaagtaactggctcatgcagaaaaaggaatttattgactcatgtaatagtaaaat

SEQ ID NO: 847984 - DNA, 607 bp, Homo sapiens
tctcactgttgcccaagctggaatgcagtgccrctatctcaggtcactgcagcctctgcctcccaggttcaagtgattctcctgcctcaacctcccgagtagctgggcttacaggcgtgcaccaccacacccagctaaatttttttgtattttagtagaaatggggatttgccacattggccaggctggtcttgaactgctggcctcaagcaatacatctgcctcggcctctctaagtgctgggattacagatgtgagccaccgcacccaggcttttcatttcctttttatttatgtttcactccatcttcatttggtctctttgcagaggtggaagtccccaatgttttttatatgatttctcatgctctcacaagccaacagcattacatgcattaacatatgtgtattcagttactcacatgtgcctatacacagtacgccaatctcatagagtaactacctcatgctcactcatctacacacattatcttatctatcaagcctcctgggctgaggtcctaggctaggggctgtgaggcccaggggtctccaaacttgggtaagcatacttactaaagaaaaacaattcagatgtccagaacct

SEQ ID NO: 847985 - DNA, 624 bp, Homo sapiens
aatgtacagcaacatctagtggaggaaaaccagtattgcggtccattggtgtaactaacaggtgtctacctctctggcctacmtccataggacccccactaaacaatggtcatcttaatgctcgcattctaaccttataatttaaactttcttgtaaaatgtatctctttttgcctagaaacaatcaaactccaaacagtgctgcgagcagagccacatgtgggccattctttcaagaacccttagatcaacctcaggagaaggcctaactgctgtccccccacacaatgccccttttcagcaggaagtatccagaaaaaagtcatcgttcaacacctcctaacagcagttagatttacttctctttaaaagggaaataatacaggagttattaagaaataattttaggcagctggatagggtaatagttctcagtggaaatttttcttttaatggaaacaaccctcgaaacattttgcttctaacagaaaggtggcttgaagagccaggccagcaagctttgataggcaaatgctggcgattaaaaactaggttcatctgacatggccaatatggcaattcccgccttcttctccttgtcaccaggtgtggcaagtgttatgg

SEQ ID NO: 847986 - DNA, 640 bp, Homo sapiens
ttggcagttacccaagagacttcccccctgctccctctgtgcctgagttgtcttatctgtgttttactgtctgccctttctggctgcttgttgttaaaagagaaatgayagggtagtgaaagtctctcttcactatgcactttctagactcctgactacaggtatgtgtaactataacaaaacggttgttgttttatgcctctaatcttggagtgttttgctatgtggcaatagggccaggacaggggaataaagacaagctcttcttcagagtagaatgccaactaagaaatatagacagaaaggtagagttagaaaatcagcatttggcagtctatagaccctacaaagcaaccacacaatagaaactacagagcaattagctagtaacttcatgatagaaccaaagctcacatattaatattaaccctaaatgcaaatggtctaaacatccccacttaaaaggcacagaccatatagttggattaaaaaaaaaaagacctatctgtttgctttgttcaagagagccatctcacatgtaatgagaccaataggcttaaagtaaagagctggagagagatctactaagctaatggaaaacaaaaaagagcagggattgctattcttatatcaaaaaaac

SEQ ID NO: 847987 - DNA, 576 bp, Homo sapiens
ctccactgggaccatgctgggtcagacctgcagccagaatttggtcttgcccaaggctcacagtgaccactgatgactactacctatattcattgaaggccyatgttctctataattagcaggtggcaaatccagccaggcttatgtccttcccttcagggtggtgagttcagccacaggttggtccagagatgccttttgggaggctgggcctagagtcgagaaccttaggaagtctaccttgtgctctattttactgtggctgagctggcatcctagccaagagagaaagtccttctcactcttccccctcctttcctcaagcagaggattttctctccatggcaaccatcaccccaggcccgcagcaagtgctgcctggctactgctgatgttcactcatggcccaagagctcttccgtcaggttgtggtaaatgcttcaggcctgggactactccttcagggcagtgggcttccttctggtccagggcagatccagaaatgccattcaggaaccaaggcctgggattaggggcttcaggagcctgcttggtgctttactctgctgaggccaa

SEQ ID NO: 847988 - DNA, 507 bp, Homo sapiens
cagtagcttgagtccaaaccactctgaaaattatggaaattgggtttctgagcgrgcacagctaagagccatgccctgggacaggtgacgtgatccaggtaaacaccaccctctgagcaatctgctgggcaccagctggcccctcccaggaggcatcttgacttcctcactgatgagaagcctattttgtttaaagtgcctatcgacagtacatagtgaaatgctcggttccagctaattaagcgctcagctgtacggtgtggaaactaagagatcatgtatatggaactgtgaaatggagtttcaggaagggttcttggacgaacttgagaagggcatttgtgggtgaatgggacttcaacaaggaagcaagagaccacagatggggattaggggtttggaaggtcaggacagttgtctcacctccttccactcgctctctgcctaggtcaggaccctgcgtgcagccaccgccgtttccctctgagccacacctgggggcactta

SEQ ID NO: 847989 - DNA, 463 bp, Homo sapiens
ttcgagatatctgtggagtatagctttatgactaaattttgtgtcccaagatgcttcctttactcttgatgctgaaataactacactaggttaaatacagaaagggtttgtaggtcaacattcaggaaaatagcacactgaacatgtggttttaaataatgttttaatgaagaagaatgagaaggttattttgcaagacagaggggattgtcacattacgcttacctagaattctaaggcaagaatattaatggagactcataaatcatttgttcaattattttcaaattagttcttaaaatttaaaagtcaaatacaaattataagattgaaaattaaaaattcaaatcaaaaatttttaaagcaaatatttttaatttaaatgaaatttattacayatttttatataaatttgcaattctaatatttattatttatctagttgtcaaataattggtatcaa

SEQ ID NO: 847990 - DNA, 463 bp, Homo sapiens
ttcgagatatctgtggagtatagctttatgactaaattttgtgtcccaagatgcttcctttactcttgatgctgaaataactacactaggttaaatacagaaagggtttgtaggtcaacattcaggaaaatagcacactgaacatgtggttttaaataatgttttaatgaagaagaatgagaaggttattttgcaagacagaggggattgtcacattacgcttacctagaattctaaggcaagaatattaatggagactcataaatcatttgttcaattattttcaaattagttcttaaaatttaaaagtcaaatacaaattataagattgaaaattaaaaattcaaatcaaaaatttttaaagcaaatatttttaatttaaatgaaatttattacatatttttatataaatttgcaattctaatrtttattatttatctagttgtcaaataattggtatcaa

SEQ ID NO: 847991 - DNA, 646 bp, Homo sapiens; identical to SEQ ID NO: 819102

SEQ ID NO: 847992 - DNA, 626 bp, Homo sapiens
tccttgtgttgaagaacatgacgaggcttccagatcctgactcacatgcttttagataccaaaagaaacaacagaaaaaagggctttatgttgtcatggcatggccacaaatatatatatatatgtatacacacacacacatatatatgtacaccataatttaaaaatacaaaaagcaaatgttcaaattctgatatgtaaaccaacatatttcattcaaactaaatactctaagaaaaggataatgatcaacaaaaagcgcttttcttaccaacatacttcaatttctttacaacgtaccattaaaattctgctactcatcacgtcaaaatgctactgctcattaaggccaagaaactgctataaaaatagttcttatgaaaagtaggaattcaataaaagatcttaaatgacttcatttctgaaaagtgtgttaatgttgagatacatattcaaattttactaagagtaaaaagattttcattggcaatatctargttattggtgaagcctgctataagaaaaactgaaatatttattgaaaaaatctaaatcattaaaactaaaatgtggagaaatttagacccagatagtaaaagttttaacccctaattcatctcttatta

SEQ ID NO: 847993 - DNA, 585 bp, Homo sapiens
agatgatacaagctagataataaagccaggtccactacctggcagcagataaggtttatatttacaaaaggtgcatttgtaaatataaaccttatatttacatcctaaatactactaatacgttaaaatactactaatttaaataccactaaattaaatactactaatagttttgggtttcaaaaatttaagctaaatctagagagttaatttgaagagggtaagaaggaaaagaaaacctgcagatgtccgtgaaaacagattattgttatataaaaatgatattccgccaggcatagtggctcatgcctgtaatctcagcactttgggaggccaaggcagaaggattgcttgagcccaagagttcaagagcagcctgggcaacatagtgagaccccccctccgatctctacaaaatttaaaaattagccaggtgtggtggcatgcacctatagtccttgctactggggaggctgaggtgggaggayctcttgagcctaggagttcaagtttacagtgagctataatcatgccactgtactcctcctgcctgtgctaccaagtgagaccctctctaaaaaaaaa

SEQ ID NO: 847994 - DNA, 616 bp, Homo sapiens
aagtcgcctattcttaaaagaarttgaccgcttattgttttgtggcctgtggacactagcaaagtagtttgtcctgaacacttaggatcagttggactcatgtcacagcatcttagacctgaccagtgatcccagagtggggtaggcctttcttggtgctctttgatggatattgatgttggcaagtgcttcactcaccagctcatgcatgtggatcccaagattctagggatatagcaatccctttatggatgcaagttcatccttaagagaaactctaggcctcacacatatgtttacaaattattcgacattgccagaagtttcacattgagtgaacttgaagtgcaaatcattccaatcttgttgcagctgtcatgttttccctgtaactgggattgtgagacacaatgagtatctgggttgtcagcaatcagggagaggaaatgccatggctggtttatttagtgtagtgtatttgctggtttaattttagttgagatgaatatgcataagggctttcgtagcttcattcattattttggtcccttttcacacaagatcttctgttcttcaaccgtgaattctattaataaagagtttctaagagatgtaa

SEQ ID NO: 847995 - DNA, 529 bp, Homo sapiens
tctacatacaacctagtgtgagagggagagaccaaacaacatggcagtacggccagtggcccgggggcagacaagcctgtcctctcatgccagggacccctctccaactgggctgtttggcttctctgagccttggttttcttatctgtaaatgggggatcatctttccgcatggggtcattgtgggaattaaactgaatgaggtaatgcacctaaagcaccagagcctattctggtccctgatgagaggtgtatggatggagatgctattaatattacgaccctgagaactgaagtcagatttggctgcgtgtgtgaggcccagccatctcactgcagcagctgtcatgatcattgcctcccaggaggagccggagggagaccctcggggtgaagaatascatgcgaccagtgccccagccccagggctgctgggaaggtgatgagtggggagggagagtggcctttaagtttacacatgtctccttcctgtaccccatctctgcctggtcttgggggtcacatgaga

SEQ ID NO: 847996 - DNA, 436 bp, Homo sapiens
ggtctcaaactcctgacctcaggtgatccacctgcctcggcctcccaaagtgctggaattacagccaccatgcccggcctggtgtatgaattttaatcctagaatctcagaattgaaagtcatcctaggtcagtcaccctaaacttattttgggttattctcctctttgatactctggttaaaacaaaacagccacaaatattctctcttgaaaatatgctttaaatataatttcagtgtgtttaaagtctccctgaagctcaaccagggattggggttaagaatctcttgtctccaggtcactctgtttgtttaggaatcttttgtaaagaatcttttgctgtatagtgctgcactattagrtggtcatccaatatatgctcaaaccctctaaggcagggaggtcaatatataataaggaagccctttccattta

SEQ ID NO: 847997 - DNA, 561 bp, Homo sapiens
tgatgatggaaggcaggtaactcctttatggagtttgagctggcttccaacaaggaagatgagtgtttttgttttgtttttttcccttcttctaggatgctagagagcagtcttcagcctgagacccatctctaggtaagtaactgaattggagcttgtcttggttaaaattaaggttaacaacaagctggtcttaatttctccttaccattagagggctcagtgatcatattgttggggtttttgttgttgtttgttcctgtctaaagttgttgtttaaggatcctaattgtagtgtggagaggcattctaaagggtcttcactattgctttttctccctaatttaatcttaatttggtttgtctgtgtgcatttgcatgaggaactgaactgttgttttcatatgttaatgagagactgagctttctcagctctgaaggaaagggcattttgctcctcccagtcaaagggtgtccctgggtgaccaaggcctcatgggagttgacycctccatgatgtgaagtagccctgcagggaaatccccacaaaaattaatttta

SEQ ID NO: 847998 - DNA, 646 bp, Homo sapiens
tatatttaacaatgctgctgggataattggctagccacatgtaggacaatgaaactggatcatcatctctcactttatataaaaatcaactcaagatggatcaaggacttaattctaagacctgaaactataaaaattctagaatataacataggaaaaacccttccagatattggcttaggcaaggattttatgaccacgaacccaaaagcaaatacagtaaaaacaaagataaatagctggcacttaattaaactaaggagcttttgtatggcagaggaacagtctgcagagtaaacagacaacccacagagtagaagaaaaccttcaaaatctatacatctgacaaaagactaacaaccagaatctacgaggaactcaaacaaattaacaagaaaaaaaaaaaaaaatctcatcaaaaagtgagctaaggacacgaatagataattctcaaaataaaatatacaaatagccaacaaacatatgaaaaagtgctcaacatcactaatgattagggaaatgcaaatcaaaattasaatgcaatacttccttactgctacaagaatggccataatcaaaaaataatagatgttcatgtggatgcagtgaacagggaacacttctacactgctggtgggaatgtgag

SEQ ID NO: 847999 - DNA, 609 bp, Homo sapiens
atctcccaaaatactgaatctttctcatcttaatatccctagggcctagcacaggtgtccaatgaatatttattaaattgcattgaatattcattgtattgaatgaatatatcatttcagcataagtcagtcatctgaaagaacaagtattttatcattatgtctatcaccactattatcatcaaatggcattttttaattagccatgtatacctagtacttatctgagcattctacaggtaacaatagattttattgattacttttagtagtataacaatctaaagagaaaaataatggcaaataattcttaaaaagacattagcatacattttcattaacacaaactcacaattttctttttgaaaatactgttgataatgccaatcaaatcctgataaaagtagaattcatttttctaaaacttgactttggtatttaaaattgtatttcttctgctagaaatattctgaaggaaygccagaaataatgggtgaagatatgaatgattcttctccacaatggatgcagaaattaaaagttatctcaaatttgttgattctgaaggcagccactgaaatagttacaggttgaagtacaaaatgaaga

SEQ ID NO: 848000 - DNA, 504 bp, Homo sapiens
gttgttttttccatgaacatgtccaggagattaacaaagttggaaaggagctggggatcatcccaaccatcatccgggatgaggaactgaagacgagaggatttggaggtgggtgggggctgcatccctgcasctcttggcctcgggcagtggccaggggcacttgggtggcagggggtcggcgggccacatggcacattgtcccaaacttcatcctgcttgtgacctgaaaggaatcagcctgtgtccaagcccagtgccggaccctgggaagcagccgtccctgggggagaaggggaggcaatccagattctgatttggattctggaagctgctagatccaagtccttccctgcctgcagcctctccagcgtcctcgcgtgctgcacacccttactcctgggactggctcagcagggcctttctgttccttgaatacacaagttcccatcacggcaggcagggcctgtgtgcggatggctctccctatctggaatactttcc

SEQ ID NO: 848001 - DNA, 612 bp, Homo sapiens
aatagatcatattctgggccattaaaagcttaacaaccttaaaagaattaaaaattatatgatgtatagtctctgaccatcaaggacttaaactagaaatcgacaacagaaggatatctggaaaattcacaaacatttggaaattacacaacatacctctaaataatttgtgtgtcaaacagaaagtgccaaacaaatgatctaagattatactttaagaaaccagaaaaagaacaaattaaacccaaagaaaatagaataaaagaaatgataacgataagggcagaaattcgtatactgaaaacagaaaaatagaaaaataaattaaaccaaatgttaggtttttgaaaatatttaatacacttgataactctctagggagactgactgcaataaatagagaaaagacacaaattataaatatcagaaataaaaaaggagataccactacagacactacagatattaaaagaataacaaggtgatastatgaagaatgctacccataaattaacaatctatataaaatgatggattcattgaaagacacaaaacaccaaaattcacccaagaagaaagtgttaacctgatatgcctttgtactaaagaaat

SEQ ID NO: 848002 - DNA, 618 bp, Homo sapiens
taacacttatcaaaagaaatctggagttgctgtgttagtataaagataatggggatttaagggcaggaaatattacaaggaaaaggaggataattttagagtcataaaaaggaccattcctgaagaagaccaaatcatcctaaatttatacaccaaataatagagcttcaaaatacatgaagcagaaactggcagatttcaaaagagaaatagacaaattcacagttagttggagttcttgaaacctttcgataaaacaggtagacagtaaatatacggaagacttgaacaacgacagcagaatacacattattttcaagggcacataaaacattcactaagatcatgttcagcatcataaaacaactctcaataaatttattaatttgtttgtttgcttttatttgtagagatgtgttgctatgttgcccaggcttgtctgaaactcctggcctcaattgatcctcccacctcagcctcccaaagtgctgggattacaggtgtgagccaccatgtccagcctctcaataaatytaaaagaactgaaattgtacaaataatattctttgaccataatgaaatgaaattaaaaattagtagcaaaaatctctggaaact

SEQ ID NO: 848003 - DNA, 618 bp, Homo sapiens
taacacttatcaaaagaaatctggagttgctgtgttagtataaagataatggggatttaagggcaggaaatattacaaggaaaaggaggataattttagagtcataaaaaggaccattcctgaagaagaccaaatcatcctaaatttatacaccaaataatagagcttcaaaatacatgaagcagaaactggcagatttcaaaagagaaatagacaaattcacagttagttggagttcttgaaacctttcgataaaacaggtagacagtaaatatacggaagacttgaacaacgacagcagaatacacattattttcaagggcacataaaacattcactaagatcatgttcagcatcataaaacaactctcaataaatttattaatttgtttgtttgcttttatttgtagagatgtgttgctatgttgcccaggcttgtctgaaactcctggcctcaattgatcctcccacctcagcctcccaaagtgctgggattacaggtgtgagccaccatgtccagcctctcaataaatctaaaagaactgaaattgtacaaataatattctttgaccataatgaaatgaaattaaaaattagyagcaaaaatctctggaaact

SEQ ID NO: 848004 - DNA, 467 bp, Homo sapiens
ctggcccacctgccgggcaccctgacccctggaggttacatcctaatgggggaagataggcagtaagcgccaaagaagtaaataagataaygacacactgtgctaagtacttgggggcgataggctgatgtgctggaagacagttttagacagggtggtcaggacaggcttcctaaggatgtgacatttgaactcagatgaatgacaagaaggagccaggcgaagtaagagctagggagggaaagctggtgccaagaccccgaggttaacaggaggcgacagattttgagagacagaaaggccagtgcagatagaggctgttgagcaagatggggagtggtaaggaaagtcactggtaaggtgggcaggggtccaaccactggggcctgtggccacaggaaggagtttcagttttattttaagtgcagtgaaaagcaaggggaaggtctagaccttccccttgagag

SEQ ID NO: 848005 - DNA, 467 bp, Homo sapiens
ctggcccacctgccgggcaccctgacccctggaggttacatcctaatgggggaagataggcagtaagcgccaaagaagtaaataagataacgacacactgtgctaartacttgggggcgataggctgatgtgctggaagacagttttagacagggtggtcaggacaggcttcctaaggatgtgacatttgaactcagatgaatgacaagaaggagccaggcgaagtaagagctagggagggaaagctggtgccaagaccccgaggttaacaggaggcgacagattttgagagacagaaaggccagtgcagatagaggctgttgagcaagatggggagtggtaaggaaagtcactggtaaggtgggcaggggtccaaccactggggcctgtggccacaggaaggagtttcagttttattttaagtgcagtgaaaagcaaggggaaggtctagaccttccccttgagag

SEQ ID NO: 848006 - DNA, 503 bp, Homo sapiens
ccctcaccacatggtcatggtccacatctcctcctccaggaactcttcactggcctctgtaccaacctcccccctcattggaggaggygccatctgtgcatggcgtccactcagccatgtcattgccggtttctgtgtcattggtgtcttagctggacagtaagcagcgtgagggcaggatgctgtcacatcactgaacatttggcacttgacagatgcttaataaacatttagaatcaatcagtaaataagtgggtgtgttcatttgtcctcaccacagaactctcatctctcgctaacatagcattttgtagatgcccctcaaaaatcaagcccccctgaagtgcactgaattgtttctccccaaaagataggtccacctggattgtgacctaatttggaataagggtcgttgcagatgtcactaaggtaaggatctggagatgatatcatcctacattggggacggccctaaatccaatggcaggtgtccttttgagaag

SEQ ID NO: 848007 - DNA, 673 bp, Homo sapiens
tggtcaagatgcgatttggtaaaaagcttcctcaaggatttttttcttattacaaagatgagacyggctgaggctgagagatttgcaagcagtggtatgtcattatccccagctcagttttttgtgtaattggtgtgaagagattgctgctgatgaatcagcctgctgctcaacagaaaataatgattcttttgtgacgtgagtcagtgtacgtacgtgtacgtttgtggttgtttatgaaaggtatgtgtgtacataaaatgcttatcaagatggataatgtcattttaaagtggtaaataataaaaaatagtcctgagcaaaactgattttacaattgcctgagaatgcagcacttcattttaacactatgcaatggctagaaattgattttttttttttaaatccaattaagcctcaaggttggttatccatttaaaaggtcggatgagttaaacaatgacagtaccttcagttcgtgctaataaatttgcacagaacttcagcacttacatcgtgtgcctcacagaggcatacattttgtatgtgcacaacactgaactaccaaagtcccagcagtggtacagatacaccagcagaccctggaccccaactgggggagtccctgagctgaccgccggccctatcacctcttccacttagatccccgaag

SEQ ID NO: 848008 - DNA, 608 bp, Homo sapiens
ttttttatgattgagtaatatttcatggtgcattcttaatagcacactctaatctctagaacaggcrtggaaaatgtgctttgtcttagattccagttcctatcaattactgtacaggcgattttgaggccatatctgggcacagtagaaaataacaagtgattgatcactgttatgggcaagactgtggggagtgggggtgataatgccatatatatgtcactcccactctagactgaattgattctcctctcctcctgtccatgctaaggatggggagtttcgataatagggctcaagatacaactggacccagtgcatttttcaggagtattgagaaggcaacattgtgaatctggggtaatcagggagggctcactggatgcagtgacgtgacctcagcaaacggaattctcagcctctgagctggctgctcagaaaaacaaaactgattctcctcagacggagacgggttggctgagggaacttagggtatatggccctaatgcaaagtgaccagtgtctaacacaagtttctttcttgttgcttgaatttcccagggtggagagccccagattgggtattctggccctagggagagttaaca

SEQ ID NO: 848009 - DNA, 513 bp, Homo sapiens
gatgtttttggcctaactagaatcaattctgttgaattcccccaaatcacatcccaattcacttttttcctaagaaatccaatgttaatttaccctcgaagagcacacaactctgggtgagtctctctggcgtctcataccaatttttttccctttggcaattggtctccagatcattaatgtcacatataacttagggcccaaacagcccacacagcgatctccacagtgcctgtcatgatgtggtcgattttgatggcaaaaataactaattgaaaccctacgatttgtttactttgaatacattaaggtggtggttatcaaatggagctgaattatcccttaaattaccatgaaaacaaaatcaatagtttatttaccacacaaaacaaaagaaaaaaraaggaataaaatgctctgaggaatctttattagaagttttccttggaagaatacaatgtagataaactcagagtaaataaggtatatggtaacttggaggaataaactgac

SEQ ID NO: 848010 - DNA, 616 bp, Homo sapiens
tgaacgacctcattaggggccttgtggcaagttggcggcttgacatgggcaaaggccaggcagagataagccaagaggtttcaccccacttagagatataagctccaattaataagaatattatcattaagtgacatttatggagcacattaatgtgtgctaggccctgaactaagcattttacgggcgtcacttaccaaaacctctaactgacagggggtaatggccagggccatggactcgggggcagactatctgggttcaaacctccgccctgtgcttactgggcaccttactccacctaccacggctcagtctcctcatctgtaaatgacggcaatagagttcctatcttacaaattgttgtgaggcttcaataacttaacccgggtaacgcacttaaaggagtgtttggcacacaggaggtgctactgtgcttatgccttgcagttaaataggaattaaatcaatggcagcttcctggggcagaagaaggtccctggaagtgygaaaagatggagaatagtggacttaccagaaatctctcagggagttggtggagatgctcccgagagttgggggcaaccccccgggatccctcattctctccatgagg

SEQ ID NO: 848011 - DNA, 614 bp, Homo sapiens
tttcaaatgaggaaatggaggcacttaaaaattgagtaacttgcccaagkatgcattgttagaaaaggatggagctgagggtagaatcaagatggcttaatccctaaaacccaagggatggaacccagaacactgcctcttccactcttcaccagcttctgccctgcagggtacacgcagatggctccaagcaggggccccattgctcactgggggaaactggcctccctgagctaagtcaggtcctgggcagagggacagatgctctctgtgcatctctaggccacagcagggcgtttccaagtccttcccagaccagacggcggcttctgctgtaggctatagtaataacaacagcgttgagcactcacactgtaccagagcaggggtggcgccgcgctgcacacctgccgcccagggtctccacagtcctcacgctgcccttgcattgattattgtctttatgtgaccagtgtggtagctcaggtgtcaagacctcaaggcacccagccagggtcgcatctcacgtctatggcagatccaagatctgaacttggacttgtctgaatcctggataagctggggggtgaagctggctgctgaggatcctgtgt

SEQ ID NO: 848012 - DNA, 617 bp, Homo sapiens
tgggtatgcaaatatctgctttcaattcttttgtttatatacccagaagtgaaattgctggatcatatagtagttctattagtattttgaggaagcaccatagttaactttggtgactttaactaccatatgtgcagctaacttccaaatctatatcccttgccttaatctgtctcctgaaatatactgatatgaggcccaaaaggagggaaatatgttttatctttgtatctcttgtttttgtatctacttgtatacttggtatacaagtagactctaaataaattcttgttgaagaaactatgcctttttaattctgagtgtgagggagctaaagtccaaatttttttccattgattattgtgtaaatcactgttgtaagcttcttaatgatggtcactgcgcagtatacttacctgtttggttataatgcctaccagtgctttacacatacaaggtagcaagtatctcactcattaaatctagtaataattgmaaatatttatcaaactgagtagcagtggttcagtattgaaatgcttgcaaaatttctctttcctgtttctaaattaaaacataaggggaaaatatgggaattaatatggtatcatgataat

SEQ ID NO: 848013 - DNA, 617 bp, Homo sapiens
tgggtatgcaaatatctgctttcaattcttttgtttatatacccagaagtgaaattgctggatcatatagtagttctattagtattttgaggaagcaccatagttaactttggtgactttaactaccatatgtgcagctaacttccaaatctatatcccttgccttaatctgtctcctgaaatatactgatatgaggcccaaaaggagggaaatatgttttatctttgtatctcttgtttttgtatctacttgtatacttggtatacaagtagactctaaataaattcttgttgaagaaactatgcctttttaattctgagtgtgagggagctaaagtccaaatttttttccattgattattgtgtaaatcactgttgtaagcttcttaatgatggtcactgcgcagtatacttacctgtttggttataatgcctaccagtgctttacacatacaaggtagcaagtatctcactcattaaatctagtaataattgcaaatatttatcaaactgagtagcagtggttcagtattgaaatgcttgcaaaatttctctttcctgtttctaaatkaaaacataaggggaaaatatgggaattaatatggtatcatgataat

SEQ ID NO: 848014 - DNA, 520 bp, Homo sapiens
tcttgcagtcgacatattaatataaaaaattaaagccaaagtacttaatcttataaaatacatcacaagcatcaggagtggcacaatcataacgccaaaggtggtagaggcagaagaaattactatggggtcagaagagactgagtaatgatggatttagagtacagaaaagggcaagttaggtaaggccatgatctaagaaaaatataaatagggctatactggaaaaatacaaatagaggtatactgggagtagcgggagaaaaggtgagacagttgagctggagccagattataaaccgtgataccagccttagaagcctgggcttcattctggttaacagtggttctgggattccagtgtacacaagaatcatcttggggagagactggtgactagacagattttaactcctgagattctaatttagtatrtttgggatggtcccagaaaactgcatcttaacaggtgattccagtacaaagacacactttgagacactccaccataggacaaatg

SEQ ID NO: 848015 - DNA, 548 bp, Homo sapiens
gccgaggcaggtggatcacttgaggtcaggagtttgagaccagcctggccaacatggtcaagccctgtctctactagtaacataaaaattagcygggcgtggtggcacacacctgtagtcccagctactggagaggctgaggcaggagaatcgcttgaacccgggaggcagaagttgcagtgagctgagattgcaccactgcactccagcctgggtgacagagtgaaactgtgtctcaaaaaaaaaaaaaaaaaaaaaaaaagaatgtacaagaagaaacacatgcaaagagagccaaattctacattttatcagaagccaagaaacagaaaaaatttgtgcatatatcatcactgagtagttttttgttgttgttgttgttgttttttgagatagggtatcgctctgttacccaggatagagtgctggaacagctttataagtatgttctgttataccttcaagctgtattatgaacccaaaagtggatagaaaggaatgccattcataaaaaagtctcaaggtataatgtaatcccatgtttagaa

SEQ ID NO: 848016 - DNA, 548 bp, Homo sapiens
gccgaggcaggtggatcacttgaggtcaggagtttgagaccagcctggccaacatggtcaagccctgtctctactagtaacataaaaattagctgggcgtggtggcacacacctgtagtcccagctactggagaggctgaggcaggagaatcgcttgaacccgggaggcagaagttgcagtgagctgagattgcaccactgcactccagcctgggtgacagagtgaaactgtgtctcaaaaaaaaaaaaaaaaaaaaaaaaagaatgtacaagaagaaacacatgcaaagagagccaaattctacattttatcagaagccaagaaacagaaaaaatttgtgcatatatcatcactgagtagttttttgttgttgttgttgttgttttttgagatagggtatcgctctgttacccaggatagagtgctggaacagctttataagtatgttctgttataccttcaagctgtattatgaacccaaaagtggatagaraggaatgccattcataaaaaagtctcaaggtataatgtaatcccatgtttagaa

SEQ ID NO: 848017 - DNA, 646 bp, Homo sapiens
taggactttctccttagttcagctaaaactcaggttcttgtcatacggtcatgaaagmttaggctcgcagagactttgaagggtgagaaaaatggaatttattgggtgaaaaggaaaaaaaaaaaaagggaaacagggactctcagcaaagcaagaatcctgctaaccagtttctcgcctcacagattgaattccagattaccacccagaccaggagaggccagtctcctcccccctgcaaaagacgacttgaacttcccaaggctccaccctggtgtgcactcctcccagtgcacaggcctgtgggaagttctgccagggagccctttttacctggctgtctcaatttgttatggagaaggctctgggcatatttcacaatgattactcttcccctccccttgacagagccttgaaaagatctttgttgggtcctcactatgagaagaaccttgtagggttcttggaggtaaagcccacaaatgcctgcaggtcctcctagagctgcagggtatccaggagtttctcacccttgtgctagttcacacccaacctccagaagtttgtcacgactgccatttaagtattcctagcaatccatggctctagttgcttctcctccagctcagaagatctctgttacttt

SEQ ID NO: 848018 - DNA, 577 bp, Homo sapiens
ttaggtatttctcctaatgctctccctccccttgccccccagcccccgacaggccccggtgtgtgatgttcccctccctgtgtccatgtgttctcattgttcaactcccacctatgagtgagaacatgcggtgtttggtgttctgttcctgtgttagtttgctgagaatgatggcttttaagtcacctcaattcaactatgaaacttcactgtaggaactgtgttttttacagcaatatttcatttcctaatgaggtttctaggatatagtttgctaagacattggtaggaaccagaagggtcataacatacaactttatctaaccctattctttttccactatgccatattgtatcttttttaaaatgtccatttccagcctccctattgcagagttaagaaacacaaagaaagactctctttctgtcattttaaataacccttggycaaagcaaagcaattacttgttaatttacctgttggattatttcagaccttgtagaagtggctaacattttttgagttgtgtaaatggaaaatggcagtggcagtgtggagatgtgttactgagatctc

SEQ ID NO: 848019 - DNA, 614 bp, Homo sapiens
gtagttcaaaggggttaattacatatgatcctataattcaaacactaccagaagtgtctgaacttctagaaccttaaattgattgcaattgtctaatcaaatgttttctagaattatagcttctttaaaatgaagtatgatttacctttcttcttgtactgtgaagtagctgaaatcaatttatcatctttttttctctctagagcattttcttttctttgaaggcatatttaccacttatacgtcatcagatttataagaatgatgaaacagatgatataaagtcacagtatattaaataattattcagtttaataaactgatgtgattaatttttttcaataaactgtcaaactgtaaatacaaaatgtatctttatgattttgctattaaactatgcattatttacaccaaaatgattttttatgcctttctgaaaattctgataccttggagaatcatttacttcatgaaaagtttttatcttaagttacattaggatatgaacattacattgctattgcataaaaaattaaaaaaattttctctgattatgaatataattcttattttartgcttttttaaaggtttgacttatgtgtctattcatgca

SEQ ID NO: 848020 - DNA, 563 bp, Homo sapiens
tgacagcagccaagaaataaacaaaaatgagtaggtggacccatgacaagccatggacagcaagtccttaaagacctcagcccctgctcagctccagccaattaagcataatgggatagcagtgcagtgttgctattgctattagtttctgaagtataaaatttagatttttatacactcatttgtttttttaaacactgaaaattctctttttttcccaaaaatttgccagccaaaagaaacaagattggattaggcccccaggaagccagcttacctctcacatttaaaaggatcctagaggataatgctgggtagacaatcaaatgtcactcattgagtacaatggtacagtcagttcatggagggtacaaatgcaaccttcaaggatgctccaattaaaattactgatcagctcttcatgcgctatatctaaatcttyatagcaataatgaatttacagtttcacattaatatatatgatgatgatgaagtctgcttttatgagccatttttcttcctatggagaaatggaagagtaatttactgtgtttggccaggac

SEQ ID NO: 848021 - DNA, 607 bp, Homo sapiens
agaggcaaaacccagggcccttaaactagccaatcattaactgctagaaaatgcctacagaggggtcacctctggtgatacaggagagagaagaggaacctaggaaaatatctgtctttgcatgagtgggaaagctgaaggactcaagaagacaaacagaaccatccaagcaacgctttccctcagttttcagctgaaatcagttccacagtactacatgtttttcatggaaagaaaatcatagcactccccttttccttccttggtttttcatttctaaaaccatttactttctcttcctcaatgtaatggcatactccacatgtaggatctgattacagatctggactaaaccttaggaattttaataaaagaacttatgatgaatgtctacactgcgttatgcttcattttggtttataaattgcatacagtgctgttttgttttgaccagggactaaaatgaaaccaaatctstacaaaatacctaggttgggccaatcttacagcactagtaaatttactccctagaaacattcacaacatgccgttcctacttgattaaagattaaaacatcaattttggtttgaaacagccttctgcctg

SEQ ID NO: 848022 - DNA, 505 bp, Homo sapiens
ccagtgtcaaatgctgcaaaaagagggaggaaaatgaatcctggccaaaggtcattagcttcagagattagaaggtcttgccgagtttcagtagagtggtgagggcagaaggaaaattcaaaccctgctttgawgttcctagcaatctaagtccatctatgtagagacattggggtatacaggagggtaggggccgcctgtgactggccttgctcgaaacttctcactctcctgttgagagccctaggtagagactggatgggggaggggtattccccagggataggagggtctctacttcctgtgtcccacatcattaagcaccagcttccctcagttaagcttcacaaaacccttggagttaggtgtcattatttgcattttttacagatgaagaaatgaaagcctgcagaggtgaagtgatttgttcggagtgactcacaccctgatgaagctgaagaattgggagcccgttccattgtcttcggggagtgtggaggcaccc

SEQ ID NO: 848023 - DNA, 517 bp, Homo sapiens
attgtatgtatgtaccacattttgcttttccatttgtccattaatggacacttatattgcttctgccttttggctawtgtgaatactgctgctatgaagtgggtatgcaacacgcctggtaatttttgattagatatcagacattatatattttatttatttggatgattgctatatttgtattcttataaatagtcttgaggcttgttctgagatgtagaatatgtagaaatgctttgatgattttaaggtttgcttttaagttttttttttgtttgtttgtttttttttttttttggtgttaccagtacaacctttagtctaatttttccttgctgctgggttactatgctaaggtaccttgttaagtacttttcctgatactccgtgaattatgtggctttccactctggctgatgggaatacgaactacttatgagtctgtgtaagctgcagggattatttcctctgctccttctatgtggtctttcccaagctttgggtagttttctcacat

SEQ ID NO: 848024 - DNA, 555 bp, Homo sapiens
caatgtagaaggcctacggtaatcacagagctctcrtggttaatggtgtttgaacttcagagtgacatgaatataaccaatagaaacaaacttattaggcatcttatatgactcatttctagacaatgtctcttttaataccagtctgtttattccttctggaattccagttagatatttgctggatacttccattttatcctccacctatttcaatctctttctctttctttgctagattctgtgtagtactctcaggtttatcttcagtttgctaattctttcttcagttttgtctaattatctgtccaacgcatgcactgagatgcttttaagacattaaccctaatgttatttttataagttctatatttttaagtctgcctattcatttttcatcttattattatatttttatcatcattcatcttgtttcttacatatttgattatccttttcttaaatcattaataattgtattattttagtcttatacaagagttctattctcagaagttcttactgagtcctgcttgttttgtctgctggctctca

SEQ ID NO: 848025 - DNA, 574 bp, Homo sapiens
aaatgccatgactataccacaatgtagaaggcctacggtaatcacagagctctcatggttaatggtgtttgaacttcagagtkacatgaatataaccaatagaaacaaacttattaggcatcttatatgactcatttctagacaatgtctcttttaataccagtctgtttattccttctggaattccagttagatatttgctggatacttccattttatcctccacctatttcaatctctttctctttctttgctagattctgtgtagtactctcaggtttatcttcagtttgctaattctttcttcagttttgtctaattatctgtccaacgcatgcactgagatgcttttaagacattaaccctaatgttatttttataagttctatatttttaagtctgcctattcatttttcatcttattattatatttttatcatcattcatcttgtttcttacatatttgattatccttttcttaaatcattaataattgtattattttagtcttatacaagagttctattctcagaagttcttactgagtcctgcttgttttgtctgctggctctca

SEQ ID NO: 848026 - DNA, 502 bp, Homo sapiens
tttcagatagcaaacattttctggccgaagagaaaagatgtaatttttaaaagttcaatcattcttaattattattgtaaatgtaaacatacccatataaataaaccacayatgtggatataacgttatttggtaggttgctactttctgaaggaacaggactttctcattaacctgtaataatttgacaaaataatgtgtgaatcagaatgaataccattacaagatattagtcattttattattttcaataattaaaatatctacttttaagttagtaaatttacctaaaatgaaagtaagctctagcattttacatcagttacaaggcactgtttttttaatattccaatttgtgaccaggaggatgttcatctcactctttcaaagccatccagaaccaaagatgctggagttaaggcaaatcaatcctattccatctgctggtccctcctcctgaaatcgaggctgctgctgttggctcttaacttgagctcccatt

SEQ ID NO: 848027 - DNA, 578 bp, Homo sapiens
aacatggacgtgttagtcgctgtcccctctgccatcccccaaacttcgttgttcatagaactctgattttgttcatcttattccaagttaccaagtcctttagggaaggctaggctgccctcttacccaggactgagagttcatggttgaagctagagaggacggagtgatttcccctgctaaacaattggttcaggcatgtgacgcaattgggccaatggagctaaaaaaggaaatctgctgatggggcttctgggaaggtttctcttggaaaaaaaaagaaaaagccacaagataaaaatgtttgcttttctgcctctggacttgggctctgtgtgttgttcctggaaccaaagcaccttgggtccattaagacagcagcctatgaggataaaccagaacactggggatggcagggtagaaacatcgaaataacctggatctttaagacactggtgagctggtgaattaatcaaccctggaactgccatccccccggacttcttcttatgtgagataacaaaccatctaattgttccaattwtgatgaattagggtttctattacttgcagccaaa

SEQ ID NO: 848028 - DNA, 611 bp, Homo sapiens
ccaaggagacggagagagatagaggaatgtctggtcagtggagtggtagaaacaccacatttattaagttttccatcgtatatggatgcagttggtggtactccaaaacaattacaatagtaacgtcacagatcactgatcacagagcaccagagcagatattatgataatgaaaaaggttgaaatactgtgagaattaaccaaaatgtgacacggagacacaaagtgagcacaaagtgttggaaaaatagcacagatagacttgcttaatgcagggttgccacaaccttcgatttgtaaaaaacataatgtctgcaaagcacaataaatcaaagcaccttatgagatgtgcctatatgtattttcagcaagaatgtcacagaagtaatgctgtgtcattataacattttggggaccattaatgttgatcaacacccaaggtagtgtgtgctatgtttctccattctataaaggtacagtttttctttgtaattaatattctattagaccaccacatcacacggattcctttttgaggaaggacttgttgctcagttttggtcagtgcartcagcagatagcttccagcactttctgcatgactcatatca

SEQ ID NO: 848029 - DNA, 611 bp, Homo sapiens
ccaaggagacggagagagatagaggaatgtctggtcagtggagtggtagaaacaccacatttattaagttttccatcgtatatggatgcagttggtggtactccaaaacaattacaatagtaacgtcacagatcactgatcacagagcaccagagcagatattatgataatgaaaaaggttgaaatactgtgagaattaaccaaaatgtgacacggagacacaaagtgagcacaaagtgttggaaaaatagcacagatagacttgcttaatgcagggttgccacaaccttcgatttgtaaaaaacataatgtctgcaaagcacaataaatcaaagcaccttatgagatgtgcctatatgtattttcagcaagaatgtcacagaagtaatgctgtgtcattataacattttggggaccattaatgttgatcaacacccaaggtagtgtgtgctatgtttctccattctataaaggtacagtttttctttgtaattaatattctattagaccaccacatcacacggattcctttttgaggaaggacttgttgctcagttttggtcagtgcagtcwgcagatagcttccagcactttctgcatgactcatatca

SEQ ID NO: 848030 - DNA, 586 bp, Homo sapiens
tgtttctgattcagccggccgggcgtggcgactgagattgttcatttttaacacactccctgstgatacccttgctcctggtaccacactgcaggttgagtagcacggctgtatggagtgttcataggctagaaagatagctcgtttttcctctgggaaacttgagagataaccctagagaacaggtgtaaactggcacatctcagggttgctgcatctgattgcaagacacctgctgtgtcactgactggctctagttgatctagactccttattcctgaaaaaatcacatgtgatcccctcctaggcatttgtgttctcatcccccaagacttatttccagtctcttccttcatttgctaggaaaatggggctaaggaatgaaggaagtcagtacaaaggaaagaaagcctatggcattgattccaggcccctttgaaaagtgttatttgtttatctattaggccccacatttcctaaattgctttattgcatatatgtatttataaaaattcaaggaaataaaaatcaccttagctttgaaacataacatagcacctttttgggtaaattgaggcacatccag

SEQ ID NO: 848031 - DNA, 601 bp, Homo sapiens
caaacttgaattcagcgaattcagagatttttgggagatgtccttttgggtttctcaggacgcctgggagtgccacactggcataggatctttgagagtcacaactcaggacacttgctatggaaactggacatccttgaacaacaaggtgccctagagggagggagccagaggcctcaaagatgtgagcaccacattgaattctgccagatgtttactcttcatccatcatcaacaagaaaatgtgggtgtggctgaattagttccagtcatctctgaacaaaaagctagctgaaaccaaggaagacgagagaagaaaccccaacccaggactgatactaaagaaactctcataagacagatgtgaagggtggtggcagctggaatggtatcagtcacatcctaaacatgccatggaagccattacccagctccaaggacaaatgcacttccgcgattgtgctgagacctgctctacytcccaaggtagtaattccatattaccccaggcacaggggaggccccagtgggctaacttccggtcattcttcaatgacttattttctcaatttaaaacagaaaatttattttatacatatct

SEQ ID NO: 848032 - DNA, 655 bp, Homo sapiens
actgttgcatctccatggcctggcattgcacatgacgtgtgagcaggcaccccatgcacactgcctaaaagttaaatacaaaggaagggaaattcagggcacaattgggtgactgaccagtggtgcagtctggtaagaccacagagtgagatccagcagagaaagagtctagctggccctggaaaacagatatggaaggaggtatagggatgctaggattcaggctatagccttggaggaccacatgcctcaagttgatggctatagacaagagagagaaaaagcaaaaaggagacacagcaggaatgagggcagaggcttgactcacaaattaaatattggaaaagagaaaataaggaacaatctgatgctacaagggccaagttaggatgcacatgaaaaaatgctaagaatagaactttacccacttagcctttatgcatgttgagtatacttaggaaatgcctgggaccagaagtgtttcagatttcagatacttttgaattttgcaatgtttgcattatacatacttacagattcagcatacttaatccgaaaatccaaaatctgaaatgccccaatgagygtctcctacaagcttcacatcagagctcaaaaagtttcagatttaggagcatttcagatttcagattag

SEQ ID NO: 848033 - DNA, 615 bp, Homo sapiens
ccgtgtgctcattaaagggatccaggtttttcctcattgttccagtgaacaaaacaggttcctaagtgcccaaaatagtcacggtcattaccacagactcttttttcattttattccaatgctaacatcaacaatagaattaagataccaaaaaataaaattcatgataataattacagcgttacaaatgcctgtttacaaaacaacatatctattaatgttccactgtacaaagcgtgctccaaaataccttccagaccactgaacactaacaaaactgttgcaatgtgctatcttatgaagataatgaaaaatacaggcctgatgtttaaaactgttttcctcatattattagcttaacatgaaatataaggatataattattcgagggtctacatgaatagagctatagaaattaactatcaatcatgtaatactggaaaataccgacagcatgattaaagtttgtgcttcaaagccaaattattaagcattttccaatttgcactaaagaataaattaggattattttctccrttggcaaaacagttttccaagattaagaatctctcaccgggcgcagtggctcacgcatgtaatcttagtattttggga

SEQ ID NO: 848034 - DNA, 553 bp, Homo sapiens
ctgctcagggttagctttgccactaaacaagctgactcttaatcatgcttctggtccagcttcagatgtgtaccttagagcctaggaggaagatgctcttctatttgagtctttgcgtgtttgttcagaacatwggaatccactgggctaactgctcataatccattagtgctatggtctgaatgttgatatctcttacaaattcatagtttggaacctaatacccaatatgataatattaaaaggtggggccttttgggaagtgattaaatcatgaggactctccacttgtgaatgggattagtgtcctaataaaagaggttgaagggagttgccttcccgcttccactatgtgaaaacacagcaacaagaagccatctattaagcagagaccgtgcacttactacatgttgcatctgcgggtgccttgatcttggacttctcagtctccagaactgtgaacagtaattttgttatttataaattatccagtctaaggtattttgttttagcagtctgaacagtctgagacaatgaggtatagtggggacac

SEQ ID NO: 848035 - DNA, 611 bp, Homo sapiens
tgcatacaaattaagaaaaaatagctacctatgaaggtgacagtctgagaatccttttgtcaggcagattcacattctttaggaacattaaaaaacccactattcacaaagttggaaaatctgcagacaagatgaatgtaagggtatttcaatttttaaatttgatttttaatttaatttagggttttgtttgtttgtttgagacagggtctcactctgttgcccaggatggagtgcagtggcacaatcatggcccgctgcagcctcagcctcctgggctcaagcaatcctctcacctcagcctcccaagtagctgggaccagaggcatgaaccactacacctggctaattttttagttttttgtagagatgtgattccactatattgcccatgctgatattgaactcctggcttcaagcaatccttcatccttggcctctcaaagtgctaggattacaggtgtgagccactgtgcctggccagtattttaatgttataattcaattttactrcaatgtaaaacccatgcacataatttttgttaggggagagattgggagaaagaaatatagaagtagaaataaagccagagcaaacagagagacaaaca

SEQ ID NO: 848036 - DNA, 611 bp, Homo sapiens
tgcatacaaattaagaaaaaatagctacctatgaaggtgacagtctgagaatccttttgtcaggcagattcacattctttaggaacattaaaaaacccactattcacaaagttggaaaatctgcagacaagatgaatgtaagggtatttcaatttttaaatttgatttttaatttaatttagggttttgtttgtttgtttgagacagggtctcactctgttgcccaggatggagtgcagtggcacaatcatggcccgctgcagcctcagcctcctgggctcaagcaatcctctcacctcagcctcccaagtagctgggaccagaggcatgaaccactacacctggctaattttttagttttttgtagagatgtgattccactatattgcccatgctgatattgaactcctggcttcaagcaatccttcatccttggcctctcaaagtgctaggattacaggtgtgagccactgtgcctggccagtattttaatgttataattcaattttactacaatgtaaaacccatgcacataatttttgttagggragagattgggagaaagaaatatagaagtagaaataaagccagagcaaacagagagacaaaca

SEQ ID NO: 848037 - DNA, 679 bp, Homo sapiens
tgcttatttgcattatcacttgtgtgtatacaggtcgcatgtwtattttatatatagatttcatttacatttgcccccatttcctctagactcttcagaccacagatcaaaacttttgcttctttcgtcactcccataaactaaaggtcagtgttttgtcctgtctagctgcttaataaatactgataagtaataatgattacattcaaatctcaaaccatgcacatgaataatctgaagtttttcataaacattagagatagagtctcttataatttatctgatgtacacatgtacatgagttagaaatatggcttaaagggattttcatttggagttaaccaagggagaattttggctaatgtttatgtccaaagaaccttagagtgccttaatttttctcatctaggaaatgggattactgatctcattgatgaggttctgtgtttcttcaaataacctctcatcgagactgagctgtataataactaaatgtttggttttgtacgttacacataaacatgtaaaactgacaggatgatgagaaattccatgaaagatcctagataaatttttgtgattcttagactgttagtatataatatgtatgtggtctgtgacatttttctgccatttatttctttaattaaattttgttttttaaatttcctttgaggat

SEQ ID NO: 848038 - DNA, 648 bp, Homo sapiens
ctctcctgtatgaggtgtctgttgacccctgctgggaagtgtcttccggtcaggaggcacaggggtcagggacccacttgaggatgcagtccgtcccttagcagagctggagcactgtgctgggagatccactgctctcttcagagccagcaggcaggaacatttaagtctgctgaagctgtgctcacagctgccccttctcccaggtgctctgtcccagggagatgggagttttatctataagcctctgactggggctgctgcttttccttcagagataccctgcccagagaggaggaatctagagaggcagtctggctacagcagctttgtggcgctgcagtttgctctgcgcagtccgaacttccaggcagctttgtttacactgtgagtggaaaaccgcctactcaagcctcagtaatggtggatgcccctccccccaccaagctcgagcttccgaggtcaacttcagactgctgtgctggcagcaagaatttcaagccatggatcttagcttgctggcctccatgggggtggtaaccactgagcaagaccacttggctccctagctttagccccctttccaggggagtaaatggttctgtctcrctggcgttccaggcaccactgggatatgaaaagaaactc

SEQ ID NO: 848039 - DNA, 636 bp, Homo sapiens
ttctaccgccttacaaaaccttcaagtattgtctctactctgctcactgtgtggtcacatgaacagaggtcatcatcctctcttgcctgcatccttgcatctggccaccccctcctggyctcactgccactggcccatccttcccatagctgagggacttcgaaaatgcacatctgaacaggtcatttcttttcctgcttaaagcatccttcagtagatcgctgtggttgtcaggatgaagtctgagctgctgaacatgtaacaaaaagtcctctgtattctggaaagcctcgttccagcccctgcctcttcaggcttgttaccttgaatgctccatgtcatcgcctccatcgcaacttgtactccacggcctcaccacagtatggtgctgaactctcccgacctggccataccctttcgcctctctgcctctctgcagtaatcagcaagtgcagagagggcaaagggcatgtctgtcctgcgaacagtgtcctcagaaacccacaggactcctgactcctagcctccatcggtaaactttgttgaatggatgaatggatgaatggatgaatgaatgatgagtctttgtgcatagtcctttgtatgccactccatgcccttctttgtgtagtcggt

SEQ ID NO: 848040 - DNA, 636 bp, Homo sapiens
ttctaccgccttacaaaaccttcaagtattgtctctactctgctcactgtgtggtcacatgaacagaggtcatcatcctctcttgcctgcatccttgcatctggccaccccctcctggcctcactgccactggcccatccttcccatagctgagggacttcgaaaatgcacatctgaacaggtcatttcttttcctgcttaaagcatccttcagtagatcgctgtggttgtcaggatgaagtctgagctgctgaacatgtaacaaaaagtcctctgtattctggaaagcctcgttccagcccctgcctcttcaggcttgttaccttgaatgctccatgtcatcgcctccatcgcaacttgtactccacggcctcaccacagtatggtgctgaactctcccgacctggccataccctttcgcctctctgcctctctgcagtaatcagcaagtgcagagagggcaaagggcatgtctgtcctgcgaacagtgtcctcagaaacccacaggactcctgactcctagcctccatcrgtaaactttgttgaatggatgaatggatgaatggatgaatgaatgatgagtctttgtgcatagtcctttgtatgccactccatgcccttctttgtgtagtcggt

SEQ ID NO: 848041 - DNA, 636 bp, Homo sapiens
cggttggttttcttaaaatattgcaagagtcatcttggaataaaaagatttggaacatatttagaggcagtgggttttcgtcgtaagcaaatggtgatgaattttaaacgcatagtcacaatattcattcagaaatacaccatgcattgccagatgtttgcagagcacctactgtgtgctcattattgcctaattggtgaggttgtagaagttaacaagaagatgcactcagaactgttgagcagtttttaacaattgggcattattttactgctttttctttgcgttaacaagttcttcagcaagaagcttaaggtcttgcaattatgtgtttgtttctgttgttaggtctctccaggtgacactggatgggatgtcttcagcctcgattatcatgttgacggaccaattgcaactgtaagattatcctgcatcattttatagtatttacaactattaagattgttaaacattttgtttgaaattggctttcttctctggggacttctaattcaagtgatcactcgacatctaagatctactcattgaatgaatacttaagccaaaattgtgtgtgtgttttaaatgattaytaatgagtactgaaatgctctattattttaaaaattcttaaaa

SEQ ID NO: 848042 - DNA, 621 bp, Homo sapiens
gcacccctgcctcacggatccctcaggcgggttggggggagttgtagtgaagagtccacattttagactaggtttagactagtctaaaatggattgaaaatcctaataaactgcaagctgtgtaacattaggcctctgtttccccatctgtacaactggcataaaaatgcctgccttctgttactgtgactttacttagcatgctgcctattatgatagtttgctaaaatgtacctttttaaaaaaagatgagacctgtactgagaggattcttacgtgggaatactatcaacttgtcttctgctgttatcccaggtgtttactcgagaatgtatgagccactacctaagagtatttaacttcctctggagggcgaagcggatggaatacatcctcactgacatacggaagggacacatgtgcaatgcaaagctcctgagaaacatgccaggtgagcccccagcacggtcacgggtccgcacacactcccagcggcctccagcccccactgggtgcggtttycagcaactccgcagaagttaaggtagactcacggtgacagctatatatttttttcagatggcgaactttcttttaaaatcacatttattttttattcta

SEQ ID NO: 848043 - DNA, 475 bp, Homo sapiens
gacctgcttaaacctctctccgtttttcccagactgatgctgccaagtgtggaggaacagcaggggtgggcgatgccctcctcccctcctgcatmtgccctgctcactgcagcaaagggtgggcgggccagggtcacaggagaggtaccctggaggcaagaccagtgctcgtgggcatgaggagtcattgagtggtggggaaatgcagggccctgggacccaggccgggagccactgccatcctgctttccacatccacaggagggcagcagggcaggagagtgtcccgccctggacctgaaggaagagatggacctgggccagggccttctgtggacaaggtggggaaagccagggagacccagcaggacgggtgagaggagtgcgcttggggaaggtggcccctagtgcccggcctcaggcaaagtctttctctgtggatccaagaagtaggtggcatgattgtgcccagttt

SEQ ID NO: 848044 - DNA, 607 bp, Homo sapiens
taatagagcacagcaatatttgctgatgtttttgttgaccacagctgtatcctgggtttggatttcatctgcctgtgctgggacgctccacctggaggcttctcttaaccgcagactcatcctgtctggagggaggcctcccatcactgccacctgcctcccctagctgtccctgtgtccttcccatcacacgcctttattcccctcacccagttcctgtcgccaggtccctccgttctccctgccgaggtcctggcccaccctttcctttctgtgtctgctgccagaccccaggtcctccacacattcattcaaaaggtttatttagggactctatatgccagaccctctgctggggtgggagccggggtgagcactccaccatagtccctgtccccaggccctctgctggggtgggagctgggcgagaactccaccacagtccctgtccccagggaattcatacgtcaggcacamttgtgacaggtcctgaacaacaggacaactggtatactgggtgagccaaggagccacaagctgggccaggaggaggtgctcctggtttgctttgttcaaagaatccttcccagaaaagtggatgcctacg

SEQ ID NO: 848045 - DNA, 574 bp, Homo sapiens
tcctgtgtcaatgatggctgtggcgctgtgagagcagaggaaaaactcgggtttagagttttttcctgaaacacattcccgaggtatctagtggatctgccttctccttgccaccttccagagtcttatgtttgcttttaagataaaatccaaggttttgggctgtaattagagggaagagtaggggaaaatacatcttttccaacttcccagaaacacagtcctggtatgttagtctttttaatagatttgcaatgatattgaactcaaaagaaatcaagagctactaaagaagttttttaggataccatataattaatgtcccagacccacagttccctaccacgcacacaatggcctattgtatcacagcactcaggacaatgatatttccacactaattttatcattcagggtcaatacatcgctaagaaaatgaaactgctaatgtcagtctgtgaattttccccactgctttcaaaagtttccttcagcaaaaacttagtttcaaaaatatcacagagcaaaacrttacattctatggaaaactccaagtgagtaaaacccaaggagt

SEQ ID NO: 848046 - DNA, 484 bp, Homo sapiens
tgcaccaatctctcaaggcttttaaaaaatgtgcagtcctcacacaagtcaaaagtgccgamtgtcagccagccatggggtccctgccaaagagagctgctctccaggcccacccacagcatcatcacaattccaacctgaagcagcaacacatatgacacagcctccaccccattccgttaggagcagctgtcatgtggctgggggctgaggtttgtgtgtggactggaaggagagaggtgggggctcgcggtcctctgagctgaactctccctctcattcggcaccttcacccacaagccacctttgtccttcacaaaagccacctgggctctgcctcagacagacagcagttcacagcatgcaggccaatctcttagctaacttcacgggaacgagcacttacattctccctcctccaggcccaagatttcataaccagaaactccagcatcctctcctgggctgcactgcagttgttcag

SEQ ID NO: 848047 - DNA, 547 bp, Homo sapiens
cagaaaaccagctccctggggacggctgtttcctcccagcaaggcagcaggggcgagaccgtgaaagaaccatcctgtgtkctcagctgtgcacttccctcacgttcttactctgagaccaagcttcctccactgtccctggccaggcaagagccccacaatggtcacctgtcaccatccaggaaacatctcatgaaaactctgctcaattgtaccaagaaaatactctgagccaacatccagcagccggatatgactgtgggagttgacaacaaccctacccctctaatagtaatgcttttctgccagaagaaagaactaaaacctcaagacaaattaatcaatcacaggaagaaaggaggcgattaggtgaccttattttttaaataagctaataattcaaattcagtaatccaatgtagttgcttgcatttatagttgctttaattttgttctgaatagtctatgacaattaaagggcattcaaaaacatagctgtgctttatgacataaaggaggatgattacttttctagtctagcaagtcc

SEQ ID NO: 848048 - DNA, 601 bp, Homo sapiens
gggagccaggtatgtaaggcagttgccggtgggcatgttttgaacctgtattgggcccttatatgtatgatctctgtgatcccatcattactgttcatttcttccaggagaggaatgacacacttctcactttaattgccagattatctccaattctgaatcagtggaatataatttaatatgattttactatgattgagtcattctctcccaggtactgctgggctaggataaaatgagatctgaattacattaaaataattaattattccaagagaagaggtgacagaatgttttaagtgggtgtgtaatttagataacctagatgcagataagctgaataaagcatttaatccagcacattcatattttaacttgatcatcagcaatgggagtttgaaacccaattgcagctgcaggtcccacacaactgaatttggttccgtgtgcatagcagtgttcgctggacatgcctggaagtctgaaggtgygcccttttataggcaggaattccaccaggatgggtatagcttgtttttttaaaaggcttgggactggatatgattgcccaagaagacagtgtagacagcgaggagggctg

SEQ ID NO: 848049 - DNA, 618 bp, Homo sapiens; identical to SEQ ID NO: 835224

SEQ ID NO: 848050 - DNA, 618 bp, Homo sapiens; identical to SEQ ID NO: 835225

SEQ ID NO: 848051 - DNA, 696 bp, Homo sapiens
ttctactatatatagactacccagtgtaaggtattttgttataaggtattttgttatagacagactaagacacattcatccatacacgaggaaaaggcagggtccttggttaaagtagaaggtcacatgctgactggtaaacatggagggagtgctgaagtgatccttgtcattttgttgccatcacagcaaagattggttcaggtaagaatcccaatagatgctaaatctgaggggaaattgtaatgaggagcaggatatttgggtggtcttaaagtgtctctcttcaaactcattattttgcaaaggagaaaatagtaactatttacagttggagaaataggacaacactcctactgtgtgaggaaaactggtgtcaccagggaggggcagatagacatcgtgtgcctccagatgtggctgtctgagaagcacacaatatcacatatgcaatatcctggccaggaatgcagaacttaaatctaatcatgaggaaacatcagacaaattcaaaatacaaagactcctgtttataaaaagtatggggactctgtcttcaaatctgtcactgtcacaaagggcaaaaaaaaaaaawtttttaaaggctatggcaatgttttagagattaaagaaacatgacaactaagtgcagtatctgtccctaaactggatccagtactggtggaaaaagaagct

SEQ ID NO: 848052 - DNA, 694 bp, Homo sapiens
tatagactacccagtgtaaggtattttgttataaggtattttgttatagacagactaagacacattcatccatacacgaggaaaaggcagggtccttggttaaagtagaaggtcacatgctgactggtaaacatggagggagtgctgaagtgatccttgtcattttgttgccatcacagcaaagattggttcaggtaagaatcccaatagatgctaaatctgaggggaaattgtaatgaggagcaggatatttgggtggtcttaaagtgtctctcttcaaactcattattttgcaaaggagaaaatagtaactatttacagttggagaaataggacaacactcctactgtgtgaggaaaactggtgtcaccagggaggggcagatagacatcgtgtgcctccagatgtggctgtctgagaagcacacaatatcacatatgcaatatcctggccaggaatgcagaacttaaatctaatcatgaggaaacatcagacaaattcaaaatacaaagactcctgtttataaaaagtatggggactctgtcttcaaatctgtcactgtcacaaagggcaaaaaaaaaaaattttttaaaggctatggcaatgttttagagattaaagaaacatgacaactaagtgcagtatctgtccctaractggatccagtactggtggaaaaagaagctataacaaa

SEQ ID NO: 848053 - DNA, 632 bp, Homo sapiens
ttctaaagcatatataatgatgaaaatttatttcttcaaacaccttgcacaatttgtataattcaatgctacttaagtatctaagatacaaatacagctccacaactggtatgtcacatgctatgaactttttaaaagttgacagctataactttcagtgaataaagtagaaacaaagtatgaatgaaaactgatgcttcaatgaataaggtatgcttttacaacggtactgcctaaaaaatttctaaacataaccacatcctgacaataaaggcaactgaaaagaagaaaacctatttctttctaatttattgttatattttcctaaagaaacatccatatcctacataaaattttctcaccagtgtaaggaaacaatttttttttattttagttgaaccagtacatgatgtgattccagaaaacacagaaacaggaaatctaataaaactaaagacttattcatcttcctgagttactgttggagaataacaagatcagacataaattcctgtccacatacatatcttcagaagaataatcacaaaaagggcaatcayttggtattcgcttttaagctaacagtacaatattagctcttttcaccacctttacctagcatccttaactta

SEQ ID NO: 848054 - DNA, 643 bp, Homo sapiens
atggttattttggaatataactttaaaatagaaatgagatraagaatatcaaagaatacaattatattgtcactagcatgagtgctaaagctacatacttttcaatatggatagtacaacatgagcacaggaaattattgttgaatggctacatatgattaccataagtagttagcaaacaatattcatcttccaaaatatccaaggtaatatgtgagctccaagatgatgttttatagcatctacttattaattctgctaatggaaacaatggaatttagagtcagaattgggttcaaaaacataaatctacttattattcatggataatcctatataacttactcaaattccatgaaatttagttctatttttataaaaggggcataataaaagcatctgaacctcataagatggatgtaaaaattaaattaagtgacatataagagccctagtgtatggcctggcacatagtaggtacccaataaatattcatttctctctttctttttagggtagagtaaatgtatgagactgaacaaaaatttctaattgataagagtatcagaatattaccatgtttacttacactatttcctcctttttccccccttaatatttttactccaaaataaaatagaaa

SEQ ID NO: 848055 - DNA, 564 bp, Homo sapiens
acccagaagggatccttctgtggggctaggagayaaggcaaggtttacggccctgaggatgccgaaagcttcagggatgaaagcggggactccaggcttataaaatatgattgatccctttcacctctttttttcatccccaaacagctcactttactgaaattgacatcacaggccactgtttttaaggtttggcatcagaattgtgaaatggttgtctagagacgtgctgatcctgctggacaatgagacagtgtctatttctccaaaccctttagaaacccgaacactctcactgaaacaatgagaaggtcactctgataggctaaaatggaattaaatggttgtgctaatttatatttcttagactactagtaaaactaaacatgctttcaagataaatgacatggaatttgtctttaattgactccttttttgtcccctgctccagagccatgttgttttttctttgatgtctctactttgtccctgtctctccatctctgatgtcctccacccagtccaggcccacatcactgctccctattttcctggcctaaattg

SEQ ID NO: 848056 - DNA, 564 bp, Homo sapiens
acccagaagggatccttctgtggggctaggagataaggcaaggtttayggccctgaggatgccgaaagcttcagggatgaaagcggggactccaggcttataaaatatgattgatccctttcacctctttttttcatccccaaacagctcactttactgaaattgacatcacaggccactgtttttaaggtttggcatcagaattgtgaaatggttgtctagagacgtgctgatcctgctggacaatgagacagtgtctatttctccaaaccctttagaaacccgaacactctcactgaaacaatgagaaggtcactctgataggctaaaatggaattaaatggttgtgctaatttatatttcttagactactagtaaaactaaacatgctttcaagataaatgacatggaatttgtctttaattgactccttttttgtcccctgctccagagccatgttgttttttctttgatgtctctactttgtccctgtctctccatctctgatgtcctccacccagtccaggcccacatcactgctccctattttcctggcctaaattg

SEQ ID NO: 848057 - DNA, 564 bp, Homo sapiens
acccagaagggatccttctgtggggctaggagataaggcaaggtttacggccctgaggatgccgaaagcttcagggatgaaagcggggactccagscttataaaatatgattgatccctttcacctctttttttcatccccaaacagctcactttactgaaattgacatcacaggccactgtttttaaggtttggcatcagaattgtgaaatggttgtctagagacgtgctgatcctgctggacaatgagacagtgtctatttctccaaaccctttagaaacccgaacactctcactgaaacaatgagaaggtcactctgataggctaaaatggaattaaatggttgtgctaatttatatttcttagactactagtaaaactaaacatgctttcaagataaatgacatggaatttgtctttaattgactccttttttgtcccctgctccagagccatgttgttttttctttgatgtctctactttgtccctgtctctccatctctgatgtcctccacccagtccaggcccacatcactgctccctattttcctggcctaaattg

SEQ ID NO: 848058 - DNA, 492 bp, Homo sapiens
gctaggagataaggcaaggtttacggccctgaggatgccgaaagcttcagggatgaaagcggggactccaggcttataaaatatgattgayccctttcacctctttttttcatccccaaacagctcactttactgaaattgacatcacaggccactgtttttaaggtttggcatcagaattgtgaaatggttgtctagagacgtgctgatcctgctggacaatgagacagtgtctatttctccaaaccctttagaaacccgaacactctcactgaaacaatgagaaggtcactctgataggctaaaatggaattaaatggttgtgctaatttatatttcttagactactagtaaaactaaacatgctttcaagataaatgacatggaatttgtctttaattgactccttttttgtcccctgctccagagccatgttgttttttctttgatgtctctactttgtccctgtctctccatctctgatgtcctcca

SEQ ID NO: 848059 - DNA, 466 bp, Homo sapiens
aataactatgacttccaaatcaagcctttagagagaactctcatttgaaataccgtatgtctatgctattgtagtacaaagtattcacatatctgtgtaaagactgcttgtaaacagattccagtaagttttatggaatggagtgggaggcaaggttgtgaatatgtaggtatcatacagcataaacaatctcctgagttcttaacaaagctctagattgcctatgctgggtatggttctaccattgagaactcttccactaattcagtcctatcacaaaaacttggtttttaaaagatgagccctccaaatacagagaaatgtgcatcatgaatattcttgtttaaaagtgttccattttaggccgggcayggtggctcacacctgtaatccaagcagcactttgggaggccgagatgggcagatcatttgaggtcaggggttcaggaccaacccggccaacata

SEQ ID NO: 848060 - DNA, 667 bp, Homo sapiens
ttggggcagtgggcggctggcagctgcacgtggtggccgcgcggcccgggacgctgccatttttgcccctccacttccggacgcggctacggggcgtcggagggggaccrcagggtggcgggggtgcccgctcgggtgactcagcacggccttgtgggactggctttgtcacctctcttatcggacgcgttgttaaagccttcttgggtgctttgtttctgtgagggagggttgacggtgtgggaagagagctttcggtctccagcacccgatactccctccttccagatctttcttgcagtcccggtggaggaggggcggggaggggagcaggttctggaagattcatgggctccttcctccgcccttcctcgagagctgagattgttctggaagcttctggattctggcgccccgccccagtgcccggatgctggggcgagggagggtgcactgcggcgccccctcctcgcgtggtcctggccgacgcatgtccggcagtgacgagtgtcggcctggtggctacggccaccatctttcttgggtttggtcctgttctgtaattttgtgctgtgaaagggtcgtggtggagcttttggcttaagaattctttgtccggatttaattgctcctccggtgggtatcgtatggatcccaggttattcct

SEQ ID NO: 848061 - DNA, 573 bp, Homo sapiens
ccccctccctcccatcctaggacaaagggaaggatgtcagggtgcaggagggagactcacaggggaaccagggtccagaacatggggaatgagactgggcctggggttctctggaggcccttatccaaaggasgtgttaggctaattgtgagggttagggaggtggatgggtcagaggggagtagctcctctagaacctaggactgaaaaaaatctggaagtgagggccccacttgttaagtggggaagtgatgtcagtgggtccctcccccttttctagaggacctggaaggggtctgggctggggaccttccttcgctgatgcctgtctgtctgtcctcccctgtcttccctgtccacatcttctgtttcattgccatttttgtgtttgtcttcggatgctctctgggtaccatcctatccatctgtgtttgctgcctgggcctctatctctggctctgatccttctctgcctcttggggtgtctctctctgcactctcctgtactggcattccggtcccctttcctgtcctctggcttgctctgtgtcacttctgtttctacctctggcc

SEQ ID NO: 848062 - DNA, 573 bp, Homo sapiens
ccccctccctcccatcctaggacaaagggaaggatgtcagggtgcaggagggagactcacaggggaaccagggtccagaacatggggaatgagactgggcctggggttctctggaggcccttatccaaaggacgtgttaggctaattgtgagggttagggaggtggatgggtcagaggggagtagctcctctagaacctaggactgaaaaaaatctggaagtgagggccccacttgttaagtggggaagtgatgtcagtgggtccctcccccttttctagaggacctggaaggggtctgggctggggaccttccttcgctgatgcctgtctgtctgtcctcccctgtcttccctgtccacatcttctgtttcattgccatttttgtgtttgtcttcggatgctctctgggtaccatcctatccatctgtgtttgctgcctgggcctctatctctggctctgatccttctctgcctcttggggtgtctctctctgcactytcctgtactggcattccggtcccctttcctgtcctctggcttgctctgtgtcacttctgtttctacctctggcc

SEQ ID NO: 848063 - DNA, 476 bp, Homo sapiens
ccctaggagcagcacagagcaggagtctgcctcrgcatagggcccatggcttgtcacgtgagagtctcagaccctgtccacatctgaaaacactcagaactcaagggctggagactgtaaatctctcacttagctggcagtctttggtgtgattcattcatgccagattctcaataagagtattcctaggccccatctttctgggtgcccaggaactatgtgagtgtgaggctgggacacgtcagaatatttcaggccaagcttcttcacgtcccctgcggtctgccaggtcaggacgcgtctgttataggtcatcaccatggcttgtttatgaactggccaagtgcctcagtcacatgagggcaggtgtgtgggagggtattctgattcttttatctgggaactgggtttgctctcattttttctttggaagacaaaaaaaaaatagggaaaacgcatttgtgtgaagatactcc

SEQ ID NO: 848064 - DNA, 476 bp, Homo sapiens
ctttaatctcgtgtttttgtttttgtttttgtttttttatattgggaagagaaagaatgggtggttcrctcaccaaagctacctccacattgctagaaggatggtcacatcttggacctcaggtgcttcacttatcagcaccatgtgacagacagaggtcaccccaccccctaccttcttccctggcctcccggacaccatccctccccagctctcttcctgccatgggtcacaccttgtcagcttccagtgccggttccttccctcccctaaccagcaaatgctggagtcctaccgcattgcaacctctggctgctgccttatttacaccactttcaagatgatttcttctactttcatgggtttaagcaacccctacactctaaacactgatgaatcccgatatcagatgaggccctgggctcctaccagcatcttaccagcatgcctgtgaggcatctccccttgtatatcta

SEQ ID NO: 848065 - DNA, 575 bp, Homo sapiens
tgtctgatacctgtctgtatgcttctatttgaacattcaacccacccgtcaagttcccacattccctgccatccgtttttattcctgtgttctccttcatcagtgaacatcatcaccttttacacaaatcagaaacctgggttctgtactccacctctccctattccttgcctaccactccatccccacttcccaatccaatccatccaagtccatccttggccacctgcttccctagacactcatcaccattatcctggttcaggccactgtcaccttgcacctgcattatttcaacattctcctaactgaactcctacccacagcattaccctactgatatgtcaacccaatatgtcactctctggtatgttgtaaagactttcatggtctgatcttggtttacttctccagcttcacattttggcaatacccatctcacaggcactatcagttatgcttatatcctccaatatgggtgcctttcaawtagctctagatcttacaaatattcttccctctgcctgaaagattattccatccccacgccctcagccaacttttctcactcattc

SEQ ID NO: 848066 - DNA, 651 bp, Homo sapiens
gcacaactttgggttttatttggagagcggtgattcacagaggctcatttytaactacatatttatccctcagggatagcaaaattagctcttcaatgtaaggagagggacttgaccaggcataaagttctaatgtgcactgatttccttgaaattttacatacaggtgtagtggttgtaacaagtaggataatgtgaacagtttagcctttgacaaaactgtaaaacaagtttgtcttggccttttttattctcttcctatccctattcttcttcctacatccttttttctacttttacatctcccttactcttataagtgatgaaattttctcatactcttttttgactactgggccccacagtgtagactcataaacaggccaaatctctatgggcatatattactgttccagatctttctgttctttccaccataaaaaacttacgttgcctgggttttagttcattgatcctcattatgtggctggttagcattctaaaaaagttacacaacaaattcaattttaggtatacagaagttcaatcttaggtataagtagaaaataacaccatccttgatgtagcgaatgagacccatagttacctggccttagtattctatttttcatgtgcctagactcatgtctt

SEQ ID NO: 848067 - DNA, 515 bp, Homo sapiens
ggccgctctgggagtgtctgtcttatgcagttgtagataagagatgaaatacgccctggtctcctgcagcatcctcaggcttgctaggattaggaaattccagcctggtgaattctagtcagattagttctctgctcttgaaccctgtttcctgttaagatgtttatcaatgacaatgcttgcacagcaggacatggaacctcattagtaattctaattttgccctggccttgtgatcttgctctgcccccatttgccttgtgatttttattgcctttgaagcatgtgatctctgtgacccacaccctattcgtgcactccctcccctttgaaaatcgctaataaaaatttgctggttttgcagctcaggggcatcacggaaactgctaacatgtgatgtcgcccccrgagacccagctgtaaaatttctctcttttgtactctttctctttatttctcagaccagccaacacttagggaaaatagaaaagaacctacgttgaaaaactgggggc

SEQ ID NO: 848068 - DNA, 513 bp, Homo sapiens; identical to SEQ ID NO: 843251

SEQ ID NO: 848069 - DNA, 626 bp, Homo sapiens
ctttccgcctctagaactggcagaaataaatttgtgttctttataaatcatccagtcttaggtattytgttatagcagcataaattgactaagacactgacttagcaggattatctggtaaaaatcaactttaaaaggaggtacgcagttgagcctatgagaaggttcaggaacttcactaaagattacccaagcaaagaatccttgtcagcctccctcttgtttaagaaaataagacacatcctttttttctttgaatgttataagtccattttctcatttaactagtttttcattaatgaggaagtgacttatctgttgcgactatgtagtagaaagtatttgctgaattctcatagcaggtaggcatttaatgaggggaggttggtgtctataaaaataaaagtaaaacaaggttaatagttggaaaaatctataaactcagtttctgagtccacagggcagccagtcaagatttttataagattgccaactagacacaaccaggagaaatgtctgccactgacagactggtactttggaaagactgacacactctgagcatatcttcagagggaaggcattgagagtgggtagaggaaggacatagatgtcgtactaaaggc

SEQ ID NO: 848070 - DNA, 633 bp, Homo sapiens
ggttttaagttgtagtattctcactgacatttattctaaatagtccataaattccactcttatttcctctttaacacaagtatttttaaactttcaaatagggaggagggcctagcctttttgctgctgctgttaatatttccttttattgagctgtaattagaaaacataaaataggttttctaattaacttagaaataatgttttccagccgggtgtggtggctcacacctgtaatcccaacactttgggaggccaaggcgggcggatcacgaggtcaggagttcgagaccagcctggccaacatggtgaaaccccgtctctactaaaagaaaaatacaaaaatcagccaggtgtagtggcgcatgcctgttatcccagctactcgggaggctgaagcaggagaattgcttgaacccaggaggcagaggctgcagtgagccgagatcgcaccacagcactctagtctgggcgacagagcaagactccatctcagaaaaaaaaaaaagaaataacattctscaaagatatgggcagattgttccctctgcctaactgcccttcctcagtctatccaactggcaaactcctattcatcctttaaaaaagctggattatcacatagtctaggac

SEQ ID NO: 848071 - DNA, 648 bp, Homo sapiens
tacatggctttatcagtttttttcactggtgtcctttttttgttccaggatccaattcaaaatatcgcatttcattcagttgtcgtgtctccatagygtcctctggtctatgacagtttctcagtctgttcttgttttttttttttgtttgtttgtttttggtttttttttcccagaagtccattaagccgagaatgaccttgttttttatgacctaacagttttaaggaatactgttgaatgttcctcagtttgtatttgtctgaagttttgcttatatttagagtggagttgtttttggaaagaacaccagagtttaaatgcctttcttatcagatcatatcagaggtacctggtatccattggcatccctggttttgtgaaccttcatcccttggttaaggtgatgtttgccaggttttccccctggcaagttgctgcctttcccttttcatagtctgttctttggaagactctagcccaccctcaagtaggtgggaagaattgagctatagctcctggaaggagagggtgtatctctgtatatcatttgaaattcttctgtaaagatttgtctcttatcccttatttatttattcagtcacttatatcagtatgaactcatgcatttttatttaataatttgag

SEQ ID NO: 848072 - DNA, 546 bp, Homo sapiens
cctggtccccttgatccctcatcagcactccaagcgtcctcaccttgacatccccaatctggtgcatggcgcaaggcaggttgttcatctggtccagaaaggcccggagctcagtcagggtcatctgtagaccagccaccctgtgggggctatgaagtatcacatgtgaggtttcaggtccaaactcagtgccttccctccatgtctatgctaagactgaacacctttcctcactacacctgtccaccttgatctcgcatatttcaaatttgccccaattgcccaggttagagggaaggttttaaattatagagcatgttcatattatgaggggaaagaattagaaactaatgggttgtaataagagctacactttgcaatccatcctctactgtgaactctaaagctgtgttagcagggatcaggtctatacrtctttgtcctgttcttacccgtaagcctcccacaactcttccctgcccacaaaacccctcagcctctctctcaggccacttccaggtactgataaaaaataaacacttctag

SEQ ID NO: 848073 - DNA, 648 bp, Homo sapiens
tacatggctttatcagtttttttcactggtgtcctttttttgttccaggatccaattcaaaatatcgcatttcattcagttgtcgtgtctccatagtgtcctctggtctatgacagtttctcagtctgttcttgttttttttttttgtttgtttgtttttggtttttttttcccagaagtccattaagccgagaatgaccttgttttttatgacctaacagttttaaggaatactgttgaatgttcctcagtttgtatttgtctgaagttttgcttatatttagagtggagttgtttttggaaagaacaccagagtttaaatgcctttcttatcagatcatatcagaggtacctggtatccattggcatccctggttttgtgaaccttcatcccttggttaaggtgatgtttgccaggttttccccctggcaagttgctgcctttcccttttcatagtctgttctttggaagactctagcccaccctcaagtaggtgggaagaattgagctatagctcctggaaggagrgggtgtatctctgtatatcatttgaaattcttctgtaaagatttgtctcttatcccttatttatttattcagtcacttatatcagtatgaactcatgcatttttatttaataatttgag

SEQ ID NO: 848074 - DNA, 597 bp, Homo sapiens
aagccctatttccaaacttttatttttctccttgggggtcctttaaactttcctttctgtggagctatttgygggaaagagttttcatttggtgatctctcctagtcactggttgctaatcagtgatgcaagattctatgctacaccaaatgcaaaggaacatattcatggtatttgcatttaaaaatgtcatcatataatatagtgacatgctgtaccatttgttcataattcattaccagtggatacaaacatttcaatttaagggtctgtctgtgcctcattatattacgttgaagcaagaatattcgctatagtttagacctctgaaataactaagcaccatggaatgacacaagaacaggatatcattcttaattttaaatagtttcctttgttcagcttatgtgatggttgacctttatttaagtccattgtgtttcattgtactgtgcttactgagctctcatcattgagaaccactgaatagtttcttgagcttaaagatgaatgttacactgttgtgatactatgtcagtggtgacattctggattcagtttttatagttgtgtcatgggtttttgtttcctacactt

SEQ ID NO: 848075 - DNA, 601 bp, Homo sapiens
ttaccatcaagggtgttgattccaacatgtgctgtgggatccccatgagcaatctccgtgactttccagtcattaagattaggcaccgagaagaggaaaaggaataaaatcaaactgatatttctggctgggaaccagatgctgaaatggatgaagagaagtcatgaaactgaaagagcactgaatcactctgcttaagtgtggagcagaggatcacatggaagcagtgaaaaagctccagaatgtagccaggcatggtggctactgcctgtaatcccagcactttgggaggccgaggcgggcagatcacgaggtcaggagatcgagaccatcctggctaacacggtgaaaccccgtctctactaaaaatataaaaaattagctgggcgtgtggcgggcgcctgtagtcctagctacttgggaggctgaggcaggagaatggcgtgaacccaggaggtggaacttgcagtgagctgagatcacgccactgcactccagcctgggcgacagagcragactctgtctctaaataaataaataaataaataaataaataaataaataaataaaataaaataaaataaaataaaataaaaaagaa

SEQ ID NO: 848076 - DNA, 553 bp, Homo sapiens
aaatgaatatttaatttagtaaggtatacaaaacaaaacatgagagggagcatagctattcctaaatggaaaaataaattggtatactacaataggaagtatgatttccttttaatatgtttgttttatagaagttactaattgcagaaaccattttgatttaacatcatcaataaaatcaatgtgtgaacaatatcattacattcgaaagatgacatgtctaacaaaatggcactatcaatatatatgtatttaaagacagtctccctttaactttgctagacaccaaaagtttaaatgcacaatgccaagggcagttaagtgtcaaaatacaaatgtatcttaatattttatttaaggcttctattgttaaaaataatgcatctaacataataaagagggtatttgaaatttcatatttcaatatccccatggtttgccatagaagacaaatataaatacatgcatgaaattgtgatttwattttcttggttactttttggttacagctcatcactttgcattagtgcatacctccaaacctccaataatc

SEQ ID NO: 848077 - DNA, 425 bp, Homo sapiens
aaaaaacagcaacaacaacaaaaaacaaagtttgtgtataatacatgccaagagggtaggaataaaataccattygctgtcaagatatatttctaaacaagtttattaggaaggcagtagcagatatgaaaaaaaaataggatagggcactggaaataataaatttaaatcagcatttttttaaatttagaaattcataatctccaaccaacagaactaatacttaagtataatttccatggtaatgattatttaaaaccccatattgactatgaatttatagatggtgattccatatgcaaaaaagcaaacttgcatttataatagaaatgagaacaaagcaacagaatgtgtaatatgttgaaggagtcattaactttagtggaggacagtcaagttcctaaagattcatttatttattcatt

SEQ ID NO: 848078 - DNA, 604 bp, Homo sapiens
actcagcaattgtcatatttttctccacttttccctaagtcaataggcaaccatgaagttgacaatgttgctgataacattgtcatactcaacatcatttcccacaaagcttaaacctctacagaaactcagcagtccctacaacacatccttgaagaatgagaggggtgtcaataatttcagctgctcaaatggaaggctctgacatcaaggaatattaagtggcacattgaagggaattctactattaagtaatgaaggtgaggaaaacaatttctcaatccacggttatttctttgttatactaagaaccgtgcccaatacttatggaacaaaataagcctatcatttggacgtctcctatcagcctgaagcctgatgtcatataaaccaataatctgtgattgaatttttcagctttcagtgttttatttttagcataatatttggtattgccatacgtgacttattattctgttcaatttaatcaaattagagaataaacaaaacgacaaacataatttctcttaatgtgygtgtgtgtttttcttttttgagacgaagtttcattcttgttgcccaggctcgattcgagtgcgatggc

SEQ ID NO: 848079 - DNA, 571 bp, Homo sapiens
ggcaggagaatcacttgaacccgggaggaggaggttgcagtgagctgagatygcaccactgtactccagcctgggtgacagagcaagagtcagtctcaaaaagaaagcaaggagggaatgggacaattcataaaagcaagccccagcagttctagttaactgtgaactgaaccagtaagatgcacattgatttaacttcggaaataatttatgtgctggtttcttaaatgactgctacatattgccttcttacctgacgatggagtgcagaatatggggacaaaaataagagcaattccaaggaaatgctttatgcccgagtgctaattcagaaccatactgaaaaaggagatgcaagagaatgctcagcgtagattctaggccatccttaaacaatccagagctgaagagccgtattcagagataaatttattctgcgttcaatgtttcttgacctacttctcgtaaggaaaattctgcctgaataccagaaggaattcatttttcactttagcttgaaatttaccttaagataaaacacaatagttgtataaaaatatgccttatttgg

SEQ ID NO: 848080 - DNA, 478 bp, Homo sapiens
aaaagattttatggattcaccagactgtcctagtgtctgaactttccaaatctagtcactcctctggttgraccatattggaggcagctgttcaaatgtcaatggcatccatcttgaaagaataagttatataaccctactggtcattaacaccatagctcctattagatgattaggttcctcagaataagaagaactccacctagagggaggccccaatcaagatgccactttgaattttggccagtttggttctgcaccacaaaatactttgggacatgggaaaggagtgtcttcaaagcatccatcatgcaaatacctgtagctggtagacagttttgcccgtaaaggtttcaatgaagagctttaggataggattctacctaacttggctggaagcttaaggccattctcctgaaatcatacctctatgagtctctttgaagttctctgtttctctggcacatttttgctttaa

SEQ ID NO: 848081 - DNA, 671 bp, Homo sapiens
attctcagggaagggagaactcaccccaaaggagagcactaatttattcacgagratcctgtccccatgacctccctctaggccacacctcccaacactgccacattgggaaacaaatttcaacatcagttttggcagagacaccacatccaagccatagtgcacagtgaaataaagcagtattcggctgttagatgatactgttattatcactactgtacagagatgacttccctttaggggtcataaaaggcctcagagaagctgtactgctgcgattttatgattttgtgtaactcgtggactaaagataaagcaagggctgctctgccctctggggaaagaatcttaactctaaaagggccaattagattaaacatcctttcttgaaagaataaactaacaactaaatggaatttgtattttgtaaagaaaagcaagttaggttttgcttaagatgaacttagaatccatttccaggtctttttcttcatagaaaccattaagctagactctagaagtaaatataacaggtggtaatagtgtatatgaggtaaaatagagaattgtggttttattgagaaaatacaagccagaaatagttctaaagcacttcttcattctagacatctaatcaatatttcagatggtagaatgacagaaaaaaatcc

SEQ ID NO: 848082 - DNA, 445 bp, Homo sapiens
agccaccaggcctatctgattttttatttttgtagagacagggtgtcactatgttgctcaggctggtctcgaactcctgagcttaagcagtcctctcgccatgacctcccaaaatgctgagattacagtcatgagcccccatgcccaactggtagtttcttacaatgttaaatatacacttaacttaccatgtgactcagcagttgtatctttaggtattacccaaaagaaatgaaaacatacctccacacaagaccttctactcaaatattcttagtagcccagaactggaaacaacccaaatgtccatcagctgataaatggagaaacaaattakgatacatccatacaatagaacactacttagcggtaacaaggatgaatcttaagggcattctgctaagtggaagaagccagatacagaagactgtagctttcaattcta

SEQ ID NO: 848083 - DNA, 445 bp, Homo sapiens
agccaccaggcctatctgattttttatttttgtagagacagggtgtcactatgttgctcaggctggtctcgaactcctgagcttaagcagtcctctcgccatgacctcccaaaatgctgagattacagtcatgagcccccatgcccaactggtagtttcttacaatgttaaatatacacttaacttaccatgtgactcagcagttgtatctttaggtattacccaaaagaaatgaaaacatacctccacacaagaccttctactcaaatattcttagtagcccagaactggaaacaacccaaatgtccatcagctgataaatggagaaacaaattaggatacatccatamaatagaacactacttagcggtaacaaggatgaatcttaagggcattctgctaagtggaagaagccagatacagaagactgtagctttcaattcta

SEQ ID NO: 848084 - DNA, 592 bp, Homo sapiens
tttataagttttgacacacatgtatacccatgtgaccatcaacacattcaagataatgaaccatcccctttccccctgccaaatttcttcattctcctacgtaatccctccctcktgtcccttgtccttagggtttctgtccctagagattagtttacattttctaaatttttatataaatggaatcatatagtatttactaattttttttttggtctggcatgttttactatggataattattttgagattcattcatgtttttgcatgtaaaagtagttcactcttttattgctgagtagtttctattgttacacattttgtttatgtgttcacatgttgatggaaatctgggttgtttttaggttttggctattacaaatcctatgaaaacatttgtatgcaaatctttgtgtggtcatatgcttttatttcttttgggtaagtacctctgtgcagaatggagaggtcatgtggtaggtgtctgtttcactttagaagaacctaccaaattgtttttcaaagtggttataccacttagtcttagtttgctgagtgttcttatcaggaatgggtggtgaattttatcaaa

SEQ ID NO: 848085 - DNA, 541 bp, Homo sapiens
aaataaagcctagtctctacggaaataaacaaaaaacaaatacataactgagatgaatctcagaacactggataattttggttyggaaaagtgtttctgtttgggacaagaccttctttgtctagttaaagttactgatgaggctaacaggacacatatgctatttatttatttttactataggcagaatattatgtctttatcttgtatcttcaaagaaactaatagctgtgtaatatggggggaatttacaaaacgtatttaaaggcatgtttatctgttaagacttaactggcctacaaaatagtcgtttgttggcaaactatcaagtttttatcggggaatttagacaagtctgttgggtcacagaagagggtctataaattggaggactgaaagtggatttacagttcctgatcagtctagtaactcatccttgcttttagatgccttggcttaaagacctcagctcttgaggatatattatcacactgccttcagaaaagggttgaggagctcccctttcaaagaactggcctac

SEQ ID NO: 848086 - DNA, 572 bp, Homo sapiens
ttcctagtagagagcagtcaatggatacattttccaaattgaattgacttcatgtaagtgaattttttaataaacagcaaatttacacggtgaatattaccttttcakaatctgtttattatattaatattgatttctcaacattatacctctattaaaaactctttgttaatgaagggttttgacactaaaaaataaactaatatatagcataacactgaagtttaagaaaattattgtatgaaacattcagtaaaagcaagcacttactaccctgtcagtccaaaatgtaatattgtgcaatagcctttaaattgtattgttataaaaatgttgcttaactgggcccttaggaattaataacggttctaaaaataaactaaatggattattttccttggcctccattttatgtcctaaatggtatttctgtgttcagtcatcttttttattgcgaaaatttgtctaacatctaggaattgctttgggaaaagacattctacccataaagttgaatttctttcttttttttctcagaagagaggaaattaggttacccacaccaccaccat

SEQ ID NO: 848087 - DNA, 572 bp, Homo sapiens
ttcctagtagagagcagtcaatggatacattttccaaattgaattgacttcatgtaagtgaattttttaataaacagcaaatttacacggtgaatattaccttttcagaatctgtttattatatkaatattgatttctcaacattatacctctattaaaaactctttgttaatgaagggttttgacactaaaaaataaactaatatatagcataacactgaagtttaagaaaattattgtatgaaacattcagtaaaagcaagcacttactaccctgtcagtccaaaatgtaatattgtgcaatagcctttaaattgtattgttataaaaatgttgcttaactgggcccttaggaattaataacggttctaaaaataaactaaatggattattttccttggcctccattttatgtcctaaatggtatttctgtgttcagtcatcttttttattgcgaaaatttgtctaacatctaggaattgctttgggaaaagacattctacccataaagttgaatttctttcttttttttctcagaagagaggaaattaggttacccacaccaccaccat

SEQ ID NO: 848088 - DNA, 635 bp, Homo sapiens
gataaagaaaggataaagaagggggtatgagctctggattggttggtttatatatgaagacatacatgcaggcaagttgtttatgtccaggaattagcttatcctgagagggacagtccctccaggggcaacaargccctggatgtcaaagcatcaaattcagaaaataagagacatgactaatacaccattaaagtcaatattatcattaatattattcgacattatcctgaagtctctagccaatgcatacaacaaaaaaaacaataggatgaaaaacgatttgaatgaaaaagacttttaaattctcagatgatgtatctacttaaaatttaaaaacaaagtcaacctattaattatagaaaccaaaaactgtcctatatactatataccagtgatgctcaattataaaatgtagtataaaaagtgattcacaatagcaacaagaactacatgtctagaattgatagacaatttcaaagtctgtataaggaaagatgtaaatgtttattgcagataaaaaagaaaacatcaggaaggtaagagttataggccatcaccactctacctagttccaataaccacgattgaattaaacgacatgagttccccaacatggttctaatttcagttat

SEQ ID NO: 848089 - DNA, 633 bp, Homo sapiens
agtttgcattttcctgatagtagtgagtgagcatctcttcatatgttgatcgacaatttktattccatcttctgtgaattacctgttcatatatatatatatttttactggattaacatttacagacattctgtatgtaatccaggtattgctgtatatgtaatatgccttagtctgtgacacttaacctttcttacatctttcttgtacaaaagcatttaattttcactagttaaatctgtcagttttcttcattatagattttgggctaaatgttatgcttaggaaagcctcctccaacactaggattatagaaatattcccttataatttcttctaataattctacagttttatttttatgctgaacactaataaacttggaaatgattcttatgtagaggaatatatatttgtttcgttccagttgccccaaaacttttcactgaattgtttaccctttcctaactgatctgaaataaaatcccacctcaatcattgtaaattttgacacgcaagtcagtcattttctggactttttatgccactccattgaacaatttgtcttctctgagacaatattgggccagttaaattactgttgcttgaaggtgtgtttcggtatctggtctg

SEQ ID NO: 848090 - DNA, 506 bp, Homo sapiens
caattgaaaatggaaagtctcaatcttgggctttaccccagctttgcccttgacttgtggtgtaactttacatggaacagcttatccctcactgakttagattggtaaatcccagtgcattgtattattcttatgtatagttggtaaatgagaagtcccaatgcattgtattattctcatttcttttcccaccatttggccaaaaatgttacaaccatcccaccttcagcaggaagactgttagaagtgactataaatcaggacagcctcctgactagcaatagtaaaagtcagttacacgaagcagaatcacacagtcactaatcggtgtcagaaaaacacagatgtccttggaaataaaaccatgaaaaacaaccaccacccatgagtctgtctgagtcacagcactatggacaattccatattcttgtttacttgaatttttctaatttttttctatagaaaccaatgttacttgaatagtaagaaaactggaaataattctt

SEQ ID NO: 848091 - DNA, 515 bp, Homo sapiens
ccacacaaaagccagtctgtgcatcctgttcagacagtggctctttcccgaccatccttcttaaaaaaggcaccactaatccccatctcattggaaactttacctccctctgctttttctccaaaattctcagcacagtctacgtaaactgttcattttatatatttatgtctccatcatcccctccccacactagactgggagctctgtgggggcacagacgtatctgttttgattaccaccatatcccacacatctaaagcagcgccagggcacacagtaggctcctgaatatctgctgaatgaatgaacacagaaatgaggaaggtatttcctgcaagcaacctcatctcagtcgtcacagaagaagctgtcgttgtgtagaaacccacgcacaagaaggtgctatcactgccccacycctgtccgtccctgctaccatcgagggtgtctttcattgttgcattttaaatgagaaaagacagtgtctaacatgaacagaaggagctctatcg

SEQ ID NO: 848092 - DNA, 583 bp, Homo sapiens
aatggcaactccattcttccaggtcctcagatcaaataacctggcatcagccttgatctcttatctcctatctcccatccaaaatatggtaaamcctgttggctcttccttcaacttatctccaaaattctaccccttgtcaccaccttcactgctacatcctcaaaccaagtttcaccttggttattgaaactgcatcctaactaggcttcctgattccaccattactgccttatattcaccctccactcagcagcaggaagatccttccaatatgtaaacaccctcttaggcttagtatcctccagtgactcccactaaatccttacaatagcttacgaggtcctacacaatctggcccagatcacctgtctgaactcatctctcccatctcctcttcctcatgaccctacaccagccatacctgcctcttggctattctggaaatgctaagaatgctctcacctcagggcttttgcacttgctgttccctctgcttggagcactcttcctccagatctccatatggcttctttcctcacttgcttcaagcctatgctcaagtgtcaccttgttggagata

SEQ ID NO: 848093 - DNA, 655 bp, Homo sapiens
tggttttaactgataagtggaataaataaagaacagataaggatcctactcaaaaaagaatgctgtgataaatatttttgaaaactgatcatctccttgtaacacatacaaccactggattttttctcttcataaataccgacttctgtgcactatgtttatttaaggtgatgtgtatctctacaaacagaagactataaagtatatccactggtatcaaaccaaaaatcaccctagaatgcaggggtcaccagccaaattaccacagagatcagagagctctgggcctatttacaccatcagaaacagagcaccagccagaaggaaaacatcctgcacctgagaactgatgataaatccatcatcatcccacaggagctaatgcagttgagcccaatcagagcaacaagctgaacgaacatgaccttatacatgaagtcagcctttttactcatcaccctagctagtgtcaaggcagaaaggtcaagcaaagagcggggagcaaagaaattttgggatgtctatctcagcattgctacgaagttgagaggacaaatcctcaaaccgtgactctccataactatcttgcagggtgtacagaccctcaaggagcattgtatttgtctgttttcacrctgctgataaagacataccc

SEQ ID NO: 848094 - DNA, 634 bp, Homo sapiens
acaaggagacgaaaacagagtgtgggtcacattctttacacagagttcactctcatttttaaagaagaattgattctattttttagctgatcagcataaagtgctttattaagcataaacttgtaccatgtactttatcttatttatttaagatggatgaatctgttttatgcatatattaaaaagttatcaaaaaagcaacacccagtgcttcatatattacagaaaataagtgttaattcaataaacaaactagaaattcttcagtatgccaaagacttggctttagatgaactatcaatttaattccattcagcaaacatctgttaagcatctgctggtgctgcctttactgaatgagctgcttcctgcagatcgaaggatgagctggactaggttctgacccagggcaagtctgctccatctgacttcttataggtggtaaaatgcacaaatactacaggctaaacgaagtactacaatgaaagaagtctttcctggcaaagtggaccacgggacttaataagtctttcatttcaaatctatgtcatctcataaatagcagagcaatgtgtgacaacacaaagactttattyccttcatagactccactaggggacacttcccagaagac

SEQ ID NO: 848095 - DNA, 632 bp, Homo sapiens
gggcctgacaaactcttttccttccatgcctttctaggctgacagagggcagctggcagggccccaggccagcttggcattttaaagtacagtctacttttggttatcagcagtacttacgttctacaaagtcactgcaactgctgaattagtgaagaatgaatcactgcttctaggccaggcatgcagatgccgcatgtttaccacttgaaattctaaaggaaactgatgccaggagatgctgcccgaggcctcacagggagttggtggctctgctgggacaaacacaaggcccctcagccttgtgtacttctactctgctcaggtacttctactctgctgagctactttctgtgtcacgtggtgagaggaaagtgaacttcaatcaaggcactgagttcccctgtctgggctctgccgcatcctctgctgggtgaccttgacaaagcccttgctttgtaaatcactcatctattaaaggtcaaatcttcaggctggggcctcctgggaaagatggccacagtgacttcagaatcagyggaagtcgtcccgccactatgtttcccaatgagctggagaggtaacctgaagaggaggcaaccgtgtgcccaggactttctaaactactccca

SEQ ID NO: 848096 - DNA, 583 bp, Homo sapiens
tatcctctgaagctttgaagccacatattgacttcttttctttagctctgaaagtcctagatggcactttcttccaatagaaggctattttgtctacattgaaaatcttgtgtagtgtagccaccttcrtaaattatcttaagtagatcttctgaataatttgctgcagcttttacagcaggacttgctgcttcaccttgcacttttatattgatacataatggatgtacatattttgggggtacatgtgataatttgatatattaatataatatgtaaagatcaagtcagggtaattgtgatatccctcaccttaaatatttatcttttattgacattagaaacattcaaaatattcttttctattttgaatgtatattagattattgttaactatagtgtatttgatagatctactgatctatcaaacactagatcttgtttcttttatctaactctatacttgtacccattaatcgacctctcttcatcaccttctccaccctacccttcctggactctgattaccatcagtctactctctgtgttcataaaatgtacttttttagctccgatgtatgtg

SEQ ID NO: 848097 - DNA, 583 bp, Homo sapiens
tatcctctgaagctttgaagccacatattgacttcttttctttagctctgaaagtcctagatggcactttcttccaatagaaggctattttgtctacattgaaaatcttgtgtagtgtagccaccttcgtaaattatcttaagtagatcttctgaataatttgctgcagcttttacagcaggacttgctgcttcaccttgcacttttatattgatacataatggatgtacatattttgggggtacatgtgataatttgatatattaatataatatgtaaagatcaagtcagggtaattgtgatatccctcaccttaaatatttatcttttattgacattagaaacattcaaaatattcttttctattttgaatgtatattagattattgttaactatagtgtatttgatagatctactgatctatcaaacactagatcttgtttcttttatctaactctatacttgtacccattaatcgacctctcttcatcaccttctcyaccctacccttcctggactctgattaccatcagtctactctctgtgttcataaaatgtacttttttagctccgatgtatgtg

SEQ ID NO: 848098 - DNA, 486 bp, Homo sapiens
tgggatacttaggtcagggagcagagttggagctagagttccaccctccttcttcctcatctgctcagaaacggagtgatgagaacataaattcagccccaaggagtcaagaaggacctgagaggcaaacactgaacagccagtgccatctcatgccccaccccacagctaccccaagaagtaggtaccctgattattctgttttcagacgaggagttaaggctcagagaggtacccggagttacacagccagtaggtggcagaaccacgatggccagaccccaatcacagccccacctgaaactagactccagcctaggagccttgctttctcctgaagaccccactggactgagaccccaccacctggagtgcatctactgtgctggctaaaagagctgcttgctggaagcmcaggttccctgatgtccgtcttgctgcagaagtccagagcctcatgtcagccgcctcccacaaatccaggtc

SEQ ID NO: 848099 - DNA, 599 bp, Homo sapiens
gctaacacttactgagagtttactgtggggagctgctgttctaagcactttagtcatttaggatctttgagtcaggcataatgttgggaacaagccccccaaaatctagccataaactggccccaaaactggccataaacaaaatctctgcagcactgtgacacgttcatgatggccataacgcccatgctggaaggtggtgggcttaccggaatgagggcaaggaacacctggccagcccagggcgaaaaaccgcttaaaggcattcttaagccacaaacaatagcgtgagcgatctgtgccttaaggacatgctcctgctgcagttaactagcccaacctattcctttaattcagcccatcccttcatttcccctaagggatacttttagtcaatttaatacctatagaaataatgctaatgactggcttgctgttaataaatacgtgggtaaaactctgttggcgctctcagctctgaaggctatgagaccccgatttcccacttsacacctctatatttctgtgtgtgtgtttaattcctctagtgctgctgggttagggtatccccaaccaagctggtgtcggcaagtggtgtc

SEQ ID NO: 848100 - DNA, 597 bp, Homo sapiens
gacctgcattgtttcttttttcctttttttggggacggagtttccgtcttgttgcccaggctggagtgcrgtggcgcgatctcagctcactgcaacctccacctcccgggttcaagtgattctcctgcctcagcctcctgaatagctaggactacaggcaaacgccaccatggccggctaatttttgtatttttagtagcgacagggtttcaccatgttggccaggctggtctcgaactcctgaccttaggtgagccactgcacccggccttattgtttctttaataaatgtgtgtatagtcttatctttgtttctctatatataatatgcccctttttttcctgggtacttttaaaatttttacttaagttttccgcaattttttatgttcttttttagtgtttattttttggatttgtggggttttagaatttgtcaaatttggaaaattattcattattttttgtcagaacccccctgccactagttacacatatgttataacacttgttattgtaccatgagtcactgaggttctgttcatttttttaaagattttttttttcttttttactctctgtgctttagtttgggta

SEQ ID NO: 848101 - DNA, 508 bp, Homo sapiens
gcttgatcccactttgcttttggtatagaagtagaagaatgtctagaaaaatcactcagcaatcccagcactttgagaggccgagacaggtrgatcacgaagtcaggagatcgagaccatcctggccaacatggtgaaaccccgtctctactaaaattgcacactcctgtagtcccagctactcaggagactgaggcagggaaatcgcttgaacccgggaggcggaggttgcagttggccgagattgcgtcgctgcactccagcctggcgacagagcaagactccgtctcaaaaaaaaaaaaaaagaaaagtcactcagcaatagattaccagggtctataccacaattaggaagcaccccagcagttttgaaataaccacagtttatagcacatgctggggtgtgctttgggcttggatattgttcttcacaacttgtggtctgagatagcttagtttttttgtgttttttttccccaaacagttgttgcactaagtagcattttgt

SEQ ID NO: 848102 - DNA, 577 bp, Homo sapiens
cctggccatgtgctggtttgtgcagctgagaacagaatgggaacgggcatttttatttgtccccatcgcccgggagcctggtcggttgtgtcgcttctcaggcaataagcaactgaatggactggcagtggctcttcaggcttttaggtttgctaaaaacaaaacaagccaaaaaagatgtgcctgacttcctctcgtggccaatggcactgcccaagggagcagcggttcctggggccacggtggaggatgcccacctgttcagagtcccaagaagccctgaatcggcacctcgcccaccttgcagcctgtcccccgggagcaggctctggagccccttttcggggaacgctgagcacacctgaagcctccacgtggggtgggcagtgctggccgtggctcctgctggttccacactctgacatgcagggccttggctatgtgtgtcctccagtgaggcacaccccctccagcggaggggcatcctcgtttcctggagcaccctctttccattctcccatgtttgtttttcttttgtttattccacacctttttygggtagtgagtaagcctgtcc

SEQ ID NO: 848103 - DNA, 617 bp, Homo sapiens
tatgccagacgttgtgcatggccctggagtgatgggagtaaacatgaatgacaatctttgatgtcaagaaattcatattatagtggtagagagccaatttaaaaataagtatataatattctttcagagggtgattggttctctaagaaaaataaagcagagaaataagatacagagcatcttaagatggtcttaactgtttagatagatttagatagattcagtaaaaacctaaatgaaatcaggaaacaagccttctgaatatttgggaaagagcatccctggcagagaaaacatcgaatgcaagtatcctgaggaggaaatacgcttgtacaaggaggaatgagaaggcaagggcacctggagctgaccaagtaagggggcaggggttagttatcggtgtctgagaaataggaaggatccagtcatgggcactttatggacttggcaatagttttggatttcattctaggtgtgatggggagctatggacaattcttacttaatttacaatatcactcagacactgtgaggaaagcagtatagaagtgaaagaaaagcagggagaacgttagtgggaayttagtgtaggagagtaaagatagtggctaagatta

SEQ ID NO: 848104 - DNA, 542 bp, Homo sapiens
ggtgaaatatttaacaattttaaaaggtaaactactgttacatacaacaacatgaatgattttcacaaacattatatcaaatgaaacaaagcagaacaaaaaagawtacactgtatgattccatttatatgatgtctaacatcaagcaaaactaactgatagtagtaaaaatcagaaaaaagttgctccagggtgagaaatgtgtactgaacagaaggagggataagagaatttcttggtgtgatgtatgttctatattggagggtagatagataaatgggtagatacggttggtcaaaatatagatataggcatagatagatgtggatgtatatatgaaatagtggattgattccacaaataattattgatcagctactatgtacaaggtactgctgtggacactggggatccattagtgattaacacagacaaaaactcttctttctcaatggggttcacattccagtcagcatgtaattaaattaattagctgcattattatttgaaataggtaacaattggaaacaatctttatgtcc

SEQ ID NO: 848105 - DNA, 576 bp, Homo sapiens
gaaacccaaaccaaagaagttaagaatcacaataaaacaatacagaagctgtcagacaaaataaccagtatagaaaagaacataacygacgtgaaagaggtgaaagacacgctacgagaatttcataatgcaatcacaagtattaatagcagaatagatcaaaccaaggaaagaatcttagagcttgaagtctggctttctgaaataagacaatcagacaagaatagagaaaaatgaatgaaaaggaataaacaaaaccaccaagaaagatgggattatgtaaagagaccaaatgtatgactcattggtgcctctggaaaagatggggagaatggaagcaacttgagaaacatatctcaggatactgctcatgagaattttccccaaattagctagagagaccaacattcaaattcgggaaatacagagaaccccagtaggatacttcacagaaatatcatccccaagacacataatcatcagattctctaaggtcaaaattaacgaaaaaatgttaaaggcatctagagagaaaggtgaggtcacctacaaagggaagctcatcagactaacagc

SEQ ID NO: 848106 - DNA, 576 bp, Homo sapiens
gaaacccaaaccaaagaagttaagaatcacaataaaacaatacagaagctgtcagacaaaataaccagtatagaaaagaacataaccgacgtgaaagaggtgaaagacacrctacgagaatttcataatgcaatcacaagtattaatagcagaatagatcaaaccaaggaaagaatcttagagcttgaagtctggctttctgaaataagacaatcagacaagaatagagaaaaatgaatgaaaaggaataaacaaaaccaccaagaaagatgggattatgtaaagagaccaaatgtatgactcattggtgcctctggaaaagatggggagaatggaagcaacttgagaaacatatctcaggatactgctcatgagaattttccccaaattagctagagagaccaacattcaaattcgggaaatacagagaaccccagtaggatacttcacagaaatatcatccccaagacacataatcatcagattctctaaggtcaaaattaacgaaaaaatgttaaaggcatctagagagaaaggtgaggtcacctacaaagggaagctcatcagactaacagc

SEQ ID NO: 848107 - DNA, 576 bp, Homo sapiens
gaaacccaaaccaaagaagttaagaatcacaataaaacaatacagaagctgtcagacaaaataaccagtatagaaaagaacataaccgacgtgaaagaggtgaaagacacgctacgagaatttcataatgcaaycacaagtattaatagcagaatagatcaaaccaaggaaagaatcttagagcttgaagtctggctttctgaaataagacaatcagacaagaatagagaaaaatgaatgaaaaggaataaacaaaaccaccaagaaagatgggattatgtaaagagaccaaatgtatgactcattggtgcctctggaaaagatggggagaatggaagcaacttgagaaacatatctcaggatactgctcatgagaattttccccaaattagctagagagaccaacattcaaattcgggaaatacagagaaccccagtaggatacttcacagaaatatcatccccaagacacataatcatcagattctctaaggtcaaaattaacgaaaaaatgttaaaggcatctagagagaaaggtgaggtcacctacaaagggaagctcatcagactaacagc

SEQ ID NO: 848108 - DNA, 603 bp, Homo sapiens
gcttagatctcaaagaaccttgcagaacagaagggcactcactcagttcttcacacaccccgaatttttttttttttttttttgagacggagtctttcttcgtcgcccaggctggagtgcagtggcgcgatcttggctcactgcaacttccgcctcccaggttcaagcgattctcctgcctcgcctcccctcccgcctcccgaatagctgggacgacaggcgcacgcccccacgcccggctaattttttgtgttttagtggagatgggatttcaccgtgttacccaggctggtctcgaactcctgagctcaagcaatccgcccgcctcggccttccaaagtgctaggattacaggcgtgagccaccgcgcccagacacacaccctgatttctggctggatctgatttaccggacaaagactccaatatatagagagaggcaacatgtcattgtggttagaaatgtcaactttgccgtcaagctgtcctggttcagatcctcactccaccattcattagctgtgaacacaggcayattatttaactttcccctacctcatggtgaccatgactagagatggtgataatagtagctaactcagaa

SEQ ID NO: 848109 - DNA, 619 bp, Homo sapiens
aaaaaaacccattaaagtagttaaagaaaaaataggaagtcctttatgacttgcagtggggaaggcatttctaactgtaactcataaaagaaaaaaatacaaaagtttggctcttaaaaagtgctytgcatgtctaaaaaaatcaccattaagaaaatcacaggaaaatatttgtaactcatatcagagatcttaaagagataaaatataaatgctcctgggacttaattagcaaatgaccaacaattcaacagaataacaggcaaggaatatgaatagacaatttacagttaataatatataaatggtcctcagatatttttaaatgctcaacctcatccatactaagtgaaatgaaaattaaaagcatttaaaaacaccatttctcacatataagattggtaggaaaatccaagtttgatatacacatcctattgtcaatactgcggggaagcagaaactcccagacagtacaaatgagaatacaaatcaacagaagccccatggagagcaatttagcaataactattgcaccttatctttttaaaaaggactttgtcagacacttttcactgtttaccatgtgaaatcaagatgcatcttacaatcaataacattg

SEQ ID NO: 848110 - DNA, 643 bp, Homo sapiens
atagacaaactagtggctccccaaaggtgttcacatcctaactgcttaaacccttgtaaatatggtacattatacagcaaaagggattttgcagatgttattcaagtaagaatttttaaatggggagattattgtggattatctggatgcacccaatgtaatcccagagtctttataagggaggcaaaagggtcagaatcagagggaaatagacaaatgagattattattattaaaaaggaaagaatcaaaagagtgaagagacaacatgcagaatgggagaaaatttttgcaaactatgcatttgacaagtagttaatatccgaaatatataaggaactcaaacaactcaatagcaaaaaataaataaataatccaatttaaaatgggcaaaagatctgaacagacattcctcaaaagaagacacacgaatcgccaataggcatatgaaaaaaatactcaacatcactaatcattagagaaatgtaaatcaaaaccacaataagatattagtacagccactatggaaaacagtattgaggctcttmaaaaaattaaaaatacagctgccatatgatccagcaatcccaccactgggcatatgtatccaaaggaaagaaaatcaggatgtcaaagaggtatct

SEQ ID NO: 848111 - DNA, 541 bp, Homo sapiens
agcattttatgctgtttttttaaatatagtcactactatatgtacttgcttttatgttacataagcttttaatatataacttaatctctgagatgttatttggttgagaggcctcagttgattaaacayagattttcttattataaaatcagaaataatagtacttgcttgtaataaacggaaaggttaacattcataagattcataatctttgagcagttacgtatacgcaaaataattactgtaattaatcttagatgatagtccctggtttgagaaaaagtttggtttgacatttagtaattaagccttattgcatgatacttccttgactcagcaaagccacatataatataaatcaagtgtagaggactttggtttttaaatgttaaaaatataattggagcagataggtacctaaaatatgctcttataataggaattaaaagccatttagtaagtccacattcatttcctatttgattgctaaatatttaagagtttttcagttatggcctgtctcacagaggaagtatgatta

SEQ ID NO: 848112 - DNA, 636 bp, Homo sapiens
atctcaggacaagtgtccttataagagtgaaacaaagatttgaaacagacaggaggaggcaacgtgaccagggaggcagasactggagtgatgcagccacaagtcaagaaatgccagtgggcaccagaagctggaagtgacaaaggaaggattccccttagagactccagtgggacagcagcactaccaacatctcgattttgtacttctggcctccagaactgttcaaggacacagttctgctgttttaagccaagattgaggtgatttgttacagcatttacaggaaaaaatacagcacctaagaagtagtcagacagatgagggatctgagtcccagagagggggctcactcacccgaccccacgtcaaccactgggccaggacactcgggtctctctgacgccaaagtgcatgcagttccgtagtggcccagtgcacagctcagaagggggacccaccgggacctaactggcctcaggctgtgctaacgcaaatatagattccgaagtgaggctgcagtgggcttgctcctgtctgggctgatcagacccccacctgcacagcggtgtcccattcttagcttttcagggggccagataaagtgggcattctgcctaaagaagtgaagatgtg

SEQ ID NO: 848113 - DNA, 533 bp, Homo sapiens
  misc_feature 1, 2, 3, 4, 5, 6, 7, 8, 9, 10, 11, 12, 13, 14, 15, 16, 17,18, 19, 20: n = A,T,C or G
nnnnnnnnnnnnnnnnnnnnaactttggtaggattctatattcaactcaaatcctactaaacagaagccccttgtagagtacaggmataagcagagtaaatctaaatgaaagtaactgggggatgttggggaggcactagactagcctggaccccctccagctaacacattccctaaattctggaaacagtgcatggacagtccccagacgcaggggaaagtcttggaaggttcctctcctatcttcggtgtaggatagggagagggagggatgatctagattttcttaaaaacaaggctttattcatgttttgttactatgtactgtgtactgcaacactgtgtcagcctgttctttgaatcagagggggatgttctggaaaggatctgggccgtggagccagaggtagcttgaatgccagctcttgttagctttatgaccttggacaactaatgtaacctctcagttttctcatcttaacacacagataatactgaccttgaagggtgttgtgagaattaaattaactagt

SEQ ID NO: 848114 - DNA, 533 bp, Homo sapiens
  misc_feature 1, 2, 3, 4, 5, 6, 7, 8, 9, 10, 11, 12, 13, 14, 15, 16, 17,18, 19, 20: n = A,T,C or G
nnnnnnnnnnnnnnnnnnnnaactttggtaggattctatattcaactcaaatcctactaaacagaagccccttgtagagtacaggcataagcagagtaaatctraatgaaagtaactgggggatgttggggaggcactagactagcctggaccccctccagctaacacattccctaaattctggaaacagtgcatggacagtccccagacgcaggggaaagtcttggaaggttcctctcctatcttcggtgtaggatagggagagggagggatgatctagattttcttaaaaacaaggctttattcatgttttgttactatgtactgtgtactgcaacactgtgtcagcctgttctttgaatcagagggggatgttctggaaaggatctgggccgtggagccagaggtagcttgaatgccagctcttgttagctttatgaccttggacaactaatgtaacctctcagttttctcatcttaacacacagataatactgaccttgaagggtgttgtgagaattaaattaactagt

SEQ ID NO: 848115 - DNA, 607 bp, Homo sapiens
catgtatgttcattagtattaacattcaagacaagttaaaagaaatatcttttcaagccctgaggatacaaccaagcagtgaagaaagcacgatgtcacattaagttctttatgcttctttagatctcgctctataaaactaacatttctagattaagcataagagaatttagtaaatcttggtggggtgcggtggctcatgcctgtaatcctaacactttgggaggctgaggcgggcagatcacttcagatcaggagttcaagaccagcctgggcaacatggtgaaaccccgtatcttccaaaaatacaaaaattagctaggcgtggtggcgcatgcctgtaattccagctactcaggaggctgaggcacgagaatcacttgaacccgggaggtgccagttgcagtgagccaagatcacaacactgtactccagcctgggcaacagagcaagaccctatctcaaaaaaaaaaaaaaaagagagagacagagagaattcagtaaatctcatgcttatttgttttaatagtataataaaatgattctaaacttcatatgacrgaataggtgggtaagactaaaagcactgaaaatgaagagtaataaa

SEQ ID NO: 848116 - DNA, 627 bp, Homo sapiens
ttttctatgcctgaaaatggaattgctctggttttttgagtgacttttcactagagggccttccagttactcctgtaagctgcctaacctggcacaccaygcccaagtgtaaccgtgaatccaaatgagtgggctgacctaagggaatgccaccaggcctcatcctgagcccaggctcacgctttgccctcctgggaaccttggcctgtgcatctttccttatctgtggagtcacgtctttggagcacctgggcttaggaagaatgattagtgaatctgtgtaagccaagcaaagttcaaagacctgcccagtcttcatttccaaacaatctcgtatctatgagacagtggccggcagcgtgactcagcctgaccccagcctcagtaacaaactctggcaaagacacgcggggagaggctgcagcgcttagaacttggagccatggtcacctgaccccggaatgaaacccgataaacaagcatttactgaacacccactggaagtgcttacaaggcactaagctaagcaccatcaagaaccttgatctcaaaggctgcaccacctctgtggcaggtgacggaagggaatgcttttcccatgcaactgcctaggaaagaaatcccaga

SEQ ID NO: 848117 - DNA, 627 bp, Homo sapiens
ttttctatgcctgaaaatggaattgctctggttttttgagtgacttttcactagagggccttccagttactcctgtaagctgcctaacctggcacaccacgcccaagtgtaaccgtgaatccaaatgagtgggctgacctaagggaatgccaccaggcctcatcctgagcccaggctcacgctttgccctcctgggaaccttggcctgtgcatctttccttatctgtggagtcacgtctttggagcacctgggcttaggaagaatgattagtgaatctgtgtaagccaagcaaagttcaaagacctgcccagtcttcatttccaaacaatctcgtatctatgagacagtggccggcagcgtgactcagcctgaccccagcctcagtaacaaactctggcaaagacacgcggggagaggctgcagcgcttagaacttggagccatggtcacctgaccccggaatgaaacccgataaacaagcatttactgaacacccactggaagtgcttacaaggcactaagctaagcaccrtcaagaaccttgatctcaaaggctgcaccacctctgtggcaggtgacggaagggaatgcttttcccatgcaactgcctaggaaagaaatcccaga

SEQ ID NO: 848118 - DNA, 537 bp, Homo sapiens
ctgatgggcttccctttgtgggtagcctgacctttctctctggctgtgcttaacatttttccttcattcaaccttggtgaatctgacaattacatgtcttggagttgctcttctcaaggagtatctttgtggtggtctctgtagttcctgaatttgaatgttggcctgccttgctaggttggggaagttctcctggataatatccagaagagtgttttccaacttggttccattctccctgtcactttcaggtacgccaatcaaacatagatttgatcttttcacatagtcccatatttcttggaggcattgttcatttctttttactcttttttctctaaacttctctgcccactttatttcattaatttgatcttcaatcactgataccttttcttccacttgatcaaatcagctgttgaagcttgtgcatgtgttacrtagttctcgtgccatgattttcagctccatcaggtcatctaaggtcttctctacactgtttattctagttagccattcgtctaatcttttttcaag

SEQ ID NO: 848119 - DNA, 594 bp, Homo sapiens
cgtatcgagtgaacaatgtgtactaaaatggacagatgagaggtatacattgggatgtgaattgataatctagcaggttgtggggctagagggctttgggaaaagacaaaggaagaacatacaaacaaataaaataatactgtctttcaaagactaaaacctgtttggaaagagaggtagagaaagcaaacatataggatcacactgagttgatattttcccctagatttcagactttaagtcctctgaccttctctactctgagaagaccccttctcttctctatttacataagatactgtaagtctatgcattttgttctctataggatgttcacagggaaagatataggcatggttcaatacatagatttaaaatgaatgcttgtaactttggttcccttctctccatttccttaatgtggtgactaagtacatttctataaataaaaaggctgtagtacacatccttgatagcagcagtagcaaacatactggggagactggatctcactctggtgtctgtcctgggacacaagtgcctctatragaggtgtgtaagacaacttcaaagggaaaaggaatataggtaaaa

SEQ ID NO: 848120 - DNA, 546 bp, Homo sapiens
aattgttacaaaatgtttacaaaaaactatattcatagaaattctgcatgtccacaaagggcatcccctgaatggcccagagaccagtgtgtgggaaccatgttgagtgggagtggggggcgtccaggcactctggtctgggtggtgggacaggtctagggtctcagaggcccatggtgctccctgggggctcagcccagagcctgggaactgaggcccctaccatgggaggcccaaccaggaagtcggcccaggcagaggtgggctgggggcttggcgcacagtggtaagaggacccatgatccctacggaaccaagacaggatgctcctcatggggctggagtcaggcgtgcttggtcagggccccagaggcagacccagagttcagtgcagaccagcctgacgcctgargctgaagctggggcaggctgctgactgcacggaagcccacctcagatatctcctcccctgcatgctccagagatgctcagacctgcgaaagaggctaaaggaatggaactgcagagaacagaccgatctgggtg

SEQ ID NO: 848121 - DNA, 633 bp, Homo sapiens
acatcctcacctactcactcataggcaggaacacatacagagtcccatagtgttcccaacatgcctttgataatgccgttgtcttcccctcactctaaatacacagyagtgacctcttaggcaagtcaaccaacatccctcttggcaacatccaagagggaagctcctttcctcactcactgtctcttcactacaaagctgtttccaacctcaaggagggacatggtgggggctgggcagcggggaggggagaaagtgccagggggctgcagtgcccaggaggtagaaggctttcccacccaaccccttccttctctcttcactcaggccccactggaggctccatctatcatttggaggcttagcctaggaggaggcagcggctgggagatggggaattagagcccagaggaaaggaaaataccccaggcttccattccaggttgattgagagcagttgattaatagataaacatataaataagtgggcctgcagccacagagttcctaaatcctaatcatttctgggaaacctttggaacagtggttctccaagcacagaacctggaccagcagctgcagcgtcactttggaactttttagaaatgcacattctcggccccatctagacct

SEQ ID NO: 848122 - DNA, 547 bp, Homo sapiens
ggttttttggggatttctgagctccgggaagaaatatcaaaaactaaccaaagagaaacatgcttgcattattccacttccctgcattcagaaaggccctcctgtcttctcagagctgagctcctgsggaagttggtaaggctgagtctcctcagcccggcttctgctcaccccctcttcctactgtatgccagccagctactccccaccccttccccagatgctcactcaggttggcattttgcctcagtggaacattcaatagcaagagctgtcaaaattcctttcgtctttattagccacaggtactcaaattctgtactgtttctaactgcgggctataaacaaagtggggattccacttcaagtcccacacattccatttaaagcaaaagaatgggggagaggggcaatggctgctatagattataatttgcaaacaatttcttatccaagctgctcactaaggtgagtaatcgctgtcaattcaattgacaggaataataggctttgtgctaaatcttttgttcctgtatgtgaactatct

SEQ ID NO: 848123 - DNA, 641 bp, Homo sapiens
actaacatgagaacagtgtgggggaaacaacccccatgactcaaattatctaccactgggtccttcccacaacacatgggaattatgggagtacaattcaagatgagatttaggtggtgacacagagccaaaccgtatcaactgtatactccataagggtttaaaatctttattcacttcactgatgtatatcatgcacctgtttccttgtagatagggcagaataaatattttttcatgaatgaatgcactgaggcacttcagaatacatcaatctacagtgtttaggaattgactatgacctgaattaatatgctttgttcacctcacatccccagatcctggagtgtagtaagtacgacatgtatagtagaatgaataaaaaataatggattcaggcacaacacagcttcctatgaggctagggaattacccagactcaggcaaaattcattactatcattctcctctttatgaacctgacaaccaaacataatggcttaggaattttttctgttaaatatatttgattgatattatatacccagaaggtcaagataatgtggaaaatattatctactgcccttgagtcaaggactctgatgtatatcrtggtgaatatttatgcttactatgtcatt

SEQ ID NO: 848124 - DNA, 669 bp, Homo sapiens
gttccccaggtgatactaatatactgttacatctgtaccactcttctgcaccatttccctttactctcataattataattcacattttgcattgtccttacagttttcaaagttttgaaaaaatacatagctcattgtattagtctgctttcacgctgctgataaacacctaactgagactgggaaatttacaaaagaaagaggcttaatggaactcacagttccacatggctgcggaggcctcagaatcatggtggaaggcaaggaggagcaagtgacatcttacatcgatggtggcaggcaaagagagagcttgtacagggaacttctatttttaaacccatcagatcctatgagattcatccactatcatgagaacagcacaggaaagagccacccccataattcaatcacctcccaccaggttcttcccatgacatgtggcaattgtgagagttacagttcaagatgagatttgagtggggacacagtcaaatcatgtcattccactcctggcccctcccaaatctcttgttctcacatttcaaaaccaatcatgccttcccaacagtcccccaaagtcttaactcatttcagcattaactgaaaagtccacagtccaatgtctcatctgagacaaygagataatgatcctatgaggctgtaaaa

SEQ ID NO: 848125 - DNA, 584 bp, Homo sapiens
gagctagacaccaggtaagacgccaattaacacagccagggagagaggaatagttggttaaacaggaagcaataggtgctaacaggacagaatccactggggaatcaacacaataaaagcaaatggaaaagcaaaaggataaaataagcataaatcatttgggtcaggtgaaagggaacaagggcaagttgaaaaagttatgtaaggactaatccttagaataagaaaagcaaaggaaacacgtgagtagaccatcctaggtaaatactgtgctataacacgtttacattctccagttcacataaaagatcagcatccaggcctcaaaggacccactcaacatcaaagtgaaacaagaaggctttcagtctttactgaaattctcacgtcattttggagcagaaaccaaaatggatgaaatggcatatggcaaagcagcatgtgctttgctagggtaagatgtgtttggccaattcatctctttgaaaaactactttgctatcagagyagagtggaaaagatttacttcatttccacaacatactatgacttcagcaactcctttttacccagcctctttaaaa

SEQ ID NO: 848126 - DNA, 634 bp, Homo sapiens
tgaatgcttaggctgcccacttgaatcacatggaatgwatttcccacaagaaagaaacattctgttaccataagcatgtagaaagggtgatgggaaggcaaaacatcagaaaatcactaagataagtacataataataaaagtttaagtttatcaggaagatataacaattcaaaagaaagtaacttcaaatatgtaaaccaaaagttgggtgaactataagaaaatttggcaaatccatagccatagttagagttttcaacatgcttctctcaattttcaataggataaacaaagaacaagtcaggaaagaatatttaaattgcacaattaccaaacacagtctttaaaaatgtatgtggagctatgcaagtaagaattagaatatatacatttttcttaagtacatataaaaagtttgcaaaaccatttcaaaaacctaatatattatcaaccatattatctgaacacaatgaaattaattagtcaattccaaaaagacaaatgaaaacccacatacttaaaaaatttcaaagatcacttctaaataccttacaagtcagcgaagaaatgttcacagaaatttgaaaatactacaagataaacaataatgtaaatgttgtatataaaaactt

SEQ ID NO: 848127 - DNA, 605 bp, Homo sapiens
caggcacacttcctgggctagttgaggggtctggatttttatttacttatttttttatttattgagacagagtctcgttctgtcacccaggctggagtgcagtggtgcaatctcagctcactgcaacctccacctcctgggttcaagtgattctcctacctcagcctcctgagtagctgggattacaggtgcccaccaccatgcctggctaatttgtgtgtgtgtgtgtgtgtgtgtgtgtgtgtgtgtgttttgttgttgttgttgttgttgagacggtgtctcgctcttttgcccaggctggagtgcagtggcgccatcttggcttactgcaagctctgcctcccgggatcacaccattctcctgcctcagcctcctgagtagctgggactacaggcgccctccaccacgcccagctaattttttgtgtttttagtagagacggggtttcgccatgttggccatgctggtcttgaactcttgacttcaggtgatccacccacgttggcctcccaaagtgctgggattacaggcatgagccmccgtgcccgacctggatttttattctgaagactaatggggatcctaaggaaggaaccagcct

SEQ ID NO: 848128 - DNA, 544 bp, Homo sapiens
cattcggctttagccccagcctcctgtgcgcactgcgtaccccctagtcaattacagtacacccccaccccacggccctctaygggtgtcggagtctctccttttctaaacatgcctcttcaaagcaggctagaaaaccctcgacatcagaatccccatcagaaaaacgaaggggctgcggaggtgcttgtaccccttccttgggttgatgttccttctatgagttctcccaatgggcaggattgggagtggtgacctggacacagtcgccttgcagagctgggctcaaacagcatcctcttgccccaggctttcttattcttcagaccccagtgccccccactgccttgccctactgtctgctctctgttctatgtggcccccatcgcctccagctcctcctccacagaatccaagaggtgtgacatcaccccctgcctgaaattggggtcagagctgctggtttgactcaggtggtccctggattccaagctcatgtccagcctgggagagataccagatgctgcttctgactggcaggctc

SEQ ID NO: 848129 - DNA, 522 bp, Homo sapiens
aacccagcctgggtttggtggggaaggttttctggaggagagagcatacagtgaggcctcaaaggatgagaaaactggccagacaggcaaaggaaccttatctattaaacagtactgatctctttaaccagaccaattcaaatgttgcttcttccaaggattcttcccaaattggcaagacctacatagccctccctccaggcctggcttcatgggcatgcagcttgtgtcctcacataggaccctgcactcggtttaatcctctgctgttgttgtcttgaaattagtagtaatttttgaacaagggccccacattttccttttttcactaggcccctccaattttgcagctggccctgcctcccttaggtcttgtcacttttgaccttgtattacatttgtccactcaaatgccrtatcttttgcctggtgaacacctgcaattccaggtgggtctgactcatctctgtcctcagggtccagcacagaggcaggcacccaagagacatctgtaatgatgtt

SEQ ID NO: 848130 - DNA, 588 bp, Homo sapiens
atgggaataaaatatctaccttgtaagacttttgtgagggtctaataactgttatayacattatctcatttaatcttcacaacaacctttaaaatagggatacgatcattctcaatttacagttgagtgaaagtgaggcagttcagatggcttgactaaggttacctggcatttgagtggcagagccaagatttaaacccagctctgtctgatgctagaccctttgcttcaaccatattctgtaatgtctcatttctaggaatgaatgaaggaatgttcacacatgtatcatccagcctctgaggtgcctctgacaaccataattgcctcctcatgaaaccgagcccagttcctcctgtggctcttcctgctgcagccgtgggccttgctctcctggctggaagcgctgttttcatcttatctggggattctcattgctgacggtgctggaggctgtggggcacagtggtttcaagcacaggctttggagtcaggcaaacctgggtttcaatatggctcaggaagctgttgggcaggaggacttttggtgagcaggcactgtctgataatggtgtttcccaggatccc

SEQ ID NO: 848131 - DNA, 630 bp, Homo sapiens
tcagttttataatattgcaaggatccacggaagcatcacatgcgaagcccttagctccgtgcctggctcttggtacgtactcagcgtaactagtagcacatcttatttcactcactatctgaagtaagggcagctacaataaagcactatatagcatttggagagtgcctaccagaaaccaaatcttatgatgaatatcagaaaggtatcctctcagtacactccggctcacaacaaaataccgtaaactgtatagcttttaaacaacagaaatttatttctcgaagtcctggaggctggaaagtgcgagatcaaggtgctggcagattcgatgtctggtgagggcccgctttctggttcatggatagtgccttctgtgtcctcacatggtagaaggggaaggggttttctttcagacctctctcatgtgggcactcatcccattcatgagagccccaccccataacctaataacctcccaaaggccccatctcctaatactatcaactttgaggtttcgattttaacatatgaatggrggggacacaaacattcaggtgtaaagtaataataaatacttcttacattatgtattaatttagcaactttctgaagtgccttgacattgat

SEQ ID NO: 848132 - DNA, 433 bp, Homo sapiens
gatcctactcctgctgtcccattgtaaggaaggctgaggatgtccgaacggcccakagcattcaggccagctctcaccacttctaagaggtggccagtgcagctcccttcgaggagcttgaggaagatggagcgggggcggccctaacaacaagaatttccactgctattctcactagtaacccagctctaactctatatcaggcaatgctaagccctccatacacactgtctcatttaacgcacaaacagccctgtgcagtgggcaccgttgacttcattttacagacagggacttgaagccacaggtatctaccagtctggacagttaacactcaggacaagtcaggtagagttaacactcaggacgagtctcactggtagaaaccagtgagactagcccatctcagactttggaagtcatcatccattgg

SEQ ID NO: 848133 - DNA, 618 bp, Homo sapiens
ctcaggttactaataagaacctttaggcaagaagtaggtttcttaccaaccttgaagtgaagagctctatcatcttgtagacagttgaatgagttttgaaatttcaaaggcctctagaaaatttaaatgatctaatatttacagtagatacctagacagaagtcattgtcctcacttctcaagtaagcctgaagaggaagatcccagtattggcaaacaggacctctagccagccagtgtttacctgggatcagaagaactcccacagggtatggcactggggtttagaggagtagtagggagggaatatcattgaaaagtgggagagggtaaaagggaagaaagaatctgatgaaccagtagaggtcacgggcattctgagcttcctctcatgttgctgaaagcaatcagggttagattcatgggttctggcttggattggagtcacacaaacaggattgaagtcccatcatcaatgccaccatcatcactatcatcatcaccaacatctttgtcatsgtgatcaccatctcctcctcatcaccattaccgtgatcaacttcatcatccttgtctccaccatcatcatatcacaatcactatcgtcaccatcatcat

SEQ ID NO: 848134 - DNA, 582 bp, Homo sapiens
gaatctcttctgtttgctcatcatccaaaccataatctttttgttaaagccgtaatcttttaagctttaattttacagactatgtggtctttagcttcatccttaaacagatctgtaagggtaaagcatcttaaccaccaagtggtttgattccttctcccattggttttgttgttatttggttcagattttcttatgtttttggtgggggaagaggagagtcatttaaaaatatatatatcatggagggatcaaatcagagtccggaagttgtaaatgaattaattaaatgctgtcaccagttgggttctctggaagcagacacgaagacagagttttgagtgcaagatattttttaatcaatacctatgttagtccattctcaaattgctataactaaatagctgagactgggtaatttataaagaaaatagttttaattggctcgcattctgcagactgtacaggaaayataatgctggcatctgttctgtttctggagaggcctcaggaagcttacaatggtgacggaaggtgaagggaaagcaggcatatcacacggccagagcaggagcaagagag

SEQ ID NO: 848135 - DNA, 682 bp, Homo sapiens
tgacatatattaacttttaccaagcaatacatttttacagtgtaaatttttcaggtatcatagggcatttttagggtgtctgggcatttttagggtrtttaccattttctggtagtttaatctaaataaactctcaggcaagcagatttttaaagaggacacgatacagtcaccctgaccttattaagcctctccccctttcattattaattcatttaaagaggtgtcattttcaactacatttttagtcgttctagctatagtaatgggaaaaaaaaaacaacctgaaccttaaagtcagcattgcaagaatatcaacacagactcagaataactagatgtatacacactcttgataaaaagcagttttcagaaacatttctcagctcattgtacacaattgttgacattttgccactgaaatctttttaatgttgtagccctttgaaatttgtgtaaaggctttgcttcacattaaagtagatgagaatataacgaaaaaccaaaaataaaatctttcaaagcatgcctggtattgtagggatttatgatggtatcacatttagggatcagtgaacacaaatttgttaagaaaaaaaaaaaagcaagatttttttcagagagttccagagagactgtctgaagcgtgataaaaacaaaatccactagtggaactcactag

SEQ ID NO: 848136 - DNA, 473 bp, Homo sapiens
tgcaggggctccccagccagcatctcctcccacagcaggctgccyacttccccagcggacgtggagcaacagactggaatgagccccctttcctttccctgaaatactcagtgcagtgactaacataaggttcagaaatattatttgtttgtttataatttatatacaattgcttcctagaaagacttgcaggaggcagggccatgctgctggctgtggatggggtctctcttcacgtctgctcctgacaaacacagagcagtgatgtcagacggcagctgccatgagtgagaccaacgacaggacagcgacagaacagccagaaagcaaagctttgttccagcatccccaggaagtcttcgtgtggcttttccctctctccactggaaacctcactttagggtgaatccttccatgtaggagccacgaagtcattttacatgtctaattaagagtagtcattcttccaagaa

SEQ ID NO: 848137 - DNA, 662 bp, Homo sapiens
ggccagggggactttgccacccagaagagaaggacacaggcccagccgacttttctacctgccaattgtagagccccagggccttgagtgaatataggctatagccaaggagtgattmaggcaggccttgggcaagacccagcactgtgcttgcttcaggtgtgacccagtacctgaagtggtggtggtggtggtcataggggtgcttgtatcatacatcataccagccccagctttaggtgtctcagaacagagagagagagagactctgtgttcttgggagaaagtaagggaagagaaaaagagactctgcctggtaatccagagaatcaccccagatcttatccaaggccatcaaggcagtacctctacaagtctgcagagaaccagtgtcactggaaagccttcccaagaaggatggctacaaataagctcaggcaatgaagagtacaataaatacctaactcttcaatgctcgggccccgaggaacatctactagcattaacaccatccagaaaaacatgacctcaacaaacgaactaaataaggcaccaagaatcaatcctcgagaaacaaagatatgtgacctttcacatggagaattcaaaatagctgcgttgaggaaactcaaagaaattcaagataacacagagaagggatt

SEQ ID NO: 848138 - DNA, 662 bp, Homo sapiens
ggccagggggactttgccacccagaagagaaggacacaggcccagccgacttttctacctgccaattgtagagccccagggccttgagtgaatataggctatagccaaggagtgattaagrcaggccttgggcaagacccagcactgtgcttgcttcaggtgtgacccagtacctgaagtggtggtggtggtggtcataggggtgcttgtatcatacatcataccagccccagctttaggtgtctcagaacagagagagagagagactctgtgttcttgggagaaagtaagggaagagaaaaagagactctgcctggtaatccagagaatcaccccagatcttatccaaggccatcaaggcagtacctctacaagtctgcagagaaccagtgtcactggaaagccttcccaagaaggatggctacaaataagctcaggcaatgaagagtacaataaatacctaactcttcaatgctcgggccccgaggaacatctactagcattaacaccatccagaaaaacatgacctcaacaaacgaactaaataaggcaccaagaatcaatcctcgagaaacaaagatatgtgacctttcacatggagaattcaaaatagctgcgttgaggaaactcaaagaaattcaagataacacagagaagggatt

SEQ ID NO: 848139 - DNA, 471 bp, Homo sapiens
tcttcaggatttgtaatgaaatgatgttcarttccattttgctctttacatagggtggagaattgtcatgtcttctctaatttttccaagtaaagtggtagcaaaatgttttaaaaagcaatcttatattagaaaacaaaaatgttgtcacttgaaataccaaaacaacatttctgagcgttgttgagggactggcaaagcaatcagctactataacaaatcagtagaaataaccctcccacaccagatatgcatgcagaaggaatggagtattatagagacttgatacaatggacatatgcacatggaggtacaaaacacacagtctaaatacaaatgaattccatcagatttactatacggaacatcagtagtgacagattgcacttcttacttaataacagcaaacttaatttctgaggggaaaaaaatggcgaagtcttatcccaaacaaatagcaagagaggtatc

SEQ ID NO: 848140 - DNA, 623 bp, Homo sapiens
tctgcaataataatgatggtgataataaagctaaccttcataggacattgtgtaccagactgatacacgtgctacaattctgttcgttctcacaccatccttcatgggggaggttaagagcattgctcaaaatcacacagctaataagtcatttttctcagattggcgttaaaattatatttaattgggtcctgtgtgtgcgagtgttttaacttttgcattgtcttttatcccacacacggaggcaacatggatggtgagactaggggctatggacaaggttccagggtttggacttgagcatgctgctgagtggctatgtggtcatcactttacttccttttctaacccgtaaaatgatgataataattctacattgaatgaatcctttgtttctactgagcccaaagtctgctccgtaaaggtaaaatacttctcagagtgtagaaagaaaagtttcagattcaagcctttttgtcatcagtaggctggaaaatgaatagaagttagaataaacwatacacttaatgtgatttttccaacaattatgttgaaaaattgttcaaaaatgcattcattccaatgatccttagctttatatttattaaaagaagtaaatgtaa

SEQ ID NO: 848141 - DNA, 608 bp, Homo sapiens
ggctcaaaattgaaattaaataaaaaggttcacacaaaaaattatttctttccctagcctctctgcccatttttctttctacttagtaaccatttgtgtcagcttctgatttatactgccactgtttctttttgaaaaaataaacaaatacacatacgtaaacttacacatatttttcttatttttccctgtccttaccaaatgttgcacaccatatatatcattctacacagtattttttcttttaaaacgacttatccttgggatcattccaacaccgctctctttgttcatcctcttctctggctgcatagtggatgggtgtgccactgtttattctaccagtaccctcgggatgaacccttgagttgtttcctggcttctcctattataaacaatgcctccttgtgccttatagtattttgtacttctagagatatgtcttcagggtaaatttctaccttgattaccagtatttttcaaagctctccaagtgattcctctacgaagcygagttgaggcttcctggaataaacttaggattgtgaattggctcacttaaaagtcaggtgcttagaaccacaaagaagtttgtgtttcaggtatga

SEQ ID NO: 848142 - DNA, 624 bp, Homo sapiens
agagcaaaattacacttgcaacacagggttaatggcatggaaagaaaattttaaaaattgtactgattttctccaaaattgatacaatagataagatcaaaaattaatctagagcacaaagataattttgatcattttcaaagatgaaaaaatagcataaactatgtaatcatatttactaaactcctatttaatgactatttcataagttattaaatataattcaatttaatgccattatttagtctaaataatttataaatgtcctgaagaaatgctgtaaaatatattcacataattcattagaaccatgagaatattttacatagtatgaatttccaaatgagattaaatatctttgtgaaaactacataacgtactatctctattgctaaggaaggcaaaagttccctctgtatccagcacgcctatgatagagtcaagccatatgactttctgttttctgagtatgtcttgcagtttctgctgcaagtgtgcctttgctcatgcgattccatctgcccagaakgccatccttttcttctctgacttctgaatcatgccatcttaagaaattttccaatgccagttacttcattttgacatcattgctgctccctctgc

SEQ ID NO: 848143 - DNA, 625 bp, Homo sapiens
tcattaagtggaagtggatcatcataaaggtcttcatcctggtgtcttcacattgagtaggctaagggggaggagaatgaggaggggctggtcttgctgtcttataggtgacagagatggagaggtggaagaagtggaaaagaaggcaggagaggcaggcacatttagtgcaactttatgaaaatacattgtaatttctgtataactttttgctttttcatttctctaaaaatgtttctgtaagtaccaatccttctttcaccatttgctttgttttcatgggcctcctgtctcatagaggggcctatgtcgtaaaagaagtcaaaaggaatctcggataattggaacccttctgccaaactgatgactgtctggcacggattcagaagcagtcgtctccatcaagtcatcttctgttaatttctctactctggcggtccattagctcttgaatttttccaagatccatttcagaaacccttcatcctgactttttttccccaatatccacaatmttttaaataatttccttgatagattctgtcataattcctgtgaagttatgcacaacatctggacacagtttcctccggcaggaatttatggtttctggatcgatggcttt

SEQ ID NO: 848144 - DNA, 436 bp, Homo sapiens
tatgtattagtaacaagctgccatagatttagtagattaacagttcatattaattatcttatagttytgtgggttagaagttggacataggtatcattatgctaaaatcaaggtgttggctgagccacattcatttttgtaggctcttcggaacaatcaattgctttcctttatccagcttccaggtaacacctgcatttcttggctgatggcctcctacctccatcttgaaaaccagtagcaatgaattgagtccatttcatattgcactttttgaacactcttctcttcctcctcttctttcacttttgaggaccgtatgattaaatttggcccaaactaaattggatcaaaatcgcctctgtaggtattcatttcttcctgtggcttaatttatctagtgtcattcctttctccaatactcagttattacctc

SEQ ID NO: 848145 - DNA, 632 bp, Homo sapiens
gtatgttgttcagattatttactatgtcttcccatctatcttcactttcactgacactttcttcttctgactccagtctrcagttaagctcattccccgaaaaaaaaaatacatatatatacacatatgtgtgtgtgtttatatatgtgtgtgtatatatatgtgtgtgtgtgtgtatttttagacttctagaatttgcttttttttctttttctaatagttttcatttatttgatgatattctcctcttttcacgcattatgtctccatttttttttcttgagacagagtctcactctattgcccaggctgaagtgcaatggcacaatcatagctcactgcagcttcggcctcttgggctcaagtgatcttcccacctcagccccccaagcagctgggtctacaggcacacatgaacacacctgactaatttttgaaatttttatagtgagaaggtcccattatgttgcccaggctggtctcaaactcttgagctaagttgatctgcctgccttggcctcccaaattgctaggattataggcatgagccactgcacctggtctatatctccatttttaataacattgaacctatttatcatagctgttttaaagtcattgtttgataattt

SEQ ID NO: 848146 - DNA, 597 bp, Homo sapiens
acggaagacacagaagtaccttgtgtgcagccttcatggacagaactgcagaaccactctgcggtcagtggtcacttatcaggaaggaatgccttgtcagttgtcgtgtggaaactgcaggaggggagggaagttcccctgcagcattaagcaattggctaaagtcagcaaaggagtgtcttgtgttctttgtctttctaagtttggtttctgtttaactcttaggaaagtctggcgagtgttagtgaggaagggggttcagtgaggcatgactgaccttcccatggctgggagacatagtttttaaagtttttctggggtcaccttggccaagaggggttcattcagtcaggcacttaggatttttcttttatttttatttcaatagctttgggggtacaagtggttttttgttacatggatgaattctatagtggtagattctgagattttggtgcacctgtcacccgagtagttttttatccctagccsccttcccaaccttccctttcaaggtctcttctaagtccattatatcaccctgtatgcctttaggtactcacagtttagctcccacttataaatgagaacatacag

SEQ ID NO: 848147 - DNA, 631 bp, Homo sapiens
tattttaagaactgatatcccattataccacatatacttttytatacttaaaatatctgccattagctaactggattacttgttttgccagttgcattgttattatcacttaaactgatagtgtgaatcagcttattttacatcaatgtcttcctagagtaaaatttaaaaaaaaaaaaacctcagaaagccatatataaattttattgcatcgcttctcagtcttttggctaagatcaagtgtagactttattgtaaacattttgttaattaccttgaatactttataattttttttttttcagaaaaaaaaaaaaaccacctgctatagttttttctcttgttttacccccaggatttccccttgggattggttaataagaaacatggaacattttcccatggggatgtagctggtattaatgtaatggagatgttagttgtgttattaccagggacacaagtttaaactctggttacctgaacaaaaatgtcaggcaggaaggagctctcagtttttgggtgcctcaccttagtgcaattgcaggtctaatagttatgcttttgcttaccatctggcagccagctgaaagatctaggagagaaaatgcttctgtttttttttttttct

SEQ ID NO: 848148 - DNA, 570 bp, Homo sapiens
gtgtgttcaggcgctgaaatatgaaagtgacaggactggatttaataatcccagaacgatcccttgggatcattgtggaaggctatgttatgagtccggtgggaaatgaggycttggacttgctagaccctcctcaccgaggagatgctagcaccatgtttctctaggtcttccctcacccctagttactgcagctcttaccatgctccataagatttgtctgtctctgactagactgtgagttcccgagaggcatggatttatttattcaaccctgtgttttccacatctagcatggtgccttgcacaaagtaaacattcaacaaataatcgttaagctgaacatcagcaagctgtgatttaattaaacataaatggggagaaaccataaatcccctaattttcctcatctaagctgacagagtcagtttgttaagtgacattgtgtctgcattacataaaagatacctacaacaaatatacacacaaaattttgtttaggaaatggtagattgctggatgtggtattccaatgtgtcagacggtatgaaagtgccatttgaaatgaat

SEQ ID NO: 848149 - DNA, 601 bp, Homo sapiens
gcatccctttgggccttagtttcccggtctttggtaagctatggtgatgttttatttaattkgctagatggcccttgggcttcaggctccctccccgccttgcctcctttccatttgcagtccaggcttggtcctattccaatgatgctattatatatgttttgtacctatctgatatttatcttgctcaggattacatttcagaagaactgttatcttaaagcagtatatttctgaattatgaatgagttcttgtcactgcaacctcttgttgagtatctgcctacaaacagcaatagtgaaaccattggttgcattcaagggaacttctgagacaacatattaataatgatactacttgataaattatggataaatgtcatcagattccaacacagataatacatcagcaggtaggaaaaggcatgaggcaggagttggactttcgaaaagatttggtgttggtgcaaggtttcagtaagaccataacagccaaatgaatttcagctggaccataaaccatctcattcaaaagtgcacatcagtcgtaataggaaaatcaagaatgaattcttctggcaaggaagtggagggatcctct

SEQ ID NO: 848150 - DNA, 630 bp, Homo sapiens
aggaatcaagtcattagtatattagcaagtggggycatatgctgttagggccctatgcttacaatacacatccaggcccacagaatactcaacaatattcaaccatctcaacctagtaactgggattttgacataattctgtcaccaagtcttgagtacataccatcctttcaacatctattgagcatctaccatacaaagagagctggagccagcttgcattgtctgcttactatatgccaagagccatagtaagtacttcattcatatattatcccaggtcttcgaatagtatgaggcagttattcttatccctattttacagacaatgctgtaaaatgaggcttagagagcttaacttgcctaaggtccagagctataagccataaggaacagaaatgcctttcttcaaagcccatgctctatcatgtctctaacacaagagcataaaacaccaagtcttggccccctcaaaacttcacagaccctagatcatgttttttattcaaggacttttcgatcaatctgcctctacatacaaatagagggtgggtctctcatattcagtggggtttacttaaaactaaacaggcccagtaggcaacctatctgagttacaggtatccttta

SEQ ID NO: 848151 - DNA, 632 bp, Homo sapiens
accatacctggctaattttttgtatttttagtagagacggggtttcaccagattggccaggctggtctcgaactcctgacctcaggtgatctacctgcttcagtctcccaaagtgctgggattacaggcgtgggccactgtgcctggccagttgaacttcttaattttgatgtccttcagtatgaaatagagaaaataataatacctgctagcctcataatgaggattaaataagataatgtggatagaatttaatagtacttgttacattgtaagaccttaaatggttgcttgttcttattactgttgttattagttattattttaattaatatcagatttatgatattttgttaatattttatgacattattgctatattctatagattattatttaattattgtattaattataactagtattaatattagactactgttgataagtgtggtaggcattcagaagaagttggaggaaccccttctctgtgtgccattctttcataaggcagctttctcactgaactgttatcactagagcacctagcatgtgccaggtacctttctaggaggggaggatacagyagtagcccagacaaagttcccatcttcatggagcttacagtctag

SEQ ID NO: 848152 - DNA, 504 bp, Homo sapiens
gtaatgtgattaaaattaggtatactactttatttgttttctgtgtgttcattctttttgtctttccaaccttcccttyttgtattcttgtatattatcttaataacgactatgaactgtggaaatttcacagaagttgtgtcttgtttgtggacttttttataggtgtggaaatgccaacgaaaacaattacattagagagttttaggggactattagagctcctctggcccaagccctttagttttatagatatggaaactaagaccagagaagttaagtgacttgccttcaagcacacaagaagtaatctttctaagccaagatgagagtactgtctataccaccatctcaatatacgctgggtaaaaaattttcattttgagccacctagcactgaacatccttcctcattgcatgagttgcgatgagaggcaagaccctaacatctctcactgtggaattggagggaccataccatcctcctcactctaggaggatttc

SEQ ID NO: 848153 - DNA, 504 bp, Homo sapiens
gtaatgtgattaaaattaggtatactactttatttgttttctgtgtgttcattctttttgtctttccaaccttccctttttgtattcttgtatattatcttaataacgactaygaactgtggaaatttcacagaagttgtgtcttgtttgtggacttttttataggtgtggaaatgccaacgaaaacaattacattagagagttttaggggactattagagctcctctggcccaagccctttagttttatagatatggaaactaagaccagagaagttaagtgacttgccttcaagcacacaagaagtaatctttctaagccaagatgagagtactgtctataccaccatctcaatatacgctgggtaaaaaattttcattttgagccacctagcactgaacatccttcctcattgcatgagttgcgatgagaggcaagaccctaacatctctcactgtggaattggagggaccataccatcctcctcactctaggaggatttc

SEQ ID NO: 848154 - DNA, 530 bp, Homo sapiens
gaacacacacacaaaaaatgtttacaaaccgtcttttaaaataatgctctgcctaacttcccccscggagttcaggtacatggcttaagtgctgctttgtccttaatgccatcttcttgtcagttgctctgtatgattaaatcccgctacactccttccctgtattatttatctccagcttttccctattgtcaagctcctcctccccaccctgttgatgcaaataggggtgtcatctttttgtggcatttgtttttgtgatggtctttgaccctactctccttttcttgagcgacagggtcaaaacagtttcctggttttgtttagtctggaggtggcaatgtacatttgcctttaaatccctccctgggaaaaccttggtttcccttagaagctggctaaccctgctcccaactcacacctgcttccagctgccacgtttcatgagcctgctgtgctaaaacacattcaaatggcaggtgctgacaattttacatgatcccaaaagccagggaagctggatcaagagg

SEQ ID NO: 848155 - DNA, 555 bp, Homo sapiens
acccatgtacccatcttgggctggtgaatgaattgggtgataggaatttttccaaatattctccatgccacgctattattatggaagactaggggtaggtatataggggarctttttccggccctcactgcccacggctgtcttccagcttacctctagtgtgcttgcacaaggctgggctgggcctgcaattagttctgtagactaattggggtgagggcttgctgtgctttccttacccaagagacctcttttacttgctttgtttggattcataggacctaggagtaggataatttgaataagcataagatctttaaagattcttattctgggcagaagagtacctgaaactttggcccaatgcaaaatttaatatccatgcacataatgtattcatcatattttctctttagatcatcacaacttgcatttaaaaattctaacttccaaatagcccttggtggttcattgtaacttttaatagttaattttacatgctaatgtgttctagtcatctatgatttggtaatttgcttatttttttaaaaaaca

SEQ ID NO: 848156 - DNA, 555 bp, Homo sapiens
acccatgtacccatcttgggctggtgaatgaattgggtgataggaatttttccaaatattctccatgccacgctattattatggaagactaggggtaggtatataggggagmtttttccggccctcactgcccacggctgtcttccagcttacctctagtgtgcttgcacaaggctgggctgggcctgcaattagttctgtagactaattggggtgagggcttgctgtgctttccttacccaagagacctcttttacttgctttgtttggattcataggacctaggagtaggataatttgaataagcataagatctttaaagattcttattctgggcagaagagtacctgaaactttggcccaatgcaaaatttaatatccatgcacataatgtattcatcatattttctctttagatcatcacaacttgcatttaaaaattctaacttccaaatagcccttggtggttcattgtaacttttaatagttaattttacatgctaatgtgttctagtcatctatgatttggtaatttgcttatttttttaaaaaaca

SEQ ID NO: 848157 - DNA, 613 bp, Homo sapiens
gtggattcttggttgggcagactatgtgatcattaatgatcactgaggatcagttctcagtttgacatgagatgggagtaggtttgtcagctttcttcaaagatgtgtctttccaattgaggaaatttcgcatgcttaggcaaccagccacccacacatgctagcgccagatagtaatttctgaatatgagtgtgtgcaactcctggatgtgtgtggctttctgtggaaaacaaacaccctgtaaacagttggatggattaaatagagacttaaatcggtatacgacattggttacattttcgttaactcttccctttcaattttgaaataattctttctcatacaacagtgcatgaaaccattgtgagaaggttttatggtgtggtaaaaagaccctaggactgtagaagtagttggatgaagccctcatttcttagttgtgccttgaattaccttctgagaccacaccttcatttcaggaggctttgtcttctttctttataaayacatgggagtgagctaaattaatgatataaacaaatcctccatattcactattctatgattctagggattctgtaaataaattggagtgaccttagtttcagaaat

SEQ ID NO: 848158 - DNA, 529 bp, Homo sapiens
ctcttgatccagcttccctggcttttgggatcatgtaaaattgtcagcacctgccatttgaatgtgttttagcacagcaggctcatgaaacgtggcagctggaagcaggtgtgagttgggagcagggttagccagcttctaagggaaaccaaggttttcccagggagggatttaaaggcaaatgtacattgccacctccagactaaacaaaaccaggaaactgttttgaccctgtcgctcaagaaaaggagagtagggtcaaagaccatcacaaaaacaaatgccacaaaaagatgacacccctatttgcatcaacagggtggggaggaggagcttgacaatagggaaaagctggagataaataatacagggaaggagtgtagcgggatttaatcatacagagcaactgacaagaagatggcattaaggacaaagcagcacttaagccatgtacctgaactcggsgggggaagttaggcagagcattattttaaaagacggtttgtaaacattttttttgtgtgtgttc

SEQ ID NO: 848159 - DNA, 554 bp, Homo sapiens
attcaatacagatgtaagtcacttcctctttctgggtctcagttttctcatccataaattaagascaacgaactggaatgtttctaaattactttccagtcctaataaataaggatgttatctttatagagatcttgcttagataggctggcactgggcagtgaaagaaaaccaaggaggcaaaccagtcaccatcagataatttatgggtgaaagtcaggggctgtctattacttaagaggcgaagtccagggtggacaacaacggctggcatgtgacaagataaactacgaacctacccaggataagaaggcaaggaatccattcaaatataggggtgaatggtggactagatattcaatccagccaataaattctgctgaacaccttccttcaagctgtttttataagatctcccctatacatagaagcttatattccacatggtctcaaatgctaaaattttacttgatacttcgaacatattaatatcataaaagaaataaggtaagttttgaaattcaaacattatcttttgcagtagccactctgaa

SEQ ID NO: 848160 - DNA, 530 bp, Homo sapiens
atattacaggtctctattaagatgtcatttccaggctgggcacagtggctcatgcctgtaatcccrgcactttgggaggccgaggtgggcagatcacctgaggtcaggagttcgagaccagcctgaccaacacggaggaaccctgtctctactaaaaatacaaaaattagctggatgtggtggcaggtgcctgtagtcccagctacttgggaggctgaggcaggagaatcacttgaacccaggaggcagaggttgcggtgagctgtgatcgcaccactgcactccagcctgggcaacaagagtgaaactctgtcacaaaaaaaaaaaagaaagaaagaaaaaagatgtcgtttcctcggaggagcctttcctaactacttatatccaaagccactttcttccatccactattgtattacttcctgttatttcttcataacagttatcaccaccgtaggggagaaaaaacttttcctctaccctcttatgtttattagctgggggggctgtaaattaaaccaatacaagac

SEQ ID NO: 848161 - DNA, 592 bp, Homo sapiens
cacctcacactcatgattagagccttartcccccaactgcaaagccacacagcttcaatttctgttcactccctcactttaaatttcttcttcatttttgtcacataataaatttattttctggtttgagcttggctgcatattaaattatttttgttaaatttgagccagcatttctctgtacttgcactcaggggaggtggtggtggtgggacatggggagggtccatccacatcagctcaagtcatgttgataggagttcactgcttgggcatttagggattaatgttattccataacattctagtggaaagacttaacaagtttgatgattcattcattttcttctagaagtctggcaagttgatgagcagatagatcactacaaggaaagccaagacaaacttccttggcaagctgcattcataggcaaggaaacactgaaggatgaaagcggtcaagaatccagaacatgtagaaaaagcatttatctgagcacagaatttgattctgtaaggcaaagactccctaaatattattcgtgggaaaaggcattcaaaacatcatttaaactttcttggtcaaaatgga

SEQ ID NO: 848162 - DNA, 635 bp, Homo sapiens
gaggcaggaggatcccttgaggccatgagttcaagaccaacctgggtatcatgtgagcccctgtctctacaaaaattttaaaaattagraaaagagtaacttgagggctggtacattggaactacataagtatgctgcctccaccaatctgtcctccaattatgttagcagtcattgatgatccttgcctgaattgattcttttattggaaaatgggaaaatgatgatattgtataaatttgtttgtaattgttacctgacattcctctataaagaagaatcaaatagggattaactaaaaagtcagggtaaatgcctaaatctttcccttagttataaaatttcaggaaaaaaagaagttgatataattgtcatcattgatcactagtgagttttcacttgtttatcataatatattcatggttttaatttactcagtgattataagcaattatgatcattattcttcttgatgctcaattgtcccaaatttggccaaggagagagcccctttaacctgactcctgagtccttttgacacaatcccactggtcttttggtgctttcctatatcctggcacaagaagtcccagcctcaccttgtactttgcctgtgccaagacaggaatccacca

SEQ ID NO: 848163 - DNA, 568 bp, Homo sapiens
gcctcccaaagtgttgggataaaagaggtgagccaccacagccagcaggacattgaaacaaacacacacacacacacacacacacacacacacacacacacacayacgataaatgaaacaaaaagctgttcattgaaaagataaattaaattgatagaccattagcaagattaaccaagaaaacaagacagaaaatccaaataacctcactaagaaatgaagcaggagatattacaactgacatcactgaaatacaaaagatcattcaaggctactgtaaacacctttacgcacataaactagaaaacctagaagagatggatgaactcctggaaaaatacaacccttctagcttaaatcaggaagaattagatactctgaacagaaatagcaagcagtgagattgaaatggtaatttaaaaattaccaacaaaaaaaatccaggaccagacagattcacagcagaattctaccaggcattcaaagaagaattggtagcaatccttttgacactattccacaagatagagaaagaatgaacccctcttaattcattctgtgaagccag

SEQ ID NO: 848164 - DNA, 568 bp, Homo sapiens
gcctcccaaagtgttgggataaaagaggtgagccaccacagccagcaggacattgaaacaaacacacacacacacacacacacacacacacacacacacacacatacgataaatgaaacaaaaagctgttcattgaaaagataaattaaattgatagaccattagcaagattaaccaagaaaacaagacagaaaatccaaataacctcactaagaaatgaagcaggagatattacaactgacatcactgaaatacaaaagatcattcaaggctactgtaaacacctttacgcacataaactagaaaacctagaagagatggatgaactcctggaaaaatacaacccttctagcttaaatcaggaagaattagatactctgaacagaaatagcaagcagtgagattgaaatggtaatttaaaaattaccaacaaaaaaaatccakgaccagacagattcacagcagaattctaccaggcattcaaagaagaattggtagcaatccttttgacactattccacaagatagagaaagaatgaacccctcttaattcattctgtgaagccag

SEQ ID NO: 848165 - DNA, 488 bp, Homo sapiens
ataaatgaccaataagcacatgaaaaggtgttctacgttattaatcttcagggaaatgcaaattaaaaccataatgaaccaccatttcatactcatagaatgatggtaaggatgtggaaaaactamagcgttcatacattgctggtgggaatgtaaaacaggacagccaatttaaaaatcagtttggcagtttcttaaagttaccataaaatccagcaattctctaaatatctagagaaatgaaaacattttataacatgcaaaaatgtgtacaccaatgtccatgggaatgtaatttgtaatagccaaagaatggaaataatccaaatgtccatcaactgataaatggattaaaaaatgtgtgggccaggcacagtggttcacacctgtaatcccagcactttgggaggccgaagaaggtggatagcttgagcccaggagttcaaggctagcctcggcaacatggcaaaataccatctctacaaaaa

SEQ ID NO: 848166 - DNA, 844 bp, Homo sapiens
aattggggttccaaggtttgtttgttcgtttgtttgagacggagtttcactcttgttgcccaggctggagtgcaaaggcgccatctcggctcactggaagcacctcctgggttcaagtgattctcctgcctcagcctcgcgggtagctgggaatacaggcagcggccaccacgcttggctaatttttatatttttagtagaaacgggatttcaccatgttgcccaggatggtctcaaactcctgacctaagttgatcctcccacctcagcctccgaaggtgctgggattacaggcgtgagccaccatgcctggccggagtttttattttccttttacaagtgcttcctcttctatttcccacagaacattctggaaaaccaccagggtagaaccctgacttctatttgaccacagctcaccattcttatatgttttgtgattttcattttcccttaagaattgtctccaattgcgacattcttcagaacttattaaagatatctgaagtgtatacggtgaaaaatgtatagaatggtggtgtcaccacttgatgttgagtgtgaaatgtgtgggtagtaaacttctgaagctgctgctgtaagggccaagggaaacttccccttcaccctgtgaaagtttgcagaaaaagcaactcactaagacaggttaattggagaaaaggcatgcaaatgtatttaacatgcacacggggagratctcagattacttattccctaatagagttaagaagcttatacagcatcctggccaaacaagttatgggagtagggagaagaggaattccattgagaggatcactagggagaatgaatggatccagga

SEQ ID NO: 848167 - DNA, 642 bp, Homo sapiens
gggactcagagtgtccgtcacccaagtacagcagttttgttgagtatagtcatcctactctgctgtcaaacactgaattgattccttccatcttaytgtatgtttgtaccctttaacccacctctcttcctcctccctgcaccccccactcacccttttcagtctgttatttttccactctttatctccatgtgttcaatatttgtccctttgtgactggcttatctcagcatgatatcctcaagattcatctatgttgtcccatgtgacagaatttccttctttttcaaggctgagtaatattccattacatgtatagaccacatttctttatccatttatctgtcaatgggtatttgggctgcttccacctcttggctactgtgaataatgctataaagttttgtttgcttctttgttttttgagacaaagtctcactctgtcacccaggctggagtgcattggcacgatctcagctcactgcaacctccacctcctgggttcaaaggattctcctgcctcagcctcctgagtagctgggactacaggtgtgcgccatcatggccagctaattttttttagtagagacagggttttgccatattggccagagtggtcttgaacccctgacctcaggtgat

SEQ ID NO: 848168 - DNA, 544 bp, Homo sapiens
gtgatacttttgataggcagcaaaggaaagtgatgagttgagtttttatttgcatattggaggacagggagagagattaaatgtcccccttgtgaagtgtgacttctaattggagacctgtgggtcagctatcagcgggctgggaggggaaagcaaatacaaacgctctaaaactgtgtgccaatattcagtctctgcatattgtgaacattttctagcttctgccaattatcaaagtggtcctcaacttctaaatggaataaataaatatatctgagtgggcgtaacctgagacaacaaataagatgatgatgatgaagtattctaagaaggctagtaattttgggtcgattattttttcttcctctttaattttatattgctcaagcatttatcaaaaaaaaaaaaaaaaagaaagttagcatgtgactgtgtattcctgtatgttataagacaaataatgatctaaggctgcaggcttytacatcactcttcagatataatttgtatttaaatgtaagtataatgtccataaggcctggtg

SEQ ID NO: 848169 - DNA, 611 bp, Homo sapiens
acccctacagtcacctgacttaggaagtgtgttactcttggggatggagcacttcatttcttttactcctgggcagagctgacttttcttctccaatgatagtccccttctrtacttctgggtatgtcagtatttactttaaactactctattcctctttcaatcccacaccttttgaaatgcatttatatatttgatgcttcttatcttttttaagcctgtaagttgtctgactaacagaaatttcccaagtaggtaaatcttaggaaacaaattaaaatgataaatatggtgaaatttaagaccttctaaatgattaataaagtatataaaattcataagtttgcaacttaaaatctcaaatctaaaccaactactcagtcacacattttaaattggaattaaatgactgatctgtttctattgagccgaactctcttaaacactaaaaatatgtaaaatgtgaaatatgcacaagctcctttacataaaaaaatattatttatatttgtttagtcattgaaatagctctgcttttaattataaatttttctggacttgcccacaaaggaataatttatatcatcctagctcagccagttaagattata

SEQ ID NO: 848170 - DNA, 624 bp, Homo sapiens
atagcattctaacccccaaattctagctgccttaacagccttgaaccaaattgctgtttccttagcacagtgagaccactgctatctgtttgggttccactttcctcttgcacagtgtggaagstgcccccgggtaccttccaagcctgtcatggcaagtgtactgtttcctttcttctaaaaatcacaaccctttgctctctgttgtctatgactgaaaacagctgcttcatgcattttgtccagttttgtgcttattattttggaagtgttaagtctgatacttcttagttcatcatgaccagaaccaaaagtcagctcaggagtttttagagctacaaatcttcatgtttgggggaagaaatattacattttaatttatttgtttttataatgtggcactgaaaaaatatttctactgttttcatgcttctctcttttccccttctctatatccagctccttctttttctaattatccttataggagtgactcaagctttgcttatatgcaaactggaattctggcaactacaaaaaagttttatacaacactaaatctgcaaatactagaattttacttctgaggaatagagagggatttacgtttataaactatataaa

SEQ ID NO: 848171 - DNA, 550 bp, Homo sapiens
gatgcattggaatgaggaagaaaacagatatctgtcacaaatcacgggacacagcggggctttcatcaacctgtccccctacctgcggytgtgaaaatctgaaatgctccaaaaaaattcatgatccaaaactcttctggtcctaagcactatgaataagggatactcaaccgtcctattgtttagccaccttctgcccttgactggcgaaagtgtccagggcaggggactaagattttcttccggaagctccctaggaagctcttcatgtaattcttatttcctcctgctcagtcctctacagagaagggcagaagatcaaagccagtttggtttgctcaaggacaggtggttcttactctctagcaacacagtcccagggccctaagccttctggtcaaccactcttcattatttttgccactttctccggaaaagttgggtttctttgcatcctttttgaaatatgttacagagacatgagcgcaacccatgcccttggacagaggtgtcctgtcaagaaggccccatctctgggtctaggccctgt

SEQ ID NO: 848172 - DNA, 582 bp, Homo sapiens
caaaagaagagatttgtcttggcatagtatgtgtcgggtataatcaccaagaatattcagctagagcataggtcttagtagagtttttcctgtttcttgataggcaagaagactcagtatttcatttttcctgtttcttgataggcaagaagactcagtattgcatttgttcgcttagcttcaattataatagcagttagaggtttactgtatgcacatcatcaccatgctaagtgattacatgcattatgccatttaatcttctgtatgaccttgagttaggtattattgttgcctctgttttatagataaaaaacctgagaaatagagggattaaataacttgccagaggtcacacagttagtaagtagtaaagctaagtcacacccaaatcataactactgcactagatcatctcaaaaatgtgcatatatgttactgttatttaaaatgcctttaacctgtcaacagagagtaatgaggaaagctttaaagtacyttaaaaggcattagtggcaaacctgataaaattttttaaaaaatctgtggttaatagtattgtaccaatgttaatttcatact

SEQ ID NO: 848173 - DNA, 602 bp, Homo sapiens
ttggttaaagacgatttttaaaagttatttcaataattttcaatttttctgtcttaaattgaaaacagtactgaaaatacaagatatttgtaagtgttcagattctcagatggaatatttttgaagtaggtatttttttcattttatttaaaaatattcttctaatattcttagtattttttaaacaaataactcttaattaccatttaattttgcatttgcttgcaataaactgaaattggcagttgctcaaactccactttacttatttacacatctagttatttgggaatgtgttttactttgtattactaaaagtattgctatgatatctagctgttttaagtaaattaaaattgaggccattttaggaaatttgctttgaaaatttagaaagatatgaaaatatcttttttaggtcatttgtgatctcttaggttagagataggatttttgcctgtgtctatttaatgtgttaggaggattttcatatagttttggaaaatggaaaaaagtccttgggcatttgttyatatgataattggaaagatctcacttaaaattttctcagagaaaaatgtgcgttatcaccttttctagtt

SEQ ID NO: 848174 - DNA, 638 bp, Homo sapiens
tatgtcaagagatgcaaaggcctgacaaccaccatgctcatggtaacctaggaaacataaccaacggtagcctgtttggcaatcataaaaatgaatttatattaaaaataaatacttctgatcctcttgtctagccaattatcctaattagattgaaaaatcctgacatttccaattagcatttatgacaaaatatatatctgcaaatacagcagaagataaatactgatttgtgaaactagaatgaattgcagagacagtacaatgtgttaacattattatctaacttctactacttttgaatggaaacaatcatttgtaaattataagtgtcagtaaaaacgtaagtgaaacatttggaaatgaaatatgtcaagttggtctcaaagcaaacagaaagcaaaaaaaaaatggttttttcactgaaaagtctgctgaagcctataaagcattctaactatctgtcagtggttgctcagtggagactagaaaataggtctccatagctagtctactgcaatgtattgggataatctgaagagcataaagttcaatggaatgtctaytgactttataaacttcctacaaagattgcagctcacagtcacttcaacaatgacaatcatcgctaaggggta

SEQ ID NO: 848175 - DNA, 630 bp, Homo sapiens
tgtgtgtacgcctgtgtgtatgagtgtacgtgtgaagtatgtccagtgtggtgaatgtgtgtgtgtgtcaggatcctgcaatttaagcagacaaaaatataaacaactgaattgttttgaaaagattccagaaataattttgagtttattttcaagggcagggttacccattactatcagagatctcgttgctaaggactccctttttttattttatttttgcactgactccttgcctcctgccagcaacctgtgccaagcctcagcgtcctgcctggaagggcatggttaatagctgctggaggtggccctcctcctctgagagctccctctcagctagtgtggcagagggcaaggcaggaatgcggtgggtgtgttcagggtgagaactcgcacacttcacacagcccgccacttggggaggggatcctgcctcaccccacgtcagggttcctctttctacgatggatgaggagaatcactaggggtagagaaatgcctgttaaggcaggatacagggcatgtcccggcaggcctgggacyggtcctcgttcatcacagcctttctccagagcctcaagcgccaccatcagtcttttgagccctggttttcctgactgcagaatgaga

SEQ ID NO: 848176 - DNA, 608 bp, Homo sapiens
aaaaggaggtggcttctgaccaagtcagtgggaaggaaatgacaaaataagaagaaaaggaagggttctttttcatttggggcactcatccatgctaatttttcatccataaagaaatgagtagtcaatcttttcatgcttcctttaccaaaaggtgattgaatttattttattaattcatagcctatgtttaagggaaatatattattttgagatttttatttgtagtttaaatgtttcttggggggttggagatttaaggtagtcccagacttcttttagatttttcctccttattatagtttgtataaatattgatccaacctagatataagctatgggtaggaggaatcttttttttttttaactatagaacacagcattccagaaaaacctcatttccattggtgaatggctattggcatacacaaacctggcatgtggttgaggagaagggatgcagctgacgtgagaaaatcttgagaagagagccataatcccgcttccaattcacttgaggttttgatgtatgaggaaagatgaaaagaaytgtatgtgggtaggcctggctgaagagctaaggagtgcaggtgcatgtgtgtgggatg

SEQ ID NO: 848177 - DNA, 599 bp, Homo sapiens
aaaaggaggaagaactgtaccagaatcaaccaccttatgttagataagctgatgacaaaggaaaagggagccactacctctcacctacaagccttttaaataattgcaaaaagacccctgccttgcataactggaccttaggatagggttgatgagcaggaagctaacagtatggtccagagaagcaggaaaagcaacaggagatggtatatggttcccattgggtaattttggattctggaggaggcttgtgatcagcaggggtttgactgtgctaaaggagggtcatcatgtgacaagtctcacatctctgattgttcaaggccaccagtggactgctttattcacctttggtcacctacctgggcaaaatccgattgctttctcctgcttagggttaagcattccccatgtgtgtggatcaacccgtattggccccaggagcacagcttatgcaacacggcttgagaaatgttctcaaaaagttctctgcatycttatgatgtttaaacttgctcaagaaattgcaactgtggtaatcaagtggcatctcctgattatcttgtgtccagtacctttctccatgtccccaagctcct

SEQ ID NO: 848178 - DNA, 574 bp, Homo sapiens
aatcgtgtgccatggatctgatctgtaccatgaccctacataaggctggatggcacctcaggctgagggccccaatgtatgtgtggctgtgggtgtgggtgggagtgtgtctgctgagtaaggaacacgattttcaagattctaaagctcaattcaagtgacacattaatgataaactcagatctgatcaagagtccggatttctaacagtccttgctttggggggtgtgctgacaacttagctcaggtgccttacatcttttctaatcacagtgttgcatatgagcctgccctcactccctctgcagaatccctttgcacctgagaccctactgaagtggctggtagaaaaaggggcctgagtggaggattatcagtatcacgatttgcaggattcccttctgggcttcattctggaaacttttgttagggctgcttttyttaagtgcccacatttgatggagggtggaaataatttgaatgtatttgatttataagttttttttttttttttgggttaaaagatggttgtagcatttaaaatggaaaattttctccttggtttgctagtatc

SEQ ID NO: 848179 - DNA, 651 bp, Homo sapiens
tttgggatccttcagcacaggaattctcaagacctgagtattttttataataggaatgtccaccatgaacttgatacgtccgtgtgtcccagatgctgtcattagtctatatggttctccaagaaactgaatgaatccattggagaagcggtggataactagccagacaaaatttgagaatacataaacaacgcattgccacggaaacatacagaggatgccttttctgtgattgggtgggattttttccctttttatgtgggatatagtagttacttgtgacaagaataattttggaataatttctattaatatcaactctgaagctaattgtactaatctgagattgtgtttgttcataataaaagtgaagtgaatctgattgcactgggtctgggagtttcttttggctgtgattcaaagtcttgggatttgtctctggctcatatctatgtctgtacctttaagagtataaaagaagtagaagttacaatggttgactcataccccattaacctgccctgctgtcctaaaggtaacttwaggttaaactctgggacgcaggaagccaggagtctgctgccattaaatcaaacacattaacaccagctggcaacttggccctggggaagtgccagggttctcgggtgt

SEQ ID NO: 848180 - DNA, 629 bp, Homo sapiens
aagtgatccttctgcctcagcctccgagtagctgagactacaggyatgcatcatcacgcctggctaattttttttagttttatttttgaagaggccggtctcactatgttggtcagggtggtctcaaactcctgggctcaagcgatcctcccaaagtgctcggattacaggcatgagccaccacacccagcctagcttttactatattttatctgataatccttttatggaaaaaagaagggcagactcttttacagtttgaagaagctccatattccatcaggagccatcttgagcaatacctgggtttctaagagctccccagagccagttctccagctcaccttgctttctaatctaaggttgccctcaccttggacaagaagcacgagtccctcagagtaattcagagtatccaaactcaaaagtctatgtacatggaggccttgctagaccttaatggtgacattttcatcaatatccggttttctgccatgagtccctatccctctttttcttaacatattcaagccagaatattttttcagccattctgtaactgcacagtttcttccaagtctctactttgtctcccattaactaggatccaatatatttatgtatttatt

SEQ ID NO: 848181 - DNA, 537 bp, Homo sapiens
acaaatcccttttccaaagaaaagcataggcataaacatgggtttgttgtgccactttttctttttwaaattcttaacctagagaaagtgggatcctcctgggggaccccacagagagccagagagcagccagccatgctcaagaaggcagagtgcaactgactggcaaccaatgcctaaggacacgggcatctctgtgaacaacaaaggaaaatgagtgctgggccgcacacacactgccttctacaacctgctccatgccaacccacatgtgggagggtatccagtgacgtttcttatcaatagaggaaaagaattgtcaacacaacttgacaattcaagcaatgggcacacgacgcagtttgaaacccaagtccctgtgtgtccagtatgataaaatacataaaagtgtgccatttcctatcatttcttatctttaaccagccatacaaatattgataagccaggaaattccaaaatggtgctggtctagtatataaacactaattgctttcctcattgcactgtaccattttt

SEQ ID NO: 848182 - DNA, 560 bp, Homo sapiens
tgcatatgttcattctaacatcctttgaataatcagcttcgactgtrcagacactgttctaggaccctggacattagcagtgagaagccaccagcccacaggaagctcacattttagtgggtacaagacaggtaagaggcaagaaaatgaacaaagttcagatactgccaaccgctccaaagaaaataattcagagcaaggagaaagagagcaccggtggtgaggaggaccaggaggagaagagaacacggatggtaaagttattcgacggcctagtggaaggaatgcttccctaaaccaaagcgaggcctgatccccaaagccagatccaagcctgcggacatcaagacatatacagaggaagtgattatatttcaaaaaaaaaaaaatttaaacctgtaagaacaacaaagcagaaagaggaaatcagctaacaaagggaaaatcctcatgggctggggacatcagacacgcctctcagagccgggagccacagagcaactctggcctcacagattcttgcacctcagttgcacaggggcagcccaggaagctcctct

SEQ ID NO: 848183 - DNA, 560 bp, Homo sapiens
tgcatatgttcattctaacatcctttgaataatcagcttcgactgtacagacactgttctaggaccctggacattagcagtgagaagccaccagcccacaggaagctcacattttagtgggtacaagacaggyaagaggcaagaaaatgaacaaagttcagatactgccaaccgctccaaagaaaataattcagagcaaggagaaagagagcaccggtggtgaggaggaccaggaggagaagagaacacggatggtaaagttattcgacggcctagtggaaggaatgcttccctaaaccaaagcgaggcctgatccccaaagccagatccaagcctgcggacatcaagacatatacagaggaagtgattatatttcaaaaaaaaaaaaatttaaacctgtaagaacaacaaagcagaaagaggaaatcagctaacaaagggaaaatcctcatgggctggggacatcagacacgcctctcagagccgggagccacagagcaactctggcctcacagattcttgcacctcagttgcacaggggcagcccaggaagctcctct

SEQ ID NO: 848184 - DNA, 560 bp, Homo sapiens
tgcatatgttcattctaacatcctttgaataatcagcttcgactgtacagacactgttctaggaccctggacattagcagtgagaagccaccagcccacaggaagctcacattttagtgggtacaagacaggtaagaggcaagaaaatgaacaaagttcagatactgccaaccgctccaaagaaaataattcagagcaaggagaaagagagcaccggtggtgaggaggaccaggaggagaagagaacacggatggtaaagttattcgacggcctagtggaaggaatgcttccctaaaccaaagcgaggcctgatccccaaagccagatccaagcctgcggacatcaagacatatacagaggaagtgattatatttcaaaaaaaaaaaaatttaaacctgtaagaacaacaaagcagaaagaggaaatcagctaacaaagggaaaatcctcatgggctggggacrtcagacacgcctctcagagccgggagccacagagcaactctggcctcacagattcttgcacctcagttgcacaggggcagcccaggaagctcctct

SEQ ID NO: 848185 - DNA, 488 bp, Homo sapiens
gtagcatgagattgggttcttctgattttcacgtagtctaacagctttttccayttcatttaattagaagacttcatccactgacattttgtgtagttacttatatattcaggtataaatctaccatttaacatttttaaaatgtgtcttcttaaaattttctattttattattagtatacttagaacttcctcactctaaaaatattcctctattgttttcaattaactttcctcttcttgaaacccatttctcttttgccattttaatcactgagatatctgaatgttccatgtgctttcaaaccattcttctctcattcaaccaactcttcagtctcctttggatatttttcttcctatagctgactctaaatatttgtcatttctcaggatccctccttggcactcttttcttttactctccaaatttgccctgggaaatcttatatgttctcatgacttctggtctcctatgactaccattga

SEQ ID NO: 848186 - DNA, 620 bp, Homo sapiens
gggaaacgacatttgatgcctgaagggaaaaacctgtgggaagctttgggatgtattgctgtagcgggagaccttggtggggctgacccttcaatacaggataygcgttaatggacccaaaatattgaaagcaaatattgactccagctcctgaaaagactttaattatttattttgaataatttgatactcaagtaaattaatgctaaagcatttctctgtttgtgccaaatcagtgcttctcagtgggaactcggcccatctttgcaggcaagcgctcactctcagtaggcagtccatttctgcagagtgccattaagttaatttcaaaaagaaccagtaaaggtatatggagcaggcagtaatagcatggaaaatatccaaaattactagacccagcaacagaacttggatgccattttcatgcactaataatttgtagtctacatattgaaggtaactataaactgactactttccctgctaaagcattcgggtaattaaaaatacgctgttagttgtctacgtttcaacatgggggaacaagatgccttttttctcttccttggtaaatgcagtttgcagactattatccaaagtgacgctgaagtcctttgtca

SEQ ID NO: 848187 - DNA, 620 bp, Homo sapiens
gggaaacgacatttgatgcctgaagggaaaaacctgtgggaagctttgggatgtattgctgtagcgggagaccttggtggggctgacccttcaatacaggatacgcgttaatggacccaaaatattgaaagcaaatattgactccagctcctgaaaagactttaattatttattttgaataatttgatactcaagtaaattaatgctaaagcatttctctgtttgtgccaaatcagtgcttctcagtgggaactcggcccatctttgcaggcaagcgctcactctcagtaggcagtccatttctgcagagtgccattaagttaatttcaaaaagaaccagtaaaggtatatggagcaggcagtaatagcatggaaaatatccaaaattactagacccagcaacagaacttggatgccattttcatgcactaataatttgtagtctacatattgaaggtaactataaactgactactttccctgctaaagcattcgggtaattaaaaatacgctgttagttgtctacstttcaacatgggggaacaagatgccttttttctcttccttggtaaatgcagtttgcagactattatccaaagtgacgctgaagtcctttgtca

SEQ ID NO: 848188 - DNA, 579 bp, Homo sapiens
ggtgtcgggcgcctgtagtcccagctactcgggaagctgaggcaggagaatggcgtgaacccaggaggcagagcttgcagtgagccgagatctcaccactgcactccagcctgggcgatagagcgagactccatctcaaaagaaaaacatggtaataataagggagactcaagaattaaagagacaatatgcaaataaacagaaaatatgcaaataatatgcagaatgaagagacaaaaaggaatgtttaaaaagcagtattaggataaattgctctctaacaaactttgaaaaactaaaagagaaggattaaaaagataagatgatagacaatataaaatgccagtttgccccaaatggaagaaaaaactttaatagcacaataagcataaaaaatttaaatcattcccttccctgaaaacttcaggcctagatggctttatatacgaattctaccaaacttttaatgaacagttctgttttcatgttttcacacacaaaaaaagaaaaraacaacccacccagctcactttacatgatttttattccaaaccacatgagggcaataaaaaaaaaatg

SEQ ID NO: 848189 - DNA, 560 bp, Homo sapiens
atacattatatatgtgtatatatacacatatgtatatgtaaatatatgtgtatatatacatctatgtatacataaatatatattgcatgtgtatatacatacattatatgtgtatatgtaaatatatagatacataatgctaatgaaaattaagctgaagtgattatattaatatcactcaaagttgattttagagtaaagaatattatcaaagatagagggttatttcataatgataaaggggctaattcatccagaggacacaacaattctaaatgtgtaggcacctaataacatagcttcaaaatacatgaagcaaaaactgacagaattgcaaggaaaaatatacaaatctatatttataatcagagatgtcatgccctgtctgtcaataattgatagatatagtagatagaaaatagaaagaatatggaagatgtgagcaggactgtcaagcaacttgacctagttaacagttatatagtactccacccsaaaacaacagaaacatatttattgcaagtacacaaggaacatgtgtaaaaataaaaagagcctta

SEQ ID NO: 848190 - DNA, 607 bp, Homo sapiens
gggcgggggctctcctgggtgcagagcggtgggcaccctgctggcacagccccctccacatcccactccctcctcactcattttatttctgtccgtttcattttgttagcatttatcaagtcagagcatgggtagtcttggtctacatactctcaactctccagcgatcaccctctttcttgttcttgggggatcccctggcttcccagcttcttttaatcagttgcttttatgggtctacagggaaatgaccatcaattcagaaattcagggcatcgaaaggaaaaagccaacttcaagggaaaggccttccccctgccttcgcccagtctgcccagggaggccgtaccaatcagcctgaccctgatcacagtgaacagagggaggcgtgggagatggcttcctgggggatggctgtcaaggatgactggcaggtgccgattcccccagggtctgattctctgtttagtggaaggagcagggcatarggagatcagaggttcctggcttccagcctcagcccagaggtttctgcgggaccttccctcacttctgtcttctctgcccttcctttgcatgtctgcaaagtcggggtattgggtcgccc

SEQ ID NO: 848191 - DNA, 629 bp, Homo sapiens
cccactgcaggtctcctctgagctgttctaacactcaataaagcttctcttagttttgcccaccctccacttgtgtgcgttcctcattcttcctggatgcgggacaagaatgaaggcaaaggcaccactggccacacaggtttccagccacaaaagcaataccccaaagatctcgtaacattgtgatggaaataaatcagttgatattttcaactttaaataatgagattcagaaactattatagagtttatacaagcacaagcttaaggatggccacctggaaaacacaggctccaaaagaatgggtcagcattgcaaagtgggaaagtaagatttttacttatatagacagtgaatggggctgcaaccctctctacacgagatcactatacacattacagtgatttgattggttacagcttgctacgttccaaggaagaatgctttaacattccatgaggaggggtgatgatctaaaggggtcttatccttggtgtcatctctgtggcctttcctaatcatttataggaaaaagcagaagttgtaactgcatgytatgtgactcagaccacatagccagccaccacatgcctctcaaggctcaaaatagtttaaagcttcaactgct

SEQ ID NO: 848192 - DNA, 496 bp, Homo sapiens
cattcccatatttactgcagctctattcacaagagcgaagatatgaaatcaatctaagtgtctaacagcagatggatggataaagaatatgttgtatatkaacacaaacggagtacaatttgccataaaaataatgaaatcctgtcattttgacaacatggatgagcctgggaaacattatgttacatgaaatgagccacctagtgtggtggttcacacctataatcccagcactttgggaggctgaggtgggaggattgcttgagtccagaagtttgagaccagcctgggctacagtgagatgtcatctctacaaaaatatttaaaatattaaattaaaaaaaaagagcagatgtggtggtacgcacctgtagtcccagctactcaggaggctaaggcgggaaggattcatatatatatatatgaaatatatatgaaatatacatatgaaatatatatgaaatatacatatgaaatatatattaaatacacatat

SEQ ID NO: 848193 - DNA, 433 bp, Homo sapiens
ttagctgggtgtagtggtgcatacctgtagtcccaactacgttggagtctgagatgggaggactacttgagcccaggagttgaaggctgctctgagctatgaccacaccactgccctccagcctgggccacagaatgagaccacgtctctataatatattctaaaataaaaaacaaaccaggttcctacgctcagagagctcatttttgcttcttgatttctcttatttttcctagagatctttgattctcaaatgtcctacaagggggaatattctgcaccaacttccccaaggtgtgccctgtgaaacatgctattttctccagaaatgccacaggraaaaagaaagattctgtgaacagatccgttggagacagatgtcagtttaagtcttcctctagacctgtcctgtctagtacagacaagaggctgt

SEQ ID NO: 848194 - DNA, 547 bp, Homo sapiens
aaagttataattacataggagggataatttctggtgtgctattgcgcagtgggttgaacagcaaggtacagtatattacaaaacagctagaagagaggctttctaatgtccttgccacaaagaaataagtgcatgggtgaccattacactaagtactctcatttggtcattacacaactatatgtgtattgaagcatcaaattgtacacttacccaaaaattacattaaaagtatataaataagaaaaacagatcgtggcggatgggagacaggactagattgcagctccagacagagcagcttgcggaggcttgcattgtgaatttgagctccagattgactgcaagaacaaaccagcaattctgagaggacctacagaccctctgaaggaagaggacttcctgcaggacccaggagacrccccaaatactgtgagtcccccagctgtggaagtggaaaagagagaccctcctctcccgaacacacaacctcactggaataagctgaagatctgcttgcagcagaagtttctgactttacctggaa

SEQ ID NO: 848195 - DNA, 613 bp, Homo sapiens
atttctgtgattttgaaaaataacactcccrgcttccatagctctaatcatcatagaaactcctttgcctctcatcctctgggcaccccctccttttcctgcaggtatttatgtggctgagtaccaaagcaataggaagagatgaaggaaagggtgtgatatgttggtaagtggaggtgggatgagaccacggttttcaggcttgactttgtgagagtcatgcttttcaaaaacacatttgcaagtctgatttaagaaaataatttcacaaaaaccctgccagcattctcaggaggatactttcctcatctcccactgtcggatattagaaggttttgaggctttttgaatgaagactttgggatcacaaatccctacctgaaaagattatcagggaataataacagagatctattaaaccctattactcaacttacctaattaacaccccaacaaatttacctacataattttcttgtattgatatacaaagacgagatgtaaataacattgccaacccaccataataaaagcagctaataaattattaaacattccctaggctgataataagccaggcactttacatatatcatctcatcttatcttcatc

SEQ ID NO: 848196 - DNA, 594 bp, Homo sapiens
acccctgccacacatacatccaatctctggaacctgtacatatgccacattacccrgaaaaaagaaaaggacttggcatatgtaattaaggttatggaccttaacataaggagattatcttggattattcaggtggacccaaaaatctaataacatgagcccttaaaaacacgtaattttctccagctggaggtagagagatgtggcaaaaggagaaggcaaagggatttgaaacatgggaaggacatggctcactgttgctggcttaaagatgaagggagacatgtgacgaggcatgcctgtgtccttaaggagctgagagaggttcccactgacggctggcaaggaagcagagatttgagccctacagccacaaggaactgagttctgccaatgacttgaaagagtttggaagtacattcttccctagagcctccaaaaaataaatggacctgtcaacactttaattttggccttttgagattccaagccgaagatcctgtgagctatgctgtgctggacttctcatttacagaactgtgacatcatacatggatgttgttctaagacactaggttcatgataacatattat

SEQ ID NO: 848197 - DNA, 640 bp, Homo sapiens
agcaactttccatctcactcaggctaaatgacaaaatctttgcagtgactaaagaccctactagatctgctctccatcttaccagctctttgaccttcaacttcaactgcttttctctttgttcattttactcaagattcctgacattattgctgtccctagaacatgctgggcatgctccaatcttcaggtctctgcactatctgtcccccaacacatctgcatagcaaacctttacctcattcaagaagactggctactctgtttagcactgaaactgccttctctctctcccaactggcactcccaatctcttataccctgctatattatttttctccataatacttaacgttttccaacatactttttatttacttatgtttcttgtcttcttgtagaatgctattatggtaagagttgggatctttgctaatttttttttttttttagagatgaggtcttgctatgttgtccaggctggcctcagactcctgacctcaagtgatcctcctgcctcagtctctcaaagttctgggattacaagcatgagccaccacagcctgcagtcctttgctttgttcactgatatataccccaaatgactagaacyaccaggcctttgtgaacgaatgaatgg

SEQ ID NO: 848198 - DNA, 606 bp, Homo sapiens
tgagccaccacgtctggcctggatgattckttacacagccatgttggcaagatttctctgaatccagctggagcagggtaaagaacaagttattcggtttctacatcaaataagactctcatctgtagcacgtgaatttttgttggggatttttgaggtattctcctggcccttttcatgccctctcacacagctcatgttcaaactcaactttgaaaagatgtacatgtatttgggagtgtgtaaattttacctttctcctagttttactagaaatgtcgtccttttttgtttatttgtgttcttatatttttattcttgctattattttaagaaagaggaaaatagtaactcatacctcacttttatactggagttcaatactattttatagtcatatgtataatttttgttttcctcttgaaatgaaattagaatactatgttcacttcctttttaaaaaatatatcattttagtcttcttgcaatctggaccacctcaatagaaaactacctgtttcattaaagagaaagatttatgtcatattttgaaatagaatattggacttaattgggcatgttttttcagagatatacattggccaa

SEQ ID NO: 848199 - DNA, 363 bp, Homo sapiens
tctaagaaaagtatacaccaaaatatattgtttataaaaaataaaatattgtttaaaatagtaaaataataaattgtggatgccaaggtgtttyagttatagagttatttaataaatgactcaggtgtgaagaatgggttagtgcaactaatttcttaaagaaatgaatgcttgctgatccaatcttgatatgaaagcttctatttgatagacatgtttttggatttattttctccagcttctgttatttttagccctgactggtaagtaacacatcgaacatgtgcttgaatatgttgtcagaaaacagattttatcacctttacaaggtagttttcatgttaatttccattctgaaactaa

SEQ ID NO: 848200 - DNA, 325 bp, Homo sapiens
ttgaaacagaaaatggagatttgaaacaagtactaaatcaaacactggtttacctattaccttcctccttccaaaaaacaaaacaaatgaaacaaaataaaaacaacaaaaatacctgaaagacaaaacaaaacaaaaacagggtcataattagaagaaagtataatttataaagtaagtaaatgttcttttaaaatatatgtgagtaaaarccatgaaattgattatttctctaaaaaattaaatttttactgattcataattgtaaatggcattataggatgatttagggaagaaaaagtacaggctgacttcactcatagac

SEQ ID NO: 848201 - DNA, 577 bp, Homo sapiens
tattgtgtaagtaatatttagaattactatgagccagtaaaaattaattccaaaagatttttatatagctattttagttcttttattttaatgtataattaataaatgtatttttattcctaaataactgtcataatttttatattttttgaccaattatatcccaatatatttcatccattataataaatccttgccagttaacttaatttagaatatttttgtttaaagtttcattgaaaagttatatgcttccagattatttttacttactcgtataatatgaaacaaaattgtaagagaagttatacttaaaattacaatataattcagggaacaagtgtaaaaccagcttattcatttacttgtttattcacttatttatttacaaagttcttccataaaacttactttctagagagataaccaatcaatacaatttttacaaataaataagtacattttatatgtagcattttagaagacatgttgtcttagttgatctgggctgaaatatamagtatcatagaaatttattgctcataggtggagactggcaaacacaaaattcaggtgc

SEQ ID NO: 848202 - DNA, 630 bp, Homo sapiens
taatccagcttgccttggccaccaatcatatagcttaccacagacaaagaagccaaaagaaccaacaactgagcccaattaaaactgccagtctgcggaatcatgggctgaatcactggctgtcaytaaaagacacaaaattctggagttgttacgtaggaaatttaactgacagaaaggctaaagataaatactagctcaacgtaaatcacattcaagctccttggataatatattacagggcatcctcataagacattttgtaaaggctgaagctgctgtagtattatatataggcaaattttgcagataagaatacacacacatcactgaaagctaccaggatagtatcttgtagtgggtcctcacaagaacttttatagaagctgaattcactacagaatcatatattagcaaaatttgcagatagaaatttagatatagatacacaggagtacacgtgtgcatacacaaataaaacaaataaataaaatggaaagctaccagaataataccttttagtgggtcttcacaagaattttcatacaagctgaagtcactgcagtagcccatataggcaagtttatattttgttgatctatgtttccaaaccgaggttttgatttgctt

SEQ ID NO: 848203 - DNA, 592 bp, Homo sapiens
tctactgtccagataaagaggcatttctaatatgtcagaatttgccacttttttcaccattaaaagccatctastgtaacatgtagcaaaaccttcaagcttgctatcactcctctgggctccctccaaaaagcaatttgtatcagctggcaaggtcattaaggaaactggtcaaaatgcaggtgggaaatgcaaccctgttgggtagagtcttaatgcatccatttatcagggatacaacgtcatttcaatggtgttgagtattaaaccatgattttccaagcatctcatggcaactgccaacttgggagatgatataaaatgtgtaagtgtgcaggcatatttcttaaaagtatgtatatatagagttaaatatattaatgatgtatgagtttatttcaaaaattatatgaagcaaaattttttttttgcaaaataatactgcagcatgtcgtattctcatggcacattaaatacagtttttatctactcattgatttctaatattctaactttccttcggcaaattgctaaaacatcatgatctagctaccctatccctaaagtgataaagttatgcaatatgcattct

SEQ ID NO: 848204 - DNA, 592 bp, Homo sapiens
tctactgtccagataaagaggcatttctaatatgtcagaatttgccacttttttcaccattaaaagccatctagtgtaacatgtagcaaaaccttcaagcttgctatcactcctctgggctccctccaaaaagcaatttgtatcagctggcaaggtcattaaggaaactggtcaaaatgcaggtgggaaatgcaaccctgttgggtagagtcttaatgcatccatttatcagggatacaacgtcatttcaatggtgttgagtattaaaccatgattttccaagcatctcatggcaactgccaacttgggagatgatataaaatgtgtaagtgtgcaggcatatttcttaaaagtatgtatatatagagttaaatatattaatgatgtatgagtttatttcaaaaattatatgaagcaaaattttttttttgcaaaataatactgcagcatgtcgtattctcatggcacattaaatacrgtttttatctactcattgatttctaatattctaactttccttcggcaaattgctaaaacatcatgatctagctaccctatccctaaagtgataaagttatgcaatatgcattct

SEQ ID NO: 848205 - DNA, 592 bp, Homo sapiens
tctactgtccagataaagaggcatttctaatatgtcagaatttgccacttttttcaccattaaaagccatctagtgtaacatgtagcaaaaccttcaagcttgctatcactcctctgggctccctccaaaaagcaatttgtatcagctggcaaggtcattaaggaaactggtcaaaatgcaggtgggaaatgcaaccctgttgggtagagtcttaatgcatccatttatcagggatacaacgtcatttcaatggtgttgagtattaaaccatgattttccaagcatctcatggcaactgccaacttgggagatgatataaaatgtgtaagtgtgcaggcatatttcttaaaagtatgtatatatagagttaaatatattaatgatgtatgagtttatttcaaaaattatatgaagcaaaattttttttttgcaaaataatactgcagcatgtcgtattctcatggcacattaaatacagtttttatctactyattgatttctaatattctaactttccttcggcaaattgctaaaacatcatgatctagctaccctatccctaaagtgataaagttatgcaatatgcattct

SEQ ID NO: 848206 - DNA, 555 bp, Homo sapiens
taattttttggttttcactggacaaagtgcttcatccttgtttatcctccactccattttactttatgtatgtatgtatgtatgtatgtatgtatgtatktatttatttatttatttagagacagtttcactctcgccccccaggctagagtgcaaaggcacgatatcagttaactgcaacctccacctctcaggttaaagagattgtcctgcctcagtgtcccgagtagctgggattacaggcgcccaccaccacacccagctaattttttgtatttttagtagagacagtgtttcaccatgttggccaggctagtctcaaactcctgacctcaggggatccacctgccttggcctccctctccacttctttttaatctttatttgtcatgccacttgattcccatagtcattgtgggctttttttttctctctgaacttctaatctatctacatttctttgctactgaagcagtttaaactgaatggcactttgatgcagttcaacagaattacataaggaaggctatcacccatgtgtcccatggtgtcatg

SEQ ID NO: 848207 - DNA, 637 bp, Homo sapiens
ctttttaacatgatatgatccaatttgtccatttttgctctggttgtctgtgcttgtaggatatactcaagaaatattgcccagaccaatgtcctggggagtttctccaatgttttcttatagtacttttatagyttgaggtattgaagtttttaattcatttgtttttttttaataagtgaagagataggggtctagtttcattcttctgcatatgaacatccagtttttttttagtgccatttaattaagagactctctttttcacaattatgttcttggcacctttttctaaaatgaattcactgtagatgtatgagtttaggtctggattttctattctgttacattggtttatgtgtctgtttttatgccagtaccatgctgttttggttaaaatagatctgtagcataatttgaagtcaggtaacgtgaggttcctctggtttgtacattttgctcaggacggctttggctactctgggtcttttgtggttccatatgaattttaggattgttttttctatttctgtgaagaatgttgttgtttttttgtcagggatttcattgaatctatagattgctttgggtagtatgcacattttaacaatattgatgattctaatccatgaacatg

SEQ ID NO: 848208 - DNA, 521 bp, Homo sapiens
ctcctctcatggctttgcactgcatttttcatttcatcttgttagcattcagtgttttgggtatgccatcactctcaatagcattcaatattttgggtgtgcaygccaagagatgacacaaaatggaagtcggttattatggctgacttgaacatctttgaaaccaagaggagactgaatgttattataccagatggatgaaatcagagtaggtttgaagtattcacaataataggctgcagtgtatcttgaaataaatgtctattgatcaaaatgaaataaaaattgcctcaaaattaaaccactaaaacgattaaatttgcatttgtcccacaggttttattacaattgagaaatctgagctgcagggacaatttttcaattgaagaatcaagaatcaatcaaagaattgtacctataaggataatttgttcaattgtttttttttggtcatatgcctttttactgtaaattctctattgttaccagttattttttgctggtcccaaaagaggaattaa

SEQ ID NO: 848209 - DNA, 378 bp, Homo sapiens
gacagtatcgaaattcctcaaggatctagaaccagaaataccatttgacccagcaatcccattactgggtatatacccaaaggaatataaatcattctactataaagacacatgcacacgtatgtttattgcagcactgtttatgatagcaaagacatggaaccaacccaaatgcccatcagtgacagactggataaagaaaatgcggcacatatacaccatggaatactatgcagccataaaaaggaatgagatcccgtcatttgcaggracatggatgaagctggaagccatcgttctcagcaaactaacacaggaacagaaaaccaaatactgcatgttctcactcataagtgggggttgaacattgagaacaca

SEQ ID NO: 848210 - DNA, 378 bp, Homo sapiens
gacagtatcgaaattcctcaaggatctagaaccagaaataccatttgacccagcaatcccattactgggtatatacccaaaggaatataaatcattctactataaagacacatgcacacgtatgtttattgcagcactgtttatgatagcaaagacatggaaccaacccaaatgcccatcagtgacagactggataaagaaaatgcggcacatatacaccatggaatactatgcagccataaaaaggaatgagatcccgtcatttgcagggacatggatgaagctggaagccatcrttctcagcaaactaacacaggaacagaaaaccaaatactgcatgttctcactcataagtgggggttgaacattgagaacaca

SEQ ID NO: 848211 - DNA, 510 bp, Homo sapiens
aggcaagggaattagaaagctcctgctatgtatatgtcactaaacagtgtatttcacacatctaatctcactcattgcaacagatattttcatattcattttacaaatgaragaactgaggctcaaggaaacaaaatagcttgcccaggatcacattgctattaaatatcagtgccaatttaggggaagagattgtacaaaattgacttacaatatcctagactacaagagaccttagatcaattactatgataatcctgtcttcagaccagtgctttcaacttggctaatcattggaatcacctgaagagctgttcagactacccagttcaccgtcccacaccaaaattattctgatgatcagcacagttaggaaacttctgctgcaatataggtgattgtctagtcagtctactgaaaaagaagctaagtccaagagattattaattcagcattagatttactgaatttgagataatggcagggcattcagtaggcccaaggaataat

SEQ ID NO: 848212 - DNA, 524 bp, Homo sapiens
ttactaaaacaagagaatttactgcaattgctgaaaaggccagatctatttaaataaataaggctrttctggattacatacagaattaaattaggggaccaactgttccccaacattatatgatatatggtcaacagacagcatcctggtgttttctttcctgtaccttcactcagctttgaaattttggggaaaaagatatttcagggcaatatctttatattcacaactctcaatattccaaacacagaaggaaaacctcactcttaagaaaacctagcttaattttcccccttccaaaattacataccagcataagtccatatattccagataactttctttggtaaacatataactgtgttatccatctgtgcaacctccatatatctttaaaacaccgcaatccacagaaaactgtctttaaaaacaaacaatgtgaaaagtatacaaatgtttgatttatttttctgaagagagaccttcccaggaaaaaagtttactgcaatatattcaaggtatgt

SEQ ID NO: 848213 - DNA, 513 bp, Homo sapiens
aaggatactattcccccaggattgagctgaatggggggaaaaaggctgcakaactaatctgcatgaacctgagttgcgtaataggggaaaacaagactttgggagaaataaaagagacaagaacaatgggagacaggaaacaggacacagaagacaatttgatttgaagatttggagtatgtgcctattttggtttcaggaaatgtgtctttaaaaggaagggagaatatgcctaaaacaatggaagatccattattttttgtatacaatctcaacagaaataacatgccttcaaaagagtagcctcagggtaacttctaattcctgtttgatgaatattataattttatttaatagcaaatggtaccactagatatgtcagctaccaaacgactattaaccaagccaggtattccaggtagattaggctgtgatttttgcaggcttctcacttagcaacatcacgcaatgggcaagccaaggtaccagaggccaccaaagcatggctagagt

SEQ ID NO: 848214 - DNA, 611 bp, Homo sapiens
aagttgaaagatgtgtatgattttgacgaatggacatggttgaatagtgtagyttgttgtggtaagttgttaggtgtaataggagataactggataagcagaataggactagatcaaggatggtgggggatcttaaatgcccccactgagactggcatatctgaaaaaaagagccaaagtgattaaacaaaggcagaagtgaaatgggatttaatggttaaaaatataacactggcgatactagaaaggatgtactagaaactttggcaaaatcttctagtaaaatagtacattgaggtcatgctttgaacttccccatcaaccctaaacacagcacagtaattataaaataaataaataaataataaacatcaaatgtagccacgttcaaggacaaagtaatactctatagatcagaaatgaaacaaaatcccagagtcatgagtgctgtggcattaaagccccggaccagactcactggcatccaaaatcaagaagagttacctgtggggtaatgaggaagaaaggcccccggacatggagaatggagggagccagatacaccgcattccagcaacaggcaaagggatccaggctcccctggaaggagc

SEQ ID NO: 848215 - DNA, 712 bp, Homo sapiens
aaatgtgggatgtagaaagttctgaacaaaggcatgtgtacagctgaattgcagcggttttgcgaagttcttactcagaggaggtcttcagactacaagttgaaagatgtgtatgattttgacgaatggacatggttgaatagtgtagcttgttgtggtaagttgttaggtgtaataggagataactggataagcagaataggactagatcaaggatggtgggggatcttaaatgcccccactgagactggcatatctgaaaaaaagagccaaagtgattaaacaaaggcagaagtgaaatgggatttaatggttaaaaatataacactggcgatactagaaaggatgtactagaaactttggcaaaatcttctagtaaaatagtacattgaggtcatgctttgaacttccccatcaaccctaaacacagcacagtaattataaaataaataaataaataataaacatcaaatgtagccacgttcaaggacaaagtaatactctatagatcagaaatgaaacaaaatcccagagtcatgagtgctgtggcattaaagccccggaccagactcactggcatccaaaatcaagaagagttacctgtggggtaatgaggaagaaaggcccccggacatggagaatggagggagccagatacaccgcattccagcaacaggcaaagggatccrggctcccctggaaggagcctgaa

SEQ ID NO: 848216 - DNA, 571 bp, Homo sapiens
tgtgtagagtcctaaatctgaagctttggttagatagttttccaatatcttggaaaaaacacaagtgatgtaagaagaaagaactkaggtacttggaggaattgaggtatggaaatgaattcggggtaagaactgactctatttaacatttaaaaccatctattactaaataagtatctccaatgccaaaagtcagttgatccagtaaagtagcaaaccaggcatggtattactgattcctctacctacataaaaggttaaatctctttaaccaccaggtggcaatgactcaccagctttttggatgtacacatttttacattctgcattcattcagagaagatcctttgacaactagtgagatcccaggcactaatttgtcataacagaatgagcgctgctctgttaagcaatgactactatggctacacactggattaaaatgatgagaatcacagtttccttctgggccagtgtagaaatgccaaagtttgagttaattgcagcattcaaggagatgaaagaatgtgtctaacttctctcttcactacaaatattccaggggaaatta

SEQ ID NO: 848217 - DNA, 475 bp, Homo sapiens
ttcagagattcaacaatgtttttctttccctttgacaggcagaacagttgtattcagtcttttttcatccaggttttctatcctgaacagattagaaacggtgtgttccactgagaataaaggggccaagctgctgctacagcgatgtttctgtaggacaccagctaccagggcaccttgaggcatctgttgcagaattgcagccacaaaatagaccgcctgtgatagggaccctgttagagcccaagcaactggcaggaaacttgcctcacatcagtgaactttgcatcagaagcactgcatctttagtgacctgcacagatacaaacaggagtccagtgggaggatggaggaagtgtcttcttccctctgctctcraggaattatccttcttcttgagatgagtttaatagaactaagtgagttgatatgaaaaattttagaagtcatacgaggattatgaatattgtaagct

SEQ ID NO: 848218 - DNA, 592 bp, Homo sapiens
gagtttacagtggtgcagctcaktagctgtatggctcatgggggctaggacatagcgtcagttccctcttaggaggaacacagccatatggactcgaggcagctccctcaactggaatcagtccctatgaaaactgcagaagtccccagtggtgaggactgtaggtgtccaaggtggttatgggggctgctggcttcttgcttaccttttccctgcaaggagaagttgctgctagttctcagtcgatcccaactgggagatagagtggtagaggtagagtgtttccttctgttctctaggtggccttcctgggtttcagtgcactataaaactatttttacatgctccagtgctctcttttggttattttcatcgaaatgtaattatttattcatggttttgactgtctttggggaggggataggtgctaggggcttctcagtggccattttgctgatgtcattctccccaaattgtctaattttatggggaaagggtggaggtcttaagtttatgtcattacaatggatgagctaatttcacttttttcatttctaagcaaaaaaaagggaaatttgaatttaatatgtca

SEQ ID NO: 848219 - DNA, 622 bp, Homo sapiens
ttttttttctttttaaattcatgttaaagtgcttagcacaatgcctggctcaggatgagtgttgagtaaatgacagcagtgatcgtgattacactaggacgtaggtaggtgcctatcagtcaggtgtagccagtggttatgggaagactgggagggtgcacacctaggccttcccaagggcatgggggtagacccagcttcaatgctgcactcaagcccagtctaaggcagcctcaaaggccacgtgacagatactcacacaagctgaagttggtggagtgtctgtccacgggactggcttacccagagtacatttcaagtgacaaggactcttgcagtgagcttggctgcagctaatttgtcattacatcatgaaactctccctctgaaaatggaactcagagtccaattcacagaggaatttattggcaagatcacagccacagcaagacctggagccaggcagctctgtctcttggggctgagtcagtctgggctgatggtgagtaccatgcaggmccctcctagaatgtatgcttgtagctaaccagctccaaataaactcatatgcaaaggcctaggaggaaaactacccaaaagaaaaggtttacctgatgctaac

SEQ ID NO: 848220 - DNA, 639 bp, Homo sapiens
tgcagcatatgcagttagtgttctaaaatcagcatgtctggtttaaatgccagctttgctgctgtttgagtgtggacaagttacatcgcacctctgggtgccttggcttcctcaygtaaaatgaagatcatctaacagggacttaggagttggtggacattaaataagtgaatacagtatgtgtaaaacacttaaagcaatggacggtacattaaaaggcccaataaatgtgagctgctgttgttattacgattatggtagaatatatggaaccaccagcaaaggtttcattcacctttaacctcctttaggaaatatgctacattttcctgaagatctgagtgctctattggaaacagccaattttgttttcatgaagtagagttactattttgctctcctgggttgaaagagaaaagattttttgctcaatcacatccccctgctttacggcagcttcatctgccatcagcaagagcacttgaaatgctttgagggcagcttccagagaagggagtccttaaaaatccatgcagacaaatgttcaggggaaaggtccttgttcatctaaatacactcagggacggaggcaaggccacagggactactctctccaggctcttctgcagcccacagctg

SEQ ID NO: 848221 - DNA, 624 bp, Homo sapiens
cacacacgtgcatacacacacgcagaatggacagtcttggggaattcttttttgttttytttttttaaattgatgttgttgctataatgtgaacagaaatttcacatgaatagatataactgtttcaaacacttatggcccaaagtgtaaatatcagatacataatatttatactctattctttgcccaccagatatggggtttcctatggatagaagctagatgtcctagttcaaaaacacccgtcatttggacaaataacccaatctgcttatatagaaaaatgtccagtgtttcccaaggctttgggaaggggttaagaagatataattgaagcttcactgtaagagttaaaaaacacacacagatagattataagcatatcactccgaagtagataatgtcttctgaccggaattgcatttgctttttgaaatgcagaggtgatggcgggggaatggtttcctgtagatctgttgagcaatcttccattcctttcctgctcagtgaactttttcattgtcctttttaaaccccatacccctattccactagattgccaaaaaatttttttgttatccttttctataactatgaggctacttaatggatcccgaatatagc

SEQ ID NO: 848222 - DNA, 536 bp, Homo sapiens
agaatttgaatttgaacctggaaggacttctatggtcctttctatgtatgtaatggtgtttttgtaggtaaatatttgaggttactctgtatagtaggttcaaatgtttgtgaaattgccttagagttagaaaacaattaacccaggttgagtctattatgtttcctgctcatttgtgggaaagctggtgatcccacactgaaaggaaactggaccagcaccttctcttccctggacggacgttattcatgccccagcagcaataacaatgcctcgtctcaagagctaaaaatctgttgattccagctgaagtgtttagagaaaagtgcattgaagactgaaccatataaacaggtcagagtgaaagccaatttttataaccagagtcaaaatcagtgtggaataattcataggtcattcttaattttatgttaaacattgtgstagattatctccatctttttggcccgtgctttcaaaatatccccatgatcaaagcttcttagataggatatgtttccctccattgtggggaa

SEQ ID NO: 848223 - DNA, 631 bp, Homo sapiens
aatggctcactgagagcaatagggtgtggagaaagagagagagggagcgagcagagggagctggatgtacacgcagttgcagtcagtcacttgtttcctgagtagactatttgagtttttgaayggttattggtgtgattatgtctatcccatcaaattgttgatgaactttccagttttttttggaaaataaatattaaaggatacaattctgattatgtttatatttcgtttcattttgttttcaacttaccctgtgaattttgtccatgatgttatggtatcttaagggatgaatctaatacagaattatgcacaatttttgtcatttgcctcccttaaaagaaaaaaaaaaatgtccatgactatactaaaagatcctgtcatcttaactaagaggcagctgtttccctggagttttttccctcttaactatatcagctatactgagtgggatgtaatcacatgatttaaaattgataattagtgtgtgaaaggcacttggcaatgaaatacatagcaatatcagtgacataattttggcagcagaaaaatgctaaatataatccaaatgtcaatgtagaaatgaaaacagtactagctagtcaatgatttatataatgtcttggga

SEQ ID NO: 848224 - DNA, 589 bp, Homo sapiens
tgctctataatagcatttctgatctttttcccttgatttcctgcctacttacctatttatttattttgccttttcctttgtcaatctcmtgctgtttcttgggcattgtttcatttccatatttataaatttaacattttaaaagataggtgtttctagttcatagatttgctgcaatcaccccctactaaagaacttcagggttttttgtttttttttttgtctgtgctttctattttgttttctgctaccaacaatactgcaaaacaagatgggtttttatataccgctgctttcatttatgagaagtggatttccagaaatagaatttctagacaaagtatatgtttatattttatcttactacatatggccagatcaaatttcaaaaaaaacctgaagcattttgacatttaaacagatatctttggtgccagtttatcagcccagacctgatatgcaaattagtagatcgtgatgttattgccacttcagtaagaaaccatatgttaatttacctcattattctccatagggtactttttcacttcagtcctctaccagggatcctgaaagagcagagtaaata

SEQ ID NO: 848225 - DNA, 655 bp, Homo sapiens
cccctcggtgccgggacaccagaggatccagggagccgagaccgccccgaccctagacatccaaaggggagagcccttagaattattccctggccgcagggcttgggtggaggctgggggtccacttcaagwctcggtttccaataataatagcatgtcctggtcacgctgatgccaggaccccacagaaggcaagcgattgattccgcgggcccttcaggcgtggcgtccaatttgcgcaaagcacagtaatccaagactttcgcgcactgaggactttaagggggcgctggaccgagacccatcttttctgagcagctccgggcgggcttagaattttttctcccaattctaaccaggatgcacggctctgaacttacagtgacctccgctcagtgttcttggctctgcacgggcgggaacccgctcaggactcaggaatattcacactagcaccaggggcttgcagaccactggagtggagggcgagaaaatagctgtatatgttcgcataaggtgtatttttctaaactagctaaatagatctcaaaaaaagaaagtcctggtccggaagccaagactgcgcccctcgatctgtccagattcgctaagggcgcctgagtgatgagacgatattgatgccccaagttttcat

SEQ ID NO: 848226 - DNA, 517 bp, Homo sapiens
cagggggggaagtcagttttatgctatgtggtatttaactttaaatatcattgaatttgtcagtcttttgctttatgtttaatggctttccattgtatctagaagatccccaacttaaagattttttaactttaagatttttcaactccacagtggtgtgaaagcaatatgcattcaatagaaactgtactttgggtgcctgacaaccattttgtttttcactttcagtgcagtattcaataaattacatgagatattcaacactttattatgaaatagactttgtgttagatgagtttgcccaactgtaggctaacataagcattctgagcacatttaaggtaggctaggctaagctatgacattcagcagtgtaggggtattaaatgtatttttgacttatgatagtttcaacttacaatgggttattgggacttgaccgcatcrtaagttgagaagcatctgtataaaatataagatactcagagtgggtataaaaaacactatcatggccagg

SEQ ID NO: 848227 - DNA, 620 bp, Homo sapiens
acagggcaaaaccttgtctctaagaaaaatacagaaataaaattagccggatgtggtgatgcacgtctgtaatcccagctactcaggtagctgagrcacgagaattgcttcatctcaggaggtggaggttgcagtgagccaagatcatgctactgcactccagcctgggcaacagagcaagactctgtctcaaaaatatatatgtaaaaaagctaaaaacagttaaactttatgacccagcaattccacttcttagttatatacccaagagacttgaaaacacatctgtgcaaaaacttgtacacaagtatttatagaagcattattcataatagtcaatagcagaaacaaccaaactgtccaactaatgagtgggttaataaaatgtgttaagtccatataatggaatatgcttcggctataaaaaggaataaagtactgatatatgttacaacctgaatgaaccttgaagaaaatagatactaagtgaaagaagccagacacaaagccccatatggtgtgattccacgtatatgaaatgtccagaatagacaaatcttcagagacagaaagtagatgagtggtttccaaagggatgggggagggagcaatggggagca

SEQ ID NO: 848228 - DNA, 602 bp, Homo sapiens
tagtcatcacaaaaaatatttgagtgtatgactttttgccaggcttatgctagttactcccctacccactaatttttattattattttgacgtataatttatgtacagtaagatgtacagcttaagtggatagstagattaatttttatgtatgtattcacctgtgtaaccatcgtctgcatcaagatatacaatgtttccagccctcagaaggctctcatgtcctctctcttatcaatactccctgacagaaggtagcaaccaattatgacttctgtcaccataggctaattttgactggttttgaacgctataaaaataaatcatgtaagtatatattcttgtttctggcttctttctctctacattatgtttgtgagattaatccatcgatgtgtgagccatagtactttttttctttttatttctctgtagtatactattatatacatataccacagtttatccattctcctgttgatgggcaatcagctaatttctgttttctgtctgttataaataagcctgctctggacactctagacatttttatgtgtgccttttgacagatgtaaggactaatttctattgatacataccca

SEQ ID NO: 848229 - DNA, 591 bp, Homo sapiens
agtcactttaaatattttagcctgtttccttttttcccctatacattttttgcttaatgttacatcataaggctgtccctgtgtcattaataatgctttgtatgcatcatttttgttagctacctaaagtacaaccaggggaactcaactgtgatatccttggatatcacctcatatttctcatgttttaaaagtacaggaaaaacagatatggggagtcactgccacattttggaccaaggaagggacagacctaaaaacagtcttccccagctccatcccaaggccgatactctcatatcatggtgctgtcattggagagggtgcagtgtaatgtggcccactccatggcagagaagttagatgaggcatcagaggccagagctggcaagcaggaaattacccactggggttccagggagacttgctgggaagctgccctttgggattctggtgaaacctgctaggaaaccacctttagaggcgccacygaaagttgctgtggtgaacaccacttaatgtcctgcacaccaaccaggcatcacagcagtaaaggagacaaaaccacctgatccaggaagtgaaacttgt

SEQ ID NO: 848230 - DNA, 581 bp, Homo sapiens
ttatagagctactgaaaggcttaaatgggatccataagtacaggatatagtgtggtatatatctatagcaaacattctatggtagctatccactaagctcctaaggatataaacaatgttttttatcttcactgcatttttcttgagacagagtttcactctgtcacccaggctggagtacaatggcgcaatctctgctcactgcatcctctgcctcctgggttcaagcaattctcctgccttagcctccgaagtagctgggattacaggcgcccgccaccatgcccagataatttttttgtgtctgtgtatttttagtagagatggggttccactctgttggccaggctggtcttgaactcctgacctcatgatcctcctgcctcggcctcccaaagtgctgtgattacaggtgtgagccaccacacccagccttcttcactgcacttttctagtgtttaccaccatagtaaatgctctgtaagtgaatgaattttgkgatgtattatattattatgccaaatattcattgtccctttccctataaaaggattgcacatctctgtccaaggccatgtgaa

SEQ ID NO: 848231 - DNA, 581 bp, Homo sapiens
ttatagagctactgaaaggcttaaatgggatccataagtacaggatatagtgtggtatatatctatagcaaacattctatggtagctatccactaagctcctaaggatataaacaatgttttttatcttcactgcatttttcttgagacagagtttcactctgtcacccaggctggagtacaatggcgcaatctctgctcactgcatcctctgcctcctgggttcaagcaattctcctgccttagcctccgaagtagctgggattacaggcgcccgccaccatgcccagataatttttttgtgtctgtgtatttttagtagagatggggttccactctgttggccaggctggtcttgaactcctgacctcatgatcctcctgcctcggcctcccaaagtgctgtgattacaggtgtgagccaccacacccagccttcttcactgcacttttctagtgtttaccaccatagtaaatgctctgtaagtgaatgaattttgtgatgkattatattattatgccaaatattcattgtccctttccctataaaaggattgcacatctctgtccaaggccatgtgaa

SEQ ID NO: 848232 - DNA, 658 bp, Homo sapiens
cacaatggtggaatgtcatcagttaaggcaggaacaggccattttcacttcttttgtgaatcttcagttacttcaggccatctggatgaatacgtgcagacttgggctcagaggcctgacaagaataagatgattgtctgtgtataaaatcccaaacattttaccaaaaaaaaaaaaaaaaaactctttgaattgataagtgagccctgcaagatctcaggaaacaagaaaaatatacaaaaatcaattgtatttctaggtacaagcaatgaacacatggacccaaatcgaaaatacaataccacctaaaattccttttaaaaatgaaatgcatgtaaatctaataaaacatgaacaggacttacctgctgaaaactacacaatactgatgacataaatcaaagaagataaataagtgaagagatattaccatgttaatggattggaagacctaacacagtaaagatgtcaattcttccccaaattgatatatacatttaatgtatttctattaaaattcaagcaaaactttttatacatacagaygtagtattataaactttatgtgaaaagacaaactagaatagctgaaacaattttgaaaagaacaaagtgggaagaaacagtctgagttcaacatttactataatagctacaa

SEQ ID NO: 848233 - DNA, 484 bp, Homo sapiens
tttgctggaagaataaagtataactccttgtccgcccttttattatactggggttcacactaagagagtctgaggacctgtggaactcccatttgcatgaaataacttttgcatctattctggaggaaaacttcctaaggcagatttggacagaaaattgctatcagcgcaaataaaacaatgcaaagcctactccggggaacgttgctctgccaccactactgaaatgggtcatccccttggtttctgaataaagaattatgaaacctggggctagaatgctcagggaggaatttaccaatccaaatcttccccttatggtagagaacaaactttcaaggtttgttctccactgtaagtgtgcgagggctgttagggaccgtaatatggctgccggagactggtgtgtgtacctccttgrctgtacgtctcatttccagttatgattttacaatcatctctttctcaacctttgcttttaaat

SEQ ID NO: 848234 - DNA, 584 bp, Homo sapiens
agatcccaggctggagtgggtgttgggggagacacagccctgtcctcagggagccccagtctgagggggacacayagccctgccctcggggagctccgatgttgaggaaggaagcaggccacacacggaaacccagtagaccctgggacaggtggggaaggggtaactcccgctgactctgccatcacagggtgggtaggtgggaaggaggcaggtaggaaggctgcctgcatgttccagtgcctggaagcaggtgtgtaggtagatgggggcaatggagctgaactttaaacgctctctggagctaatgttgcttcgggcctgccagccagggcattttctgtccaaatccaactgtcattattaaacatttattatgcaagggagatgtgcttttctggtctcagtgtttggccagcaaacttggtgagtaaatggactagaactaatcctgtagctaaacagcgagggctttagaaaaggaaacgcctcacttgcctaatagctcccagggaggggtgagatatggagtatcagccctcggactgccctcttcctcagttagggagacagtggcttggtgg

SEQ ID NO: 848235 - DNA, 584 bp, Homo sapiens
agatcccaggctggagtgggtgttgggggagacacagccctgtcctcagggagccccagtctgagggggacacatagccctgccctcggggagctccgatgttgaggaaggaarcaggccacacacggaaacccagtagaccctgggacaggtggggaaggggtaactcccgctgactctgccatcacagggtgggtaggtgggaaggaggcaggtaggaaggctgcctgcatgttccagtgcctggaagcaggtgtgtaggtagatgggggcaatggagctgaactttaaacgctctctggagctaatgttgcttcgggcctgccagccagggcattttctgtccaaatccaactgtcattattaaacatttattatgcaagggagatgtgcttttctggtctcagtgtttggccagcaaacttggtgagtaaatggactagaactaatcctgtagctaaacagcgagggctttagaaaaggaaacgcctcacttgcctaatagctcccagggaggggtgagatatggagtatcagccctcggactgccctcttcctcagttagggagacagtggcttggtgg

SEQ ID NO: 848236 - DNA, 440 bp, Homo sapiens
tttagtataagtgaaagggaaagtatttctgagaaaatggcatttaagtagaggcctgcaggatgagtaggcgttaacsagccaggaaggggtgaggactgtgctaagctgcagggacagtgtgtacaaaggtcctgaagtgcgaaggagcagagtgcattctgaggaactgacaggtggcgggtgcagctgtgtatgtgtgtgtgtgtgtgtgtgtgtgtgtgtgtgtgtatggctttctcagtcattcgaaggaggtttgaaagttgccagagagttttaagcaaaggagtgacatgattacagtcatgttttaaaacatccctcttgctgctggaggaggctggattctggggcgggggtgagagtgaaagcagcagggccaggtagggatctcaggcgagagagggtgatggcttggtccagggcagcttctatga

SEQ ID NO: 848237 - DNA, 561 bp, Homo sapiens
tgggaaccggtcctgataaccccttaataacccactcccacccatctcaaccttgtttgaagcaatttctgttcttagcctgtcaggacagttctttctggacttttctcatctgtgatgttggagtccttcactttgtcctaacacccctctccaagcctggaggtgtgctccagggcctgaggatcagggcgcaggaatgttttttcccttcagcccatcaagattttacagaccaacaaccaggtgtgtggagggcctctgccttccctggcctgtgctgggtctggaggggccgcagaaacacggcagatggagacagcagtcaccactgtggacacacacctctcgggagacagtgaagccttctcacatcgctgtcctgcctggtgacttcaaaatccagacacacagctgtctttatgagtccctgtttcactgctgaagaggctgaggccragaggatcggccaaggggcctcaggcaggagcagcagagctccggtgacatccgtgtgttctcatgccctcaacgaccctgctgggcagggctgtggggagc

SEQ ID NO: 848238 - DNA, 373 bp, Homo sapiens
gacttcctttagattccatatataactgaaaccgtgcagtatttgtctttctgtgtctagcttatttcacttaaagtaataatgtccttcatgttcatccatgttgttccaaatggcaggatttctatcttttctttaaggctgaataatactgtattatgtgtatatatacatatatgtatataacaatttatttttaatttaaaccggagaacaaaaataactaatagcctactaagtgaaaggtgcatacaaggtaattctcrtgctcaaatccaagtctgggtaaaaaagccataaaaacagtcatgtgtcacttaaccaaagggaatatgttctaagaaatatgccattgggcaattctgtcattgtg

SEQ ID NO: 848239 - DNA, 373 bp, Homo sapiens
gacttcctttagattccatatataactgaaaccgtgcagtatttgtctttctgtgtctagcttatttcacttaaagtaataatgtccttcatgttcatccatgttgttccaaatggcaggatttctatcttttctttaaggctgaataatactgtattatgtgtatatatacatatatgtatataacaatttatttttaatttaaaccggagaacaaaaataactaatagcctactaagtgaaaggtgcatacaaggtaattctcgtgctcaaatccaagtctgggtaaaaaagccataaaaacagtcatgtgtcacttaaccraagggaatatgttctaagaaatatgccattgggcaattctgtcattgtg

SEQ ID NO: 848240 - DNA, 567 bp, Homo sapiens
attctactataaagacacttgcacatgaacattcatttcagcaatgttcacaatagcaaagtcatggagtcaacctaaatgcccatcaatgacagattggataaagaaaatgtggtacatacataccatggaatacgatgcagccataaaaaaaatgagatcatgtcttttgcaggaacatggatggagctggaggccattatccttagcaaactaatgcaggcgcaaaaaaccaaatactgcacgttctgacttgtaagtgggaactaaatgatgagaactcatggacacaaagaaggtaacaacagacactgggatctacttgagggtggagggtgggaggagcgggaggagcataaaagataactattaggaactgggcttaatacctaagcccagtatggtgatgaaataatctgtacaacaaacccccgtgacatgaatttacctatgtaacaaaccttcacatgtacccctgaacctaaaatagaagttaaaaaaaaacagaagtctatctcagttrcttatttacatgtttcaaattggagttatgagattgtcattcta

SEQ ID NO: 848241 - DNA, 487 bp, Homo sapiens
ccaggacacccagggcccttgggcttatctgactgtcactgatctcatcgctttgcctctccacccatcccttcctgcccccagactggaataycacctcaagatctctccaagcccccttgcaaacccaccatacctgaaagaggctgtggagggctggttccaggtagctgttcccatgatcatgaatctttaaccatagagccctttgagaatccaataaaagctatggatttcctggttccaaagaggtacaagggcaccaaggcaattttgcatctaatatcgagggactcacagatctcctaatgccctgttttggggcccacgggttaagcatctctgtatcacaccatgcttatgcactgacatatacaagaaggttgggccctaccaaaactgcctgtgtacatatgccctaacattgaaatatacgtcttgagaaacccaggacactcagcccatggtagaatgcatcttggaacac

SEQ ID NO: 848242 - DNA, 567 bp, Homo sapiens
taactaaatgcataggaagttagtagtctcaaatgttttgtgttagaaaaaagctttactattcaagccaacaaytggaattgctctctatgactagaagactgtgggtgctgaaactagagattatttttgttttatttagcatgaccatatgtattttctgtctgaagaatctacagtgtagtagatccaatgtagtaaatttgtaatacgaaaaaaaaaacagctctgaaagttttacaaaaattattaaactaggagtagctacttgtcaaccttggttaagaggaggtattgtctttcctgtaggatcacagtgacagagacaaacaaagctcttcaataaacactggctgaatgagtgtgaatggacagaatgacgttattaatcgctttggtaactggggatcttatctgctctcccctcatcactgagtaacatccacattagaaaagagatgatgtgctttgtcttttttgtctaatctctctcttattggcaacactcactgaactgagaaaaataagtgaacaggggagtcagtccaaataaagggcttaaattcc

SEQ ID NO: 848243 - DNA, 636 bp, Homo sapiens
acttaataatatattgtgaacatcttaccatgtctgcagatataaatgtatgatgtaactatatgaaacattcagaatgccattaaggaaatagaagtctcactaggataytggaatagaaaaagatatattatagggatttataagcttaagggctgctcaaagcactaggagagtgaagactagaaggccactttcaggcaatctggaagtgcagcaattgcaaagaagcttccatcagtgattacagccatatggcagcatcagggatggagattctgaagggaatgcctagagccacctgcaagctgccaaagatctttgctgcctcagtacgtaagtgggtgatcctcaggtggagcattcagtgctacaggatgcttgtgtatatctgcctctagaaaatgagggctctcctcttttgccttcagaatccaacctggaactgtagtgaaaagagattatgagatttaaacttttggcttcctcccagagatgatggaaggggcagagatgaagctgaattgacaaaggacataaaaatggtcaatgcctttttaatagcttcatactatattgtactgtaaatttttaaaacttcatattttttctttctttttttcttgcttcctcaac

SEQ ID NO: 848244 - DNA, 528 bp, Homo sapiens
tactgagataaactttaaagccaagttataggtgaagagaagaaaggcaatactcatttttctacttcaaaattgccacaaatgaaaaakttattttgtgtctacatcagattaaatagctgaataaaaacataaaaattaatgattatccagttttatctagtttttaacgtagatgcctgtttcattgtctacaaaatcttacccaattgtctgtcttgctgccaattaccatgtaagacccttggacatagacagtgtactgccacttttttttttatgccatttaaccatatggttaaatcagtccactctggtttataagatacctgaaatacctgggtccttagcgaggtcaaccagtcattttggctaccatatcaactgattcagactggctgagatacaattccatgaactctgtggtgcacatatgttgttataactgaaaacatcagctgtcaagtggtctactctggtcattcagcgctagatgagaaagcatatacaaatcagccagttcacatt

SEQ ID NO: 848245 - DNA, 628 bp, Homo sapiens
tacatatccaggggaatatttggggataatttattattttgtatttagaaactaaaaaaagttttttttaatgagactatgcaaaaagtatcatagaaggatagtggtgaagagtataggctcttggccaggtgcgtggctcacacctataattccaccactttgagaggccaaggctgctggatcacttgagcccagaagttcgagaccagcctgggcaacatggtgaaacctcatctttacaaaaaatacaaaaaattatccaggtgtggtggcatctgcctacagtcccagatactcaggaggctaaggtgggaggatcacctgaccccatggaagttgaggctgaaatgagccaatgagccaagaccacgccattgcactccaacctgggtgacagagtgagacccccatctcaaaaaaaaaaaaaaaaaaaaaaaaaagggtgtaggcttttgaaccagactctttaggtttaaatcctagctctgccacatatactttattctcctcaaatttaaaagagatagtattaacagtgtttatattgtcatattgaggaatctatggataatctatggacatctctaagaacaatgtctatccayaacacaagagctcaatatac

SEQ ID NO: 848246 - DNA, 566 bp, Homo sapiens
ttgcattacactttattttgataggttttagtcacctcaggctgccgtaacagactgggaggcttaaacaacagaaatttatttctcrtagttctggaggctggaatgtccaaggtcagggtgccaacaaaacagattacatcctgaggcctcttggtttgtaggttgtgtgctcacatgacccctttctttgtgcatgtgcagaaacagagagaagacagagagagagagagagagagagagaaacagagtgaaagagcgagttctggtgtctcttcttataagggcactagggggctctactgtcatgacctcatctcatcctaattacctctggaaggccccatctccaaataccatcacactgggagttagggcttcaacatatgaattttggagggacacaatcattctatcaaaaacagatagtttcttcaaatcctttaggaaataaatagggctcaactataaaactctaaaatatcacatgtgcaagagcttgtgttaggcactgaagaagatagaaatatatttaaaataagaattctacttttgaagagttttta

SEQ ID NO: 848247 - DNA, 566 bp, Homo sapiens
ttgcattacactttattttgataggttttagtcacctcaggctgccgtaacagactgggaggcttaaacaacagaaatttatttctcgtagttctggaggctggaatgtccaaggtcagggtgccaacaaaacagattacatcctgaggcctcttggtttgtaggttgtgtgctcacatgacccctttctttgtgcatgtgcagaaacagagagaagacagagagagagagagagagagagagaaacagagtgaaagagcgagttctggtgtctcttcttataagggcactagggggctctactgtcatgacctcatctcatcctaattacctctggaaggccccatctccaaataccatcacactgggagttagggcttcaacatatgaattttggagggacacaatcattctatcaaaaacagatagtttcttcaaatcctttaggaaataaatagggctcaactataaaactctaaaatatcacatgtkcaagagcttgtgttaggcactgaagaagatagaaatatatttaaaataagaattctacttttgaagagttttta

SEQ ID NO: 848248 - DNA, 556 bp, Homo sapiens
atataaatatttttattcttgcaggaagcaatatatttagtttttcttttccactttgatagaaaatactacaaacaaatttcattcattatctcaatgcagttgtagcatattatacttgatacgcttcatacatagatgtaatatactgtatgatatatcaaaggtaatgtattttttcttctgtcagaatgtaccaaatgatggaaattaagaagattaaatagatacttatccttaagtcaacatatatataattaaatataatattctacttaagaaaactgtcaggattgagaggccatacgatttatattttctttcttaaatgtcttgaaaattcttgtgatttttctgtgtgtttttcttttactttttaaagaacctacttcaaagccttcttaaaagtcaccgttactgccttctaatgtattrtaaacaaagagaacgtcctttcttcaaatatgcagggctcctaagagatgtccactggcgtgtcaaacaaaaatcaagaacttgctcttttatcagcattatcaagcccatccagtagtga

SEQ ID NO: 848249 - DNA, 618 bp, Homo sapiens
aagaatctcagtgaaccccaggcacaagaaatataaagaaaattacagcagggcgtaccataatcaaatggctctaaactaatgacaaaaaaaaagttttaaagcagccagagaaaaaaagaaacatgatgtacagaggggaaaagaaagataaatattacagcagatttctgctagcaataatgcaagtgagaagacggtggagcaacatgtttaaagtaatgaaagaaaacaacttccaatctagacttgtatatgcagtgaaaataattttaaaaataaaagtgaaagaaaatatcatcacacatataatagctataacaattaaacaacacatctctactataagaaatgttaaaataaatctttaatacaaaagtaaaatagcaccagatagaactatagatctatgcaaatgaataaagagcaccagaaatagtgactatatgggtaaatgtaaaatatttttaaattatttaaatttcctttaaatataattgactgtttaaacaaaaataagaayttattatggagtttaaaatatacaaaagaatcgcataaaggcaggaggagtgaaatcaaaatacagtattgtaaagttcttatactatatgtgta

SEQ ID NO: 848250 - DNA, 521 bp, Homo sapiens
caagtattaaagattcaaactaacatactctaaccacaaagcccataaccttaacggctctctcttactatacaagtaaagtatattttttggcagaaacagaaaaatataacaatgtgtttggagcatgttaagtattctagagctgatggggcacagtatgtgatacaattaattgtaaataatggagtaagcaactaagagaatagttaataatcaaaaactttaaaactcattctaagaaatgtttagttcattacaaattaatgattggaatcagattaaggagaaataatgacttttgtggaggtgagtgacataatgcaacctacattgggaataaaagggtaacaacactatgaagaatacatttggagataaaggcatccaggcaagagagacaagaagggaaggcaatgaaaacactctatgtctcttctattagaggtgctgccttagataagtggagagatagacaatgaatgayacactcgaattttggtgttagaatggactgcact

SEQ ID NO: 848251 - DNA, 610 bp, Homo sapiens
atacctatgtaacaaacctacacatcctgcacatgcattccagaacttaaagtaaaataaataaataaatagaacaaaatgtatagaatacagctaaagcaakgcatacacagaaatttatagctgtaaatgcctacattaaaaaataagaaggggccgggcacggtggctcacgcctgtaatgccagcagtttgagaggccaaggcgggtggatcacctgaggtcaggagtttgagaccagcctggccaacatggtgaaatctcgtctcaactaaaaatacaaaaattagccggccatggtggcaggcgttatcccagctactcagggggccgaggcaggagaatcgcttgaacccaggagacggaggttgcagtgagctgagatcgcaccatcgcactccagcctgggggacaaaagtgagacttcatctcaaaaaaaaaaaaaaaaggatctcaaatcaataatgtactcttccaccttaggaaactagaaatagaaaagcaaactaaatccaaagcaaacagaaggaagaaaataatacagattatggtggaaattaataaaatagagaaaggaaaacaataaagaaaatcaatgaaataaaaaac

SEQ ID NO: 848252 - DNA, 623 bp, Homo sapiens
catgttcttatgtttatgtccgtgtgcaactaatgtttagctcccacttrtaagtgagaacatgcaatatttggtttttggtttctatgttaacttgcttgggataatggactccagctacagccatgctgctgcagggatatgatttcattcttgtttatggctgtgtagtattttgtgatatgtaccacattttatttatccaatccactgttgatgggcacctgggttgattccatgtctttgctattgtgtatagtgctgcaatgaacataagagtgcatgtgtccttctggtagaatcatttattttcctttgggtatatacccacttgtgggattgcctagttgaatggtagttctatttttagttctttgagaaatcgccaaactgctttccacagtggctgcactaacttacattcttacagtatgtaaacatccccttttctctgcagcctcaacaacattagttatattttgacttttaaatgataactgttctgacaggactgagatcatatctcattgtggttttgttttgcatctctctgatgattagtgatattaagcatttcttcatatgtttattggatgtttgtatatcttcttctgagaagtgac

SEQ ID NO: 848253 - DNA, 623 bp, Homo sapiens
catgttcttatgtttatgtccgtgtgcaactaatgtttagctcccacttataagtgagaacatgcaatatttggtttttggtttctatgttaayttgcttgggataatggactccagctacagccatgctgctgcagggatatgatttcattcttgtttatggctgtgtagtattttgtgatatgtaccacattttatttatccaatccactgttgatgggcacctgggttgattccatgtctttgctattgtgtatagtgctgcaatgaacataagagtgcatgtgtccttctggtagaatcatttattttcctttgggtatatacccacttgtgggattgcctagttgaatggtagttctatttttagttctttgagaaatcgccaaactgctttccacagtggctgcactaacttacattcttacagtatgtaaacatccccttttctctgcagcctcaacaacattagttatattttgacttttaaatgataactgttctgacaggactgagatcatatctcattgtggttttgttttgcatctctctgatgattagtgatattaagcatttcttcatatgtttattggatgtttgtatatcttcttctgagaagtgac

SEQ ID NO: 848254 - DNA, 623 bp, Homo sapiens
catgttcttatgtttatgtccgtgtgcaactaatgtttagctcccacttataagtgagaacatgcaatatttggtttttggtttctatgttaacttgcttgggatratggactccagctacagccatgctgctgcagggatatgatttcattcttgtttatggctgtgtagtattttgtgatatgtaccacattttatttatccaatccactgttgatgggcacctgggttgattccatgtctttgctattgtgtatagtgctgcaatgaacataagagtgcatgtgtccttctggtagaatcatttattttcctttgggtatatacccacttgtgggattgcctagttgaatggtagttctatttttagttctttgagaaatcgccaaactgctttccacagtggctgcactaacttacattcttacagtatgtaaacatccccttttctctgcagcctcaacaacattagttatattttgacttttaaatgataactgttctgacaggactgagatcatatctcattgtggttttgttttgcatctctctgatgattagtgatattaagcatttcttcatatgtttattggatgtttgtatatcttcttctgagaagtgac

SEQ ID NO: 848255 - DNA, 622 bp, Homo sapiens
tttaagttaaataagatgagagtttctgtttcccatttaggaaatttctggaagaaccagtaccattccagacatatgccaatttgatatcctctttctgtggttaagagctatctaaaatacwtacacacttttggcagtacaatccttggtatttacagaaatgaaacaagataattatgtagactaaatgttagcagattcttgtttccccaatgactactaaggatgtttcactcaatctctgcttctagtaaccaaatttctcagaataacactacaacacttggaaatgaaaagtacagatcccaagccgttatagatccccaagttgcgaaggaattctgacaatttaagttacacatttgtttcattcttgatccaaaactaaccgacacttaatcagacctcaaaatccaaatctatgtaaattgaaatattgaaccttactgttaaatgtattctgagtagacacctgaatatgataatttggaacaaataaaaatgtctcttcaactctgctttgttgaaccaacttgggaaattagaaaatattaacaactaatgggtaaacaagcaaaatgcatatgaaatgtaaattgtattaagggaggaaaccacc

SEQ ID NO: 848256 - DNA, 622 bp, Homo sapiens
tttaagttaaataagatgagagtttctgtttcccatttaggaaatttctggaagaaccagtaccattccagacatatgccaatttgatatcctctttctgtggttaagagctatctaaaatacttrcacacttttggcagtacaatccttggtatttacagaaatgaaacaagataattatgtagactaaatgttagcagattcttgtttccccaatgactactaaggatgtttcactcaatctctgcttctagtaaccaaatttctcagaataacactacaacacttggaaatgaaaagtacagatcccaagccgttatagatccccaagttgcgaaggaattctgacaatttaagttacacatttgtttcattcttgatccaaaactaaccgacacttaatcagacctcaaaatccaaatctatgtaaattgaaatattgaaccttactgttaaatgtattctgagtagacacctgaatatgataatttggaacaaataaaaatgtctcttcaactctgctttgttgaaccaacttgggaaattagaaaatattaacaactaatgggtaaacaagcaaaatgcatatgaaatgtaaattgtattaagggaggaaaccacc

SEQ ID NO: 848257 - DNA, 392 bp, Homo sapiens
gtaaaaaatggcattggtaatttgataggaatrgtatttaatcgttgagtgcttcaggccatatggtcatttaaattatagtgattcttccaatccatgagcatggaatgtttttccacttgtttctgccatgtatgatttcatttggcagtgttttgtagttctcctcgtagagctagttcaccttcttggttaggtgaattcctaagatttttgtgtgtgtctattgtaaatgaaattgcattcttgagttggctctcaggttgaacattattggtgtgtagaaatgctactgatttttgcatgttgacttttgtatcctgaaactttaatgaagttatttatcaggtctaggatactttcatcagagtccttaaggttttatatgtgta

SEQ ID NO: 848258 - DNA, 540 bp, Homo sapiens
tatttctttttttctgctaccttggggctagtttattcttgtttctctagtttctttaagtacggtattagattgttcatttgagatttttcagtctttttgatatrggtgcttagtgctataagctttcctcttaacactgcttttgccacattccagaaattttggtatgttgtgtttctgttttcacttgtttcaaatgttttggtttatgccttaattttgttgtttattctaaagccatgaagaagcaagttgtttagttttcatgtaattgtgtgatttgaggagttcctcatggtatttatttatatttttattccattgtgatccaaaggtatgtttggtataatttcattttttaaaaatgtattaagacttgacttattggtgagcatgtggttgatcttaaatatgttccttgtgcagatgagaagaacatatattctatggctgctatgtggcatattctatagatgtctcttaggtccaattggtcttgtcaaatttaagtccagaatatctttactagtttactgc

SEQ ID NO: 848259 - DNA, 567 bp, Homo sapiens
ctttgttcggattcttttctattaaatggcatcactacaaagaatatgggcaagaaacaaatttcaagactatgtatcccattccatcttattgattacgtatttctgtgaattagcctgaatctcatccacaaagctgactggttaaaggaggattacaagtgaataagaaattcatggagaaggaaagatgatgtaaaatatattgaaaataatggcaaaaacctcatttactttttcatgaacctaataaatgggggcacatctgactctagaaaaacttatatccaaaatcataaagaaaagttaagatgtcctactgaaatggatgaataagttaaacattttcctacctgtatcttttagcttctaagtcatttctttcgatatcaaagctgccaaggtcatctttgactctgtgtgtgtgtgtatgtgtgtgtgtgtgcacscgtgtgcgtgcacgcgtgcacgtatgttcatttgatagttacacattttgaaagctcaacgtatttcaagttgctaaaattccaaacagagctgtaaataaaataatcctggttgcaa

SEQ ID NO: 848260 - DNA, 567 bp, Homo sapiens
ctttgttcggattcttttctattaaatggcatcactacaaagaatatgggcaagaaacaaatttcaagactatgtatcccattccatcttattgattacgtatttctgtgaattagcctgaatctcatccacaaagctgactggttaaaggaggattacaagtgaataagaaattcatggagaaggaaagatgatgtaaaatatattgaaaataatggcaaaaacctcatttactttttcatgaacctaataaatgggggcacatctgactctagaaaaacttatatccaaaatcataaagaaaagttaagatgtcctactgaaatggatgaataagttaaacattttcctacctgtatcttttagcttctaagtcatttctttcgatatcaaagctgccaaggtcatctttgactctgtgtgtgtgtgtatgtgtgtgtgtgtgcacgcgtgtgcgtgcacgcgtgcacgtatgttyatttgatagttacacattttgaaagctcaacgtatttcaagttgctaaaattccaaacagagctgtaaataaaataatcctggttgcaa

SEQ ID NO: 848261 - DNA, 564 bp, Homo sapiens
ggtgaaatcctagtgaaacctgactggacaggttctaggcttgcaaagggagagaaatgatctgtagaagaacctaaagaatctggctagtacgwattggcaggagctgggaaggtatgcatgagactggatcctgaggacaatgggcgaaggaggtagaacaggaagttggtgtgctctcccaggatacggaacttaaaaccctggcgaggactctaggaagtgttactaacacactggtatttggaaacctggagtaaacaatggcccacactaagtgaagcagaacttccatggcagattgcacagggaaggattaaagggctcaaagaagcagacatgttggagtagatatactactgaagtctggaaaacccaccagctgattaaggcctggaggatacactcaacttatgaaattaataagaaacatgctggtgagggtggtaccagtcacgctgagaagcacagtagtggtaaggtgataaatgagtcctggcccaggtcctgcttacagtgggtctggtgggtctagagacccacccagtggtcacttcctcagtt

SEQ ID NO: 848262 - DNA, 621 bp, Homo sapiens
cttgtcaagtgggctgtcctaagagatgatagatattaagatctcttcttataatactttttataaatattaagattttgagtatctttactattatataatttattattttcaaaatttaatatattttcattttgatgtcatgtttcttttattatgatagatatttttatgatttagcacatgttgttatattatgagctagtattttgtatttaatttcaaaatgaaaagcaaaattgtcacttaacaaagtgttcttgtgttaagcttttcttcccttaatcaaagagtaaataggaaatttgaagaataatttgtattgataatatgagttcatatgtctttagaaactataaggaaagatacagtctgtgtgaacaaccgatgctaatttttagaattgtttttttaatgagacatacgtaacttgacctttatatggtcccaaaaagtgtaggaccaggcttgatgctgggacacatgtgagagatgttttgctgcagtagcagaaagtgcccattgtgtyggcttacctgcatgttatcctagtttgcttttatttttgaaattttatgaaaggtaacaagtggaaaaaggtccggttgtacaatagcatgc

SEQ ID NO: 848263 - DNA, 608 bp, Homo sapiens
aagctggaaacatttcaaatatttatcaatatgtgaatagacaaaggaattggtgtatctccataccaccgaatacactaaacataaaactattgatacatgttaaaacatagatggatctcaaaaatgattacatggagtgaaagaagccgactggaaaaggagcatactgtgtgattctatttacataaaattctaggaaatgcaaattaatgtagagtgacagaaagtagaccagtggtgcttggggataggcaatggaagagcaaagacagggagggatgaaaggaggtggtggccaaggggcaccaggaaacttttgtcggtattatctttatttcagtgatggtttcatgggtatattacatatgttataactgatcaaatcgtatactttaaatataggcagtttattgcgtatccgttatacctcaataagcctatttgagaaaataaaactagatagtacaatcccatatcatttgatcagaaagtccgagtgcggtggctcacrcctgtaatcccagcactttgggaagctgaggcgggtggatcacttgaggtcaggagtttgagaccagcctggccaacatggagaaagccagtct

SEQ ID NO: 848264 - DNA, 542 bp, Homo sapiens
tttgtttttggattgttccttgctagtatatacaaatacaaataacttttgcatattgtttttgtaccctacaaccttgctgaacttgtttaatagttctagtaatttttagyacattccttaaggttttctgtatacaatatcatgctatccatgaatagaggcagttttacttcttcctttccaatctggaagtattttctttctttctttttttttttttttttttttgagacagtgtcttactctgtcacccaggctggaatgcagtggcatgatctcggctcactgcaacctctgcctcccagattcaagcaatcctcctgtcttggcctcccgagtagctgggactacaggtgcacgccaccacgcctggctaatttttgtatttttagtagagacagggtttcaccatattggtcaggctggtctcagactcctgacctcaggtggtccacctgcctcgacctcccaaagtgctgggattagaggcgtgagccaccacacctggccttttattttgtacttctttttcttgccta

SEQ ID NO: 848265 - DNA, 638 bp, Homo sapiens
aaaaactgtattaaacttagagttttttgtggagtttttaagtttttctagatataagatcatgacatctaccaaaaaaaaaaaaaagacaatttgactttgtttttatgaatgaattttatttctttccgttgtgggaagtcagggactccgaacagaggaaccagctgaagccacggcagaacaacataaattgtgaagatttcatggacatttattagttccccaaattaatacttttataatttcttactcctgtctttactgcagtctctgaacataaattgtgaagatttcatggacatttatcacttccccaatcaatactcttacaatttcctatgcctgtttttactttaatctcttaatcctgtcatcttcataagctgaggattttgtcacctcaggaccctgtgatgattgtgttatctgcaaaaattgtttataaagcatgtgtgtttgaacaatatgaaatctgagcaccttaaaaagaacaggataacagtgattttcagggaaccagggagataaccatacagtctgactgcctgtggggccagacagaacygagtcatatttctcttctttcagaaagcgaacaggagaaatatcgctgaattcttttctcagcaaggaat

SEQ ID NO: 848266 - DNA, 637 bp, Homo sapiens
tggtagatagtcatttgagatgactgaatttcaagaaacttaaattttctttygctctttcttagtaatgaatgcattcatcatatataaatgtatcccacggtctagaaagaaaaagccaatgatagagaaggtcggaatcttgtgtttattcattagttgccacggaatggggcattaaagcaaattaacaatataaaaatttttgtgatgggatattttactctatttaatttaaaattgcttagatttaaactttgtattttttgtttttcttttattgacacataatgttttccatatgcatgggatacatgtaagtatttgttacatgcatagaatgtgtaatgatcaagtcaaggtatataggatatcattttgaatatatatcatttctatgtgatgagaacatttcaagacctctctttcagctacttcgaaatatacaagatattgtcaacacaagttaccctagccttctactgggcattaaaacttacttttttccatgtaagtgtgtttttacccattcatcagcctctctttatttctccctcccacccttccacacttctggtatctatcattctatcctctgtctctatgagatcaaatttttagctcttatgtatgagtt

SEQ ID NO: 848267 - DNA, 361 bp, Homo sapiens
tataaaaagtcatgtaacattgaaaagtttatacttgaaaatatgcataaaattacccaactctttctacagccaataataataataacagtaaaggtggagccatcaatatccaagaccctttccctaagcttctggatgccctcatacagaagcttcttccccatgttttggatttgtcccttttctctctgagcattcacatctgacctggtatcactttctcaaaggaagttaccctcagcagttctttgtggggtaaagtgttcawaggtcagtcaaaggctggaagataatttatgcagggagaggccacttcagcactgcaagagaggcagctccttctaccatttatttattt

SEQ ID NO: 848268 - DNA, 651 bp, Homo sapiens
cctgctatcctcacttatttgttcaataccattctgtgtgaccagtctcttgtgtccctgcccttaggcgagtactcactccctctgggacttcagcatccttcatcaggttacctctgctgctttccctctgtcttcaccccatgctttctcagatattttgtgccaagctgcccttttacacagaatatttttcctgctcaggtgctgaaaacccatgctaggctgtccttctccatctctgcatggatgcctcctgactctattcagtttttgatattttattctatttcacccaccattcaggggtgctctcacttgattgttaacattgtgcagggtggtgctcccacacttaggtctttcccattgtctccaggccccaactcctcactctggacaaccatagctttctgttttatctccatgctcatgaataaaaatgctcagaaagagaagagagggaaaatgccatatacattttataatcaatacacaaagctctgcagagcaaggattttgattggaatttcattgagttartaatttgggcagaaaagagataatactgtattctcacactactaatatttcaattgtcttattaacttaattaattttaaaaaatttcacatagagatcttgcctagt

SEQ ID NO: 848269 - DNA, 651 bp, Homo sapiens
cctgctatcctcacttatttgttcaataccattctgtgtgaccagtctcttgtgtccctgcccttaggcgagtactcactccctctgggacttcagcatccttcatcaggttacctctgctgctttccctctgtcttcaccccatgctttctcagatattttgtgccaagctgcccttttacacagaatatttttcctgctcaggtgctgaaaacccatgctaggctgtccttctccatctctgcatggatgcctcctgactctattcagtttttgatattttattctatttcacccaccattcaggggtgctctcacttgattgttaacattgtgcagggtggtgctcccacacttaggtctttcccattgtctccaggccccaactcctcactctggacaaccatagctttctgttttatctccatgctcatgaataaaaatgctcagaaagagaagagagggaaaatgccatatacattttataatcaatacacaaagctctgcagagcaaggattttgattggaatttcattgagttaataatttgggcagaaaagagataatactgtattctcacactactaatatttcaattgtcttattaacttaattaatttwaaaaaatttcacatagagatcttgcctagt

SEQ ID NO: 848270 - DNA, 621 bp, Homo sapiens
tataatttgcaaacattttctccacttttctggttgtccttttcttttcttttcttttcttttttttttttttttttgagatggagtctcactctgttgcccaggctggagtgyggtgacttgatctcagctcactgcaagctccgcctcccgggttcacaccattctcctgcctcagcttccgagtagctgggactacaggtgcccgccaccacacccagctaattttttgtgtttttagtagagacggggcttcaccgtgttagccagaacggtcttaatctcttgacctcgtgatctgcccacctcagcctcccaaagttctgggattacaggtgtgagccactgcgcccggccctctccttttattttctttgttatgtcctttgaaggacaaatgttctaattttgatgaagcccggttcattttcttttatcactgtgcttttggtgccatatctaagaaactcttgtcaaacccaaggccataaaggtttattgctattttttatcctaagagttttatagttttgcaactcagaaatataaaatcaaatactgcatgttctcatttaaaaatgggaaataaataatgtgtacacatgaacatagagtgtagaa

SEQ ID NO: 848271 - DNA, 505 bp, Homo sapiens
cactctagctacttcctgctgcataggggcaatgaagaggccctgcagttttagtgtcctccagaggggagccctctagaccagtgaaagtgccagcaggtcggtacagggtcctcattagaagtygttaattgaactcatttgagtttccatttgtaagaccatctgtagcttgatggcctcgattctggaggaaaaaaatttgacaagaaggttaaaaacacagggcccaaaggtgagtaacagtaagatggctgccatgggacctagaaaggggagaagccatgttgcccaactccagaggttggtatgagtttgaaaggcattgcctgatttcagaagccttttcctgtaaatgctgggcggcatctcatactatccttgattggttagtgtaaaaacaatactcttcccctaagaaggtgcaaagtcctcctttctcagcagtgaggaggtctaggcctcagaggttttggagagtcattgctgctaaagagtctatttg

SEQ ID NO: 848272 - DNA, 583 bp, Homo sapiens
cttaaatgtttgatagaatttacygttaaactactagggcctgaatttttttttttgtggcattattttgtttgaaaatggattcagtttgcttcatagaaattgggttattcagattttctagttatgtctgttttgattaagttgcatttatcaagttgtttcctttttacttttttaaaaaaacattaaaacatttctttaaaattacattttctatgcacatttcttcctcagaaaaagtaacaaggagaatggtacatagtaaaaaaattctgaatacctcatggaattgagcatttgaataatagaatattctagttacttttgatttattctagagttatattttccaatgacttagggcctcattaattatattaggcttttgtggaataaagcctttttataaacttcacgtataaatacaggagatggaggaaattggatcttttttggtgtattttgtttttatttaaatagatttattgagtttttctaacattattaaaagcaggatagtgactgcttagaaattctttatcatctcagattattatgtaaaaagtagccatgttaagga

SEQ ID NO: 848273 - DNA, 593 bp, Homo sapiens
taaattcctaacagcgtcatgggccctcaagcactatgcctactcagcctaatggatgagtcggccctacggaaggcattctttgcttctgaacccctcttttctcctgttccaatctggactacttattctgtaggccctgagatgttttcttactgttatcctgacaattcaatttttttctctcatatattggatcccctatttctgtgaatatgtggctggttttctttctggtagtacgccttcattttgatagagtgcatctttcagaaggctctgctatagcatgtctggaggtaaatatgaggccttgcatgtgagataaatgtttcaatctactctcataattggttgtatagaggaagagtaatcattttcttcaacagtaagttcttagttgaaatgaacttctgtaatacaagacagatcaacaagagaaaaacagaagtgtattaacatgtgtatttcatacwtacaccagagacacccagggaatgagtagttctcagaattggctttgaattctggctgatatagcatcttcaataatgaacagcaaatttctggagaggtaaaggaaaagaacttta

SEQ ID NO: 848274 - DNA, 593 bp, Homo sapiens
taaattcctaacagcgtcatgggccctcaagcactatgcctactcagcctaatggatgagtcggccctacggaaggcattctttgcttctgaacccctcttttctcctgttccaatctggactacttattctgtaggccctgagatgttttcttactgttatcctgacaattcaatttttttctctcatatattggatcccctatttctgtgaatatgtggctggttttctttctggtagtacgccttcattttgatagagtgcatctttcagaaggctctgctatagcatgtctggaggtaaatatgaggccttgcatgtgagataaatgtttcaatctactctcataattggttgtatagaggaagagtaatcattttcttcaacagtaagttcttagttgaaatgaacttctgtaatacaagacagatcaacaagagaaaaacagaagtgtattaacatgtgtatttcatacatacaccrgagacacccagggaatgagtagttctcagaattggctttgaattctggctgatatagcatcttcaataatgaacagcaaatttctggagaggtaaaggaaaagaacttta

SEQ ID NO: 848275 - DNA, 580 bp, Homo sapiens
ttcttcaatctgttgatggacacttaggttgattccatgacttttctattgtgaaaaatgctgtgataaacatatacttgcagttattttcttatatatgtattttttttttgagacagastttcgctcttgttgcccaggctggagtgcaatggctcgatctcagctcaccgcaaacttcgcctcctaggttcaagcgattctcctgccttagcctccccagtagctgggattacaggcatgcaccaccacaccggctaattttgtattttttagtagagatggggtttctccatgttggtcaggctggtctcgaactcccgacctcaggtgatccacccgccttagcctcccaaagtgctgggattacaggtgtgagcccctgcacctggtggcagttatcttttttatgtaatgatttcttttgggtggatactcagtagtggaattactgggtcaaatggtagttatatgtttagttctttgagaaatcgtcatactgttttccatagaggttttactaatttgcgttctcaaccagagtgtgtaagtgttctcttttctccacatccacaccaac

SEQ ID NO: 848276 - DNA, 613 bp, Homo sapiens
aggaaagtggacttggacatggacgggccaggggaacccggctaagggrctcttcagatgtggggatgacccggcaacagcacctgcgactgattcctctggtccgcaggatccccaggcctagtgcgtccctttctcatggggcccggggtgtttccagggctggggctggtttcatagtatcctgcgccctgcgctagcacttctatcttggatcttgatgttgaaaccattagaggtgctgactctgttacattctcctctcatctgatcctcatgtaaagatatttctgaaatctccagcaagcaatatggtacgtggaaaatggcggacttgcgtttcccacacagtaatgccgtttctcggtagacatcagtgaccatgaggcagctctaccaaatgctgctctgatcttataagctgctcaggaaaaggaaattgttctgttgcattgaaaatatcgaaagttttggaatcttatcttgctattttaaagtattaatctttttagattttgactcttaaaaaatatttgaatggccctgggagatagattggtcatgtcataaacaaaagaccaaggcatacgaaagttacgggactcggctaaga

SEQ ID NO: 848277 - DNA, 466 bp, Homo sapiens
aagacctgcatgctgaatactaccaaacattggtaaaagaaacttaaaaagacctaggtaaatggaaagatccttagttcctgggtcggcagactcaatattgctaaaatgccagtcctattcaaaacaatctacagattcaacacaatccccatcaaaattctgacaaccatttttccccccagaaatagagaagccaatccttaaattcaaatggaattgcaaggagtctcagatgaccaaaataatcttgaaaaagacgaacagagttggaggactcagtattattcagccataaaaaggaatgaagtctgatacatgctacaaggatgaaccttgaaaacattatgcctagtgaaatgagccagtcacaaaaagacaaayatacggttccacttatatgaaatctttagaataggaaagttcacagagacaaagcagattaaaggttaactggcaatggggg

SEQ ID NO: 848278 - DNA, 468 bp, Homo sapiens
cattttcacaaaagggagggattaaagtctcatggaaaagctatcatggatgaattgtaaatatatgtaatttagtcactttcagcaaagtacaaataaaagtactgtgaaggtaagggggaaaagatcactggcaatatattttgcattagtgtaatttattacaagcatagctgctaaataaagtgtcccttgttctttcataaatgtattttaacaaactgaatagctgaatatcaatcaagcattcctttctatcatgattctgaacagactgggctcagggatctcttggagaccatgataagttatggcttctgttagccagcaggtgtgtgtgctcacscattcaattctgaatacacttccgggctgttcacagaaactttacagccatccttgaacgccttacatgtccacaaagcccaagctaagaagctacgtctttccagtatctcacttttaaaa

SEQ ID NO: 848279 - DNA, 602 bp, Homo sapiens
tgtcaccagaagggaaattaacaacatcgctaagcctgctgtgtagttcagctgacgttttcttcacagcwtgattttctcaatgaaggaaaccaaacacaatttgcatttgggtgcgagtgtctcatagttgtgtgctgataaacagtttgcagattggctatttcaaacagcactgctatagtttggtgacactttaagcaaacacagaaaatagcagaacattcattcaaaaatgattttctaggtcacttgaaattgttggatattccagttgcagtgaaggagatatgaaaatgactagagcaaggtatctactcatctcttaaagcttctactaaagtaatgctatcgctgcaatcatccttaccagacttacagaagagcttaacaccaaattcacagtgccgtgtctggaaaaaatccttacgaaattgctaaaatcctcttctgggtatgacagccatgatctagggtgcttgccatttgttgtcttttttttttaaatttttaatttctgtgggtacatagcaagtgtacgtatttatggggtatctgagatgttttgatacaggcatgcaatgcgtaataatcatgtcatg

SEQ ID NO: 848280 - DNA, 598 bp, Homo sapiens
ccacactgatgaatttccggatcttctctccctgcgtcatggtaagttccctgagaaaagggatttgayttattggtccatcagcacacagagggctggcttcaatgtgaaaggcacttttctcagatcaactttattggatgaaaccatgagaaaggcaattagtggctccctgaaggagctgaaacttgagtttgggtttcactcacacccatcacatctaaagtatatttggggaaggaaggaactccaggaggaagggatcgttttacccaccaaacccttgcttgttggcaaacaagttgccctgatgacagccacaggtttgatttcctcactgaagcctgcagtgagttctctagctctgctccagggcaaggttacacacaaaaaaatctaacaagaaatcaccaaggcgtgaaacctgtccaaatccattatattctggaagggatccatggcccttcatccttccccgaggacaaatctatagaaatgttctgtttgcttttctgctgtttataaacatctgcaataacttaggggtgtctagccctgtcaatctggccaaactctgtggctgaaaatcagaaagctc

SEQ ID NO: 848281 - DNA, 551 bp, Homo sapiens
aggtgctattaagtaggagaaaacagactgattggacataggtcttgaggagactgaggaacagcagggtaggaatgaaggagggagcaaagcaaggtcttcatgaccagggtgtaggtaaaacatcagtttcccctaatctcgcagctatccccacgggggtgaatcacatcatctagggagggatccctatgttgtattgaggaaagctagtgaaaaatccacctgagcttgggattgcgtagaagaggacctgggtctcatggctcttttccaggagctgaaaacctggttgcctattatatctcggaccaagaccatagcaattattctaagagagatgattgaacaaacaactgtcaacagatagtgaagaggtaggaggcaaaaaggggactctcaggtatcacagagataactgcaataggaagccgccacgcttagggctgggaaccagaggcaaggctgggatcattaaaatgtggaagcttttccaggagctgggagtgaaacctctcwggcgtggacaccactctcctggtaactggtac

SEQ ID NO: 848282 - DNA, 646 bp, Homo sapiens
tcgcctggggtcatgccagtgcagggtgtagctgtgtgccctcagcaacccttgttccctgcagatgagggacaggtgggttggcctgaagagaatatctggagagaacatcatagtcctcactgtggtggttgtaacatattggttgtaaggtgcatcctgaattcagaaacattgaaatgtaaaaaaaaagagagcaccttaaaaatgccaaaatatggtagtaggcttcagtggtattttttgggacagggatacaagccagactctaggaagaaccagagtagagaattggagatctgggggtgggggagcagggattattcttcacggtttactcttcatgtgtcttcttgcaactctatttcactcttttttcttgatattccaagtttctttgctaaacaattttctggtaatcatccaacatgggaggtggatcatggtcagtgctgtgctggaaatatttaaaatatcgcctcttgggggaaaaaaaggtgtgcacatatattcatataatttttactgacataaagcatgcagaggacacaatttataaataataataaactgyacaataatctttattgtaaattccatatagcccattgattctcccagaatgctttcattgatttttgcaaca

SEQ ID NO: 848283 - DNA, 499 bp, Homo sapiens
  misc_feature 1, 2, 3, 4, 5, 6, 7, 8, 9, 10, 11, 12, 13, 14, 15, 16, 17,18, 19: n = A,T,C or G
nnnnnnnnnnnnnnnnnnnaagcttgggagttggccatgaagactgcagaaaatgttgtcttcatggatcaaagagaatgaaattcaaagmccaagacccctacctcgaattacagccgctcccagtctcctgctgaatgacctagagcagagtcagagccaacaccttgtttgtgttttaaacacaacctacaatcgcgttttttcctaaccctgtgaaaacccagtgtcagatgagagaggctgcatctatcagcccaccttcccccttagcacagggaatctggctgacttcagcttggattcttgaagctcagtggttctcaaacttcggcgtgcatcgaaaccacttggagggcttgtcaaaacccctctcagagctcctgattctgtaggtctggggagagcctgagaatttacacctctaacaagtttccgagtgaggctgatgctgctggtctagtcgctttaattggggagactctcttgttgctgagga

SEQ ID NO: 848284 - DNA, 620 bp, Homo sapiens
ctcccaccttcctattctcaggcccccagactccaactgaattatgcccctggctttccaggttcttcagcttgcagaaggcaggattgtgggacttcacagcttccataattgcgtgagccaattcccataataaatctcttctgataaatacctatatatcctagcggctctgtttctctggagaaccctgactaatacagtcactgtggttgatttccagttgccaaggtggggtcctcaagcctggaactggtaagaggtctgcaggagccaccattttatagtatttccaccacaaagatacaacagtcataaataactccaagagcataagagtaaaaatgtagtaaaataagaattaggttctgtgtatttattaacttcgtttataatatgatttatttgattacaagtaaactcatttgatttttaataattgctaagtttgacaactgacacaaaattctcaaaaatgtaacaattggctcttgtgggacggtatgcaccagcctggctgaagtggctatcactctggaattcacattttatatatcctgagtcttggaaggatccactccattccarttttagttttctagggaagggactctgattgt

SEQ ID NO: 848285 - DNA, 338 bp, Homo sapiens
ctgttttggtgactgtggtcttacagtatagtttgaaatcaggtaatgtgatgcatccagatttgttctttttgcttagtcttgctttggctatgtgggttcattttttgtgctayatgaatttttggattttttttctagttctgtaaataataatggtggtattttgatggaaattgcactgaatttgtaggttgcttttggcagtataattattttcacaatattgattctactcattcgtgagtatggaatgtgtttccatttgtttgtgtcgtctatgacttctttcagctgtgttttgtagttttccttgtagatgtttttcacctccttgg

SEQ ID NO: 848286 - DNA, 594 bp, Homo sapiens
gaaattgccacagccaccctaacctttagcaaccaccaccctgatcagtcagcrgccatcaacattgaggcaagaccctcccttagcaaaatgattaatgactcacggaaggatcagatgattgttagcattttttgaaagtattttaaaattaaggtatgtatattgttttttaaagacgtaatgatattgcacacttaatagactacagtaaagtgtagacaaaacttttatacatactggaaaaccaaaaaattaatttgactcactttattgtaatattacctttattacgatggtctggaaccaaacccccaatgtctctgaggtatgcctgtccatatcctgtttccttaccactccctggtaatcataactaaaatttgcttcaaactctcctcattgagaaaaactatattaaagcaacattaggcctatgtagactctcaggaacttttctcagctggtgaatttctcagttctaattacaggtagacctgtagtcaaatcttggctctagtttcaagcagctaagtgggtaaactgctagtccctacaagtctcagtttcttcctctgtaaagtagaactaata

SEQ ID NO: 848287 - DNA, 594 bp, Homo sapiens
gaaattgccacagccaccctaacctttagcaaccaccaccctgatcagtcagcggccatcaacattgaggcaagaccctcccttagcaaaatgattartgactcacggaaggatcagatgattgttagcattttttgaaagtattttaaaattaaggtatgtatattgttttttaaagacgtaatgatattgcacacttaatagactacagtaaagtgtagacaaaacttttatacatactggaaaaccaaaaaattaatttgactcactttattgtaatattacctttattacgatggtctggaaccaaacccccaatgtctctgaggtatgcctgtccatatcctgtttccttaccactccctggtaatcataactaaaatttgcttcaaactctcctcattgagaaaaactatattaaagcaacattaggcctatgtagactctcaggaacttttctcagctggtgaatttctcagttctaattacaggtagacctgtagtcaaatcttggctctagtttcaagcagctaagtgggtaaactgctagtccctacaagtctcagtttcttcctctgtaaagtagaactaata

SEQ ID NO: 848288 - DNA, 537 bp, Homo sapiens
agaccctcccttagcaaaatgattaatgactcackgaaggatcagatgattgttagcattttttgaaagtattttaaaattaaggtatgtatattgttttttaaagacgtaatgatattgcacacttaatagactacagtaaagtgtagacaaaacttttatacatactggaaaaccaaaaaattaatttgactcactttattgtaatattacctttattacgatggtctggaaccaaacccccaatgtctctgaggtatgcctgtccatatcctgtttccttaccactccctggtaatcataactaaaatttgcttcaaactctcctcattgagaaaaactatattaaagcaacattaggcctatgtagactctcaggaacttttctcagctggtgaatttctcagttctaattacaggtagacctgtagtcaaatcttggctctagtttcaagcagctaagtgggtaaactgctagtccctacaagtctcagtttcttcctctgtaaagtagaactaatagtgcccacctcatag

SEQ ID NO: 848289 - DNA, 371 bp, Homo sapiens
aaggagaaataaaatctttctcagacaagcaaattctgagggaatttgttaatattaaaccagtcctgaaagaaatgtgaaaaggagttctaaatcttgaaactaaaggttgatacacacagaacagaaactcctgagagcatagaatttacagggtttataaaacaataacacaacggagaaaaaaaagttactaggtaacaatcaatacaatgactgaaacagtaacctacatcacaatgttaatgttgaatataaatgacctagattctccacttaaaagatacagattggcagaatggataaaaaattacaaaccaaatatctgctgtcttcaagagacacamctaacatgtgagggttcatataga

SEQ ID NO: 848290 - DNA, 634 bp, Homo sapiens
gtttaaaaggtagcagggttgtgttgagcctaaagatctatactgatttatcataacgaactgtgttattattttttagtaaaatrgaaaatctgggtaataatggtagtaaatctataacagcaacttagtatttgaaaggtggaaaaaattctaaacctttgaattatcaacattgaattctttatataaattttggttattttgctcttctagttttctttggtagtcttataattttactaaatcaaacatcacaaatattaacctctgtttcatcggatatattttcttaaaccagcataatcaaagccattttatttctctttggtcctctaggactaaatatatcaccactcattacagcaacgttgtttgatggtaaagaaaattctcttttatttttgaagtaaaattactggacacaaaaatatgttacactaaagagaactttttaatttttgaaattgaaagctcagttatacaaatcaccagaaactggtaagtacagtttgcagtaatttctgtctctgatgaaatcttggtttattttttcttaaagaatacttaccatggaaatgtactttattaaccacaccctgatagattcccatgtcaaaaatgcaacaggagt

SEQ ID NO: 848291 - DNA, 557 bp, Homo sapiens
attgaaccctggaccacccaaagttacccaactctacaaattyttagtttctgcttaagctagattcttacaactgaaaaaatcttaactgataaattatcagaactttgatcagtataataattcttttgttacaaaagttaattgttacaaattagctattctagtttcaagctcaagtaaagataattgcttaaacaattctgtagactgctatctagggatattacttcttctaccaaagaatttttctgtcactagagggcgtcagagcccacagtggccaagtgacaaagtctattaataattatttctaccaattaatagaaatatgtatgggttcttgggaaaggaagagagaggacggagatcttagatttggataggtaatctgtgaatctaatcatatagacattgtcacctcctggagaacatattatttcctacaggattaaagaaatgacatatgcaaatcacctagtacacacaataaatactaatttttacttttacattgcttttcctaaatgaagtgacttcacaagacaaattgataa

SEQ ID NO: 848292 - DNA, 549 bp, Homo sapiens; identical to SEQ ID NO: 820510

SEQ ID NO: 848293 - DNA, 553 bp, Homo sapiens
agacagacactgaggaccgcagagctgaatgagacccgcacaggcgttttcctcccgacttctcagaggactgtacctggtaccacctggagrgctgaaacgtactcaggtaaaagttactcactcctccagtcctcagctcttcctgtgtgagtcccatgctggccttgtctaggcacatggggtggaggggaggagtgtcagatttgcaaaaaagaaaggctaggaggccaggcaaggtggctcacgcctgtaatcccagcactttgggaggccgaggcgggcccatcacctgagatggggagttcctgaccaacatggagaaactccatctccactgaaaatacaaaattagcagggcatggtggtgcatgcctgtaatcccagctactcgggaggctgagacaggagaattgctttaaactgggaggcagaggtttcggtgagctgagatcgcaccattgcactctagcctaggcaacaagagccaaactctgtctcaaataaaaaaaaaaaaaaaaaaaaagaagaagaagggctaggagaagtggga

SEQ ID NO: 848294 - DNA, 624 bp, Homo sapiens
ccgaggtgggtggatcaccttaggtcaggagtttgagaccagcctggtcaacgtggtgaaaccccgtgtccactaaaaatacaaaattagctgggtgtggtagcgggtgcctgtaatcccagctactctggaggctgaggcaggagaattgcttgcacctgggagacggaggttgcagtgaaccgagattgtgccactgcgctccagcctgggcaacacagtgagactccatctcaacacaaacaaacaaaaaaacaaagacaatatcacagcccaggggctggcaaggatggcaaagatgagtgccatgcttaaggatctgaagcaggacttgcttaaaattttagacctcgtgggtcatgcagactccattgcaaccgtttgcctttgccatagcagcactcaagcaactagagacaatctgtgaatgaatgaacatttttcagtttgaataaaactttacttatggacaccaacatttgagtttcatacagttttcacatatcacaaaatattattattctttygattttttaccaactatgtgaaaatgtgaaagccgtttgtagagcaaaggtggtataaaaacaggaagtgggccagatttggcccgtgggtcataga

SEQ ID NO: 848295 - DNA, 536 bp, Homo sapiens
ttgtccactagcagataatcatttgccccaacccaccatgttcagaaatctctttctgatgaaatctcaaagcagcttggtagagccaggcatttgtgaacttagattttttttttaaattgtggyaaaatatacataatgtaaaatttaccatcttaatcatttttattatttatttatttatttatttatttatttatttattgaaacggactctccttctgttgcccaggctggaatgcagtgacacggtcttggctcactgcaacctctgcctcccgggttcaagcgattctcctgcctcagcctcccgaatagctgggattacaggtgtgcgccaccacgcccagctaattttttttgtatttttagaggagacgggggtttcactgtgttggccaggctggtctcaaactcctgacctcaagtgatctgcttgccttggcctcccaaagtgctgggattacaggcgtgagccactgcatccggccattttagctattttttaagtgtgcagtacagcagcaaattatatt

SEQ ID NO: 848296 - DNA, 482 bp, Homo sapiens
agagaggagacacatgatccttcattttgccaaagaaaatgactttaaggtgagctgagcgtcttgtgttgtgctagagggctcgggagagaggaaaaggcytcaggaagcggcctgagtcctgcttggtccttcccctcctgctgcccatgttccttagtcctgctcggtccctcccctcctgctgcccacgttttgtggccttaaatttgggcctttgtgtggtagggctcttgggggccatggggcgttccagaggctgcagtgaggaggtgggctttcctgtgtttgggagttggtgggtggcgtgcttccgccttgtccgggtgatgacatcgcagtgatggcaaggttgatccttcgtggtgtttgttttctaacatccccacctcacttccaccaggcgtttttcatcgagtcggtgtgcgacgaccctacagttgtggcctccaatatcatggtaagacagccgggagccccgt

SEQ ID NO: 848297 - DNA, 657 bp, Homo sapiens
tctctctttctcagtctcttaactatttttagctgccatcagcgtacaaaaatttcatgatgatgtgcccagatgtgggtataattctttcattgcagagcacccaatgtgttctatcagtctggaaactcatcattgctgggaaacttacttggattatttctttaattttctccccctctatattttacttgttctctcccttttgtgtgtgtgtgggtggtctattattgagttctgaggccttctggaataatattttctgactctcttttattttttttttcattttcttgtccttattttttccgtttcttccccttatttttttctttcagtgtcctcttttaatccttcttttattcctaatattgaaatttcaatttctaggagttatttcctcctattttttatttaaataaaattctgttcttatttcatgaatgaaaggtattctctgatctttctgaggatattaatgatagtgtccatctcatggcataatatctgttcccttcaaattgcctgtgtcwgttgagtctcacttgtttatattagaggcattcttcagatgttgtgaagtccttggctgtttgctcgtattgtgaaatgggatgctagaaagccgattggcattcactctagatggatccaacc

SEQ ID NO: 848298 - DNA, 581 bp, Homo sapiens
attcatgatattaacaggctaaagaagaaaaatataatcatatcaataggtgtggaagaaacaatggacacaattcaacatccattcataatttaaaacacttagaaaaatgagagcaaaggaaaagrtgttcaacttgataaggagcgtctacaaaaaacctaaagctaatatacttaatggagaaaaactgaatgctttcactgtaaaataaaaaacaaggcaagggtgtccgctcttattcaacacagtgatgaaagttctagccaaagcaagaaagcaagaaatggaaacaaaatgcaaacagattgaaaagaattattttagatcatctgtactagcaaatgacatgattgggtacacagacaatcccaaggaatctacaaaaacacatatgactaataagctcagaaagttcttaggatacaaaataaacatacagaaatcatttgtatttctacgtactaataatgagcaccctatgttcatggactggaagactcaacatagcaaagatgtcaattctcccaaaaattcatatataagttatatgcaattcctagtaagatcccagcaagatt

SEQ ID NO: 848299 - DNA, 586 bp, Homo sapiens
tgatctcatcccctgaaagtttagtgtacctattgtcatcatttatataggaacagcaaaaccagctattcaaaaataactcaatcacctttcttttatttttttcctgaactgggacattctacttcatgcgacagctaaattagcagaaacctgacccagatgatacaatgactagatgagttcacagctggctgtaatcttatctcagaaagaaacaggaaatttaccagttactgtatttctactctgttctaggcacttagtatttaactatctcatttaatttttacaacaaacctataaggtgcatgctatatttatagatgatttagttgatatccagagaagtcaaatgacttgcctactatattaacaaatcctggtaaggagtagttcattctcaaactaatggtaaaatcttttgagcctaaagaactccaatatcttggttaacatagatttagacaagtcactagtgagacactgtactgaatttttaatactacattatttatataatatatacaaattaaatgtatattgtgtatawacatatatggatatacatatagagttatatata

SEQ ID NO: 848300 - DNA, 375 bp, Homo sapiens
cctagcttccataattttattgtatataaatctctttatatacatcttatttatgtatgtataaataagatatatgtatacatatacatgtataaataagatacataaagatataagatgtgttatatattaatattatatgaaggataattttatatgttatatatgtataagagatttgttattataaggaaatggcttaggaatttcatatgatacatagcatgccgtgttaatcagtgttccccagagaaattggagaaaycttattggttctgtttctccggagaactcatgaatacagcatgctgcctgtcattgggaaattcactgcagtctaagaaacctaacaatgtgacatacaacagtagagaa

SEQ ID NO: 848301 - DNA, 647 bp, Homo sapiens
tatgcagacacaatgcctaacagtctaatacataartctctcataatagactgatggtattaaccatacttagtctctatattgctttatcatttggaagtctcatccatcatttctctccatcatcatgcacttcaaaacaggtattaaaacctttactttataggtaagaaaactgagttcaaatttaagggactttcctaggtgcccctgccattacctggctgagctgtaactcaaagcctggttttctgacaccaagtccagaatgcttttccccagtgcattgcaactgtcattcagagcaggtgtacctctttaaacaatgctagcaagttttgcagctggtgcctggctgctgaaattcacagccatagcagagtgtgtttttgggttacttaaccccaaggcagtgcgccttcaaatccgtatcacaggctgcaagcaacctttaatctctctgctgcccagtctagtctgctgccatcagttactgtatctgccagttcatcatgttcacagtaaagccaaaagacgaagtagcgattgaaagggggcaaactgcaccttaagaaaatggcatttttctggcattgataaaggtatcagctgccagtcagtagagagtggaaattgttccaggttaa

SEQ ID NO: 848302 - DNA, 559 bp, Homo sapiens
agccacaacattcccttaagccaaagtctaatccagagcaaggccctaactcttcaattctctagagtctgagagaggkgaggaagctgcagaagaaaagttgaaaggtaggcggggtcctgtggctcatgcctgtaatcccatcactttgggaggctaaggtgggtggatcgcttgaacccagtagttcaagacccacctgggcaacatggtaaaaccctgtctctacacaaaatacaaaaattagccagatgtggtggtgcacccctatagtcccagtgactcaggaggctgagatgggaggatcgcttgagcccaggaggcagaggttgcagtgagctatgattgtgccactgcactccagcctgggtgacagagtgataccctgtctcaaaaaaacatgaaaagaaaagtgggaaggtagcagaggttgttggtttgtgaggtttaaggaaagaagccatgtccataacattaaagtgcaagataaagtactaagtgcaatgtagaagctgcagcaagctaatcaggaaatatagttaaagtcactaatgaaggt

SEQ ID NO: 848303 - DNA, 626 bp, Homo sapiens
tatttgctgctttcagaccacccaaatagaagagatcatgatttggccccatttcataggtgggaaggctgaacaaagcactcaggttagtggctagttgaaggtctcacaacaraaatcagtgagagtctttctttggttttgttctcaaatttaggggcaaattttccttgatgtttatttttagtctctgccctcttttcatatccagtctaccctaaagctctgttgcaccctagcactttaattcaagtgcccctttgttcgtctgcttttattcacccatattaatagtcttgacgtagttggggacttggatgggcatatcttaaagtaaaatttaaaaataaaccttattattccttcagtcttggaggtggaacattcctaggcctatgttgcttgctgactggttgtgagacctttgaagaagctctggaaatggcagctaaaggcgacagcaccaatgttgataaactggtgaaggacatttacggaggagactatgaacgatttggccttcaaggatctgctgtagcatcaaggtagagattaagtagctaggagcagtagtgattaaacacaaggcagcctctccaccctggccattcactaagttgttttaa

SEQ ID NO: 848304 - DNA, 552 bp, Homo sapiens
atgatgttcagtatttgggttggagcccaaaccccacgattatgcagtatgtccatgtaaaaaaactgcacagtactcccgaatctattttttgagttttttttktttgtttgtttttttaaatacagtgtcttgctctgttgctcaggctggagtgcagtggttcagtgtctgctgactgtagcctccacctcctggattcaagcgattctcatgcctcagcttcccaagtagctgggattacaggcatgtgccatcacatccagctaatttttgtattttcagtagagacggggtttcaccgtattggccaagctggtcttgaactctggacctcaagcgatccaccctcctcagcctccatagtgcgaggattactggcatgagccaccacacccagtcacctctgaatctattttttaaatatgttgtacaatttaccagtgaggtgatctgggcctgaatttttcattgtgaaagttttaaaaattactgttcaatctttctttgtgttcagattttctatttcattttgagttagtagtttttatt

SEQ ID NO: 848305 - DNA, 613 bp, Homo sapiens
gtatctttttttttcccttaatgagtcaagaaatactagctcctaaatatttcactgagtaatccagtgaatgcagctaaacttattttaggtacagatggttaaaaatacattccttctctrcttattggcattattaaatttgctataaaacctgtttttccaccagctgcagatcatgtaaaggtaagtgtttatacaaaacttagcataatattgtgcaaactgcatgggctttagagttgaacctgaggtttgaactttgacctgccctttatttagagttgaacctgaggtttgaactttgacctgctctttatcacttgagttagttcacttctctaaatctcagtttcttccctagaaagatgattacccctactttagatatgtgttgggaggggcaaatcatataatatacaaaacatcatgttcagcagatggcatagaattggtatttaactaaatagtaacatttgttcctattagttttatggtgttgaaaatttttttaggtagcttgagttacacttatgggatgttcctctggtcaaatttcttaatatctgtaagtctaagttttctcagtaacaaagctgataaaataattgtg

SEQ ID NO: 848306 - DNA, 471 bp, Homo sapiens
aaggcagtcatttccagtaagaattgctagaacaaacattaagcatttcacagtgaaaagggtcataggtatattttcatcctttgcrtatagaagaaatagcaatctattattctcagtttttgacttaaaaggtattgttgcttccctttctttccctcccctactcaagtttttgcccatggatccagatacctacaagggcctaatacagggaaagtgcactgtgtatgagctatgaaggcacaatggaagcttgcctggcaatcagtgccagaacagacagctagtctgatgaattctgctacacatcacagggctactagttttttgttttttgttttttttttttttgtcatacattactgcaagttccctgaggaagtttactgatctgtagttttacgagaaatgcacgtcatggaggtggcgtgggggagcgggtgaacaaggaaactttagttgctataa

SEQ ID NO: 848307 - DNA, 493 bp, Homo sapiens
tacttcaaggaataagccagggaatgtcattgaagaatacggggtgatgctccttggatggcaactctgaaggaagaaaatgttttcacatcagtttgttctcagaagataaaatataaaggcagaaagtcaccttaagtaccagctaattcactttcccatctgatctctgattctctttaacaacctgagtttacagtcatttggaaaagaactttacaatcttttaaataggcatttactaagatgagggatgaaaacattgcacttcactgtagactgaatctagttcccatcatgccaagaaagctgctcttttcaacatttccacaaacccagatgataaatccagttgacccatgttaatgcaccatgtttatcctgcatgtgaatccccatattatttgacttcaaccatttccttctcraaacaccctctactctttattcttgtttgctacagttttcctcttacttggaaaatttgattacc

SEQ ID NO: 848308 - DNA, 591 bp, Homo sapiens
cctcccctgatgctcccgcttctgcttctgccacacttgccttgtctgtttcctgaatgcagcccacacatccctgccctagggcctttgcacctgmgattcctgatgcctagaacaactgtgttcccacctgcgcgtttggtgaactcctagcatctttcaagactcagcttaagtgtcactgaatgaaggctttccctcactcatgccaggactgtgggcccctattggtgccctcctgggacctttgctgacccttctgtggctagtgtcaaaccttgtctcatggctctcagtgtctgactctttctccctggactgtgaagtccctgaggcctccgagccacctggcaccctcaggattcctggtacccagcttagtgcctgacccaaagctggtgagagtgaaagttgactgaaccagtgtccatctccccactggcagatgccaagctgtccctctctgtaccccaggccctgggggagggactgaaagaagtagggccacgtctcatcacaggtgtacctcaggctgtcacaccttcagcctcttaccacctgacccccctcaccatttatgcctaaacgttc

SEQ ID NO: 848309 - DNA, 561 bp, Homo sapiens
aggtgccagaccccttatctgactccctgatgcctgttgaccaactcctatataaacccctaactttagttggttggggagagagatttgagacttgtctctcatctcctggctgacatcwcccacaataaagcctttcttccttggcaatactcgttgtctcagtgattggctttctgtgggtgagaactggacctaggtcaaacccctggcattcagcaacaaaattctggtgtcctgacttggattgcattgcttgtgacttggcagccacaggctgggagagttttgaaaacccttctagcagatgcccagccatatttggccagaggtttcagtctctctctctttggccccaactgcagtcctgattgcctaggaagaatattctttgaaatttgacatctgcatctggacaggtgagtgtcctttgtgggtactagacagtaggagctgctcctgtcaaattgggaaattctgaagaatttccatttgttgcaggttaaacaagcccaacccactaatgtgagagtggaaagcactctatttcagttcagacac

SEQ ID NO: 848310 - DNA, 589 bp, Homo sapiens
gatagttgtaggtaaagataggcagatttattagagaaagtatgaatatgttgcaaaagagcaactggcagagtcagcaagagaggagctgactgcaaggaaacaaaggcttgctggggattttataggatggctcttttctgtgtacggatggttacatcggcacagcagtaccgacaatgccaaggttgcagtgagctaacttccaatttctatcagctgagggtctggtgatagttgtgatagaggcaacggccagccaaatgcctaggcagatagggaagtgtccttggagaacttccaacccgcccaggtcattgtgcacaggggcttgcctaaacatgtgcacggtgaaaaattccatcccttaacacatgcacagtaagggaaataaatcaatgtggagtggctcagactaagggcccccatgcacaccgaaaggtcggggtggagccaccaggaattcayaccttatgcaagggaaggagcctgactcttcagtgcatatgtgggagccctggtattcaattgtgaggtggaaacctgtttgcaggacccctctatttgctgagaggggacccctcttttg

SEQ ID NO: 848311 - DNA, 446 bp, Homo sapiens
caactggatgctcatgctcatgaaactagaccacacaagcagacaaaatgacaattccaagtggattgtaggtctaactgtggaaagtaaagtcataaagcctcagtagcatatgcaaagatattcaagacctcagtcttgaagatttacttctatattttcttctaagagtttgttttagctcttatgtgtagggctgtgacctattctgagttaatttgtgcgtatgaaggaaggaaggggtccagcttcattattttgcatgtggctgtccacttgtcccagcatcatttgttggaaagactattctttctccattgaattggcttggcgggcttgttgaaaatcwgttgactgtgaatgtgaaggctgagaacactttatcatgaactgttagcttcacctatgtaaagatatcttctctctgctctgcctcctgtcaaaat

SEQ ID NO: 848312 - DNA, 446 bp, Homo sapiens
caactggatgctcatgctcatgaaactagaccacacaagcagacaaaatgacaattccaagtggattgtaggtctaactgtggaaagtaaagtcataaagcctcagtagcatatgcaaagatattcaagacctcagtcttgaagatttacttctatattttcttctaagagtttgttttagctcttatgtgtagggctgtgacctattctgagttaatttgtgcgtatgaaggaaggaaggggtccagcttcattattttgcatgtggctgtccacttgtcccagcatcatttgttggaaagactattctttctccattgaattggcttggcgggcttgttgaaaatctrttgactgtgaatgtgaaggctgagaacactttatcatgaactgttagcttcacctatgtaaagatatcttctctctgctctgcctcctgtcaaaat

SEQ ID NO: 848313 - DNA, 630 bp, Homo sapiens
ctatcctcagtgaatttatttactaacctgtaatatgycatattattattgttttaccgggttaatgtctacacaattctctaaaagccatcacttcaatgaaaagccttcctggatccctcctattagggcaggtgaccctacctaagagtcccataaaacactctgagctttgcattaagtgttaagtgcaacccatctgcattaagtggattccccacccatatccttttcccttgagcttgcgagcactttgagtagtcagactgcaacttcacctacactcaggacatgatccaatacctgaaacagagtacgtgctagataaatagttgttaaaaaaataatgattttagtttctaaattgtgttgccttacatgagtgtcacaacaatcttgtgagttctgagggaaagaatatgctattacctctgtgactagaaaaaaataacatttaatattctactgaattactctgtgatttcatgattttccagacatctcatctttccactacattagccctgccaaaatccacacacctacctatagcaattggaattacagataatagagccttgactatttagatttggggctcctatatttggatactccatgacaatttgt

SEQ ID NO: 848314 - DNA, 588 bp, Homo sapiens
tccgccctgcaagccaccccaaatacaaartaaaaattgcattgtatttgtcaacaatataaaatgtgaataagtgcatctttagaaaatactctgcaaatgaagcttcatcatccatctccaggtactcatacaacccatgtgttgcccctaagctcttcttacatcaaaattctggaaccttcactggctccacaaatgaatgtcttcttgttcttggcaagttgtctggccacatttagtctcagattctttggctggaaagcaacctcccagggctatagtggggactatagtgagatgacatacaaaccatctgtttgtgcccactccccacttttcctgacagaagcttggtcatggtctagcagaaagtagcctttgctactgtgacttgggagctacaaagcaaaggggaaagtggaacttgctttacctaggtcctcgtttgtctgaatctagcccaatatttggagtagctgagttctcacagctccgtgctttccttgaaagggaagtcactcatctgacctaagaggcagaaaccgcaagggcaaaactccgaaactaagctcattaaaatatgga

SEQ ID NO: 848315 - DNA, 603 bp, Homo sapiens
tgctgttacagcatgaaagcagccatagacagtatgtaaatragcatagctgcatccatataaaacttcatttatggagtcaatttgaatttcatataattttcacgtcatgaaatatccttttttgatttttaaaaaatcatttcaaaatataaaattcattcttagctcatgggccatacaaaaataggtggtggaccataatatctcaaccgctggtctcagcctcactgctgaggataatgagtagctgtgcacaaatagttacttcatcagtgcttccccagctagggacagagctacgctcaccagtcatttagcctgctaggcagaactctggaattctgattcaacttctgccctgatgctttccagctgtgaccttgggctctagtcacacgatatcagagtctcaggctgctcatttccaaaacagtgatacaaaatttttttctgccttcttcatggcactggtgcaaactgcatatgaacgtcttcatagtctgattgctggtttcctctgtggcctccatttgcaaaaagtacattaacattttaatcatccttcaccaaacatttctggaagacctattctatgccagt

SEQ ID NO: 848316 - DNA, 606 bp, Homo sapiens
ctgtaagaagtgcctttcgcctcccgccatgattctgaggcctccccagctatgtggaactgttagtccaataaaacctctttttcagccaggcgtgatggctcacccctataatcccagcactttgggaggccgaggtgggtggatcacaaggtcaagagatcaagaccattctggccaacatggtgaaaccccaacatggtgaaaccccgtctctactaaaactacaaaaattagctgggcgtggtggtcggtgcctgtaatcctaacgactcaggaggctgaggcaggagaattgcttgaacccgggaggcggagggtgcagtgagctgagatcacaccactgcactccagcctgggcaacagagtgagactccatctcaaaaacaaacaaacagacaaaactctctttttcttcccagtctcgggtatgtctttaccagcagcgtgaaaacggactaatactgacccacgcgctcactgcatcactgatgctgagcaggaatggtgggaggagcayagaatgcctcctcccaatcagggtattttcagtctcttctgtggtgagaaactttttgaggatccaggatttcaaagcaaagaggc

SEQ ID NO: 848317 - DNA, 602 bp, Homo sapiens
tgctactgtgttcatcaaagcagatccttcttcctgagtacaaagctagactatgtcmgttttagctgatggaatgtgagcagaaatgattcctgtcacttacaggcctggtccataaaagcctctcagggagattcactttgtcttctcctgttgagatgtccagggcgatcttggaagctacatgttaaagatggcagggtctttgtcagtggagctcctaacaactttgtggagtcctaccccactctactgtctttttccactgattggacttaaatgaataagaaataatttgctagctttctattctgtaatggttcctttttatagcatccagttcttatttcaataatgtaacaatatttgttacctctttgaggacattgaagattgttgtggagtttttgtggttattgtttgtttgttttgcttccggcattgtgtgtttcctctgagttctttttggcacctacctgtttggatcactctttcacattgagtttttcctcaagtatatgagtatcatcattgacttctgaccatatttgagagtgaggtattgaaaagctgattaaaagctatgtgaccatgggtggggt

SEQ ID NO: 848318 - DNA, 613 bp, Homo sapiens
gttactaataatatttactaatgttactattttgaagccaatttcttattgttcttattttaatatgactttcaaaacaaaatcatagagattaaatcaaggaccaatcctcgtaagagttgatgaaatgagcgagaggtagtgtacttctgagaggtgttgacaacactgctctaattcatctagcatatcacagaaactggcctacagctcacaggtaaccagagaaatctgcagtatgacacgatcatcacagcaacagccaatatttttaaactgattagtatgtgctggtccagaaagcgtagagaatatgcttacctcagtggctggccactgatgttagtcaaatctgaatttatctctagacaaatgaatgtctcaaaactagacaaacttcataggagacatgatctaagcctagaaaaaaatagtaaagtaaaaagacaaatagtacaaagtctaattaataaaaacttggaaaagtgtttgatgaatgtgacatctgccttctaktttacatttaaggcactttcctaaatattatctcagaccttttatttaatactaaactaatttagcagctcaacagaatttctgaaaaggcttcagt

SEQ ID NO: 848319 - DNA, 630 bp, Homo sapiens
acatagtaacatctgtagcagctggttagtaaacctcatgtgggggtggggkgggggtgtattccttgggggatggtttgggccgaatggggagtggaatatttgacatttttcctgttttaaattctaggatagattttaacatcctttgcggtcccagtccaaggtaggctggtgtcatagtcttctcactcctaatccatgaccactgtttttttcctatttatatcaccaggtagcccactgagttaatatttaagttgtcaatagataagtgtccctgttttgtggcataatataactgaatttcatgagaagatttattccaccaggggtatttcagctttgaaaccaaatctgtgtatctaatactaaccaatctgttggatgtggattttaaaaaatgtttgctaaactacccaagtaagatttactgtattaaatggccttcgggtctgaaaagcttttttaacctcttgcttaaaatgcgttttattttgataagatacttcaaatagcctccaaaagtgtagatccaatcacttaaataaacctgtatgtatatgcatatgtgtacatgcatatcccctcctgctaaaactcatacacatgcgtgcagattattttcca

SEQ ID NO: 848320 - DNA, 630 bp, Homo sapiens
acatagtaacatctgtagcagctggttagtaaacctcatgtgggggtggggggggggtgtattccttgggggatggtttgggccgaatggggagtggaatatttgacatttttcctgttttaaattctaggatagattttaacatcctttgcggtcccagtccaaggtaggctggtgtcatagtcttctcactcctaatccatgaccactgtttttttcctatttatatcaccaggtagcccactgagttaatatttaagttgtcaatagataagtgtccctgttttgtggcataatataactgaatttcatgagaagatttattccaccaggggtatttcagctttgaaaccaaatctgtgtatctaatactaaccaatctgttggatgtggattttaaaaaatgtttgctaaactacccaagtaagatttactgtattaaatggccttcgggtctgaaaagcttttttaacctcttgcttaaaatgcgttttattttgataagatacttcaaatagcctccaaaagtgtagatccaatcayttaaataaacctgtatgtatatgcatatgtgtacatgcatatcccctcctgctaaaactcatacacatgcgtgcagattattttcca

SEQ ID NO: 848321 - DNA, 447 bp, Homo sapiens
gaacgcccaaaataataataataataaaatagtattattctactattataatatataatatataaaaatatacatacaattatataataataataatatattattattattgagatggagtttcactcttgttccccaggctggagtgcaatggtgcgatctcggctcactgcaacctccacctcccgggttcaggcaattctcctgcctcttccgcccaagtagctgggattacaggcatgcaccaccacgcctggctaattttgtattcttagtagagacggggttttcaccatgttggtcaggctggtcttgaactcctgacctcaggtgatctgcctgcctaggcctcccaaagtgctgggattagaggcgtgagccgccktgcccggcccaaaattattttgataaagaaaattatgaagaatcagtcttctccatgttaaa

SEQ ID NO: 848322 - DNA, 597 bp, Homo sapiens
tagacagtcaagggtacagtgggcaggcagatatttcagwcagagggaatagaacctccgtaggcctgagctaggaaagcatcaggtctagtgcattggtcaacagagggaaagcgagatgcagtgagaatgaagaggcaggaaaattgagtccttaagctatggcaagaaaatcagtgaagtaaagggaggggagggtgaggagatatatatatatctcctcactatgttgcccaagctggaatgcagtgactattcacagatactatcatagcacactacagcttcaaattcttgggctcaagcaatcctgagaagctgggactacaggtacataccaccatgcccggctatctatattttcttaaagaccattctgaattgaaaatacattgtagggtaccaaaaacggaaatgtggacaggaaaccattgcagaattctaagtaaatgcaggatgatgacagtgaagacaaaggaaagtggaatggtgaaacatatattttggaagcagaaagaatagggcctggctggttgtgggccggatatagagagtggtgagaaaagggttcctggcttgaatgattacatcacttgc

SEQ ID NO: 848323 - DNA, 483 bp, Homo sapiens
tcacattttccctgggatccagtggacacttttctgttcttatttttcttggcctctcaacagatttcaaactgttggaatccttctttcttttagaaactctttccttggctcccaagaatctatgtcctcctgattttcttcctacctctggtagttcatcctcagtccatttggagatataataaaatgctaaatgagactcaccctgatgtctcaaatttaagctgcaaacaaatgacatggacccccacattaaaaagagaagcataaagagtggacagatcttgtcctgtgcccctttgctcacttagggattcactggaagatttcttgaaagagagctgctggccaagtatggagtgctgyggcttatttctgttcaaatagaggaggtaaggggtgtgctactccactcgaagccaaatgagagaggcaaaagtgaagactcagagaagcttagggttggtgttttccacaaat

SEQ ID NO: 848324 - DNA, 608 bp, Homo sapiens
ctatgcagatagtgctatatctaaaagaacagtgtacatatcttaatgtaaatgcttcattgcattagccgggygtggtggtgggtgcctgtagtcccagctactcaggaggctgaggcaggagaacgtcgtgaacctgggaggcagagcttgcagtgagccaagattgcgccactgcactccagcccgggcgacagagcgagactctgtctcacaaaaaaaaaaaaaaaaaaaaaaatacttcattgctaaaaagtgctaacaatcaccgagccttcagcaagtcaacctttcttctgatggaggatcttgcctccacattgatggctgttggctgatcaggatggtgggtgttgaaggttagggcggctgtgacaatttattaaaacaacagtgaagtttgccacattgattgaatcttttttaggaaagatttttccgtaacatacgatgctatttgatagcatttgacccacagtagaacgtctttcaaaattggaaactctgccactgttgaatctaccaagtttatgcaatattctaaattctttgttgttatttcaacaacgttcacagcatcttcaccaggagtggattccatcaaaaga

SEQ ID NO: 848325 - DNA, 601 bp, Homo sapiens
cttctacagatgaaatgcataggttgaggttagggagagggacacagagcatccatgtactttacagtcataccaccttccaggaaccttcatgtgttcagctgtctggaagcttctggaaccctgkcgtttcggactgttagagaagcttcattacataggcattattgattaaaccattggccattggtgatcaaattaaccttcagcccctctctcctccctggaggctgtgggatggggcagaaagtcccaaccctccgattaggccttggtctttcagttgaccagccccatcctaaagctacctcagggctgccatccatcaattaactcattagcatacaaaaagatgtcactggaaattttaagtattttaggagttgtataccaggaaatggggttgaagttcaaatatatattttacactatcacagtccaatacgctggtttctcatggactagttcatgctaatcaggctcaaaacaaactcctttataacttggaaatttttttttattggcaagggaggatatgctttacttgttaattagaaatttatttattttccttccatttttccaatttctgttcttacca

SEQ ID NO: 848326 - DNA, 612 bp, Homo sapiens
gtgtcttccattttttcacaagatatgtgtaataaatattttgtaactttaatttcatctgttaaacattgagaaagctacaaatgttagaggaatgtgaaagctcagaagatagattttcaagtaagaatctgagcccagtaaattataatagctagtcaggttttccaggactaattattatcttattctcgctaatcctagttttaatatttaatagtttctctggtttattttgcacatctattagttggtggcttaaactcagagcttccctgtggagcgtggtgaataggttacaagtgtgaggagatgccggtttgctcttccctctgggtggtgggttgagcccaaggtggtcagtctgttaactgtgcctctagtctgagcatgttcctttttgactcccttgtgctgtacagatactggtatttcaatatatgccatgacacggaaaagaaaggaaggtagggtttgtcctcattatttggatggcatttattttataaataaaaggataaaggagtttcaaagcaacaattaaagtggttctttgcatttcgtggatgcrtttgttaatgtcatttctagttggggactggttatgtacaa

SEQ ID NO: 848327 - DNA, 662 bp, Homo sapiens
tactggatgctgtgggtgggaagagtatgaaagatgaatgaaagagcttcctaatcttcaggaagcttagctgggtaagacatgcacatgaataatgagtcatagaagaaatgaagttaaracaatagtataccacttctgaccaagcaagttacaaaagtccatgagtgtgtcacacatgcatgtcacacacacaaacacactccccatgccggtgagggtctgggggatgcatgtcccacatgctacagacagatgcaaactggcagctctctttgaacaccaataaggtaatatatattaagtcctataaaatgttcaaatactctacatctgaaaaatctacccaagaaaataagagacttataataagaaaattaaaaacttatatagaaaaatattcatccaaaactacaagaatgaaaaatcagaaacagtcttaacagtcagtgatcagggataaacatagtacatatataaaataaataactacacaatcccaattttttaagaatatgcatcaacttgaggatttataatataatattatgtgtaaacagccatatacagaaaggtttatataaggcatgaaacaaagtatgttaaaaatctatatacataaaaatacaggaaagaaacacccccatattatgatagtggtt

SEQ ID NO: 848328 - DNA, 603 bp, Homo sapiens; identical to SEQ ID NO: 848315

SEQ ID NO: 848329 - DNA, 681 bp, Homo sapiens; identical to SEQ ID NO: 835569

SEQ ID NO: 848330 - DNA, 681 bp, Homo sapiens
taaggattcgccacactgttttccatagtggttgtactagtttacattcccatcagcagtgtagaaatgttcccttttcaccgcatccacaccaacatccattatttttttatttattgattatggccattcttgcaggagtaaggtgatatcatgttgtggttttgatttgcatttccctgatcattaatgatgttgaacattttttcatatgtttgttggccatttgtatatcttcttttgagaattgtctattcatgtccttagcccacttttgataggactgtttgtttttctcttgctcatttgtttgagctctttttagattctggatattagtcctttgtcagatgtatagattgtgaagattttctcccactctgtgggttgtctgtttactctgatgactgttccttttgctgtgcaaaagttcttcagtttaattaagtcctagctatttatctttgtttttgttgcatttgcttttgggttcttggtcatgaaatctttgcctaggccaatgtctagaagggtttgtccaatgttatcttagagaatttttataatttcaggctttagatttaagtccttgatccatcttgagttgatttttgtataaggtgrgagatgaggatccagtttcattatcctgtatgtggctagccaattatcccagcacca

SEQ ID NO: 848331 - DNA, 596 bp, Homo sapiens
tccgccctgcaagccaccccaaatacaaartaaaaattgcattgtatttgtcaacaatataaaatgtgaataagtgcatctttagaaaatactctgcaaatgaagcttcatcatccatctccaggtactcatacaacccatgtgttgcccctaagctcttcttacatcaaaattctggaaccttcactggctccacaaatgaatgtcttcttgttcttggcaagttgtctggccacatttagtctcagattctttggctggaaagcaacctcccagggctatagtggggactatagtgagatgacatacaaaccatctgtttgtgcccactccccacttttcctgacagaagcttggtcatggtctagcagaaagtagcctttgctactgtgacttgggagctacaaagcaaaggggaaagtggaacttgctttacctaggtcctcgtttgtctgaatctagcccaatatttggagtagctgagttctcacagctccgtgctttccttgaaagggaagtcactcatctgacctaagaggcagaaaccgcaagggcaaaactccgaaactaagctcattaaaatatggatcacagga

SEQ ID NO: 848332 - DNA, 592 bp, Homo sapiens
tttcgcctcccgccatgattctgaggcctccccagctatgtggaactgttagtccaataaaacctctttttcagccaggcgtgatggctcacccctataatcccagcactttgggaggccgaggtgggtggatcacaaggtcaagagatcaagaccattctggccaacatggtgaaaccccaacatggtgaaaccccgtctctactaaaactacaaaaattagctgggcgtggtggtcggtgcctgtaatcctaacgactcaggaggctgaggcaggagaattgcttgaacccgggaggcggaggttgcagtgagctgagatcacaccactgcactccagcctggcaacagagtgagactccatctcaaaaacaaacaaacagacaaaactctctttttcttcccagtctcgggtatgtctttaccagcagcgtgaaaacggactaatactgacccacgcgctcactgcatcactgatgctgagcaggaatggtgggaggagcayagaatgcctcctcccaatcagggtattttcagtctcttctgtggtgagaaactttttgaggatccaggatttcaaagcaaagaggcg

SEQ ID NO: 848333 - DNA, 599 bp, Homo sapiens
tactgtgttcatcaaagcagatccttcttcctgagtacaaagctagactatgtcmgttttagctgatggaatgtgagcagaaatgattcctgtcacttacaggcctggtccataaaagcctctcagggagattcactttgtcttctcctgttgagatgtccagggcgatcttggaagctacatgttaaagatggcagggtctttgtcagtggagctcctaacaactttgtggagtcctaccccactctactgtctttttccactgattggacttaaatgaataagaaataatttgctagctttctattctgtaatggttcctttttatagcatccagttcttatttcaataatgtaacaatatttgttacctctttgaggacattgaagattgttgtggagtttttgtggttattgtttgtttgttttgcttccggcattgtgtgtttcctctgagttctttttggcacctacctgtttggatcactctttcacattgagtttttcctcaagtatatgagtatcatcattgacttctgaccatatttgagagtgaggtattgaaaagctgattaaaagctatgtgaccatgggtggggt

SEQ ID NO: 848334 - DNA, 587 bp, Homo sapiens
cacttagaagtggaagctaactatggttatgcaggggcctatagagaggtataagggacactgaagactcagaagggggaaaataggaaggaggtaaggaatgaaaaattacctattgggtacaatgtacactacttgaaagacgggtatgctaaaaactcagatttcaccactatacagttcatccatgtaactaaaaaccacttgtacccctaaatctattgaaatttaaaaagaaaattggccaggcagagtggcttatgcctgtaatcccagcactttgggaggctgaggtggacagattgcatgagctcaggaatttgagaccagccttggcaacatggtgagaccccgtgtctacaaaaagatacaaaaattagctggatgtagtggtgtgcacctgtagtcccagctacttgggaggctgaggtgggaggactgcttgagcctagcaggttgaggctgcagtaagttgaaactgtgccactgcattccagcctgggcaccagagcaagacccctgtctcaaacataaaataaaataawataaaataaaataaaataaaataaataaaataaaatagaaaa

SEQ ID NO: 848335 - DNA, 398 bp, Homo sapiens
cgccccaccaataaaatcttaacagtgacaatccatcacccgccaactgacctgcttcaagtgacagcaccgcaaggcccccgtgtccagacctctgtacataggaacatgaaacctgtgtacttaacaagatgcttgggaggaatacacaggatattatgtacgctgatctcacggatgagacaataattaaaaggtgactgaaactacctttcctgttggtaagcaaaagctttcagccacaaataaggcaacaagtacctctcagaccgcccgatggccrtcagtaaggatggggctgagaagtagtgtagatggagagaatcatgtgaatgatattgataatataagctcagttctcttgaccaacccttgcattctagaattaaagctaagat

SEQ ID NO: 848336 - DNA, 392 bp, Homo sapiens
gagggcagctttgtagctgcaggagggttctgctgtggaaacacggtatatgggcattatccttgtcccgttggcaacactgtcaccagcagggctaaattgcactttttgtctgggggttcagctaatctttcagaaaagtatttttgtacaagagaaattccttgtttcaaaacaaagctcacttcttgtgacgctctgggcagaaggtgctgggagcagcttcctgggtggccctgctcgtgtcccagcctctggcttcctgctrgtattgattcacaagggccctaaggccatcacagaggacgtatctccatattcaccacttgagcatacctcccagctccatgtttcactcgtgaaaccatggtcttcaaaacataaaataattt

SEQ ID NO: 848337 - DNA, 536 bp, Homo sapiens
tcaaccattcagccaaagagctgtaatcataattagccccgtattacacaagagctaaaggatagcaaccaccatttccccccacaatgaaagcacagtgaaggtaaacacagtgcagtgcttccgtaccatggaatatgagcccgccatgagaagaaatgacctcaaacacatcatgccaagtgaaagaaggcagtcatgagaggccacatagtgtatgattccagttatatgaaatgtccagaataggcaaatccatagagacagaaagtagatcagtgtttgccaggggctggggaaaggaaccacatcatgggcatggggtgacaggaatgttctggaatcagatagtgatgagggttgcactgcacaacttggtgaatatactaaatctcactcaattawacatccttaaatttggatgaatttcatggcatgcaaatgatatttcagtaaagcaattattttaaaaaatgaatgaaaatactaattaaagttaaagaaagcaacagagttgggatcttcctgcactccca

SEQ ID NO: 848338 - DNA, 580 bp, Homo sapiens
gaagaagcagagcccagtgaggagaaagaaacacacacacatcaaagttccctccatcttaggcagtgatgtgaacagcaatgaagcacagacggctggggggtaaatttcccgattcaaaakccagttcgagggtctaactgccttaaaactcatttctacccccagcaaaggccctactaagggaggtgccaatgccccattcctctctcatgtagtcttatcccataatactttctggaaccttctgcggacactggtttcttttatacacgtgtgttgtttaaatgctgacatctgcctggattccataagggaatcaaaccccatccacctcacacaaggccactgcaggcaccctgctcaaagagatctgcttatgaacaacctcaactcgtgaggccccaacacactcatccctctgcaggggcaagaggatgcgggacagggcctgggacaagcaaccatcaccaccaccagcaagaagaaatgagacagcagagagtcaaaacctgatgacctttcagaagaaaacactcccgaggtttctttgagtagtgaaaatgatacagggggtttt

SEQ ID NO: 848339 - DNA, 542 bp, Homo sapiens
atctgtctgggtctctgagtgatcatggtagcactgtctctctgccaacctgcaagaggcatgtgatgtgtgtgagatacacctcagtcatgtgatgtgtgtgagaggtacacctcagtcatgtgatttgtgtgagatacacctcagtttttaaaccatagagatgttaggctcgattgtcacctcggcataatctaacccatcctggctgatacagtcacatgactaagagcccagagctaagatttatacccgagtctggggcccaggcctcaggccctaaccacccggcttcgatggagagtgtggggctttcggggccatcgctggggctcctgaggcctggcattggtgagcagctctgagtgtctgctcatggccatgaaggtaggcgtggcaggtggaatgccagggtgacccttgtcagagcccaccccktgcctcataatcccccctatctccagtgtggaagggcctgtggatgccatgggctagcgctccaggagcaagctctgctgtggcaccatgactgtgtgagttga

SEQ ID NO: 848340 - DNA, 600 bp, Homo sapiens
aaacagaattatacatactgtttgtagccaacactttttttaaaaaacatgtaatctgagyataataagattttaaagcagaattacacagcgttttacataagttaacatatttatggcacttggcacagtgcccggcacacaggaggaaaatgctggaaactgtcatttcatcatccggatcaccttgggttggtgcccttatacctgtttcacagatgaagaaactgaggcacggatagggtaacttacattagtttcccagggctgccgtaacaaattgcggttgtggtttaaaacaacagaaacttgttctctcgcatttttggaggctagaagccccaaatcaaggtgcccgcaggccaggctcttccacaggctctagaggaggacgctttctggccgcttccagcttccagtggctgctggtcatccttggtgttccttggcttttggacatatccttccaacctctgtgtcctgtgtcacgtggccttcttccctctgtgtgtctgtgtcctttcttttaaggacaccagtcactggatttagcacttactcgatccagtatgaccctatactaactagttacatctgcaa

SEQ ID NO: 848341 - DNA, 642 bp, Homo sapiens
tgtacaacagcgttattcataatagccaaaaagtggcaacagccaaatgtccatcaactgatgagagggtaaacaaaatgtagtctttccatacgatggaatattattcatccgtaaaaacaaaggcagtactgatgcctgctacagcatggatgaaccctgaaaacacgatgctaagtgaaagcagccagacacaagactaagtttccacttatatgaaatgtctagaattagaaaatctatagacacagaaagtagattagtggttgccaggagttgagggtaaagtgggtagaaatggggaatgtcttcatcagttcgggctgctctaacaaaataccatggactgggtggcttgaaaacatcagaaatttatttcttgcagttctgcaggctgggaagcccaagatcgaggtccagctgggtcgacttgtggtgggagccatcttctcgctatatcctcacgcaaaaggccaggggtctctccccagcctctttgataagggcacactaatctcaatgaatcacctcycaaaggccccacctcctaacaccatcacactgggagttaggatttcaacagatacattttagagggacacagacattcagtcataacacagagtgactgctaatagatat

SEQ ID NO: 848342 - DNA, 642 bp, Homo sapiens
tgtacaacagcgttattcataatagccaaaaagtggcaacagccaaatgtccatcaactgatgagagggtaaacaaaatgtagtctttccatacgatggaatattattcatccgtaaaaacaaaggcagtactgatgcctgctacagcatggatgaaccctgaaaacacgatgctaagtgaaagcagccagacacaagactaagtttccacttatatgaaatgtctagaattagaaaatctatagacacagaaagtagattagtggttgccaggagttgagggtaaagtgggtagaaatggggaatgtcttcatcagttcgggctgctctaacaaaataccatggactgggtggcttgaaaacatcagaaatttatttcttgcagttctgcaggctgggaagcccaagatcgaggtccagctgggtcgacttgtggtgggagccatcttctcgctatatcctcacgcaaaaggccaggggtctctccccagcctctttgataagggcacactaatctcaatgaatcacctcccaaaggccccacctcctaacaccatcacactgggagttaggatttcaacagatacattttagagggacacagacattcagtcataacacrgagtgactgctaatagatat

SEQ ID NO: 848343 - DNA, 573 bp, Homo sapiens
attagattagtagagattatgcaaaacaaagaatggaggaaaaaaagaatggagaaaaataagcagagcctcaggggaaagtgggacataattattaagctcaccaacatatgtgtaatgggaatacaagaaggagcagactcagaaaggagcagaaacaattttttaagaaataacggctgaaaattgccaaatatcttgaaaattgccaaatatattgaaaaccaatgagttcacgtcctttgcagggacatggatgaagctggaaaccatcattctcagcaaactgacacaggaacagaaaaccaaacaccacatgttctcactcataagtgggagttgaacaatgagaacacatggacacagggagaggaacatcacacaccagggcctgtcagcaggtcggggcctaggggagggatagcattaggagaaatacctaatgtgtatgatggattkatgggtgcagcaaaccaccatggcatgtgtaaacctatgtaacaaacctgcacgttctgcacatgtaccccagaatttgtggtataataaaaaaaaataataataaaaatatat

SEQ ID NO: 848344 - DNA, 568 bp, Homo sapiens
accaccctgaaaagctgctttctcccttscatccatatcctctcttcctgtcacctccccatacagcttcacatttgcctcatcgcacttttcttttctgtccacctttcataatcccatccactccaaatcccggaccctgcacacgccaactccctgaatccaattcaggagtgccccagttcccctttcgatccatctcctttctactgtagcggagactacaagtcccaggatgccccgctagcccgtgaccggctaggaaataaagagccttctctccgcggtaggggcgctgttggatgtgctgagtgacgcgaggcggggaagtcggggcctagcctggcgctttctcggacgcgaccactggccccgcgttcggggaggagccgggcgggcggtcctgcactggcgtgccgctcccccagccactgcaatagagagctggatctgggtccccagccctgcgctggcagcttcagagactggcgagggctcggagctgacgcttggcagagctggggcttcccagatgctgtcgccgcaccccctcgcaggagggcccagg

SEQ ID NO: 848345 - DNA, 643 bp, Homo sapiens
tcagcctggcccttattgttcatatcactatcatgatttttgtcaaagtcattgaacaagtatctaggaagttccaaactttcccacattttcctgtcttcttctgagccctccaaactgttccagcctctgcctgttacccatttccaacgttgattccacatttttgggtatctttccatcaatacctaactctcagtaccaatttactatattagtccattttcacactgctgataaagacctacccgagactgagcaatttactaaaaaaagaggtttaatggagaactcacagttccatgtggctaggaaagcctcataatcatggtggaaggcaagaaggagcaagtcacatcttacatgaatggtggcaggcaaaaagagagagtgtattcagggaaactcccccttataaaactgtcagatctgacacttattcgctatcccaagaacagcataggaaagtcctgcccccatgattcaattacctcctaccaggtcactcccacaggaggtgggaattcaagatgagatttcggtggggacacagccaaaccatatacgccttatctcaacrcaggacaatttatgatgagatttatgattcaggcttccccctcccccaaaattaaataaaaaa

SEQ ID NO: 848346 - DNA, 468 bp, Homo sapiens
gcttcaatctcaggcatagaagacctgttttagctgacctaaaaacactccctgaagtcaatgataaaggactgtaaattgtagggcaagtgatctgtgagcccccaaagaagactaaggtagatgggctttagcaggggaaactccaccaagacagccatttactggtatcacctctatagggtaaagatctagtaagaaaatgatgtggccctggcaatatagcaactacagaagtttggttttctttcccacattcttgtctattattcttccctgagcaatactttcacatcacttcttcctgcccagaacccttgcacccaggccccaatccaggcttgtccttccctgttctgaaactactgctcctccagtcttcttcccattccctcgtgatacttaacagaattatagactcagagtattcagagacrgagtccaccttcccaccattagtctcatctg

SEQ ID NO: 848347 - DNA, 642 bp, Homo sapiens
ggaccctttactataactggtgataggcttgaatttctcctgttctaccaactaatccattcttcattaaagtttaaagakcctgtttggcagttgaagtgctattgattttgaaaccatggcacatgcagaaattgtctcacttgtgttgtttcctgtatttgctttaaaaagttgggatacagaaagtaaagcactttaatttaaggagtagatatagctgagtcaacatttatccagggtactttgctctaagcccaggatgacagaaagaaaacacaaaattctaatcattaagctctcgagtacattccaatgaacagtgactaacttttaacaccgcagggtgaaatttcaggacttttaaagtacaaaaaaagaatcagcttcttgagtaaggaatgcaatgttttgaaagtgaatcctgagtcaattttcccaccaccatatgaaagacgtatgtgtggaaagggtggaaaggcacgaacccattccctaactcgaacgtgaagaagaatgatctttgatttcactctattctagctctatcctgagttagtctttctggttctctgagtacaacttttccagagagagaaagaaaactataaagcagatcctttagaatcattctatatccca

SEQ ID NO: 848348 - DNA, 423 bp, Homo sapiens
taacgcacctctgggatgaaatcccatccctggacctcggttgtttttattgttgttgttgtttgcacaaggacagggagcaagttacaaataattcctgtcttctaccagctaataatcctatcttggacttyctttctacgtctagactaaatccttccaattcttcattaactgcactcccaggagcttctccttttccaactgctgacttaaaattcacactcattgattggtgaccacagacttggatacctatccttgtcccacagctcaaccatttccgtggctcagcaccagcatacctccaactggtcctatttaccacctagacatttctctcctcctccttcctctgaggtcctttctgtggctctcaaacatctttcagcaagttctttcctcatgtagattcttaatcaa

SEQ ID NO: 848349 - DNA, 423 bp, Homo sapiens
taacgcacctctgggatgaaatcccatccctggacctcggttgtttttattgttgttgttgtttgcacaaggacagggagcaagttacaaataattcctgtcttctaccagctaataatcctatcttggacttcctttctacgtctagactaaatccttccaattcttcattaactgcactcccaggagcttctccttttccaactgctgacttaaaattcacactcattgattggtgaccacagacttggatacctatccttgtcccacagctcaaccatttccgtggctcagcaccagcatacctccaactggtcctatytaccacctagacatttctctcctcctccttcctctgaggtcctttctgtggctctcaaacatctttcagcaagttctttcctcatgtagattcttaatcaa

SEQ ID NO: 848350 - DNA, 634 bp, Homo sapiens
gaatttctcagcagtgacacatcatcagtatatgcccaggaatccccgaggctactccacatctccagcatgggactcatggggaaaaccagtacaaacatggagctcatgttgcctgctgtgctgtaataaagtccttcatttctgacccaggagttttctatcttttgccagtatccatgaaaatgtgacagtctaactttttagcttgcaaataaagtaaatctcaggaccttcacaacatagctgggctattattatgctaataactaaacactgagttgagaaacttccattctacttgggagaggggtaggggaagtacagagaaacaaccaaccaaacaaacagacacttgatagaatgtcaggtagtcacaaatgaacaataaagtaagataaaaggacagagtaatggggatgctattttagatatggtgatcaggaaaggcctctatgaggaggtaaatgtgagcagagacctgaaaaataaaatgaagcagctgcttgctatggttatgtctatttaagagataaggaaacagaagctaggastgtgtatcttgctgaggtcttgtccacactaacgagttgtgcatttgtcacagcttacacaactaacaagctggggactt

SEQ ID NO: 848351 - DNA, 637 bp, Homo sapiens
ccagcaggtaggggtaagaccgagaagcagacataacagaaagagcattcccagctccaggaatgagagaatactctgctagcaagaactgccccaggaaagatggacagccacagcagggggcagggctggggtcatccctgttccaaggactgttctgggggagccagtgtagattaggtccctgcccaggtactgacagggcggcagaaaggacagatggtggagagtttttacaggtggtcccacaattccttctaactcagatcttccatagctaacaacatagactgcggccatctgataagagagaaacacgggattgaaggtagtcggggagatggagtaagatgaacaaaaggagacagagacaaggaggcagacaggagggtgcggacaaactaaggcccttggagacggaaaggtgaagcagcaggctgaaggcacacagcccccggcccctcccaaggtcgcccgctgtgggctgtgggggcagtggtgccccttagcccggrtccctcccaggcatggagcctccgcagagctgggcagctcagcattaattaggacctggctaatggctcggaagattggccagttctagggacgctgatgaatagagactgcgctgagattt

SEQ ID NO: 848352 - DNA, 602 bp, Homo sapiens
ttatctagagcttttaaccacttgatgtaaatgattattttttaaatatcttataaatcttaatgatttttctatttcttataaactcagctacagttaatgccagaakatcctaccatgagtaaatatttgtgtgtgtttttaacattttggtgtatttcaattttgttccttttgttttcaattttttgggtacatactaggtatatatatttatggggtataagagatattttgatacaggcatacaatacattataatcacatatgcgtagacgggatatctatcacttcaggtgtttatcatttctttgtgttgcaaaaatctaattgtacttttagctactttaaatgtgcaataaaattattattaactatagacaccctgttgtgctatcaaatactagatcttattcattagagttagatacactaactatatttttgtaaccattaatcatccctactccccccacctcacactgcccctcttgttatcttctgataaccatcattctattctctatctccattagtttgttttaatttttagctcccagaatataagtgaaaacatgcagtttatctttctgtgcctggct

SEQ ID NO: 848353 - DNA, 631 bp, Homo sapiens
gtactctccctcactctcaaaacttctatagattacaaatgaagaatgatccaaccaattaactgcaaacccctcagaccccaatgtttattaccaggtacaaactttsctttctgagtgaaagcagcagcgtatgcctggagacattctgggctgtgtgtacaaaacaaacagtggaccagaagtatttctgagccgatgtcatgggtccctgtaccaatctatctgggagaggagactagatttgagaagcagaaactccttttatgcagcatgtcaggctcttctaagacccctcaagagattttgagccaagctacctgcatccatattttccagtgtagaaggtaacagttctttaaagagtgacattgtgagatttttccacctagattagtttaagtcagatagattagggttacttgagtttcaagactgtttttctactaagctaaaaaaccttggaaaagtatctgcacctttctgatcctcattttgcttatctgtaaaatggagagaaatcaggttcatcaccctcatgaaattaaagtgaaaatatgtgaaacatctagcacagttccttgtatgtacaaaatagtcagttgtgatcattgataataacaataataac

SEQ ID NO: 848354 - DNA, 614 bp, Homo sapiens
gaggtggatttacttacatagacttttcatgttctttatacaaaacaaactagtccctgacaattttcttcttcaaatgttgtcctgctcccctaagagctgtgtcttgaggtgatctggactcaytccctatgcatgggcctcaacctccccatttgtgcagtgagagaggctggactgtgtggctcccagggttccttcagctcagactgtctatgtcaccccatcagatgccatattctcagccatgtctcccaagaggccctgggggtttctctcctgggggtcagctttgggtggcatcattgtgatgcattggacctcaccagccctgcttcccaggaggttttcaactgggtctcttactaagaaagcccaaagaccaggatcctagagagagctgtcaggcagaggccagcatggacttagagagcatggcctaagagaagccaaagagcaagccctctcccaggggaaatgatggcagaaagtcctgggttcaaatcctagcagctctgccacggactcactgtgtgaccttggacaagtcacttccttctctgagactaagtgtcctcatctgaaaaatgaggataaaagagtctttccatcac

SEQ ID NO: 848355 - DNA, 629 bp, Homo sapiens
tattcaccctatcttacataaagtgctgatttactgacaccaggcaaatacataattgactatccccctacctgcttcctttctcttgcaacgtgtgaattcgataatgtgaccataccctccctctttctcgtccagtcagcttttcgtctttaaatattgaactcctcaaaaatcatctttggagaaaggcacagacccgtctcccagacacatccttgaacttggcaaaataaacttctaaattggttgagaccagactcagatactttttggtttacagttccacgattcatgtgagtagatctagcagggaatagaaaattcaaagctgttgggaagaataatttcatatcccagaagcttcaagcattcttttccttcccactcctcttggacaaatcagagggtttgcaaatggcagtacagtagaagctgatacttctctcagagatgtaacacaggaagccaacaatatgctgtaatcaagaacagagcctttaggtgagaaaataaaaatcactgaccttggtttcaagyccaagtcatgtctaaatgttttactatggcctagacaccttataagaactagatccagaacttacattttaattgcatgtacatgtaga

SEQ ID NO: 848356 - DNA, 545 bp, Homo sapiens
aaaaggtggatgtgtgaccattccaatagagagaagctgagaatatatacagggagatatacagaagagggggagaaaaagttataatgatasgttgggtccacactatcaaaaaatttgagcatcatggtgaagtaattagtcttttaataaattagggattattttaaaaattctaaattttttaaaccgttattttaggttcagaggtacatgtgcaggtttgctatgtaggtaacctgcatgtcaccgggatttggtgtacagattatttcctcaccctggtaatcagcatagtacctgataagtagttttttaatcctttcccttctcttaccctccaccctcaattgggccccaatatatgttgttctcttctttatgtccatgtgtactcaatgtttagctcctacttataagtgagaacatgcagtgtttggttttctcttcctgagttagttggcttaggattatggcttccagctccattcatgttgctgcaaaggacacgttcttattcttttttatggctgcatagtatattc

SEQ ID NO: 848357 - DNA, 619 bp, Homo sapiens
cctgcattagtttgctaggaataatagcctccaggcttcatccatattcctgcaaaagatatgatctcattctttttatggctacatagtattccacagtgatatgtaccacactttcyctttatccaacctgtcattcattgatgggcatttaggttgattccatttctttgctaatgtgaatagtgctgcaataggcattcgtatgcatgtgtcttcatgatagaaccatttatattcctctgggtgtatacccagtaatgggattgctggatcaaatggtggttctgcttttagctctctgaaaaatttccacgctgcttttcacaacggttgaattaatttacactcccaccaacaatgtataagcgttcctttttctccacaacctcaccagcatctattatttttttgactttttaataacagccattctgactggtgtgagatggtatctcattatagttttaatttgcatttctctaatgatcaatgatattgagcttttttcataggcttgttggctgcttctatgtcttcttttgagaattgtctgttcatgccctttgcacactttttaatgggattgttttactcttgtaaatctgtttaagttcat

SEQ ID NO: 848358 - DNA, 619 bp, Homo sapiens
cctgcattagtttgctaggaataatagcctccaggcttcatccatattcctgcaaaagatatgatctcattctttttatggctacatagtattccacagtgatatgtaccacactttctctttatccaacctgtcattcattgatgggcatttaggttgattccatttctttgctaatgtgaatagtgctgcaataggcattcgtatgcatgtgtcttcatgatagaaccatttatattcctctgggtgtatacccagtaatgggattgctggatcaaatggtggttctgcttttagctctctgaaaaatttccacgctgcttttcacaacggttgaattaatttacactcccaccaacaatgtataagcgttcctttttctccacaacctcaccagcatctattatttttttgactttttaataacagccattctgactggtgtgagatggtatctcattatagttttaatttgcatttctctaaygatcaatgatattgagcttttttcataggcttgttggctgcttctatgtcttcttttgagaattgtctgttcatgccctttgcacactttttaatgggattgttttactcttgtaaatctgtttaagttcat

SEQ ID NO: 848359 - DNA, 643 bp, Homo sapiens
aaaaatataattatcaaatatgactgggtaaatatttgttaatgcaaacgaggcaaaacatggcatgtcttccaaaagtaattatttctgatgatattcatagatctttgaatcctatcatagtagtcattccatcatgaaatcacatgattgtcagttgaaggtagccatcctaggagcagtattatgcaggagaactttacctaaaagagtttttataatattttaaacctctagttgaaatgcaaaacctgtttaaaaaaataatttatctttgggaggccaaggcgggcggatcacaaggtcagatcgagaccatcctggctaacatggtgaaactctgtctctactgaaaacacaaaaaattagccaggcgtggtggtgggcacctgtagtcccagctacttgggaggctgaggcaggagaatggtgtgaacccaggaggcagagcttgcagtgagccgagattgcgccagccctggccacagagtgagactctgtctcaaaaaaaaaaaamattaatttacactaaaagtgatgtagttttgtgagtcagctgtgtaatgcagaggctaaacatttaaaaaggccatttttaagaaaacaatttaggccatcagtaaagttcatgtagagttttagg

SEQ ID NO: 848360 - DNA, 574 bp, Homo sapiens
tcttttttcccagtcttaatacctttttttcttgtyttatttcattagctactgcttccatgtagtatgatgttgactaggaatggtgagagggagcttctttgccttgttcttaatctcatgggggaaaagcatcttgtttctcaccattaagtatggtattagctttgtataatttctgttcctttaaattcgttaaggcatgttttgtggcccagaatgtgatctgtcttgatgttccatgtgagcttgagaaaaatatgtattttgtagttgttggatgaagtattctgtcaatgccaattagatccagttgattgatggtactgttcagttcagctatgtccttattgaatttctgcctgctgaacctgtcaattattgttagaggcttgctgaggtctgcacttgtaatagtgtatttatttattttcctttacagttctgttagtttttgcttcacatattttgatgctctgttgttagttacatgcacagtaaggattgctgtgtcttcttggagaattgaccattttatcattatgtaatgttcgttatccctaataattttcct

SEQ ID NO: 848361 - DNA, 606 bp, Homo sapiens
acttgaacatattttattgttagtgttcattgacttggcagaccctctcttaactgcaaggtacttytgtacatttttttttactctgaagaatttttccttccctttctttttgctctccaagcgttatactccgctttcagcagctaacaagcgagctgtggaatggggctggtgccaccccacatcggctgggaaggcctcaaaaaaagccaaatcctgtttcaaatcttgtttatgctccttcctctcttccccagcttcaaatcaacagatgcttctagtctgggaacctaggggagttctcagggccatgtatcctgtttcttttaatagaattgcagcctgactaaggtaaaaattagtttcctttttatattctttaattccttgtcttcactctttaatcaaatgtcttgttttaatttttccttgccctgtggcgttggcttatgtctagccacaaaatgtcccatttcatatacgttttaaaaagtggaccacaggaggaaatatttcatccaaagggaatattatagtttgaacacttaagatctagaatcaaagagtctgcagtaggagtcagtcacagaacacaaataacag

SEQ ID NO: 848362 - DNA, 606 bp, Homo sapiens
acttgaacatattttattgttagtgttcattgacttggcagaccctctcttaactgcaaggtacttctgtacatttttttttacyctgaagaatttttccttccctttctttttgctctccaagcgttatactccgctttcagcagctaacaagcgagctgtggaatggggctggtgccaccccacatcggctgggaaggcctcaaaaaaagccaaatcctgtttcaaatcttgtttatgctccttcctctcttccccagcttcaaatcaacagatgcttctagtctgggaacctaggggagttctcagggccatgtatcctgtttcttttaatagaattgcagcctgactaaggtaaaaattagtttcctttttatattctttaattccttgtcttcactctttaatcaaatgtcttgttttaatttttccttgccctgtggcgttggcttatgtctagccacaaaatgtcccatttcatatacgttttaaaaagtggaccacaggaggaaatatttcatccaaagggaatattatagtttgaacacttaagatctagaatcaaagagtctgcagtaggagtcagtcacagaacacaaataacag

SEQ ID NO: 848363 - DNA, 606 bp, Homo sapiens
acttgaacatattttattgttagtgttcattgacttggcagaccctctcttaactgcaaggtacttctgtacatttttttttactctgaagaatttttccttccctttctttttgctctccaagcgttatactccgctttcagcagctaacaagcgagctgtggaatggggctggtgccaccccacatcggctgggaaggcctcaaaaaaagccaaatcctgtttcaaatcttgtttatgctccttcctctcttccccagcttcaaatcaacagatgcttctagtctgggaacctaggggagttctcagggccatgtatcctgtttcttttaatagaattgcagcctgactaaggtaaaaattagtttcctttttatattctttaattccttgtcttcactctttaatcaaatgtcttgttttaatttttccttgccctgtggcgttggcttatgtctagccacaaaatgtcccatttcatatacgttttaaaaagtggaccacaggaggaaatatttcatccaaagggaayattatagtttgaacacttaagatctagaatcaaagagtctgcagtaggagtcagtcacagaacacaaataacag

SEQ ID NO: 848364 - DNA, 600 bp, Homo sapiens
caccctttagcttattgatacatcactccaatctctgcccctgttgtcacaagaccatcttcttcgtgcgtgtctgtttctgtgtctcgtctcctcttatgaggatacttaccagtcagattaagggccaccstactccaatatgacctcatcttaattacatcatctgcagtgactatttttttttaaagcagtctcactctgtcgcccaggctggtacccaatggcatcatctcggctcactgcaacctctgtctcccgggttcaagcgactctcctgcctcaacttcctgtgtagctgggataacaggttcacaccaccatgcctggctaatgtttgtatttttagtagacacgggatttcgctatgttggccaggctggtcttgaactgctgacctcaagtgatccacctgccttggcctcccaaagtgctgggattacaggcatgagccaccaagcccggcccgtaatgacttatttccaaataaggtcacattcgaagactggagattaggcctcaacatctttttggggggcgtgggggcaagggacagaatccaacccataataccatacaacccgacagtcccactcctag

SEQ ID NO: 848365 - DNA, 603 bp, Homo sapiens
taccttaatatttttgacaggatgagcgcttaaggattttgttcccctctctttgctatttagagattttagttttaatacacaggaagactctcaggaaatccttttttctggttttggattcatgtaaagaaaaaaacgtaaaatgcagatctttgcatcattcagtagtcgtttatgtgagtaacagctgtttctctcgattcttcgcgatgtgcagttacaagttagaaccaccatttcatagagtccctttgattttaaaattgtgaacaatgaaaagcaagtgttctttaaaaacgaaattaagtgttttaggcagtacatatattaaatgtttggaaaataaaactctcctgaatttttaaactctctagaattggcaaagtactcagttacattatgaaatacagctctgttttggagcttgcaaaatgcttttgtagtggataactactgcaggggacaatactcatctttactgttggtgctgttagcatatttaatgaagtaattccattcctgtgatcacaaatgctcatgcacagaggctcttttaawgaaacagcttatcatctggtttctagcatgttctttcagatt

SEQ ID NO: 848366 - DNA, 511 bp, Homo sapiens
ccatgcccagctgatttttgtatttttagtagagatgaggtttcaccatgttggccaggctggtcttgaactcctgaccacaagcgatacgcccacctcagcctcccaaagtgctgggattataggcgtcagccactgtgcctggcctttaatttgcttcttattccttggttaggattagggagagaatgtcttgggtggccactgtggaaacagcatttccagtacctgtcggtacttgtctaaggagatttaatgctctccttcctcttgggcagtcattctcacagtggctatggcttgtcttgctacatacactgtgtaaccaccctgccctgctgggccttggtgtacacagatattgggtaaaaatctaatgttgacctagataaacatcacacacacacacacacacacacacacacacacacmcccaccacatttttttggtaggtacgttttcaatgtcgtttcatttcagaaaaaatatgggctacccttatattaacat

SEQ ID NO: 848367 - DNA, 626 bp, Homo sapiens
agataccgaaacacaccttcaagcaacagtaatttaactggcccaatattgtctcagagaagacaaattgttcaatggagtggcataaaaagtccagaaaatgactgacttgcgtgtcaaaatttacaatgattgaggtgggattttatttcagatcagttaggaaagggtaaacaattcagtgaaaagttttggggcaactggaacgaaacaaatatatattcctctacataagaatcatttccaagtttattagtgttcagcataaaaataaaactgtagaattattagaagaaattataagggaatatttctataatcctagtgttggaggaggctttcctaagcataacatttagcccaaaatctataatgaagaaaactgacagatttaactagtgaaaattaaatgcttttgtacaagaaagatgtaagaaaggttaagtgtcacagactaaggcatattacatatacagcaatacctggattacatacagaatgtctgtaaatgttaatccagtaaaaatatatatatatatgaacaggtaattcacagaagatggaatamaaattgtcgatcaacatatgaagagatgctcactcactactatcaggaaaatgcaaac

SEQ ID NO: 848368 - DNA, 634 bp, Homo sapiens
actcagatcccctaaccctctgtttsgagtccttcacccaaatctcccttttataaaatgtctctggtccagaaggtagatgttactggtgccacctttaaggtctgagaaagaagccctgcttctgccctagtgggaaactttcccctgcactttgggtagtaggattggtgtccctaactaacactggctggcaaagggaaatgattcccttctatctcggaagaaaaggaattttacagaaggcggttaaagcattagctgaattgagggcctaaaaagcttgacaacccccctttaaccgatgatccgcccacagtggaaaaagaggcacttcttagctgagcggcaaataaagatttccagaaggatacgctgctgtgcttttgtgtcacgtttggggagcccgccgccctggccacctcacttcaatggcagcccagatgaccagataggggtagtaattaattataatttgttccaatttaaagaccacaaaagaaatgctgaaaactggtttcgaaaagcatttttagacgtaagggtattaatgattaatcctctcgaaccctcagttggtaataggtaaaacgtcggagacggtgacagtcacttaattgctggtgcaattcac

SEQ ID NO: 848369 - DNA, 639 bp, Homo sapiens
cagggttagaatcatgtgcaggaacacagtagtaggctgcctggctgacacagaattacccacattaggtgcaatacctacgacctctccttcagaatacttsaaagttgtgtccaatttgtttgtaaaatggggaaactacgactatttatacaccaaagttcatatttttgatgtgtattggtagcaaccagaacatacttagaacaaagaccatcataaaggcataattctttcttacttttttctactaagtgtcttattgggagaatgagggattacctaaacatttttaatctgattttcactatctgatattcatgtgtaattgttaattttgtactgggggaaaaaaatcaccaacttgagcaccagctctcatttggaaataatttttataatattacaatgaatataggttgaaacaattaagaactttaaaaaaaaaaatgaagttctaatatgattcaggcatgtagcccacacttggaatgctgtggctctcattacaacctaccctgcaaaccaaatagcaatttgaaagttctgaggtttcagagggacaggcagggcaaattagaatcagttacagaggcaggaaaaaacaggcagctgaaaatgtctgggaaatgtactttt

SEQ ID NO: 848370 - DNA, 595 bp, Homo sapiens
acgtccgtgcactgctcaggtccagtgcattgcaaccaattgtaggttacatgtgcccagttaagtggatttgcagatcataccatctggctttaactaagctaaagcaacgctcacaaaacaggtaagtgcttaagaggatgcctgaaaaacaaccacatgggctgaagctaatgttaaacacacaggaccaatcaacaagaagccacgtggcaggcctaagactgagccctgagctcccagggttctcgctatcagtcacatgatgaggtcaaagcactgatgatttcatcagatatgaaaagaatagttcacaacaattaaaatgactgggaagactttatttaaaatgtgggcttccattcatttttgttcatgataaagcttccctaagtgtacactgtgcctagagataccagctaatgatactccagagctatcaaaatgcgcaagtcatttaaaatctaagcactcaggacctgaagacaaacaactctagttttyttcactatgtttaacattgggcagtactacactacaaattcagtacttcacaaaattttattaatttaatgattaacatgtagaagcttct

SEQ ID NO: 848371 - DNA, 406 bp, Homo sapiens
ataatacagatcttaaatagcgtattagtttctttaatattttctcccaaatatctcttttacataaactctaatacattgcctttccctgctcatcaagaatgtgaaagaaatactgaaaatagacctgcatttgtttaaccaaaagctaatatgtaaaaaaaaaaaaaaaaaaaaaaaaaaaaaaaaaaaagataaggaaagccactggctgtggctttgtacaaacctgctgggatacatgacacattgtgctttcattgctgccacctcaccatgcaagggctttgcctgtgtgcaaggtcttttactgtcaaatttaaraatccccatgatattctttatttgaggactctagtaatttcttatgtaaagacagtctagggagaatgtaagaatataagca

SEQ ID NO: 848372 - DNA, 571 bp, Homo sapiens
ccggtgccatgccctgggcctggtagttaaaaatcaacccctgacttaactgcttgtgttatctatagatttcagacattgtatggaaaagcatcgtgaaaatccctgtcctgttctgttccattctgattactggtgcatgcaggccccagtcacatacccactgcttgctcaatcaatcacgaccctctcacacagacccctttagaactgtaagcccttaaaagggacaggaattgctcactcagggagcttggttttttgagaataagactgctgacactcccggccaaataaagccctttctttcctaaactcggtgtttcgaggggttttgtctgcagctcttcctgctacaaagggagctcgacaagatgcaaaacggagttgaaaattagcacacagaaacttctaaagccacccaggaaatgaaggaagaaatcttaamaataaatcaatcagagcttctggaattgaaacactcatggaatttcaaaatacaattgaaactttaccaatagactgggccaaacagaataaagaatttcagagcctgaagaccagtcttttg

SEQ ID NO: 848373 - DNA, 602 bp, Homo sapiens
gatacttggtactatagaagtgggaggattggaggacaatgggttttggctaagtttccttggacaatagagtttagaatcattattactgccaagacatatttttaatttgtatactaatgacttggtgagggttagcttaagagacaagttcattgctaaggaagtcaaggctttttaatgaagaaaaataccaccttattagttgcaatggaaacaatactctatttccttcatcatttctgcaccaataattttgccctcttactaacatgtgctgatagttccaagatcttttagtgtggtaaggctggttcaccctcatctatggctggtattacagactgtagttgctcatctctgtgtttaagaggaaaaaggcctccttgtttccttgagtatctgtgacttagtgcatttgtatgctacaatagcatacccccaaatcagcccaattttgaataggtcagggtggctcagactcatgaagatgatctcctataaggcagagattgataactggtaggctctttggctagctctgaagagtctatggtttctatcgcmttgtgcgactgtagcacaaagagcatgtttattat

SEQ ID NO: 848374 - DNA, 506 bp, Homo sapiens
cattcagccccagggtaattacagtcacacaaaccttaaaaacaattccatcatgacttytaaggacaaattctacccactttcattatagaaactgaacagtattcttcctcctctgaattacctttggaaaaaaaacatgtttctatggtgagttttgtgacataatttgcaaaatgttggcatttgggaatgaggaaacaattagttcttgtctttatgttaaagtcatctctgtgaaactctattctcaggtccatggcaattaggatggcaaaatagctaatttttttaatcaaaaaataagtcattaaagcccattttcccctaagtaaacacacacaacttctggttttagagatgaacaataatcaactaaataaaaaaagagtatttatttactgcctatggtcacaaagaatcaggctttgatagtgtgagagatgcaaagagaaaaggaaggtgatttttatcttttaagagattagtttgaggttggaaaagag

SEQ ID NO: 848375 - DNA, 522 bp, Homo sapiens
catacagattttcagaacataatggcatactcaagaataaatratgagaattttgtaaagttactacttatagaggtgtgggcagggttatgggaaccaccaaaggatggcgaagcatctagagctccaggcagcaaaatgctgttaggaactcagctgagctgggaaagggagaactaagctgccaggtgtcagtgtagccaattaaaacaagcaaaaatgagaaagttaagcctttaatcacttactgcaataataaaagcaagagtctgaaaccagagaaatcaccgactcctactgttccatttatccccatggaaaagagcaccagcaaagggccaggtggatcagcactgatttgggcagattcacactgttgagggagccccagctaaagactccggcagttgagaaccctaattgtgtagggagtggagtggtgaagacgggctaggagtggaaaagtattagatactgtgtcagagtgtggaaaaatgtctttaagatttcccgagtctcccc

SEQ ID NO: 848376 - DNA, 522 bp, Homo sapiens
catacagattttcagaacataatggcatactcaagaataaatgatgagaattttgtaaagttactacttatagaggtgtgggcagggttatgggaaccaccaaaggatggcgaagcatctagagctmcaggcagcaaaatgctgttaggaactcagctgagctgggaaagggagaactaagctgccaggtgtcagtgtagccaattaaaacaagcaaaaatgagaaagttaagcctttaatcacttactgcaataataaaagcaagagtctgaaaccagagaaatcaccgactcctactgttccatttatccccatggaaaagagcaccagcaaagggccaggtggatcagcactgatttgggcagattcacactgttgagggagccccagctaaagactccggcagttgagaaccctaattgtgtagggagtggagtggtgaagacgggctaggagtggaaaagtattagatactgtgtcagagtgtggaaaaatgtctttaagatttcccgagtctcccc

SEQ ID NO: 848377 - DNA, 611 bp, Homo sapiens
tttataaatttaaagtcattgtaatttatgtattcacttctctctttttttttcctctgtctctctttatccgtctctctcctctattcattgacccagggtctaatttattgaaactcaaatttgatgcttatacttacagtatgaaaaatgaaaaatgtgtgtgtgaggatagatgcaaatgtcatgtgttttcaggaatatcatttaagtttgaagatgattttaacccagcagttttgtttgtttgcttagttttagaaatgaggcctttctatgttgcctaggctggagtgcagtggctactcacagggatgatcatagtgtattgcagcctcgaactgcaggcctcaagctgtccttccattctcagcctcatgagtagctgggactacaggtggataccaccatacctggcaagtaatattatttagatgataccatttacaaagtaccagtcacttgggctgttacctatgttctaacactttaaaaactgtgtgactttggaaagtttatctttctggtccccagttcaatctctgtaaattgaagttaatatgagagctattaaacagyactttactgtgtattaggttagttatgcttat

SEQ ID NO: 848378 - DNA, 469 bp, Homo sapiens
ctggaggcatctcagactaagcatgtgcaaaaagtcaatgaccgtgttcctccattccaacacctccttccatctccattaatggtgtccacccacatttcttggcctgtgcttgtcttccacaactagcttgcgggcaaatcaacaggttctccctctcgaccatccctcactcccacccctcctctgcacaccgtggctgatgctgatgaactgggaatagctgccccacgctctgtgctggcctccctgattccacagccaagctcacatgaggccacagcaagttgttcagaacacttgacacaggctctatctcagtgaaaagctcaaatggtcccacctccagccactgatgggccacagctcacagctgccgtggctgagcggctctttargacgcatttccaggctgctctccttcttcagctgtgccctgagattcaggctaagcctcccccacaactgt

SEQ ID NO: 848379 - DNA, 468 bp, Homo sapiens
attttatcatccccaggaaatggttaagagcagaacatttgatttttcatcaaatgattcaggacgttcccatttgaagaaagttaataatgtcagataaccttgagaacccwgggtgtgtttcttagttaaaactgagcaagtgctgaccacagtaaaagtacgtgggcactgagtctggctctgaattaaagaggaacacaggttcacattagaaaccgtgattgtaggttttattacaagagtttgtttcctgaccctagattcaggtagtaagagcccatattcagagcacaccaccatttctccactgtttcatgtcctggtgagcataagagatcttgcttaaaacaaataaaagtctcaatcatcaaagttggaagactaataaacttattgataattcttccttctgggcacttatcagcctcttagatccccttaaggattagaaggaacactataaag

SEQ ID NO: 848380 - DNA, 551 bp, Homo sapiens
ccattgctcaaggagctggctgaggccctgcagtggccccttcagccgacatggcctcccactccatgctgggggagccaaagggaggaacagcaggccaggcgtccagcccaggaggawgcgccacatccaggtgacatggaactcactcagcaaaagtgcagccaccttttcctgtaaaggccaggtggtaaatcgtgtccacttcacagcccctggggtatctgctgcagctcttcaactcaactcaggcatcaccaaagcagccgtagaccacccggaaacaaaggggtgccactgtgccccaataattgttttttaatgtaaaaacaggtgttgagccagaatttgacctgtgacctggtttgctgactgtgctttagaaagactgggaaggatagtgatgatgggttttgaccacagagatatgggtgtgtgtgtgtgtgtgtgtgtgtgcccgtgtgtgtggctctgtgtacgtgtctgtatctgtactgggagtggggatgcccattgattttcttaccgggggatccttgttcttagagctc

SEQ ID NO: 848381 - DNA, 598 bp, Homo sapiens
agtctattttcaaacgcctacagctagtagtaaaatagccagactcccccagcaggttaggatcacacatcatcatcatgtctattagatgctgagctggaaatattgagccagagcaataagcaaaaataaataaatacataaagattggaaaggaataaatacaactgtcaggattcacaaaggacaattgcatagatagaaaattcaaataatcaacaaattagaattaacagatgaatttagaagggtcactggaaacatggttaatatagcaagtccactttgtttctatgtaatagcaacaaaaattagaaaaataaataaattctgattcatatagcatcaaaaaattcaatacttatggatacatttatttttttcaaatgcaagacctcttcatgaaaaactatgaaacattactgaaataaattaaagaagacatgagtaagtggggagatggtccttgtttgcggattagaaaatccattatttttaaaatgtcaaccctttccacattgatcaccagatttaatgcgattccaatcawaatcccagcaggaatttttgtgcacgctgacaagccaattataaaatt

SEQ ID NO: 848382 - DNA, 549 bp, Homo sapiens
catcagacattatcatgtctggtgctaataaaagtgtgggttctcccactatcaaccacacaaatgtcctttggcaggcaaatgatttttagcctcttagcctaaaaagatgccttagggagtggggagcccatgtttcagggggacagggtttccgtctgggaagacgaaagggcggtggggatggatggtgctgcacaacagcgtgagtgtgcttcatgccgcagaactgtgtgcttaaacaaggttaaggggcgaaattctgtgatgtgtattttaccacaataaaataaaaaagaaattaaagatgaattactctgaatcctggatcccaggactagcgaagtgaaatcagctctagaatcaagtgtccataaaatgtcagcagggcaccacctagggaaccaggaagtgtctcagcacccaggattgctcaagaagaacaaacacatctgcttttgaaatatataatacacaataygaaatttcttaaaactaaaggagaatagagcagaaaggctgcattgctataaaatacaatccattcct

SEQ ID NO: 848383 - DNA, 631 bp, Homo sapiens
ctgtggactactagagcagggaggcaaggaggggagcgtgggttgamaaactacctgtcaggtactatgcttgctaccagggtgatggaatctgtaccccaaacctcagcatcttgcaatattcccatgtaacaaatctacacatgtaccccctgtatctaaaataaaagttgaaaagactgcatgtttccttttaacgctagctttaaatttatcctacaatttttaacagctttatcaagctataattgacatacaataaaatacatatattaacgtatataattttatgttttgacataggtacacacccaagaaaccatcaccacaatcaacataatgaacatacacactatgccaaagagttccttcgtctccctttataatccctcctttctgcttctccctagcacccttgatttagtagatttgattttactgagcaaaacaaaaaacataacacacatcaaaactatacaggtcagtgaatggtcacaaagggaacacacacgaaaccaccacccaggtcaagagacagaacatcagcaacacccccaaaaggccttcccagcctcttcctctcaccatcccctccattcttccaagtggtagctcctagttttctactcca

SEQ ID NO: 848384 - DNA, 485 bp, Homo sapiens
agttttgtataaggagcatcaaagttcaatatctttatagaaaaatgtcaacaccaatttccaggagaggtaggagatatcaaagtgtcaaaaaatatatatctaaaagtccsctgataaaaagagacatggtgtagagaagaggatccaaatgatgagaatattgaattgtctttgttaaatattctcagcaattgtgtcagaatggatccaaggccatcttcccacagatatacccttgttcctaagttccaggcccacactcactcaactttttgggggaattaaccacaggctttcaccaacgttggaagaaatcacaatactcacagactcataaagcagaccagaaaaatcttgctaaggttatttttagatataaaaacatttcacagatatttttaagttgatgtgaataatttaagatgcagatatgatacaggagtcaaataatttggttttaaaaatacaactaaaaatatcta

SEQ ID NO: 848385 - DNA, 601 bp, Homo sapiens
gtcctggggatcaagtgaccctggagcctgtcggccctgtctccaatctccccactcaccatcggggagaagattgatggatgtcattgggggaatcaatatgattttctttttttttcccctgactctgagataccaagtttccccctaccctccactctcctcgttacacagaccctcccaaccctgagctgatcgagatgggactggagggccatggaattaaattctgggggttgttttctggctaaatcaaccgaagctaacatgatggaaaggtgagagagaggctgactgacggaggagacaggagctgggggccatggagagagggtcctggtcagggagagccaggaaggactgggctccaggcccactagggcaaagaggaaaggggctacagggaggaatggcacagaacactgttccatggagttggatgggtgggtgggggtgatattagcaaggacgagacagacttgatctccataaaggacagagatctrtggcaagaaagactgaagttagagccaagatgcggtaacctgggcatttctcgtaggtgtcattggtacttcctcatctggaaagcttatcctgc

SEQ ID NO: 848386 - DNA, 505 bp, Homo sapiens
cccaggttcaagtgattctcctgccttggcctcctgagtagctaggactacaggtgactgccacctgtacttttagtagasatgggggtttccccatgttggccaggctggtcttgaactcctgacctcaagtgatctgccggccttggcctcccaaagtgttgggattataggcatgagccacctggcccggccccttgtggctttttgattaggatcttgagcttgggttaaagatcaatgttggttcaatcgccttcgggcagaacaggtgtgctgggccactattgttaggtttctagatcagattcttcacagagtgaggatccaggtttccttgccctggaaaaccacattacttcccagggcttatgaatgccccattctaggttgtccaagtggctgaagttctggattttcaatagataaaaatgggtcaaagacagaagaacaagacgaatgaaacatttttttgggagtggggtgaaggggtatgaaaaccaac

SEQ ID NO: 848387 - DNA, 607 bp, Homo sapiens; identical to SEQ ID NO: 815532

SEQ ID NO: 848388 - DNA, 645 bp, Homo sapiens
aagatcaaactttttgccaggtatagttttacattgytattttaaccttcaggtgggaaagcaattgtttctgtagagaaactgtctccataaccaaaaggaagtgcgggtggaagcaattaactggacagttcggtcaattaactcagaaacttactgaccagagtgttcagagctacctacctttattctggttttaattttgtaatttatcagagtccagaatttcagtctggataacttttatttaaacacttgatttctgaaactggccttgaactagtgcttctttggacttttttttttctcttctccctttggtttgctctcgacagctggaatgagagactggatggcgttgaaatgaaatgctggagccatccatccatgtgcttccagggtggcttcctggctgtgagaacacagtgaccctgtgaggccaacatggactcggttctcctgacataacatggctggaggagctccagctctgggatgttatcttgctgttttacactggtggttcagccagcccatgggaaactgaacttgggctgggagacctggcagcaaatccaaactgaaataagaatcagcacttcgagttcaactgtgaaacaaatgtgggcccaaggcctaaatgcc

SEQ ID NO: 848389 - DNA, 656 bp, Homo sapiens
gtaccagaaatatacagccagactaagacaaccacacatatcaacagtcatttactttggacatattcctagaaaattttgcttccatttatcatccttttcccgtccataaaggcacaatttaaaatctatccagtccaggaggctttctgcgctgttcaaccacagttggagtgtgagatagactcagagtcgctgtttccaagagttcaaaattcaccattgtcaatattttccccagttattgccaattatgatcataagccactgccaaaattcatttatcagtcatctgtgagttttctgccttgtagacaagtctgtttataagctcatattccagtgacaaagaacatatgggttgactcattctgctgtagccagttcagaatcaacagtttgcctcattaaaccttaaaattagatagcttattatattctctgcacacatagccagaatatttaggaacaaggcattatcacaatcctaacagctattatggtttattttatgttaatggtkcttgattcctgcactcacagttttacgtagcaagcatgatttggaggtcatttaatcagttcagcatatgaaaacatgcccccatactgtgctgactcatcagcgttttaatgtgacaacacatatacgcaca

SEQ ID NO: 848390 - DNA, 656 bp, Homo sapiens
gtaccagaaatatacagccagactaagacaaccacacatatcaacagtcatttactttggacatattcctagaaaattttgcttccatttatcatccttttcccgtccataaaggcacaatttaaaatctatccagtccaggaggctttctgcgctgttcaaccacagttggagtgtgagatagactcagagtcgctgtttccaagagttcaaaattcaccattgtcaatattttccccagttattgccaattatgatcataagccactgccaaaattcatttatcagtcatctgtgagttttctgccttgtagacaagtctgtttataagctcatattccagtgacaaagaacatatgggttgactcattctgctgtagccagttcagaatcaacagtttgcctcattaaaccttaaaattagatagcttattatattctctgcacacatagccagaatatttaggaacaaggcattatcacaatcctaacagctattatggtttattttatgttaatggtgcttgattcctgcactcacagttttacstagcaagcatgatttggaggtcatttaatcagttcagcatatgaaaacatgcccccatactgtgctgactcatcagcgttttaatgtgacaacacatatacgcaca

SEQ ID NO: 848391 - DNA, 636 bp, Homo sapiens
gctaattatcctgatctgatcatgatacattatatgtattgaaacatcactacgaaccccataattatgtacagttattacatgtcaaaaataaaaaagaaayggatggttaaaagtatggctgttatagttaggcctttttttgttgaagataaaaaaccaattcaatctggtaaaagaggaattctatgaacctacctagctaaaccttgggaaaggtaggatagatcattggaagcacaaactcaggactcttaatttttccttttctcatctcttctcctctctatgggccaaatttctactcttcagataagatcatccataagttgggaggacaggcattgctgaaggaagcttttctgatctgagaggaaaaatattctctttctttaccttcagtttgaaaatgtctatagaaggaatctgattataataatataattataatcaattatacaattaattttaattaattaattaacaatataattataattaatcagattccttccataattaatcagattccaattaacaagggcaggattcctgcccttattagcatcttaaatcagggagacagggtcagctcgtctgatgcataaccatgatgggaaatgtaccttgtccctg

SEQ ID NO: 848392 - DNA, 639 bp, Homo sapiens
agtattttttagaatttccttgtttcctctatttgttttttgaactacctcattgtattattacattttgtggtttctctagagattacgtataatatgcattcttagtttgtcacagtctagaattaatattacattattttatatataacaaccttagagcagtaaggtatgtaattttcacttatatcccttcctgtcatttgtgctactcttgtcatacattttacttcgacatttattttgaaccccaaatacattttttactatttttgctttagtcaattaacttttaaagaaattaagaaagaaaaccaaatgtttatatttacccacatatttataatttcttctccctttcaattcagaattccattttttatcatttcccttcagcctataaaactttctttggcagtttttgtagtgcagagatactggcaacatattcactttgtttttatctaaaaatgtcttttgtttgctttcacttttttacacttctctttgaaacgttttattgtgataacatgtcataaaatttggcattttaaccatttttaagtgtacattcagtggtattagccacactcataatgttgtacaaccacyggcattatctatttctaagagtttttt

SEQ ID NO: 848393 - DNA, 668 bp, Homo sapiens
tgggttactgatccattttcagttaatttttagatgtggtgtgagacaggggtccagcttcattattttgcaartcctattttcccagcaccatttatggaaaatgttactgtttctctatcgaacaaagttgctagccttgtcaaaaataaattgtgcataccaacaagtgtacagaaaatgctcaatatcaattgtcatcaggaaaatgcaaaccaaaaccacaatgagatatcatctcacctcagaaagactatgatcaagaagacaaaataaatgctggcaaggatgcagagaaaaggggacttatacatacactgtttgtgggactgtaaattacttgtagccattatggaaaacagtatagagacttctcaaaatattaaaaatagaactaccttatgatccagcaattccactactgcttatatgtatccaaatgggaagcggtgtgtcaaacagatatctgtactcccatgtttattgcatcattagtcacaatagccaagatatgaaatcgacctgtgtccaccaatggataaatggataaagaaaatatggtatatatatacaaggagatactatttagccataaaaaagaatgaaatcctgtcatttgtgacaacatggatcagtctagaggacattatgttaagtgaaataagcca

SEQ ID NO: 848394 - DNA, 668 bp, Homo sapiens
tgggttactgatccattttcagttaatttttagatgtggtgtgagacaggggtccagcttcattattttgcaagtccyattttcccagcaccatttatggaaaatgttactgtttctctatcgaacaaagttgctagccttgtcaaaaataaattgtgcataccaacaagtgtacagaaaatgctcaatatcaattgtcatcaggaaaatgcaaaccaaaaccacaatgagatatcatctcacctcagaaagactatgatcaagaagacaaaataaatgctggcaaggatgcagagaaaaggggacttatacatacactgtttgtgggactgtaaattacttgtagccattatggaaaacagtatagagacttctcaaaatattaaaaatagaactaccttatgatccagcaattccactactgcttatatgtatccaaatgggaagcggtgtgtcaaacagatatctgtactcccatgtttattgcatcattagtcacaatagccaagatatgaaatcgacctgtgtccaccaatggataaatggataaagaaaatatggtatatatatacaaggagatactatttagccataaaaaagaatgaaatcctgtcatttgtgacaacatggatcagtctagaggacattatgttaagtgaaataagcca

SEQ ID NO: 848395 - DNA, 553 bp, Homo sapiens
tctgacgcctttgctgacagccaagcacaggttctgtgggcaccaatckggggaataaggatgagggaggtggccaaggggttctgtggtggcaggagaaggtcaaatacggtcagcttcctgctgccaacaaggtcaacccggaagaaaatgagaagggacctggtgagtcccgagtagaagtcaaaacaccctccacgggcatctccacccctaagagggaccctccatgggcacctccacccctaagagggaccctgcatgggtgcctccacccctaagggggcaccctccacgggcacctccacccataaggggtgccctccaccagcacctccgcccctaagggacacctccatgggcatctccacctctaagagggaccctgcaagggcacctccacccctaaggaggcaccctccatgggcacctccacccctaagggggcaccttccatgggcatctccacccctaagggggcaccctccaccagcacctctacccctaagggggtaccttccatgggcatctccacccctaaggggacacccta

SEQ ID NO: 848396 - DNA, 477 bp, Homo sapiens
atcatacagagaattttccttatctaaaccactggatttatccgaccttcattccccatagtgctccatccctgatgtctactcagttttcagccaaatcaagstcaggataaagaagaggtttggatggaagtaagctggatattcaggctcctgcagtaatactcaattattgaattctctagaaacaccaactctgctataatgaagtcctcagttttaaaatatctttataaatcaggtgattctgtattggcaacagccagcttgctgttccctgctttgttataaaaattagatggtaaaatcctgagagcttgctgggattgttaaaagataatcttaagtattttaatgcacattattcttcatgcaactttgagccttaagtgccccgaaacagtaagatcagaatccaatcgaagagcaatcagctggtgtcatcatcctgagactccagtccggtctgctgttacc

SEQ ID NO: 848397 - DNA, 477 bp, Homo sapiens
atcatacagagaattttccttatctaaaccactggatttatccgaccttcattccccatagtgctccatccctgatgtctactcagttttcagccaaatcaagctcaggataaagaagaggtttggatggaagtaagctggatattcaggctcctgcagtaatactcaattattgaattctctagaaacaccaactctgctataatgaagtcctcagttttaaaatatctttataaatcaggtgattctgtattggcaacagccagcttgctgttccctgctttgttataaaaattagatggtaaaatcctgagagcttgctgggattgttaaaagataatcttargtattttaatgcacattattcttcatgcaactttgagccttaagtgccccgaaacagtaagatcagaatccaatcgaagagcaatcagctggtgtcatcatcctgagactccagtccggtctgctgttacc

SEQ ID NO: 848398 - DNA, 624 bp, Homo sapiens
gttatagaatggaaaagaggaaaagggtccagagagctgacccatattcaagagctaggtttacagcagtgagagatgtagtagcaaacaacagtggccatgaagaagcagcggctcagtccgaaactggggaaatcactgaaatgaaaggtgcagagtttcacaaagaaggaaggggcaggagccccctcatagaagaataggaggccaatttcagcaaaaaatttcagggctctggggttttgtattagcatgcctctttctcctcaaattaggattattttatttttattttattttaatttttttttgagacagagtcttgcgctgttgcccaggctggagtgtagtgacgtgatcttggctcactgcaacttatgcttcccagattcaagtgattctactgcctcagcctcccgagtagctgggactacaggcgtgcgccaccatgcgcggctaatttttgtattcttagtaaagacagagttttcaccatgttggccaggctggtctcaaactcctgacctcaggtgatctgccygcctcagcctcccaaactgttgggattacaggcgtgagccaccgctcgcagcttaatttttgtttctaatgtcagtccctcct

SEQ ID NO: 848399 - DNA, 624 bp, Homo sapiens
gttatagaatggaaaagaggaaaagggtccagagagctgacccatattcaagagctaggtttacagcagtgagagatgtagtagcaaacaacagtggccatgaagaagcagcggctcagtccgaaactggggaaatcactgaaatgaaaggtgcagagtttcacaaagaaggaaggggcaggagccccctcatagaagaataggaggccaatttcagcaaaaaatttcagggctctggggttttgtattagcatgcctctttctcctcaaattaggattattttatttttattttattttaatttttttttgagacagagtcttgcgctgttgcccaggctggagtgtagtgacgtgatcttggctcactgcaacttatgcttcccagattcaagtgattctactgcctcagcctcccgagtagctgggactacaggcgtgcgccaccatgcgcggctaatttttgtattcttagtaaagacagagttttcaccatgttggccaggctggtctcaaactcctgacctcaggtgatctgcccgcctcagcctcccaaactgttgggattacaggcgtgagccaccgctygcagcttaatttttgtttctaatgtcagtccctcct

SEQ ID NO: 848400 - DNA, 624 bp, Homo sapiens
gttatagaatggaaaagaggaaaagggtccagagagctgacccatattcaagagctaggtttacagcagtgagagatgtagtagcaaacaacagtggccatgaagaagcagcggctcagtccgaaactggggaaatcactgaaatgaaaggtgcagagtttcacaaagaaggaaggggcaggagccccctcatagaagaataggaggccaatttcagcaaaaaatttcagggctctggggttttgtattagcatgcctctttctcctcaaattaggattattttatttttattttattttaatttttttttgagacagagtcttgcgctgttgcccaggctggagtgtagtgacgtgatcttggctcactgcaacttatgcttcccagattcaagtgattctactgcctcagcctcccgagtagctgggactacaggcgtgcgccaccatgcgcggctaatttttgtattcttagtaaagacagagttttcaccatgttggccaggctggtctcaaactcctgacctcaggtgatctgcccgcctcagcctcccaaactgttgggattacaggcgtgagccaccgctcgcrgcttaatttttgtttctaatgtcagtccctcct

SEQ ID NO: 848401 - DNA, 622 bp, Homo sapiens
ctaccattttgtagatgggaraaacaaggcctgaagcaattgttctgctcgaagtcacagaaacctgaactcacaccagtctttacttcaaaatggcataaatatttctaaacagttttctactttagatatttgggtgttctacagtgttttgcagactagggctgagggagaatcctgttacgtttataagtaatttacaataagacaaaaagatggaaatgaaaactttgtcttctttcatttaagtaattaaggtgcttcattttccctcctcgttcctacacagttcactttatgatttttaaaaactagatagagaaaaaaggaaatcctaaaattagtcattcaaagattaacacagtgagaggaacccacccattctttaatagaatgaatattttattttagtctatgtgaattttatattagtagatagacagatgcagatacaagtaattttacaccaattataattcatgtataggaatctttccttatttaatttttgagcatttaaaaatgtttttctagtctattaaattatatcagttagattataaaatataaagattaaacaaccttggatcacattgcactgcagaacctgcttttatcacag

SEQ ID NO: 848402 - DNA, 541 bp, Homo sapiens
cacacacagggttggatgcaggctttgtgtggcctgaaagcctattcaatttggcaggggtgggtacctctttaagaaaagaatgtaaggccaggcgtggtggctcacgcttgtaatcccagcactttgggaggccgaggtgggcagaccacctgaggttgggagttcgaaaccagccgaccaacatggagaaactctgtcctactaaaaatacgaaattagctgggcgtggtggtgcatgcctgtaatcccagctactcaagctgaggcaggagaatccttagaacctgggaggcggaggttgcagtgggccgagattgcgccattgcactctagcctgggcaacaagagtgaaacatcgtctcaaaaaaaaaaagaaagaaaagaatgtaaaagtaccagatataagagtgagtatagattkcaaatgatgaaagaaaacacaaggaagtatatgtttaagaaactgacaaccttacatcacaaaatgcagaaaaataaaatatgattacttgttatctgtttgatatgttacattatt

SEQ ID NO: 848403 - DNA, 572 bp, Homo sapiens
tgtgtatgtctgtgtccaaacctcttcttagaaggacaccagtcatagtggattaggggtcaccctaatgacttcattttcccaattacttgtttaagaccctgtgttaaaatagagccacattctgaggtactcggggccagggcttcaacacgtgaattggtttcaacatacgagttgtgcagttcattttgtaacacctgtggagatgggtagagggcaggttctctctgcaataaggttttacagatggtcatttatcttctgcttctttcttttcccttcttattttttactgtgagaaaattcaaacatgcagaaaagttgcaagaatagcaatgagtaattgttaacatgttgttgtatttgcctcctctttatgtgtagattatatgaactgatgaaaacaaagttttaggcatcatggcacctcacctgtaaacttttcagcatgaagctcagaacaaagacatccttttctataaccccacgctattgtcacacctaagaaagtttcaaataattcagttcratgtctgtcatctagtccatattcagatttctccagttgt

SEQ ID NO: 848404 - DNA, 510 bp, Homo sapiens
ctctaaaagggcaatctaagggatccttatagcgatgaaaatatcaatatcrtggttgtgatactatacaatagttttgcaagatgttaccattgggggaacttggtgaagggtacataggatctctctgtattatttcttactacagaatgtgaatctcaaaatcaacagtgtaatttttttaagcagtccttcattactttgaagaaccaacctgaagtccagaatttggatctttggatgtagttcctttagtgcagctcctcaaatatacttcttctcaatctagagagtcaagttatctgccctgcatgcacctaacacacaattgtgggacaggcataccaaaagtgatatagacacatctgttccaaaaaaggagaaaatgggaagcacatggaaataactggtccatagccattctaaaatccagcatagcaaatatttggagttctgtgattaggattcaatcccattcctgcctgagaataactctcaagtcctggcttg

SEQ ID NO: 848405 - DNA, 482 bp, Homo sapiens
cccagcctgtaccttgtcttttcatactctcacagtgttttttgaagagcagaagttttaaattttgatgaagtctaatttatcargtttttattttgtagacggtgcttttgtttttgtacctaagaaatctttgcctaagccatggtcacaaaaattttctcatatattttcctagcagttttattaattatgtgttttacattagatctctaatccatctttatttaatttgtatctacaatacaaggtattgatcaaatttcatttttttgcatataggtatctaatttttccagaagcatttgttaaaaagttttctccactgatttttctcaaaaatcagttatctatgaaagtatgtgtatgtttctgaactctattctgttcctttgatctatttatctatctttatccaaagccatattgtcttgattactacagctttataataagccttgaacaaagttcatattagccca

SEQ ID NO: 848406 - DNA, 599 bp, Homo sapiens
ccagcctgtaccttgtcttttcatactctcacagtgttttttgaagagcagaagttttaaattttgatgaagtctaatttatcaggtttttattttgtagackgtgcttttgtttttgtacctaagaaatctttgcctaagccatggtcacaaaaattttctcatatattttcctagcagttttattaattatgtgttttacattagatctctaatccatctttatttaatttgtatctacaatacaaggtattgatcaaatttcatttttttgcatataggtatctaatttttccagaagcatttgttaaaaagttttctccactgatttttctcaaaaatcagttatctatgaaagtatgtgtatgtttctgaactctattctgttcctttgatctatttatctatctttatccaaagccatattgtcttgattactacagctttataataagccttgaacaaagttcatattagcccatgactttggtttttctccaaaattgttttagttattcgatatcctttgatttccatatgaacctaaagattaacttgttaatttttataaaaagatatgctgagatttttacagcaac

SEQ ID NO: 848407 - DNA, 569 bp, Homo sapiens
atactgtagactaaactcaagttgttttatttaccactgacacctacaaaaccatattttgttaccacagaagtttactactctgagaattaaatcctacactactggagaatgaaagatgattaacaatattttcaaaaggtcacaaccagataaaacttagaaggctatacaaatagttatataaactttatttaagcctagacatattactaggacttttaaaaggcagttttcaagttacactgtgttgttgttgttgtttgttgttgttgttgttagagagacaaggtctcactctgttgcccagcctggagtacaatggtgtggtgaaatgataccttgctgcagcctcaaactcttgggctcaagcgatcctcctgcccaagcagctaggactataagcacacacctccacacctggctaatttttttattttttgtagagacagggtcttgccaagttgtccaagctagtcttgaactyctggcctcacccaatcctgcctcagcttcccaaagtgctggaattacagatgtcagccactgcacccagccctagattatac

SEQ ID NO: 848408 - DNA, 569 bp, Homo sapiens
atactgtagactaaactcaagttgttttatttaccactgacacctacaaaaccatattttgttaccacagaagtttactactctgagaattaaatcctacactactggagaatgaaagatgattaacaatattttcaaaaggtcacaaccagataaaacttagaaggctatacaaatagttatataaactttatttaagcctagacatattactaggacttttaaaaggcagttttcaagttacactgtgttgttgttgttgtttgttgttgttgttgttagagagacaaggtctcactctgttgcccagcctggagtacaatggtgtggtgaaatgataccttgctgcagcctcaaactcttgggctcaagcgatcctcctgcccaagcagctaggactataagcacacacctccacacctggctaatttttttattttttgtagagacagggtcttgccaagttgtccaagctagtcttgaactcctggcctcacccaatcctscctcagcttcccaaagtgctggaattacagatgtcagccactgcacccagccctagattatac

SEQ ID NO: 848409 - DNA, 528 bp, Homo sapiens
tgcatgctgttctctctgcttacttccttttgcttgttcccttgcctttagtaaagtcttatgaaatattccagctttatctatattgtgctgcaaaactcggaaaatatcagagaaaaagggagagcagtycccctccacaagaccgtggtagcagctataaatagatccaatctccccaaccaaagatgactctaaatacagagctggagtgataagccttttgctgttaaggatatgaacatttaattggtgtattctcttttcttcctattgacaaattaggccaagcagaaattcttttaaaaatccactaatcattctttattattttttaaaaagccacaatgaaactgaaatgtttgaagcattgaaggcatctctaaaaatatcagaagtatactttaaactgccatgaatccattctcattcttatttctctttctttttcttggaaagttctctcccttttctccagcttctcaagacactcaaaaacctcccctgaatggaaaatgaagccctaat

SEQ ID NO: 848410 - DNA, 460 bp, Homo sapiens
ctgattttacttttctacttgtgcacctgcayttatgatgtttcatctccaattcgtttagcaaaattctgcctatgttagtcttataccatctcatcttcccttcacctattgaatcctagtatctcagaagtccaactcagaatatctccattctctgactacctaagtcaaaaatgatacctgactttgtattcctgtagcagaatatttataccactcgcattgtacttttagtgttttatctcacagaataggcatttgtatcagttgcaggttagtttccccaggaaacagactcctgagatgaagattgcatggaggaagtttactggaaaggaatctcaggatcagcatctgtggaggaatgaaggaagaaggcttgggcagaggagaaactgacctgtgatgtaatcacaactatggcctcacctgttcctgtggagagccttgaggctgg

SEQ ID NO: 848411 - DNA, 681 bp, Homo sapiens
ggtaaagaggaaatactacaagaggaagcatctgagatttagaattctagttcttgttctgtcatttctaggtgtatgattttagatgtcaggtatgaaccttaatttcttcacctgaacaatgcaaataataacacctgcctagtctatatcaaagcgttataaatatcaaaggaaatgagtgtgaaagtgctttgaaaaagtacgtgtagtggctcgtgcctgtaatcccagcactttggagggccgaggtgggcggatcacgaggtcaggagatcgagaccatcctggctaacacggtgaaaccccgtctctactaaaaatacaaaaaattagccgggcgtggtggcgggcgcctgtagtcccagctacccgggaggctgaggcaggagaatggcgagaactcgggaggcagagcttgcagtgagccaagatcgcgccactgcactccagcctgggagacagccagactccgtctcaaaaaaaaaataaaaaataaaaaataaataaataaataaataaaaagcacattaagagagaaaaaatgtaaatcttattggaagcctttttaaaaaaaggaamaatgacatgatgataattacaagaacatgaaatttttattaaataaaatcaatgtttaatcaactttctttctagaaaaaattttgtttcctttcaaat

SEQ ID NO: 848412 - DNA, 636 bp, Homo sapiens
agggttagtttcatcttttacatacaatctcttttgcttctttattagtaacwcatcctattataaatatttgtcatgaataatcattcacactggtttaattactgtatttcttatattctactatgttgttgactttacgatgcaccgttaatttaataataaaagcaaaaggacctggaaaaacagtatattaaaaatacaaagaaaacatttaattgagtatagcatttcttttctttttttttttttggagtataacatttatgcagtttacatttcctagagtgtgtcaagtaatcatcttttaattttattgctggatcatactatcaactcagaacatactaagcacatgtaaggattagaatttcagttaaaactcagtggagtattttaaccagtgtcagccaactgaggtgtgataatcaggtaaacaaatttcttggtggtcttactaggttatcatattgaatggaaagatataattactgacaaattaaaacttacacttttccctgaaagctggcatttttctttgtttgacatttattttgagatatagtctgatagtaagatttgtcctgatatatgagatatggtataatctaaaatcataaatatattacctattct

SEQ ID NO: 848413 - DNA, 636 bp, Homo sapiens
agggttagtttcatcttttacatacaatctcttttgcttctttattagtaacacatcctattataaatatttgtcatgaataatcattcacactggtttaattactrtatttcttatattctactatgttgttgactttacgatgcaccgttaatttaataataaaagcaaaaggacctggaaaaacagtatattaaaaatacaaagaaaacatttaattgagtatagcatttcttttctttttttttttttggagtataacatttatgcagtttacatttcctagagtgtgtcaagtaatcatcttttaattttattgctggatcatactatcaactcagaacatactaagcacatgtaaggattagaatttcagttaaaactcagtggagtattttaaccagtgtcagccaactgaggtgtgataatcaggtaaacaaatttcttggtggtcttactaggttatcatattgaatggaaagatataattactgacaaattaaaacttacacttttccctgaaagctggcatttttctttgtttgacatttattttgagatatagtctgatagtaagatttgtcctgatatatgagatatggtataatctaaaatcataaatatattacctattct

SEQ ID NO: 848414 - DNA, 463 bp, Homo sapiens
cactgagttcaactacaaagtttttgcaactggcttgaatggaaaattctttatttctttttctaggagactatagtgttttttaaaattattttttattatgataaaatacatgcaatataaaatttgccattttaacaatttttaattgtacagttcagtggcattaagtacattcacaattactactatctattactaaaattttttaattgtcccaaagagagatttttacttattgtaaccagtaggcaatatctcctcatccctaccttctccccagcccttggtaatttcttatctactttctgtctctatgaatttgcctattatagatatttcacagtgtgcttggttccatgtctatagatcaaagaatgcttgagcttggagggatccagtggcccaagttccttcctggtacagatgakgcccctgaggctgagacgatgaagtagttgcc

SEQ ID NO: 848415 - DNA, 408 bp, Homo sapiens
tagacaagtaatgtttttccagaaattaaattctagtacagcaatcagaaacctgaacagctttattaaagtgtgtccattatttcagtcrattgcttatttataattccatgttggatgtcttcaaacattatcatgcaaaaattctaattaagataattagagcaagcagagagccacagggatttttccctcagcaggatctttattctaatttctaaagaattggagcttgtactgacagcttgacttgttcaaacagtttgtcgactgtcaacacagtgggaacattgttttgaaacaacagggttgacacagccatttctcagcatttcttattgccgtgactgttaatgatccatgcgtagctacaggaatatctgttcacatgtccatttgctatgtgtg

SEQ ID NO: 848416 - DNA, 634 bp, Homo sapiens
tctaagctcagattacccaggttgatgctgcagtgtgcattttcccaagattgctttattttgtgagggattactaccgaaagaacaataaactttcccttcggttctgtactcccactcaaggctgagcaagaagaagctgaagtaagtagaagcaggagatatccagtttatcaggaacttcctgataagagaaattggctcttcaactggcaagagtgtagaatctctttcattaaggatcttacagttgggaaagaaatgaaaatatttcaaataatttaggagaattacagtagagcatcaaaaatctttgggaagtcatctctgttcttatgtctttccagaccagaatcccacagcacaaggcattctcattgcacagcaatgcctggtaatacacacaacactctctgatagtgcaagtatctaatacactcttaaataatttggtctgaccagaaattgaatgggagataaataacctcatgtttcctcaatcttgatgtttccatcattacaaatattttatgaagtaattatttcagagcaatayacttgagtttcctaatttcttactagttctttcacatttaccatagactcatcaataaaccaattgttcttacctaaa

SEQ ID NO: 848417 - DNA, 566 bp, Homo sapiens
aaaaaaaaaaaaaaaagcaaggagtggaaagaattatgtgaataccctcctctctacaggtttcctgttycctttttctttttttgttaatgtcagacttattgaggtaaaatgcacatacagccaaattttgacaaatatacagtagtgtaaccatcacaacaattaacatggaacatttccatcaccccaaaaagttctctcatatccatttgtagttagttcctatccccagcctcagccattggcagtctctgattcatatcctatccctacagtcttgccttttcccgaatatcttataaatgaaattatacagtttttagccttttaagattgagtggtattcaaagacctgggaacttttgctagaactctgggagccacgattgtcaaagaaagtacaccttaaataggagactaaaaagtgtggccagagaggtagacggtatacagagaggttgtcttacgtttaaataaagagatgcaaacacttcgagaggaaaaggagaaatagtgatagggatagagattgtgatagacaaagacagagacttcacaagaga

SEQ ID NO: 848418 - DNA, 546 bp, Homo sapiens
tgtgcaatctacatctagtatgaaatccacacataggagagctggggcacaaggggactggaggcagttgctttgcaagatggctgaggagaaagcacactgggaacacaatccagaatgttctaacaataagttttcagtgaataaaccactggcaagacaattccatgtgcacctttaggttacctatatagtctcctaggaagatcaggatgaaagacctagatgatacccctgaggataaaacctccatcccctaaaatgattttttttaaataccactgtctttagctgtccaggaggtcagagtgttttttctgtctttgggccaagtcctgtctgagacctgtattttcactcttgttaccaaatctatctccctagtgcagtgtctccaggcctgagtttcttctggaacagattccattttagaatggggattcacaggttctgtgcatcaccacagtgctcagagaggattctcctggggtgtcttagaggcaggkgcccaactcaaatgtattcccaaggtttgctgggctctgg

SEQ ID NO: 848419 - DNA, 631 bp, Homo sapiens
tatctcattttctttctttttctcttctctttatttctttttctccaggatgatggcctcccagaaaatgaacatcagctgtcagtagctggaaagataaagaagcatttcaacacaggccccaagccgaatagcacagcagctggagtttctgtcatagcagtaagcatctgaaatatccacctataactttttttaaagcaacccacctaagagacaggcattactcaggagattctccagtcagagacagcagaatgggtcatttctttagacagctcagccacttaatgcactagaggaggtatgggacttatatatattatgtgtttctgcagatcatttccctgggcatcacatcattatccaacacctccagggtgtcttgcagtatatattaattttatgatttatttatttaaaaccgaaaacctcccccatgctggactctgtgccaatgcaaacttcttggctctaagaaaaagagttcatagtgtccttttgctaggacctagaaaggaaaggcaagctgagagagacgacattgcagggagagcttggaacactatagatcttgatactrgacctaaattaaagtcaaagcatagcagaaagctacgcagtgagattt

SEQ ID NO: 848420 - DNA, 174 bp, Homo sapiens
ccgctgtggcagcaccttcctggcaacagaacatacaatgaacacactaatgtggtaatgaactgacatccagagaacagaccagaaattgctggaggcaggaagcggggaatttgaggtggcaaaaaagaagagcatscttcacacaaacctgctatctctattctttgtgca

SEQ ID NO: 848421 - DNA, 509 bp, Homo sapiens
tcagtaagtccagagaatccaataagatatccatgagaagatctaccccaagacacataatcatcagattctccaaggttgaaatgaaggaagaaatattaagggcagtcagagagaaaggccaggtcacctacaaagggaagcccattagactaacagtagacctctcagcagaaaccctacaagccagaagagactgaaggtcaatgttcaatatttttcaagaaaagaatttccaaccaagaatttcatatccagccaaactaagcttcataagcgaaggagaaataaaagccttttcagacaagcaaatcctgagggattttgtcaccaccagccctgctttgcgagagctcctgaaggaagtattaaacatggaaaggaaaaaccgttaccagccactacaaaaacacactgaagtacacagaccaatgaygctatgaagcaaccacattagcaagtctgcaaaattaaccagctagcatcatgatgacaagaccgaatttaca

SEQ ID NO: 848422 - DNA, 657 bp, Homo sapiens
tcaacagatttttggaagaaggaaaggcaaaataggagtagaaagaacttagaagaaagctcaagtgctgtaggagactagaagaattgtctgatttgctcctatagggcctctgagattcccagaacttaagwtgaggcagagcagatagtaaagtactgagctaaacaaatatggattgattaaaaggctgtatatgcactggctagacttctagatatgttgcagtttattctctgtataaacagatcagtgagtttccaaaagaaaatgccttcagtaccacaaaattaagaaaatattttgaaaacattgattaagccctccgctatttctgcaaactgagccattttccatcatgagatgagaaagtcaaacatgcagtggaaagacaatatgcagggtcatcaaacaatttgaaggaaaatattcaaaccacctccaagatcaacccttgttttatctctgcccattatttgaattagtgtataaatgcaatttttactgaatttttgttaaatataggaaatacagatttatttttcatttttgtgggtagtttttcagaataaagttttaatccaacctttcttcctacttacccccaaatgttgatcaccttgtaagttctcttcatgtggacttttcctgatacca

SEQ ID NO: 848423 - DNA, 629 bp, Homo sapiens
gcctatgtgctaatacaatgctacagttccataaagggatccaggaaatgtttaatgaactgcctcaacatcacttaaaagctcattcaggtcagtgtttgggtttgaatccyggcacaccgctttccagatgtctgacaattccttcacctttctctgcctcagtttcctcctatggaccatggggattgttctagtcactacttgattccactgttgggaggattaaatacatttattcttgataaaaacactaaaacactaaaaaatagcagctattattttctcaaaagtcttttacacaagtagtctaaatatacatcctggtgaaaccactgaatttgttaaggttttttgcatcctgactggctgtgttgagtgaattagcttggaggcagaggtatgattctcagagcaaacttcaattaatgaattgaattcatctagttaccaggaatacagcaaaaaaattgaaagcttgaagtaatttttaaatataatcaagagactgtcaatttgtatgtatgtcttaagaaacaatagagcagaagcaatttaaaaaaacatgaggtcctgttccatcattttccacttggtttactgcccaaagcagcaagttctttatgtaa

SEQ ID NO: 848424 - DNA, 558 bp, Homo sapiens
agcaaaaattgacgaatgggatctaattaaactaaagtgcttctgcgcagcaaaagaaactatcaacagagtaaacagacaacctkcaggatgggagaaaaaaattgcaaattatgcatctgacaaaggtctaatattcagcatctataaggaacttattaaaattaacaagaaaaaacaaacaaccccataaaaagtgggtaaatgacatgaacaggcatttctcaaagtaagaaatgcatgcagccaagaatcatatgaaaaaaaaaaaagctcaacattactgatcattagagaaaagcaaatcagaaccacaatgagataccatctcatgctagtcagaatgtctattattttttttaaaaagtaacagatgctggcgaggttgtggagaaaaaaaaggaacacttatatactgttgggggaagtgtaaattagttcaaccattcggaaagacagtgtgggaattcctcaaagacctagaaccagaaataccatttcactcagcaatcccaatactggatacatactcaaaggaatagaaatcatcctattata

SEQ ID NO: 848425 - DNA, 464 bp, Homo sapiens
tacatttttgtgttgtcaaagagccaatctaagatttaattaataactctagtattttagttggtttaagtttctaaattatctttttatttttacaaatttgttatttttattttttactttattttgtcttttctcagattcatgatattaaagttttatttattaaatttttttctttttttcctaagaagtatatttttaaacacaatattgtatttgagaactgcttggattataacccacaaggttttttaatttaatattcattgttttctacaataatggtcaaatatagaggtagaataaaatggtaaattaaaccccatatgtgcrtgctaccaaggttcaaaatatttcaattttcttcaattgatttagttgtccttttttctctaaataatttcaaacaaattttccatgggtcaaggtattttgttgatatatactgcaatatttgtctt

SEQ ID NO: 848426 - DNA, 637 bp, Homo sapiens
acactctggtgtgagatgttgatagtgggggaggttctggaggtgtgtggtcagaggttgtaaggaaaccccctgtactttctgcccaattctctttttttttttaagatggaatctcactgtcacccaggctggagtgcaatggcatggtcttggctcactgaaacctcctcctcctgggttcaagcaattctcccgcctcagcctccctagtagctgggactacaggcgtgtgccaccacacccggctaatttttctattttttcttttaatagagacggagtttcactatgttggccaggctggtcttgaactcctgaccttgtgatcctgccacctaggcctcccaaaatgctgggattacaggtgtgagccaccacacccagccctttctgcccaattttttatgaacacgaaactgcttcaaaaaataaagtctattaaaaatgttgaaagtgtcctacataatcaaagttcaatgagcataagtaggaaattaacattgctgcattattgacatctcatctgcagattccaatctcatttgrcctactgtccaaatagtgccctttatttgtccaggatccaatcagaatcacacattgcatttagttattatgtggcattagtctcttt

SEQ ID NO: 848427 - DNA, 453 bp, Homo sapiens
cctagtgatatcaattttatcaaccctttcatgaatgagcttttggtttcactgattttctctttagtttttctgtttctaatctatctgtttcttttctggtctttatttttccttttctgttaactttgggtttcattgaaaattatttttttagtttcttattatgtattaactttccactctaaaacctctaagatgaatgttgattgacaattacttgagtctgtaaggttaacttcaaaatattggggttgattgcttggggacttaagcatttagttattgcatcagttcttgcagagcattttacaggcatccgtattacaawacatcatattatagtctgtgattaggtgggttttgtttggtcctattttgtttttatttgactatttcccaattagtctgaaaaccataaagggaaggacatttttctaatctcttaccccc

SEQ ID NO: 848428 - DNA, 633 bp, Homo sapiens
cggccctgacttaatataggcctgattcattcatttagactcaggagaaagaaacagatctgagtaaggtcacgaagagaaagccatgacaaaaagggactgtctctaaagttaaacaaaagtgataaacaattaaaattcaacaaaaatgatagggagaatttaaaccattttctcagatttcttaggtcataaaggatattatgctgttctatgagttgttgccttaagacatattacttatgtaaccccaaatttaatcatttcaagtgcttctttttaagacaagctttactttatcccccagaagacgtttagaaagcacttttcaccaccctagttatccttaaagaaaagctttatccacacttcagtttgtacttcccaccctcatctgtctgtgtgaagagctaacaatacagtgttccttcccttcagtttctccctggggcttcattatggctgtttcctgttagtatagtggggtatgcagtaattgatagtttcatattcccaggtgaggaatgggtcacaatttttggtggcgccatcattttgacacgcaccaccctcatgccctgtaactgaacragagctcaggtgtaagggttttaaatgtatttgaaagaaatg

SEQ ID NO: 848429 - DNA, 637 bp, Homo sapiens
cattaggagaaatacctaatgtaaatgacgagttaatgggtgtagcacaccaacatggcacrtgcatacatatgtaacaaacctgcacattgtgcacatgtaccctagaacttgaagtataataaaaaaaaaaaaaaagatttgggtggagacatacattgaaactatatcaagggtggtgccctcacaacataatcacctcccaaaggccacacctcttaatactgttgtattggagattaagtttctatttgaattttggagagaatactatcatccaaaccatggctttctgcccctggtctcctaaaattcatgttcttctcacatacaaaatacattcattccatcccaatagctcgaaatattcttaactcattccagtatcaactttcaagtttgagtccaaagtctcatctaaatatcatctaaatctgatatgggtgagactcaaggcacaatgcaacctaaggcaaatatctctccagctgtaaaatcagcttgtttgtgaaatcaagcaagtatgcacttccaaaatataatcgtggcacaaacatacgataggcattcccattccacaagagaaaactaggcaagcataaaggggtaacaggtctcaaggaggtccaaaacccaa

SEQ ID NO: 848430 - DNA, 611 bp, Homo sapiens
ttgcccaggctggactgcaatggcacagtctcagctcactgcaacctctgcctcccgggttcaagggttctcctgcctcagcctcccaagtagctgggattacaggtgctcaccaccacgcccagataatttttgtatttgtattagagatggggtttcaccatgttggccaggctggtctcaaattcctgacctcaggtgatctgtccacctcagcctcccaaagtgctgggattacaggcatgagccaccgcacctggcctacatttattttttacttacttatatatttatttttgagacacagtttcgctcttgttgcccaggctggactgcaatagtggggtcttggctcactgcaacctctgcctcccaggttcaagcgattctcctgcctcagcctcccaagtagctgtgattacaggtgcccgccaccacacctggctaatttttgtatttttagtagagacaggtttcaacatgttggccaggctggtctcgaattcctgacctcaggtgatctgcccacttggcctcccaaagtgctgggattacaggtgtgagccaccgcacccagcccacrtttattttaaattggccacttttaaaga

SEQ ID NO: 848431 - DNA, 527 bp, Homo sapiens
aagagctgggatgggtggatatacaaagtattcagagagagtaagaaaggagacataagcgtcgtttgtcctggacttattgccgtttttccttaaacagtgttggggggagagagacaattttgaagtgacatttgaatggggctatcaagggtgggccatcaaaattgaacatggagggaggagccagatgctgcaggaggaaacagaatgggctgagaaaggtgcaaaaaaagcagtacaaaggcatgaacaggcctgcagagctctggggctgttcaggaaggagggatggagacaaggctgggaaacatttggacattacgatgcaggtaacttgaactactaaaaatatcttgatgctggggagggatttagtcacactcgattatacaataacttgatggtaatatgaagggttgattggaggagaaaggatgtggrgcagtgagaacagctggggccctgagtggtggcctgagtaagggacaggagagagctgtgccaataccaacaggaggtggcaa

SEQ ID NO: 848432 - DNA, 634 bp, Homo sapiens
ataaaacaacaagaaactgaatttctgcagaaagtaaaaatgaaatttttcactctttagataggcaaatcagagactatacttcaagttttagaaaaaacatcagtacttttcatataaaagcaggtacttccatacatactttttcaccacataagatgaatgtttttaacagtgcctgggacatgatacgaactcaatgactgtttattgaatgaattaattgaacaagtttatgcaagatattgacataaaattaaacattgtcttcttataccatatagtgtctacaaaaactaagttgatacagaacctgcattgtaacatgattaaatttgagccaagtacatttatctctgaagaatttagaagtttataaaggaatcagaggctgggaactgaataattaatggaagatctctaaggcaatattcttttcattgtaactaatcttaaatagttaaagtaataattaataaataatatttaggttcctgaaaaaatgattaaattgaacrtcaaatagtttgcatttctatcacactgtagaatttatattttttatactgctttactgtaagatttggttgaacaaatacatcttatgatttcaagataagatattaaaatatgc

SEQ ID NO: 848433 - DNA, 628 bp, Homo sapiens
cttatgtattaaaaatttaatgataaaaatatttgcaatacttaactgaaaaatttttattcagaatttatcttgagacttgacatgtattaatacaattaacgtaccttataggtaaatattgattatattaaatttttagaattgggtcaaatatatgtctcatctcctctgataacttagtacaatctatgaaatggtgctagagactaagaaatacagaggttccgttatcaagtgtcatgaacttcaaatgctgttttgttgctaatgttagagtacctctctaattatcctctttagtaaactgtgagttgaaaatagtgaagtctttgatattgcagacagtgtctccagtataaattttgcttgagatgagaatctttctaagaacattttttcgtcacatacagtatgtcacatgttggaacattcccacttaaagttaacatgtactaatataaaggcctcagcagaatgtgttaagtggattctttttggcattgggtaaaggaatctttcaagcattctgtggatatacaaataagaaaaaaatttcaaaacaggcatatgcacaaaatttttatawcctatgagaatcatgatctggactaaacgcaaataagtg

SEQ ID NO: 848434 - DNA, 605 bp, Homo sapiens
acagaggaaaagacacaattttgaattccagccacacattaattgtgtgcctttaggcaaatcacttaagcttgttaaattcaatttattctactgaataataatacatgggaaagcactttmtatacttgaacgaactatgctcatttacagggttctgcgcatgacactgcatccgtaaaactgagaaaccaacaaagtgaggacaggatgaaaaaaaaaaacaactttcggaacgtgcttcctttcctcaatgccatgcagtttgtgcagtcagctgattagccaaaaatagttttgatgactgatgcttcctgcttatgtttagttggtttaggaagctcattagggatgctatcttggagatgagtctggtgggtagaatatctgatgactcttaagcaaatgtacttctttcagctggtgaattaatttctcaatagaatcagtttgctttttactaactgtctggcaatatcccatatttgctatagcctttcaaacacttgcaataagatctggctcacacatacaacctgttagtggtgaaagagaaacattcatcatattcaaatatctccaaacatgagagcagatgaatatgc

SEQ ID NO: 848435 - DNA, 618 bp, Homo sapiens
gagggcctgttcctcactcacagattcttgctgtgtgctcacacggtggaagggtagaaagggccaaaaacgctccctcaagccattttattttttcagggtactaatcccattcacctagtagcttcctaaaggccccaccacttaatactcttgcattggggattacatttcaacatgaattttggagggacacaaacattcaaaccagagcactcatacactcatggaatcacttcaacatttctcctctctctctgctacattagcattttttcaccctctaccagatcatttccaagagcatacatgctgttatttccttcatctaaaaaataaataaataaaattaaaatcatccattaacccttcttcccctgccaatgacttccccatttattttctcctctttgcaacaaaagtcctcaaaagaattatctgtactcacagtccaattcctctattcccgttgtcccataaatccacaccaatctttctttctcacaccattccacttaaacttttcttatcaaagtctccagtagactctaygttgtgaaattcaatgctagatctaattcaaaaatactgtttttgattagcagtatttgacacagg

SEQ ID NO: 848436 - DNA, 576 bp, Homo sapiens
gaatgaatgccagtataggcaggggagagaggaccttttattaaatatcaacagaacattagtctagtatcctcttctttttctctttagaacttgttggagaaagtggcacagaaaatgcaagctccccataaaatccactggattgagaaggcaaatcattccatggcagtgaaaggacggtcgacaaatgatgttttcaaagaaataaatacacagattttgttttggatccaagaaattactgaaatggacaagaaatgtcattagttaaaagccatgttatcttgagtacacatacagttaatttgataaagaagagtatgcctctcagcattgtgagatatatttcagactaatttgatgttctttaatgttcccttatttttgaaacacgttttaaatgtgaaattaatgtccttcacaaaatgtcttttgaaagcactgttacagtygtataaagatgatgtaaaaatattgaaggtggtctacatatattttattttcattagtatagttaagttttgaaaaaaaattaaacatctgattttgttacaaaaggtgcttttgtcttat

SEQ ID NO: 848437 - DNA, 646 bp, Homo sapiens
aatatatccttcattcatttttacacccaatcttctgccattcactctattctaactttctctatctcagcaaacaaaaattacaacgtcaacttttcaggtttcaggctaaaaaagtggaagtcatctgtgactcctttctctccaccctaaatccaatcacacaaaatacagacaactctgccttcaaaatcctgtatatccagatgtcaaccacttcttgccacctccaccacttctagtctggacaatagatacctaaatgttccctgttcttctcagttgtagaatttcaacagagcagcaaacgtgatcctcttaaactgaagccatcacgtcacttctttccatacctccttcttcccagggcttccctaatcacctagttgaaagcagattctcaagtccttgcaaaggcttgacctcaccatgccattctgagtacatctatcccctgacccctgtcacttcactgcagctgtgctggtctccttgctgtccctccaatacacagaccctgccacatagctttctatgtaccgtcccctctggctggcacacttgcacccacgtatccacgtagctccyggctcacatgtcacctttttcatgaagccatccttaatactctgttcctttcttcctg

SEQ ID NO: 848438 - DNA, 646 bp, Homo sapiens
aatatatccttcattcatttttacacccaatcttctgccattcactctattctaactttctctatctcagcaaacaaaaattacaacgtcaacttttcaggtttcaggctaaaaaagtggaagtcatctgtgactcctttctctccaccctaaatccaatcacacaaaatacagacaactctgccttcaaaatcctgtatatccagatgtcaaccacttcttgccacctccaccacttctagtctggacaatagatacctaaatgttccctgttcttctcagttgtagaatttcaacagagcagcaaacgtgatcctcttaaactgaagccatcacgtcacttctttccatacctccttcttcccagggcttccctaatcacctagttgaaagcagattctcaagtccttgcaaaggcttgacctcaccatgccattctgagtacatctatcccctgacccctgtcacttcactgcagctgtgctggtctccttgctgtccctccaatacacagaccctgccacatagctttctatgtaccgtcccctctggctggcacacttgcacccacgtatccacgtagctcccggctcacatgtcacctttttcatgaagccatycttaatactctgttcctttcttcctg

SEQ ID NO: 848439 - DNA, 657 bp, Homo sapiens
atgtggtttggaagtgaaataatgagcctattgaaaagtatgtaataaatgagtatttagactcaaaatctaaaatgaattatgagggatttgctcttygttttaaaaaatatattccaaaggaatattttgagatatcatgaaacacacatctcgcctaaaaaccaactgagaattagatttgatgtgtgtcatgattgtgttggagatgaagagacagagggaatggtcagttttgctaattaggaaaatcctggacatgtttacatcatcttacaatgttttgatcaatcttggaggcattaaattgactacttttcctaatagagatagtgcatgtgttctgaattgttaattggctctaaaattagttatagtttatttctaaattgaaccaaagttgggaaaaattcatggacttaatatgaaatatgttattcatcaatttcatatacaactttggttttttatgattttagatgttgaatctttgaaataatatttatattatctaatgataacgtttgatgtttggatagttcattgtctttacattttaaatttaagctacttttttttctttcaattcatgtgattaacttcttcggatgaacttgttaattttctcctactctgagttcatttgaatggcttatt

SEQ ID NO: 848440 - DNA, 574 bp, Homo sapiens
caactaaataaaaaagtattgagtagctgtaatatgacgagtcttgtgttggattctgggaagtcaatgataaaaaatataggctcatttgagaaaaacagcaaagctarcatgaaatactgaacctggcaggaccatggctactgtcaaaggctagtaagtgccagatgacatgggattttatataagaaatgaaccaagtaataaataaaatagtgtgtcagaggaacaatacataaaccaatatttaaaaatccacaaatatttaattttacctccaaacaatccctttatggaagagccttgatgttttatgaaaaataccatccctgatcattgctttactacctgataattcataaaaattttcttcagaaagattgaatgtcttatcctttatacccttttctgaccctaaaccctgatttcaacaaagtctgatgcacagaaaaggtagatcttgtcttcttttcataagatttctgttctggatatttgccataattatattctcaagtatatttaatattaaatacttgatcttatatttaagattttggatcatttgatcacc

SEQ ID NO: 848441 - DNA, 561 bp, Homo sapiens
ccttaagaacaagaataagaaaaggatgcctactcttaccactcctattcaacatattgttggaaaatttaccaagagcaatcaggcaagagaaagagataaaaggcatccaaatagaaaaagaagaagtcaaattatctctctttgctggtgatataattctatacctagaaaattcaagagattctgctgaaaggctcctaaaactgatcaaccagtttagtaaagtttctagacacaaaaatctgtgtgcaaaaatcagtggcatttctatagaccaacagtgttcaagctgatattcaaatcaagaatgctatcccatttacaatagccacaaaataataaaatacctaggaatatatctaaccaaggaggtagaatatctgcaaggaaaaataaaaagcactgatgaaaaaaattatagatgacacagacaaatgtaaaaacattycaagttcatggatcagaagaaaccttctcattaaaatggccatatggcccaaagcagtctacagattcagtgctattcctatcaaagtaccaatgtcattttttaaagaa

SEQ ID NO: 848442 - DNA, 534 bp, Homo sapiens
aaatttagacaggttatattatatttcccagttattttaaagatagtagagatttccaaatatttttgtgttgctgatattactgagattgacatttcaggcatgtgttaagctttgtgcattcattatctcatttaattatcaaaaaagcctaccgtatttcatcaatttaaatacagtaatcatttcttattcttttttctattaacatctctgaaatcaggattcatgttaaaattgatggaataccatagtgtaattattggccttttgttttttattaatgatgtgtaaaacaatgatgtggcctacattctatggcatcttagagtactagaaatgcagcagtgtgaattttgtacatacaaaaaaaagaatatcagagaggctaataagcctgattgaagtgaaataactaacaasttttagaacgaagattccaacagaggactctgtgatatctttacactgatacaagttaacgagttatcctataatactttcccacatattatttgtatgtaatattttcaa

SEQ ID NO: 848443 - DNA, 636 bp, Homo sapiens
gatgttctgctagaaaaggcaagacagagaaaatcaaactgaatgtattgatttttcctaattgtatactatcttcaaactctggaactasttatggtttctgagtggtccatatcaagctaatttattatttaatggtagaggatatgcatacttccaaactgaatgagagtgctgtttttattcactattcaaaatagttttgattcatattattttaaaattttgcaatttataaaatactttcctatatcatttcacttgattaatactacaatcaaccacctttcacctcactgttgcttcagataatgtgccaagggaaaaaaataagacaaaatgatgaatctgtattaggcataatatgagaaaaaacttagggcaaaattatttttttcctcctagatctcttttgttgttttttaaatgtgtttggttttgcactttgattttgccttatggcaattctttgctttgggaaattacttggaacaagaatgagcattaagaaacagcattcatagtattttctgccatctgtctcttgacctgaatttaggtgagaagaggagagagtaaaggagtcaaagtgaactatgttaaataatatgagaaatatttggagtttgctgcaga

SEQ ID NO: 848444 - DNA, 549 bp, Homo sapiens
ctataacattcttttctcaatcctttatggcaagaggtagtaaggataactggctttatgagcsctagggtatacctcatcccatttggatctttgtaaatcatttctttatttaaatcccttcaaactgtctaatgcatatgacatatattttctgtgggcaccctggctgataaacatttattgaacacctactacataccaagcacttcctatgagttatgtttaatatccctctgaagaaggttctactcttatcccacatatgttgcagatgaagaaatgaaggtgcccagaggttgacttgcttaaggtcaaacagccaacaggtggccaaggtggatttggacccccaacatctgacttagagcccattctgttaactgctatactcatctcactctgttcagaatagtcagatcccacctgggaatagttctttctccctggctttcagaggaattaaacaaaacaaagttgtgtttagaggcaatgccaataagaaagagggaatctcataactatgggaaatggggtgtacaaatttgt

SEQ ID NO: 848445 - DNA, 549 bp, Homo sapiens
ctataacattcttttctcaatcctttatggcaagaggtagtaaggataactggctttatgagccctagggtatacctcatcccatttggatctttgtaaatcatttctttatttaaatcccttcaaactgtctaatgcatatgacatatattttctgtgggcaccctggctgataaacatttattgaacacctactacataccaagcacttcctatgagttatgtttaatatccctctgaagaaggttctactcttatcccacatatgttgcagatgaagaaatgaaggtgcccagaggttgacttgcttaaggtcaaacagccaacaggtggccaaggtggatttggacccccaacatctgacttagagcccattctgttaactgctatactcatctcactctgttcagaatagtcagatcccaccygggaatagttctttctccctggctttcagaggaattaaacaaaacaaagttgtgtttagaggcaatgccaataagaaagagggaatctcataactatgggaaatggggtgtacaaatttgt

SEQ ID NO: 848446 - DNA, 529 bp, Homo sapiens
tccattttgaccttggagaatttgatgaktatgtgtctacggaatgatcttctcatggagtaccttactggggttctccgcatttcctgaatttgaatgttggcttgcatagctaggttggggaagttttcctggacgatatcctaaaatatgttttccaaattggtttcattctccctgtctcaaagcaagagttttatacaaattggtttatatctgttccaacctatagcacactcaaccaatattcagctattaaacctgattgtacaaaacaataaaattggttgaactaatgctttctctcatccacagagtactcacacatacacataaaagtatgatagtaggtgcttttagatgtatttctcagctaaaatatgacaagtacatgaagttttaattatacccctttcagaagaaattttccctttcaattgccctaccaactccaaatgtaccaacaaatttcccatgaatcacagacagactattataaccacttgagaacaggaacacagctgatgtt

SEQ ID NO: 848447 - DNA, 254 bp, Homo sapiens
atatccctctcttctaagaagaggctctggtcacacatgtaaagatttgaccacaagttgcagttcaacaacwaccgtccattcccactgcaaagtgagcaattccaaattgggggcccaattatgtttggagagttgacaaataccactttcaggcagagaagaggtggtgtaattaacactaagcattataggtaaaaataaaataaaataaagaaactaaaaccctttgaatagtctgtctcctggtgttc

SEQ ID NO: 848448 - DNA, 677 bp, Homo sapiens
cactctgtcaacatgactcaccagaccttgtaccaagccaacccrtaagaaattatttacccttccttcaactcactctcctctgtgctcatgagatttcccagcatttatgttttaccttcatcttaactaactctgattcatccctcaaaacttggctccaccgtaatttattcctaaaagccttctatgatcttgaattagatgtccccttttgtgtgtaaaatcttctgtaccccttgctaaagtaattctacttcaagaaacttgtcctcaagaactagtaggggacaaggacaaagaataatgctcaaagttctccactgcagtgttatttatttataattggcaacatttaaaaacaccttgaaatagcaaacaattagaaatatttttgtccattttaaactccttcctttcttcccagactttttgacacacttaatagctgaaacatacaagtccccaagcaaccatatactcccttgcctctgcccccctctgccttcattcctgtttttgtcacggccaactcttacatactttcaaacccagttcagatgccacctcttctggaaatgcccttgtcaactaagtctgggttaagtgaccttctaagggctatcacagaatgccatgttttgctacaatacttctaaaactatactgtaagggcc

SEQ ID NO: 848449 - DNA, 621 bp, Homo sapiens
atagttggacagctactagccatcagagatttagagccaaagtgcartactcaccttgcctcagacaaaatattcactgcatatttgtgcaaaaggaacacctttactctggcagaaggaatattgcaattacagggtacagagatacaaagtggccattcttagacatttacacagagccagagagaaataatgaatactactctaagaattcttgatgggttcactaaactgaagaagctgaagaaatgaagccttctagcaactcagcttccatggatatcatatttcttaagaaattaggatctctggatgaagaaggtgatcaatggcagacaagttgggactacttcaaggcctttggtgcatttcaacatctgagatcagactgctgaagattcagctgccaccatgagtcaattgggtaagcacacataggaaaaagaatgctacttgaaatttgggaaaggtaggtaagtttcctagcaggcattgggactgagaaaacaagaggctgagtcatttttagagcatgccacagaaatgatgcccatgtgaatgacaaacataagagagaaatgctgctctctaagcaggagggactgggctgtactaggtatt

SEQ ID NO: 848450 - DNA, 621 bp, Homo sapiens
aatttaggtcttctcttttctctgcttgttgttctttctcaagagctaagcctatcgtcatctttatgatatatttgagtattaagctttcagaagtttccatccacataattgaacatttctatcaaaagttttgaggtagaccaggaggccagaaaatagatttaagttactagcaataaccagatgctactgtaggattataggttatcacaacttgtaactaaaaattatgatttttattataataagtttaattacatttatttaattttaattaaaattaaaatacattttattattataatttctactttaacaagtaactatacctttcactgtgttttatttagcacctttcacagtgttgttgtcttttttaatataccttcctattaaaccagttgctctttgcagaatgcttgaatcatttggctcttggttagtaggctcccgttacctaaccaagcactgagtgaacgtatttactggggaggcagctggtctctcccaaatgtaaatcagatttcatcatgtctggcttggagagaacgtggcatatggcaaatgaagacacagctgcatagtgaaattttccakcacaagttagtctaatacctg

SEQ ID NO: 848451 - DNA, 637 bp, Homo sapiens
tgaagagccctgtaattgctcttctctgtatgtgtgatttaacagtggggaccacagttactcaactacaaaatttaaatacaatgggaataattggatcccaaggtggtgggggccaagtggcagcactcagccatcaaaggcaaggtggccatggctaccgtaatggacagcagagacaaagcagcaatcagaatagtctgactcatgtagatctctggcattggctaattaatcatggtgttcctagaagtgaactgataggaagcctactgcattcctacttaatttatacaaggagaaaacttttaggtcgaatggacaaaagactaatttgaagtataaaaacagagaatagcagcccctaaatcaatttccagacttgacccagtttacagacccagaaccacttgaatgaaggggaggctgggtccccttgaggaaggcctcactacatttttgacaatttatgcagtgaatctttctcccttcctcccccaaggagacctccagcctttcaccagggtaactgcattggggaaagggaaatgatcagacattatggggactactggacactggctctgagctgatgttgaatctcggggactcaawacatcattgtgaccctccagtt

SEQ ID NO: 848452 - DNA, 637 bp, Homo sapiens
tgaagagccctgtaattgctcttctctgtatgtgtgatttaacagtggggaccacagttactcaactacaaaatttaaatacaatgggaataattggatcccaaggtggtgggggccaagtggcagcactcagccatcaaaggcaaggtggccatggctaccgtaatggacagcagagacaaagcagcaatcagaatagtctgactcatgtagatctctggcattggctaattaatcatggtgttcctagaagtgaactgataggaagcctactgcattcctacttaatttatacaaggagaaaacttttaggtcgaatggacaaaagactaatttgaagtataaaaacagagaatagcagcccctaaatcaatttccagacttgacccagtttacagacccagaaccacttgaatgaaggggaggctgggtccccttgaggaaggcctcactacatttttgacaatttatgcagtgaatctttctcccttcctcccccaaggagacctccagcctttcaccagggtaactgcattggggaaagggaaatgatcagacattatggggactactggacactggctctgagctgatgttgaatctcggggactcaaamcatcattgtgaccctccagtt

SEQ ID NO: 848453 - DNA, 644 bp, Homo sapiens
tcataagggatattggcctgaagttttctttttttgttatgtctctgccaggttttggtatcaggatgatgctggcttcataaaatgagttwgggaggagtccctcctttcaactgttttaaatagtttcagaaggaatggtactggttcctctttgtaccttgataggattcagctgtgaatcatggtcctgagcttttttgggttagtaggctagcaattactgcctgaatttcagaaattgctattggtctactcaaggattcagtttcttcctggtttagtcttgggagggtctatgtgtccagaaaatctatgcatttcttctacagtctctagtttctttgcatagaggtgtttatagtattctctgatggtactttgtatttctgtggggtcagtgatgatatcccctttatcattttttattgtgtctatttgactcttctctctttccttgtttattagtctagctagcagtctatctgttttcttaatttttccaaaaagccagctcctggattcactgattttttttggaaggctttttgtgtctgtatctccttcaattctgctctgatcttagttatttcatgttttctgctagcttttggattagtttgttcttgcctctctagctcctt

SEQ ID NO: 848454 - DNA, 631 bp, Homo sapiens
tgtggagggaggctcagctggtggcactcaaaaataccaagtgttttccctagcatctgttattaggtaggcacaaaagtaattattgtttttgcaattacttttgcacyaacctaatagtaaataaatgtatataaggaaagcaaaggtccttcctccctcactcctcccaaaattatatagagttcctcatgacccagaaaactgagggagagcccatgaaagagaacaacttgtggcctgaaatggaatccatttattggtagaaataagcagaaagaggctctcaaataacttttaccttctgaaaatgtctgcttattaaaaataaataataaaaggcttgaggtatgtccaggctctggagtaaaagtgatcatttatctctgccccgccccaagtccccagttctccaggtccacctcaagcttccaggtagcaagggccctaactcacaggtgttcatgttagtctttcaaatccttagttctgctgggaaggcagagagggaatccagcagttacaaggggcccactgtgtgctgggcacagtgcaatgtattcacacctcttatccctttcaattatcaccagaccttctttgacaggcattttaagccctcttataaagc

SEQ ID NO: 848455 - DNA, 588 bp, Homo sapiens
cttcattggtacgctttgattggtgtaattccagcaagacagagggaaacttggtgctttacctggtccaggtgacttgcttgagggcactggatgtcaggtagatttttgaaatatcgacaaaaacagaytcatctttactacctctaagagcccagtgtaagactccatgctggggacagttggagcaaggtgctaggtttcactgagaaggaggatgcatgtgccagggaaggctgcccagggctgagcaccgaatgccaggtgtacaggtcctaggcccaaggacattcctgcagggcaaaggcctggaggtgtggaggcatattttgggtggagatgaggtcaccaagtgtggcctcagtgtgggctttggggtgggtgggtgtgggagtggcaggaagggagcctggaaggagaacgcaagtggcctcagggccctgcagggcaggggtcattcccacagaggcaaaactgggggggcctggaggtttgaaacaaacctgtaccatgctcagatgtttgcccaggggtggaaaggaaccatttggccagacacacaggccctgcagactgtgatgtgtgact

SEQ ID NO: 848456 - DNA, 413 bp, Homo sapiens
tagaggctgtgcagggttggaccaaggagggagatggcaaaggtgacagygggcttgtgtgggtttgtgctcatttggctaaatgtcaggacacataccaaggttttccacgttttcatttctcatagtgacccatgcctagggctgactgtcccaccttcttgtgaggggtccttggtggagtctggcctgtttccccaggtgcagcttccaggcccagatacttggcacatcttccaggaagggaggtgttcagggtgcctgctttaccctcatagctgaagctcacctcttccaaaaccacagcttttaaacaacttatctttgctggaattttttctttttcttttaagtcaactatttggtaaaattatgaaacaagcataggcttgatgtaggaaacttatatgata

SEQ ID NO: 848457 - DNA, 635 bp, Homo sapiens
ctgcctttcctggtgctgttccatctgcctggattgcttctctttctttttctatttttctttcttttattttgtcctttttttwattttttattttttgaggcaggatctcacctaggctgcagtgtagttgcatgatctcagctcactgcagcctcagcctcctgggccctagcaatcctcccacctcgaacacccttctccccagttgctggaacaacaggtgtgcaccgccatgcctggctaatgttgttcattttttgtagagatgctgtctcactatgttgcccaggatggtcttgaactcctgagcttaagcagtcctccctcctcagtctcccaaagtgctgggattacaggcatgagccactgtgcctggctaaattagtactattaaattggtgctatttgtgaacttttagtaaatgttgcagcctatttaatatgtgtttgtgtatgtgtgtgtaaaatgatatgagttagttagtatctctgttttttacagaggaagaaagcaatgctgagagcatgattttgttgaaggtcactcagctaatgaatcacaaaggcaggatttaaacccagatcagtctgaatccaaagcccatccatttaaccacttcattctaccataa

SEQ ID NO: 848458 - DNA, 528 bp, Homo sapiens
ctacaatactacctaataatgatgttgataatggaaagactagaaagattataataaatagaggaagacagatgtgcatttctaatatttgtagggtaaattctaaggtcatacattactttgtgttaccacacacaacataatagttaagagatagtgtataactcatacagcaattagtttgttaattttgcaaagtaataatatctataacattcaaagttaaaaactggtcaagaaaggtattttgcatatactttttttttgttgagcacatatcactcagttggaaaagtaactaacacattttctcttatcattcagcaacaatttacttcactaaacatttattaagttcaaaatttatgtaaatgtgatgaatggggtataaaatgagcatcaggggaggtcaggccaaatgcaagaagataattaggaaggtttgaaagcgtgtgatgaattccatttttcagaayatgattctctgaaaggtagagaaatacctgtcattgtcaaacgtataaaaat

SEQ ID NO: 848459 - DNA, 647 bp, Homo sapiens
gtattctctaagtgaaatactttatagtagtgaaaataacctaaagctatactcagtaacatgaatgaatttaaaatacaattttgagcaggtataaaagaattcaaatttttatgtgtcatttatttgtagtttaaaacaacctaattaacatactggttatttgtgtgtaaatatatggcaaaactatgaaaaaagcaagagaatgacaatcccaaattgcagaaaaattcaggaaagagagcgaaatatgaatgttctgtttcttaatttgtgttgtaagcacataaatgtttatttcttcctttcttcttcccttcctcttcatctttgtcttcaaaattgcttgtgtcacccttttgtatatgtcacatatttcacaataaagggaaaagtttaaagtatgaaacaatcaagttttgggtgaatgtggagaaacagacattcatgtttctggtgagagtagaagttggtatgatcacatttcaaaacaacttgtcaatatttgatatgtttgaccctgcaaattgtctctgatcctgaaatttagtagagaatctctcagtcagctgcaaatggagatatgctcaatggcgtttattgcagcattgactataatataataytaaaattacaatttaatggga

SEQ ID NO: 848460 - DNA, 651 bp, Homo sapiens
tgcagccacccctacgaacactgggcagaaatgtggacacagcattgccagaccttgtcacttttcagggcgacttaaaagttaaatgattmtaagaaatctgccaatttttaaatgttggctcaaattcataaaaccctaaaacggattgaatcaacccatggcctgccagtccataacctctgagttagggaatgctcttccagaaatactcactaatcaggaaagtagtgggaaatgaccctgaaaaggaaggagggaaagagaaaggggtcattactagcagcatggaaacatttaagcaaaagtcaggaggtgttcaacagaatacaacaaagagattgattaatccagtaaaaaggatggggagaaaggaaataaaactggaagaataagttaagggagatcattgggagacccaaatattggtatctggagattttattttatcttgttaataatagggagccactgaagatgtttgagcatgggagtgactgacacttggctgcagaagggttacacaaaatcaggcctcttttaccaaaatatgaaaatctctctctctcttcaacgaaatgaatacacatgcaatcaaaggaagagctctggagggctgcagcactttttgcagcactgggtcagctgaaa

SEQ ID NO: 848461 - DNA, 553 bp, Homo sapiens
gagtttctcataaacagcatatagttaggcctcattgttgttgtttttaatctattaacccagtttttatcttctaaatgggaaatttaatccatttacattcaaggttactattgataagtaagacttactcctgtcacttcattgttttctggttgttttatataaatttttgtttcttacttcccatcttatttttgcaatttgggtggttttaagtagccataaggtttgattcctttctcctttgagtatcaactgtaccagtgagttttatagtttttgcacattttcataatggtgatcatcttttcacttccagatgtaagattaccttgaacatttcttctaaggctggtctagcggtgataaattcccttagtctttgtctgtgaaatattttatttctctttcatttctgaagtataatctttctgartataataattgcattgctaggtttttttcagtactttgaatatatcatcttattctctcctgccctataaagtttctgctgcaaaattcagtgtaagtctaatgatgattcttt

SEQ ID NO: 848462 - DNA, 553 bp, Homo sapiens
gagtttctcataaacagcatatagttaggcctcattgttgttgtttttaatctattaacccagtttttatcttctaaatgggaaatttaatccatttacattcaaggttactattgataagtaagacttactcctgtcacttcattgttttctggttgttttatataaatttttgtttcttacttcccatcttatttttgcaatttgggtggttttaagtagccataaggtttgattcctttctcctttgagtatcaactgtaccagtgagttttatagtttttgcacattttcataatggtgatcatcttttcacttccagatgtaagattaccttgaacatttcttctaaggctggtctagcggtgataaattcccttagtctttgtctgtgaaatattttatttctctttcatttctgaagtataatctttctgagtataataatygcattgctaggtttttttcagtactttgaatatatcatcttattctctcctgccctataaagtttctgctgcaaaattcagtgtaagtctaatgatgattcttt

SEQ ID NO: 848463 - DNA, 494 bp, Homo sapiens
ataatttttagagaaatagttttccactaactatacagaattctacagggagaaaaccaacaatttcttggtacatagtaaggaaagagagccaggtgctttttctgggactgtggggaaaaattgctttatgttttgaagaaatcaagtggctgtctctttattcccttcaccagaccttaaaatagctctccctatgatttgggtttcagaaactctgtatttcccagtcaagtattggaagcacccacttgcccttagaacagtaacacaataaaacttcgctcctaaatgttggccaattatggatctcctacaggaaattcagaccacatcataattataagaaatcacacgatgagatgttccttaagtgttgtttctgagagtctgaaagctacctatccctttgacgcatttatgtatgtatttgtgagtgtgcgcatgtgtgtrttgcatgtgtatgtgctgcttctcatggacagagcagcaaa

SEQ ID NO: 848464 - DNA, 651 bp, Homo sapiens
taaagaaaataagatttaggggcacagtgcaacacgtgccctgaatgatctcatggtagaaatctaattttgcttctatttatttggggttatagataggattatatttctcaggcagagaaagtcattaatcaagaaaggggcctcttaatccttttccctattttaatgagacactttaaaatgccttgcgttggtgaatggcaagtgtcagctgggtgtgattagcaggcttttgtggcaggtttgccgtggtactgtgtgctcaggtattcaccggcctaatcctgcctgcctatcacgggggcagaaatggacaaagatggctttatggcctcactcaagttgcaggctggtgagtgggcatttgagagctttggtgccacagtctggacaatggcatatgggatacgttcttagaaatcagccccccagtattagcgtagcccctaagcagaatctccaaagtaaataatacataccagcaacagagtttcaccgtcagtgtatgggtgggtccctccttcattgaaatcagaacgtctaacctggtagaaaggtgccagagaactgggagtccccctgttccctctgtcccctctcttccctccctcyttctttcctttcatggccagcagctgtgctcatcac

SEQ ID NO: 848465 - DNA, 534 bp, Homo sapiens
agacacggcggctccctcctgctgaactctaaccagagaggatgtagtggtgaaggtgctgctgccgggctgctgtcacatggagcctgaggcagcacggaggcaggcagagtcaaacaatgaggtcatctgaactcgaagtccaaccacccttgaagcccctggctttttttttttaaagaaactttttgttttataatagttttagatttacaagaaattgtgaaaatattagagttcccagactccatacccactttctcctaatatatatatatatatatatatatatattttttttttttttttttttttttgagacagagtcttgctctgtcactcagaatggagtacagtggtgtgatctcagctcactgcaacctccacctcccgggctcaagcgatcctcccacctcagcttcctgagtagctgggactaatggtgtgtgctaccatgcctggctaaattttgtatattttgtagagaccgggtttygccacgttgcccaggctggtctcgaactcctgagctca

SEQ ID NO: 848466 - DNA, 612 bp, Homo sapiens
aatgaaaacacttaaaaaatctgtattctcatggatattggccatttaatttgtttatcattgattcttcggccaaagataattctaactgggtgagaatgaggactggggagtgagacagcagaggtttttgggtctagcactccccaggacaggactccattgattattagtcaagaggacgtgattggagaccaaatttctttttctttgctcacatgtcattcactcctttgaaccatgtttcctaacctggagcagatggtttcctcctggcgacagatcatctgcctctgctttctgtgttagcttatgttttcaggtttatgtggaacaattctagatagaggaaattacttaggggaaaaaagatttaatatgatgaacatgttttatggatcaagtcctatgttaggtgttttacatagactctcatttatttctgtcaactggttctgcaaaaggaaccgattttcattcccacttacgattgagcaamccgaggtgcagagaattcaagaaaagtacttaggcccctgggaagagtctggatttgaatctgagtctgtctagttgcaaagtcctgtgctttccaatgtaccatgctgcctt

SEQ ID NO: 848467 - DNA, 612 bp, Homo sapiens
aatgaaaacacttaaaaaatctgtattctcatggatattggccatttaatttgtttatcattgattcttcggccaaagataattctaactgggtgagaatgaggactggggagtgagacagcagaggtttttgggtctagcactccccaggacaggactccattgattattagtcaagaggacgtgattggagaccaaatttctttttctttgctcacatgtcattcactcctttgaaccatgtttcctaacctggagcagatggtttcctcctggcgacagatcatctgcctctgctttctgtgttagcttatgttttcaggtttatgtggaacaattctagatagaggaaattacttaggggaaaaaagatttaatatgatgaacatgttttatggatcaagtcctatgttaggtgttttacatagactctcatttatttctgtcaactggttctgcaaaaggaaccgattttcattcccacttacgattgagcaaaccgaggtgcagagaattcmagaaaagtacttaggcccctgggaagagtctggatttgaatctgagtctgtctagttgcaaagtcctgtgctttccaatgtaccatgctgcctt

SEQ ID NO: 848468 - DNA, 588 bp, Homo sapiens
cctggtggctggaggtgaaattcttctcattgtttaaactagttcacagtaactgtaagatggggaaccctgctctstgctccttagtcctggatttcttagggtgcaaaaactgcctggtccctcactccattccttgtgggtgaggacccatagttggtcgcccaaagcccatggtcctcctgggtgtcctgagagcttctcagagcacctgggccgcgaaccttctctcgcacagacttcccgctgcagggctggccagatgcctcctgagcatcgcctcggctgtgactcacagcccagggaggccatggtcagagtgagctagactccacagcccccagcgccgcagacttctgccttggtcattacatcatgggcaagatcttgcaggctggtggagagacagagtgcctggggagggcctgaccaaccccttatgtctcacgcagtaggcctggaccttcccaggggaggctgttaggacatgaggctcacagactgcactggttttcatttccactgactcactataaaattgaatgttgagttcttccctattctgggccaagtttttcagcagggcag

SEQ ID NO: 848469 - DNA, 648 bp, Homo sapiens
atccaataatggaatatttctggatatgtatacaaaaagagtgtaatcaggatctcaaagatatctgcacacccatgttcactgcaccattattcacattagccaatataaggaaacaacccaaatgtccatcaaaagatgcataaagaaaatgtgatatagacatgcaatggaataatattaagcctttaaaaaagagagaaatcctactatattcaacaaactggatgaacccacaggacattatgctacatgaaataagccagtcacagaaggacaaatactacatgactccacttatgtgaggtatctaaaatagtcaaactcccagaagcagagaataaaatggtgattgctggggctgtaaggagggaaaaatggaaaactgttaatcaatgagtataaaatttctgttctgcaagatgaaaaatttctagagatctgttgtaaagcatagtacctattaggattgtgtgagtctgttgatcaatttggggagaattgacatgttaacagtattgaaacttccaaccaacagacatggcattccatttacttagatcttgtttgatttatttcaacaatgttttgtagttttcartgtataggactgatacttctgttcagtttattcctaaatatcttgta

SEQ ID NO: 848470 - DNA, 513 bp, Homo sapiens
acttatatgggtatataagacatgaagaaagataaagttcattttactaaatcatgtacatgtttascatacgtctacagcatgtgttaattgaattatctcattactatataaggttaaacatggaaggtcatagaggtcataaattcccttattaccatgaaaaaagttcactgttctaaaaaacaattacagaatgtaaatgtccattgattcatcgcagcaacatgtgagatagattattagtttattctcattgataagcaataaaaaatcaaacatgaaaactgaaatgggataaggaaacactggatgagacagtatgaaatatttatttgagatcttcatcaaaccaaaatgaaaaatgaaaaaggtgaaatacgtaaagtaaaaaagagggaaactttctgattaagcagagcatttatattctaaattatagattattttaaatgttttataattagtgtcaaattgtggctccaattacattaaaataattccaactacacc

SEQ ID NO: 848471 - DNA, 513 bp, Homo sapiens
acttatatgggtatataagacatgaagaaagataaagttcattttactaaatcatgtacatgtttagcatacgtctrcagcatgtgttaattgaattatctcattactatataaggttaaacatggaaggtcatagaggtcataaattcccttattaccatgaaaaaagttcactgttctaaaaaacaattacagaatgtaaatgtccattgattcatcgcagcaacatgtgagatagattattagtttattctcattgataagcaataaaaaatcaaacatgaaaactgaaatgggataaggaaacactggatgagacagtatgaaatatttatttgagatcttcatcaaaccaaaatgaaaaatgaaaaaggtgaaatacgtaaagtaaaaaagagggaaactttctgattaagcagagcatttatattctaaattatagattattttaaatgttttataattagtgtcaaattgtggctccaattacattaaaataattccaactacacc

SEQ ID NO: 848472 - DNA, 548 bp, Homo sapiens
gattcaatgaaatctcatttaatattctaatggtattttttacagaaatagaaaaaaaattctaaaattcatatggaaccacaaaaaccasaaatagccaaatcaatcttgaggatggagaacaaagcaggagttagcacactagctgatttcaaactgtattgcaaagctatagtaatcaaaacagtagagcactggcataaagacagacaaatagacaaatggaacagaatagagagcccagaaacaaatccacaaatatatgtttgacaagtgggtcaagaaaacacaatgggaaaaagatagtctcctagacaaagacaagagatgttggaaatattggatatccatgtgcaaagaaaaaaattaaatctgatccctaacttacacaatacaccaaaaacaactcaaagtggactaaaggcttaaatataagacacaaaattataaaactactataagaaaacatagaggaaaagattcattccattgatcttgggaatgatttcatagatataacacaaaagcatagaaaacaacaacaaaaa

SEQ ID NO: 848473 - DNA, 577 bp, Homo sapiens
aatatttatagatatataattttctatattctctrtctactcaaaggaaacataattgcatttctttcttttaacaacattggctctctcatccacaatgcagtcatcagcattatctggtcttaggcaacataactttattagcacctcttctaagaataggtctttagaatagtcctcaaaagagatacaaccaagagagaactttatctccagctctagacttctagtctacaaagcttgaaggaataggaggaatacaacttgaaacaaatgattatcgaaatgaaaaacaaaagccaaaacaaaaatatgaaccgtcacaacaaaaacttcacctgacgtaagagcatattacacacgactccagttgtagcctgatagtactaagagcataaccaactttgtaccttccactgattaccaaatgctcctcattctaattattaattttaaaactgataaacagggcctccaggctgacaagacagtgtgtgtgtcagctagaataatcagacaatacagccaagtatccggcacatagaattctgctctcagttgccatctctggtctggg

SEQ ID NO: 848474 - DNA, 584 bp, Homo sapiens
tgaaataattgttttacaaaagtagagcataatattctgtctttaatttttagtagtaacaataccatattaaaaatttttaattatactaatagacttgtagcacatagaggactgaggtgaataaagatgtttaaaacatatatatcatgaagggaactgagacactgattaatgtttaacatataaggttgaatatgcatgctaaaattttagttgttaaaatataaaaatagaatgtgtgaatttaaaacccattaaaagaataaataaaacgaaaacaaataaatggaatgaaagaaagaaaatgaagcaaataaaccatataaaatagaaataaatgagtaatatgctagaactatgtcaaatatgtttaacttgataataaaagataaacatttgcttttcaaaatgtctaattatcttttacaagagacatacataaaatatgttaaaataattttataaagtytttgaattaaaaagatgaatagaattttaaataaaaaagatgaataggaaaaggaaaatattaaccagaataatattatggaagcactattaatgtagaaaaataaggcaat

SEQ ID NO: 848475 - DNA, 604 bp, Homo sapiens
atacttgcatagtttgttttttgttgtaggttatatgatgtaagtacagaacctgcrcattccatacaagcatagaatcaggtaaaaagcataactgaaaatgaaatacacttcagaggtgacaaatcaacacatgctgagtggggcattaatggacccggatcctagtcagggttagttacaattagctgtctgaccttaggtaaatcagttaatcttgaagactacttcctagtctaaaattcagttacttcaattacctctattgccttgatttgtctgattaagcatgcactgagaacacatataaaaggccaagtgaccatcatcattaattcaccattaaacttttgatcatgataatgcaggtactctgaaaccctaggaagaaaaacaacatatcaaggataaatgtggttaggataaatagtggtagaaaatacatttcttcttaatgaatctgttccagattattttcttctgtatggtcctgctcctctgcacgatgcagaggtttctgtttagttttgactctatcagactcccaggtagagcattctcacctttgtagaagtaggagtcatctcattgattgtcttgagta

SEQ ID NO: 848476 - DNA, 495 bp, Homo sapiens
gatgtgctgctggattcggtttgccagtattttattgaggatttctgcatcaatgttcatcagggatattggtctaaaattctctttttttgttgtgtctctgccaggckttggtatcaggatgatgctggcctcataaaatgagttagggaggatttcctctttttctgttgattggaatagtttcagaaggaatgttaccagctcctcttcatacctatggtagaattcggctgtgaatccgtctggtcctggactttttttggttggtaggctattaattattgcctcaatttcagagtctgttattggtctatttggggattcaacttcttcctggtttagtcttgggagggtgtatgtgtccaggaatttatccatttcttctagattttctagtttatttgtatagaggtgttatagtattcttggatggtagtttgtatttctgtgggatcggtggtgatatcccctttataattttttattgtgtct

SEQ ID NO: 848477 - DNA, 620 bp, Homo sapiens
cacatctgacaccctgtcttcccctcatagcctaaactagtttttctggttttctttcggtccccctgaatccagaggggtccattcagtctgttggggagcttagaattttatttttggtttacaggggccatagcatttaaacttcattactgtgtaaagttaaaggaccaagtgaaaaataagctgcacttttttccacctattatctcatttaatcgtcctggggtgaccacagtgggcaagtattacaatttcctcagttttttgcataaagaatctgaggctcagaaagctgaataaggaacttaggtcctttaattctagcttctctgcccttatcatttcccccttggggttttcctgtggctgtaatttaatttcttttatgcagtagctgaaaataatttattttttataatgctttttttggtggtaaaagcaatccatgctctttgtttaacagaaatagtacagttgacccttgaacaacacagaggttaggggcactaaccggcaccccsccctcaccatgcagttgaaaatccatgtatcatttttgactcccccaaaacttaactactaataggctactgctgaccagagtccttactaataac

SEQ ID NO: 848478 - DNA, 461 bp, Homo sapiens
ctgcgaagtctgcatcattctttgaagcagtcctcatggtcaaagtccctctgaaatgagccaagttccccacctttctagtcggttgagatctggcccacaggaaatataagctttcttgctttggccacactctgggaggtgtaggctactctgagtgcagcactgtctctaagctgtggagccccaggctcctccagttggcttcttttagactggtgtcactatcacccagtgtgtaggtgaaagagataatacaatgctctggcaatagtctctgtaaagaaatcctctttaccagcacacctccaccagttatgtccccatttatatcctggaagtaacaatggtctatgatawaccagactggatttcgtgtcaccccttagcaaattgtgcatatatgtttatgcaccactcttaaaaatgtgtgagcagttaacaaacaccaattatcttaa

SEQ ID NO: 848479 - DNA, 623 bp, Homo sapiens
ccagaagcgccccttgcttcacctgttcctcttaatgggataattaaagattaggacaaagagatgagaccttcacaagctgaaagagatagagattctagacagtcataatgaatccagatggcactttcccctgactttcaacccctgagacgtcaactagatgactgaccactccaaagcctgaaggttaaacaccctgcaagaatgggtcccaataagtcagaccaacctcctatttccatatgggaacatctcttcctgaaccttaagagaaaacaaaacctgggatggccaattagtgtgactgtcccaggagacacagatttagggctcagtttctgtgacggatgcgagaaacctcgaattggatctgaaaaggacatgaagtgaatagagctttggcacttcacagagtgattatccctgcagtgcaaggaggtaacctttctgctgctacatcctgacatttgcatggaggcaaatgcatcactggtaattgcacctgagtgtcaaagcyacttgatgtgtgtgttccgaccaaggtatgaatgagaactttagcgctagggaatgggaggcaaagaaaaagtgcagacaaattatgggagaagagataatgg

SEQ ID NO: 848480 - DNA, 563 bp, Homo sapiens
gtggaggaattttcaaagaaataaagaaaaaaaagacataaaactgggcctttgaaaaagtttataaagggcattttttttttggaagaatttaagattggctttagaactctaacttgagttcatattrtgatgcatgtacaaattcatgcatatatatttgaaaaataattcgattctctggagtaagctttgctcccttttatatgtatccagaaagctggcaaaagctcatgtatgttatttcaggtcaattaatcacaattattggactgcattaatcatttataaaagactaaattgcttaaaattcaactgctatattttcaacacttcccctcagatattctaagtttttgtatagctcctgaggtcagacggaaattacaaagtcacatctattttaatggcattcttatcaaaaaccacttaatgtggtatatgcactttcactgaactcaaaggcataagccattcagaaaccaagcagctctgggtggcacaaaaacaataaaacaattctacacattcaaatagcttaaaatgaaatagaagaggtgatg

SEQ ID NO: 848481 - DNA, 525 bp, Homo sapiens
aagaacaaatgaacagggatcataacgtaagagcccagtttaatacttggttaagtcaagtaaaggaaacatatttgtctaaagtaatttgggtaattctttaaatcttctctgtgattcwtttttatttttctatttactatctttttctatttacttccccaaggacaccaggtcatacaaccatctgcatcaggctctatggtcagggaggaatgtcccttactagccgtaaacatttttctcttgctcagctgatgaccttggctgcagtgaccagtgtagtctcaccttgaatactgccttcacgttttcatcctgtctccctatctgcctgagctaatctgtttcagggttctctttgttcactacatcctgagaattaatgtttatcctagtttggtgatttctagcagggaaaaatggtctctttacaaaatcttgttaatgatatttcacttcagggaccaagacctgttttactgcagtttttgcctttgccttcttcaaatcattatcttttgc

SEQ ID NO: 848482 - DNA, 541 bp, Homo sapiens
tttttgcctttgccttcttcaaatcattatcttttgctcccaactgatagcaaagagccaaacgcccaggtttaatttgcaatgtccttgcttaattcaaacttgccgctatactctcagagcagcccaatytatcttttgaaaacactttccactgtaaaatactttcaactcttttctgttctcttgctgtgtattacacatgcttgtgttactatcttacacattggaggaaattagacttgtctagttcaggaaattagcatgttctcttagatattttgaaaggtaagatttacctgataatcagtactcaacctatcaaaataatggctgccttggctgtaggtcagaaggacaagttcagggaaaatggtgcatctgctggagcaggcagaatagcttgtttcatttctgcagtagctaacataataatagaagaaccagtaatgagggctggtgagggtcctaacattcacagtggtctttagcaccatcattcgtgttatcactgtgaatcactgacataattgtactattt

SEQ ID NO: 848483 - DNA, 613 bp, Homo sapiens
tagaaaataattgcaaaagatacagcagataaaggattgttatcccaaagatagaaaaatacataaaactcaacaataaggaaacatacaacctgatgaaaaaaattggccaaagacytcaaaggacacctcatgaaagataaacatataaaatatgctgcacattttagatcatcaggcaaatgcaaattaaaacaaccataaaataccaatatatacgtattagaatggtcgaaattcaaaacaccaaatgctggcaaggatgtggagcaacaggaactatcaataattgttgctgggaatgcaaaatggtactctggaagacagtttcttacagtttcttacaaagttaaatatactcttatatgttccagcaatcacagtacccaaatgaattcacatgaaaactggcacatggatatttacagcagctttatttgtaattgacaaaatctggaagcaaccaggttgctcttcagtaggtaaacacataaatgtggtacatcctacaatggaatattattcagcactgaagagaaatgagctgtcaagccatggaaagaacattacaggcatattattaaaagaaagaagccagtcttaaaaggttata

SEQ ID NO: 848484 - DNA, 526 bp, Homo sapiens
ataatgcaggttgaatatttytaatccaaaaataaaaaatctgaaatactcaaaaatccaaaacttttttatactaacatgatgtccaaagaaaatgctcattggagcattctgaatttgggattttcagatttggaatgttcaactggtatgcaaatattctaaaatctgaaggaattcaaaatctaaaacacttctagtcccaagcatttcagataagagatacttagcctatagatggttctgataggagttgtacagaaagaatttttgaaatattaaaccttttaagaaatttacttcaaaagttaaatcaatggaacacttgcatggtaataagttataatttggaactataatttgcattatacttcatggataatggaattctgtgacatcttaatgtgcactccattagagtgtattctagattctcatttcaaaatattttgtatgccttcccatatgctaatcaatcaatatcatttcttttttatttgagtgaattaaaaggaaatatctcatt

SEQ ID NO: 848485 - DNA, 670 bp, Homo sapiens
aaatggtgaaggccaaagaaaagtttagtactatggttataaaaagaatttttgctaaaccaagtgtyttttgaaaacagacttttagatggaaattgatctaggctttttctgctctttgtaatttcccacagctttttcttggtctcttgatgatgctttccatcttttcttcttactccatcagcctgagcaaagttaaattgtgtccatagctttctcaaggtttaatttttttctccctctttcatattctttttattttgcttgtggcaaaatcattttcttcatcgggaatatagatgttttttacaaaaaataatcttacagtttgctttgttgcctagaagcatcaatgtttttcttccttctttttgattcctttcattgttttaactcagtattcagttttcttccagtttttttgttgttgtttttacttttatagccaaaaatgtttgcttatataacaagtttgagagccttagttccaaatccagcatttcagtgactcctcatttctcagcttatgatgtgtatcctttttatattttcaagctcattctcacttttatactcctcatacccaatattggagacacagtttttaatttacagtttctcccacctggaaattgccaaacactcacccaggagccattggtgttgc

SEQ ID NO: 848486 - DNA, 623 bp, Homo sapiens
acgcagggtacctcccatgcttgcctcccccttccccgccgcctgatcccctccccacataaacacacgccggctgcctcacccccgcaggtctcccctcagggtcacctcatgagtgaggcctccctggargctcactgagatctgtgggaagaatggtcggtcttcccgcagtgaaacgcagttgtccctctctcattctcagacacagatgccccagcccgtccccttcacctcgctgtgttcctccctgtagcactgtaagctgccagcgcacggcagctgcccacatcacaggcttggccacctccccaccagggacaagcaccttgagggcagggacttggtcttgtttgcacactgctgtcaccctcgcacctctaacagtgtctggcacatgttagacacccagtgtttgtggaatgaataaaagaaggaaagggagggaaggtggtgaagatggcaaccttgggctggtaggggtgtgtgcaggaggctgagggagcagtggagagcctcggcagagggggcggttcagaggcagttcctgggtgtgtgcagagtgaggaggaccccccaataggacacaggaggaggctgtgtcaggaggtgtccgggaggag

SEQ ID NO: 848487 - DNA, 530 bp, Homo sapiens
ggaaattgtttttctaagcttaaaatcctaaaatgaaaagaaaaaaatgatactcatttatattaaaatttcaaaaacttgatataaaatagttaaacagtaagtttaatgcaagttaaatactaagcaacaaaaatactggtgttaatgtggcaaaggattaatttttaatatatgaatgctatgaaatatatcagtatgaatgatactaaaatctagatagaaaaatgagcataaggcatgaacacagaatttgtaataaaagcagcagaaatgactagtaaatgtgtgactaatttgcaagctctctagcaagcaaaaaaagtgcaaattaaaacaacagtataatatcatttttctccaaattactaatttttaaaaatcaggtaagtcctgattaatttacttatttcatagttttataatttcataagtaagtatttcatatttcatcatttaagtaaattaattaattawaatgttgtttggtaaaatagagaatcagagcaaaaggaggtagtatatgaagg

SEQ ID NO: 848488 - DNA, 539 bp, Homo sapiens
caaatgtgtaattgccttaaaatcctccacttgtcccctcgtgtggatttctcccacacttaatggctgtcgtaacatcttttctaaacagccataaaatctgcgaattccttctatcttacggagcaggcatttatatactactttgtttcttctactaggcgacaggtgctgtgggcagggcctatattggaattagctttgtattatttgtatcacctgtggtgtcctgcaaaaaaaaccagaaatcccccagagagttaagcatttaactcaggcttgaaacatttatgggaaatctattgccatattgttcaggtatacaataagctaggtgttttacacctcttatcttgtttaagttataaaactctaatggctaggccctatcacttgcattttgcaaaagagaaaaatcgaggcttagtaagattgattaaactgttgaaatgactgagcccctaagtgatggaatgggackgaaacccaagtctgcctgcctcttgcccattctgccgatggcctcccaatcacttgga

SEQ ID NO: 848489 - DNA, 473 bp, Homo sapiens
ggcaagaaaacaccagggcttgaacccaggagatgaaagttgcagtgagccgaaatcatgccactgcactccagcctaggtgacagtgagactctgtcaaaaaaagaaaaaaaaaaagaagccaatcccaagaggtgggatcatggcagacgagaggcaggactagattgcagctctgactcggactaacagagcagtgtgcagaggcttgcatgtgaactttagctctggatcgacttcaagaacaaaccagcaatcccaagaggagccacagaccctttgaaggaagtggactgctactgcaggacctaggagacaccccaaatactctgcagcaagacccacccaaggagagtctgagctcagacatgcctagccctgcccccacctgatggtccttccctacgcacygtggtagtggaagacaaagggcatataatccagggagtcctagggtcctgtgcactgctagt

SEQ ID NO: 848490 - DNA, 622 bp, Homo sapiens
ttctcattcccccatggggtgaatctatctggccagcacactttatgtcacacacaaagctttggtgggtttgggtgagcccctgggctggtccccatccatctccctcccctgtgctgtgcctgcagaatttcacccggcctgcagctctgtcagcgtgagaggggcacacagacacctgcacctttgaccaccgaaaggctaccttgggccatgtctttatcctggctctgacgccacgtcgttggctttctactgcaaactcaggttttctgagacgtggtctgaacctctcccctcggtggaactgcagtgcatcggcccaggggacctgcgctcacgggcgcacgagcttgagaaagaagtgtcgccagcctcgtgctcgcctggcctcgtgcagcatctgtgtgtggtgtgcacttacgcgtgatgaaagcagcccagccgtgccgtgagaggaagagtcggggaggcgaatgggctggagaaactgtttccgcctggctccgtgttgctggaaacgggcagaggcggcggagatgaatcccgtgtgcgagcgcagagctctctycccggctcgtgcttgctcccctcgtggctgggggctgtggtcctttcaaag

SEQ ID NO: 848491 - DNA, 388 bp, Homo sapiens
agaggcggcggagatgaatcccgtgtgcgagcgcagagctctctycccggctcgtgcttgctcccctcgtggctgggggctgtggtcctttcaaagctgttccctgcggatcccttcccaggggcactttgccctcggaagccccgcctcccttctcgcagattgtggcaggattaggggcagcatcttgtatgactgtcctaattgtgtgcagttctttttgagctttgaatacgaagtttggtctgaaaagaggctttctcaagcctgggcagctctttcaggaacacattcccagtgggaattttgggtgggattcaggaggcaccgatctgccagtgagggatttctaggaacacaaggttagtcaggacgtggatccccacag

SEQ ID NO: 848492 - DNA, 388 bp, Homo sapiens
agaggcggcggagatgaatcccgtgtgcgagcgcagagctctcttcccggctcgtgcttgctcccctcgtggctgggggctgtggtcctttcaaagctgttccctgcrgatcccttcccaggggcactttgccctcggaagccccgcctcccttctcgcagattgtggcaggattaggggcagcatcttgtatgactgtcctaattgtgtgcagttctttttgagctttgaatacgaagtttggtctgaaaagaggctttctcaagcctgggcagctctttcaggaacacattcccagtgggaattttgggtgggattcaggaggcaccgatctgccagtgagggatttctaggaacacaaggttagtcaggacgtggatccccacag

SEQ ID NO: 848493 - DNA, 678 bp, Homo sapiens
acaactttcttaccccttgcttttctgtcattcctatattacaaaaccttatcactgaatcattctaatcattagtctcctccatccccatgctcagcytatggtatactgctagcggaaaaataaccgaacaccataagaagtggagtgcaaaatattctaactcaatgtagcttccaatatcaaggactcaacgtacttatgtggcaagcaggagcttatctttatctgccaccatgattctgattcccttcctgtctctggaaaattaagaattgagaattattgtccaaaactcaacaaactacttgaatatttacatctgatcacctcccacatccccaagacccatgcactagcaatcatccctccaggcttttctctccaatcaatagtttcctttccaatgcttctataatcttggaataaaatatgctccagcctcatttacttaaaaaaaaaaaaaaagctcttccttaaacttgacatcctttctaagtcctcttccccttccacttcttactcccactgccatctggttttcacttccattattcttctttctggtatcaacaatcacctccatgtcaccaaattcctttgaagttttgggttgatctttatagacctttctgtggtggctgacaatgttgatctcatcatcattcttgaaacact

SEQ ID NO: 848494 - DNA, 678 bp, Homo sapiens
acaactttcttaccccttgcttttctgtcattcctatattacaaaaccttatcactgaatcattctaatcattagtctcctccatccccatgctcagcctatggtatactgctagmggaaaaataaccgaacaccataagaagtggagtgcaaaatattctaactcaatgtagcttccaatatcaaggactcaacgtacttatgtggcaagcaggagcttatctttatctgccaccatgattctgattcccttcctgtctctggaaaattaagaattgagaattattgtccaaaactcaacaaactacttgaatatttacatctgatcacctcccacatccccaagacccatgcactagcaatcatccctccaggcttttctctccaatcaatagtttcctttccaatgcttctataatcttggaataaaatatgctccagcctcatttacttaaaaaaaaaaaaaaagctcttccttaaacttgacatcctttctaagtcctcttccccttccacttcttactcccactgccatctggttttcacttccattattcttctttctggtatcaacaatcacctccatgtcaccaaattcctttgaagttttgggttgatctttatagacctttctgtggtggctgacaatgttgatctcatcatcattcttgaaacact

SEQ ID NO: 848495 - DNA, 678 bp, Homo sapiens
acaactttcttaccccttgcttttctgtcattcctatattacaaaaccttatcactgaatcattctaatcattagtctcctccatccccatgctcagcctatggtatactgctagcggaaaaataaccgaacaccataagaagtggagtgcaaaatattctaactcaatgtagcttccaatatcaaggactcaacgtacttatgtggcaagcaggagcttatctttatctgccaccatgattctgattcccttcctgtctctggaaaattaagaattgagaattattgtccaaaactcaacaaactacttgaatatttacatctgatcacctcccacatccccaagacccatgcactagcaatcatccctccaggcttttctctccaatcaatagtttcctttccaatgcttctataatcttggaataaaatatgctccagcctcatttacttaaaaaaaaaaaaaaagctcttccttaaacttgacatcctttctaagtcctcttccccttccacttcttactcccactgccatctggttttcacttccattattcttctttctggtatcaacaatcacctccatgtcaccaaattccttkgaagttttgggttgatctttatagacctttctgtggtggctgacaatgttgatctcatcatcattcttgaaacact

SEQ ID NO: 848496 - DNA, 573 bp, Homo sapiens
ttaaggttcttgcagctgtagattcagataatataattcaacataatgtaatgtagtatattaaacatatttatatgatataataaatttttattaatcactctgggtttctcattagtctttgtaaaaatatacaaaaagttcaattccagtttgaacagtttgaaaaaatactatgtcaaactagaatttaattactagatctaagaagcagaaatgttgacatgaatacactaagaactcaaagtatgagaatgctatcacttctctcagtaaaagcaataaagaaatatttgcaaaattgttacattgcaacatccagggtgcataatgaaaaaagagcactagtcatatcagccaattattttatttaaatttaaatacagtttttgtcttcaatttttttttctgtgaagtctaagtctctatgagatattcagataktcaggatattagtaaaataataatttaatatttcaggaatgtagcttttaactataatgaaaatgatcactcagaaatatataagtggcttagttatataaatttctattaaaattgattatagtatat

SEQ ID NO: 848497 - DNA, 644 bp, Homo sapiens
gcttcataatgttccaaagtcttatattttacttttccatttttcctagatgtggatagtttgcttctaatgctcagctatcacaaataatcaagaatgcctcctctgggtataagcaagtttccttaggacacatcctaagtagtagactctagtgcatagggtatgtgagttttgccaggtgcagcaggaggaaactgtaccagtgcacaaaatgatcatccacacagaaaacctaatatgatcaaaaggccaaccattagaaacagagttcagaaaaatagccatttatagcattatcctaatatctttgttcaaatcaatctatatagtcaatataactccaattgaaatccaacaaaaagatactatattttgaaaactaaatttcaaaatatctaagagaattttgaaaatgagagtaaatatagtgacttaccttacaagattttataaaatccttaaaagcaaaagcaattgcaataacagaaatcagtaaaaatctgcagaaaacaactactgacttattaacagaygataggccagtataattacatgaacttagaatgagtgtgaggtgaaagaaaagaacacaaagggggaaaggatggactgttttagggttttttggggaaattggatca

SEQ ID NO: 848498 - DNA, 534 bp, Homo sapiens
ctgttcttttttttttcctaaaaaaaaaaaaaaaaaaaaggggggggatactaggttgataggcttaacattaatcatgaattgkttttttttttttttcattttttttttttctttttgagacagagtcttgctctgtcgcccaggctggagtgcagtggtgtgatctcggctcactgcaagctccgcctcccaggttcacgccattctcctgcctcagcctcctgagtagctggggctacgggggcccgccaccactcctggctaatttttctgtattttaagtagaaacggggtttcattgtgttagccaggatggtctctgtctcctgacctcgtgatctgcccgtcttggcctcccaaagtgctgggattacaggcgtgagccaccgtgatcggccctcattaatcatgaattgttaaaattagaaaccaggatatccaggtttccccaaagtacatgtcacaaaattcaaccaaaccaaggtccaggggactttaaatctttttatttttatttgtattattttatta

SEQ ID NO: 848499 - DNA, 524 bp, Homo sapiens
atttttttcctgaagcctggaggtgttgcttagagacacatggagttctgttctagacttatacattattgacttcccagctgaccactacagtggcagtcttgytatatttcaaatatgacagttatggtctcattttttcctgtgaagcatagagccttctacttagttctaaattgagaccaaaaattcattttcggttggtttccacaaagaccatcatagaattacctacctttggaaattggtcctgagatggatttaaaacagtaagctgatgttcaaagtcagtattttttgagctgcccagatccatatttctgagctactagcttccataaaatgaacttatactgattctttggtaacctagagagatctttcgagctttcgatatttattcccgtatttttcccatttcactgaaactgaattccatcttacctggacattttctgagcaggagcaaacaccaaaattagtgatgggttctccactggtgttccatttttccagactgtctt

SEQ ID NO: 848500 - DNA, 419 bp, Homo sapiens
agactccgtctcaaaaataaataaataaacaaataaataaattagccaggcatggtggcacatgcctgtaatcccagctattcaggaggctgagacaggagaatckcttgaacttgggaggcagaggttgcagtgagctgagatggcacctttgcactccagcctcggcaagaaagcgagactctgtctcaaaaataaataacaatacaacaacaaatacaaattaaaagccacacagtacgagtatttacatagcatttacattgtattaggtattataagtaatctagagatgatttaaagtatacaggaggatgtgcataggttatatgcaaatactacgctatttttagctgaggacttgggcatccatgtattttggcatctgcaggggatcctggaaccaatccccctataga

SEQ ID NO: 848501 - DNA, 656 bp, Homo sapiens
ttattttttatttatttatttatttatttttgtggagacaaggtcttcctatgttatccaggctggtctggaactgctgggctcccatcttcctgccttggcctcccaaagtgctaagattacaggcgtgagccactgcgccctgcctaaaattatttataaaataaaaaatcacaatgtattgttgtcaagctttaggtatagttgacaaataaaaattgtatttattcaaggagtacaaagtgatgttttaatatatgtatacattgcaaaatgattaccataatcatggtaattaacattacatcaccccacagagttaacttttttgtagtgagaatacttaacatttactctcttggcaaatttcaagtattcaatatattaactatagttcccatgcagtatattggatttccagaacttacttgtcatacaattccacatttacaccctttgaaccacatcttcccgtttctctcattctcaaattccaggtaatcacccttctactttttgtttccgagtctgacttttcaaaaaagtcacaatattaaagacaaagaagcttaactattgytgctatttcctgatcatccttttgccttattcctcctcatctgtcacagctctatccagcttcctttatctgccat

SEQ ID NO: 848502 - DNA, 629 bp, Homo sapiens
aagatatttatttttatctgtctagtcatacctgaatagggactctcttgacagccaaatttcattctgtttcacagttttccaagagaaaagcaacagcagcaacacagtggacacaatcagggtggtggccccacatcgattcagccaagtgcagagcttgctcagtccatgcacaaaaaggatgcagtagcccatgctggaaaacagggtggaaggaacgggattactttgggggtgcaatagcttccccccagaattatctcctacaaaactaactttcaaatgaagcttgtcctgtgctagagaaacaaatagaaactcccctgccttggacaatattaacatgttagttctctaaagtgctgcactagcaggtttgctatttcttgtagaaatatttcttgctatttcttcagtgtagggaatgagagagtcatcttgtaggcttaaagtgccctggatttcagcagctgaggcatcatgagaagtcccacatataagctcttgggtcctgaatggctcctctgacccaagctccctcatgtcactgtcattgtatgastctattggcactatgcgcctaaattcggagtttatgctgcagcaggtcacaccacagctttgta

SEQ ID NO: 848503 - DNA, 605 bp, Homo sapiens
aatgatgtgacaaattggctaaataaattaatgttctttaagcctagtagatccaataataccctacaaaaatatgagaagaaaaaagaggaaatttcatggtattttccaaaagtacacatggtcattcatttttaggacaaagaacgaatggaaattcacttattcccaaagacagcagggagagaagagatatgagaactaagacagctaataatacagccattataatacatgacatttgattaactgcaacttcagacaaaataatttacttctctgagctttaatttggtgatcaactagacaaaagaaaaggaattgatacctatatacctgttatatctgtaggaaaaatgtgtgatagattcgctattataggtgttaggtttgatttttcttttctggttgggaagaagagagaaaagcatccccctgagctgcaaagaggtgaaaatcctgtcttaacacccagacgggggtgctgagagggtcrctcagtcaccatcggcacaaatacacatcaggccaagcagctaagggaagagcagggcttttctcagagccgtaaattgcctcagaggaaatccagctcctgaaaccgt

SEQ ID NO: 848504 - DNA, 614 bp, Homo sapiens
ggtctctagctgaatttttcttttcattgtcaaacaatatgccggccaaaatgcattcattactgccacattgatattagcttttgctcagaaagatcaaagaaatgatttgattacctcttattgcaccatggcattatctgtttaattttgatgctctgggttttatttttgttttcttttgggtattttcttttcaggctgttttaaattttttctgtaatttttctatttttcaaatgcattattcagagctgtgtttcccttgaataaaaacaatatttgaaatgaccttcagattttacaaaaatggtatgcttcaaataacacttaatttcatataataatttgttgtatctaattttcacttatttgttcttataaatccaccttaatattaatgatgatctctcagtcactaataatataaattcatgaagaccattgagcaaaggatatttgtcttaataatgatgtataygtgcatgtttttctgtgggacaagagagtggaatagaaggaagaaggcaaacaaattcagagtatttttcttactgtatgttgaaaaaatttaaaatatacttttccatatttatctcctttttactgtatcc

SEQ ID NO: 848505 - DNA, 594 bp, Homo sapiens
tatgttggagttaatgagaacaagactgaaaaggtaaaatcagcctaattaataaagaatactgaatgccaagctaagaagtttgaacacggtttgaaaggcaacaygaccacttgtagttgttatgttagggaagtgatacaatgaaagtcgtcttgtattttggcacactgactcgatttttttcttacaattgtcttcttgggtaccaaacggtctccatgtgttttttatatcatgggatcattaagggatgttgtacttttggaatagtcataaacaagaaagcacactgttgattactgaggaatgaacatacacagtaaaattaaaaatgacaaaaatatttttggaacaagaataggaagaaagtgagaagattctactagtataagataaataaatatttttaaaagtttgttttcttcctatcaggtataattctacaattacacagatttttatggtttcatagtatcctctcaataaattaatcatgaatgcttgtgacctttattactgtattgatgtttcctaaacaaagatttaaatgttttaatcatccaaataacatttatctatgatttcccattt

SEQ ID NO: 848506 - DNA, 642 bp, Homo sapiens
tgtattagcgttttcccttccttgcttttatttcctttgccccctagattataatacaagctaaagtcccaggctcttctttctgaaaaacctatggtaaggcacatgggaaaatcatcatggtataaagttatgtgaaaaaaaacaagatacgaaattctatattagaatgattccagttttatataattgatgtctagaaagaagtattaagaataatatattgaaagttagagcattgacaagtattactacagggaagcaggactaaaaatatttacttatttatttatttttacattctctggttcccaaatttcttacagtgaacatgcgtgctttcaaaacctgaaaaaaatttctatgggagaaactgtcagtagatttctgcaacaaaaagggcatagtcatggtaaggtacacagcaaaccaaatgtcatgggaaacaagtatggaaatcaaaaccaagaaaatccaaggtcaaaatgtcagaagctaaccaagggataaggctaagggataagagaagataaggagtttggtcctgtatagtttacagtggctgtcttatttggaggactgggtcccttctgatatattgcctgttgcatgaaaccwaccatctgggtgaacacctaacag

SEQ ID NO: 848507 - DNA, 642 bp, Homo sapiens
tgtattagcgttttcccttccttgcttttatttcctttgccccctagattataatacaagctaaagtcccaggctcttctttctgaaaaacctatggtaaggcacatgggaaaatcatcatggtataaagttatgtgaaaaaaaacaagatacgaaattctatattagaatgattccagttttatataattgatgtctagaaagaagtattaagaataatatattgaaagttagagcattgacaagtattactacagggaagcaggactaaaaatatttacttatttatttatttttacattctctggttcccaaatttcttacagtgaacatgcgtgctttcaaaacctgaaaaaaatttctatgggagaaactgtcagtagatttctgcaacaaaaagggcatagtcatggtaaggtacacagcaaaccaaatgtcatgggaaacaagtatggaaatcaaaaccaagaaaatccaaggtcaaaatgtcagaagctaaccaagggataaggctaagggataagagaagataaggagtttggtcctgtatagtttacagtggctgtcttatttggaggactgggtcccttctgatatattgcctgttgcatgaaacctwccatctgggtgaacacctaacag

SEQ ID NO: 848508 - DNA, 560 bp, Homo sapiens
ttaatgctataaatgtccctctgaatgctgttttagctccattacatacaattttatatgttatatttacattttagttcaggtyaaaatatttcctaattttctttgaggctgtctcttagatctcatggattatttagaagaatattttaacttacacctatttgagaattttgcagatagctttttgttattgatttccagtttaattatattagtgtcagagactatatttcatatgaattcaatttttaaacatttgttaggttttattttttgacccagacctggcctatcttggttagcgtttcatggtcactcaacaggaaattaaaatctacagttgtttggcagagcgtcctattaatgtcattacatccaactggctgctggttttattcagttctttatactggctttccttctgtcagcatgtttcatcaattactaagagaaaagtattgaagtcttcacagccataattgtagatttgcttatttcttgtttcagttctcagtttttgcttcatgtgctttgaagttttgttattaagaacatac

SEQ ID NO: 848509 - DNA, 635 bp, Homo sapiens
ggcgtgctgtagactagtgagtgtcaagctcatatttaacctcctccagtctctctgccttctgcaagaaaaygcttccctagagctagattgatcctacaaataactgcacagaagctaaggcacaaagggagaggaaagggatagttagccaactctcaccaccatgctgggaccctaccatagacaaatgcagccaggctgggatttttcacctaggataaaattaaggagtttagattcagaggtgactgccctggggtcaagcagctaggaatcagaaaagccaggtttatctgagttcaaagtcagtgctttcaaattttcaacaaattgcttttaatacatcagtagtcttcatcctttctggagtcagagaaccctttgagactgcaagaaagctatggagactttcatcccaaataaaacacaaatgcagatgaacaacactttgcctataccactaaggcatttatgaccctcccaggctcactcaatctcactcactcatttatttcaataaacattattgaatgctatcaatatgccaggcactggctaggtattagccaagcaggcatggtccctgccctcacagagcttatagtgcagcaagagagaaagatgtaaactaa

SEQ ID NO: 848510 - DNA, 608 bp, Homo sapiens
ggagcccaagaaaaaatcctctatccagttgacagccccagctcaggtccagcatagccagtgtcaaccaccaatggtgccagtcctagccccagacaggtaataaaggaacccttctgcaaatgactccccagtcccagatgccccatctgtctttgatcagagacaaaccagctgcaccctccacatagtcctgattcacaaatctatagacaaaacaagagtgtgtgaagctactgagttttggggtagtttgttataaaacaatagaaagctggaaccaggaaagtgagctatgaactgatacttcaaaaagggttaaggaggacgcattgtgtttaccagattgtctggtgttgggttaatcaaaaggcttcctgtgctgggaaaaccagaaaaacataaaagaatggcattagtgaagtgcgtcagggggcagcagttacttagagatggtggtggaagtgtcctccrtacgatgctgtgattaagtgcttacagttttctttgtttttattctctatcttgattaaaattttgcagtgtttatactgccacacagaataaatggacccatagcttacatttcaaactgtgccttgctgaca

SEQ ID NO: 848511 - DNA, 643 bp, Homo sapiens
agttgagaatcaaaaaatatgtcaaagaaaaccaaccaaccaaaccaaaccaaaaccaaaatctccttcacctagcaataatgatttttttttttttgcaacattttcaaagtacttttttaaatctgtcattctatctaatttaaactgtgttagacctctggcatcatcattatcatgaagaagtttaagagtcaagtataaagttctttggagggttactggaaaactaagcacaaggatgcaggtttctgagctcagatttttccccccatttatagtacgtaagcactccgtagcataaattgggctatagctgggtctagagatggcagctattcatccaaatccagggctatacttaacatgtgttgttgtttaaaatggagagtgagaagaagagagatttctctagaaaaaggacaaagtagaaacaaacttttagacaattgtagttccagggaacatggctaggaaaatgaaggatgcctttgtgtgaagaagaagtcatattttccaccaggtagatgtggtctataggccaagatcaaagcttrggtagtgggtttcagctgccgctgacccttttgctgacattttgtgcaatgcacagtcagcagatgggcttgttctcttctaccat

SEQ ID NO: 848512 - DNA, 600 bp, Homo sapiens
agtatattcttttattctgttttatatattcaattgtgtggatataccaccatcaagaaaaatcattctaatgtttatcrgcatttgaattgtttccatttgagggctgatgtaattaatgatgccaatggcatccttgtatatgccttttcaggatatttgtacacatttctattagtatatatttatgagtagaattgcagcattatggggtatttgtatctccaacttcaataaatactgtcatttttctaaatagttgtaccaattcaaactctcatcattattacaaacagtatatgaaagtgtgtgaattccagttactgcacatcctcatctacagttggtactgccagtcatttaatatttattctgatatgtgatagtatctgattatggtgttaatttacatttccttaataactaatcatgttgagtgtcttttcacatacttattgcagatcaagtacatatatatttttaatagtaaagacagggtctcgctctgtcacccaggctgaagtgcagtgacacattcatagttctctgtaacctcaaatacctgagttcaaaagattgttccacctcagcctcccaagt

SEQ ID NO: 848513 - DNA, 555 bp, Homo sapiens
ttgtcttgaagtcagaaaaatctgggatgagatataggctcacaaattatacagtyctagtaaaaagatttaaccttttaaaatctgttttcttatctttaagataggaataataataatatctaactcactggtctattgtggcatcaactaaaataatgtaagaaaagggctaaatatagtaccttgcccaagcagtctatgaagttcagttccttcttttttccaaaatttttcttgttcttcccacaaagactacatgaaacaaggcacaggtgtttgcctctgtggttttctgtttggttttgttttggtttctgtgctttgtagcttgtaataaacaaaacaacaaaaaaccctttaggatattttccaaaggtgttattttggggccaaatatgtttgaaactgttcaacaatgtatcaaggaaaaatagaaatctttgttggatacaaaaagggtgactacagaaaagtcagtgagcaggagaaacagaatttcacatagaccaggtgttgtaaacctcaagtaagacaaggttagatgggctctga

SEQ ID NO: 848514 - DNA, 633 bp, Homo sapiens
tatgccagtggtctttaggctctacatactgccatatataagtatagtagagaagttagataccatgacaccaagaaaacacaatatattttaaaaaataggctgacaggaagtgatagaaagtgaccaggtgaggctgtgagcagaagtagaagaagccacgaggggaccagcaggaagagtactcagccagagggaattgaatgtatgatgattatatggtgtgggattggtcttagaggtgggcacaggcagtttttgaaaggctttgaagggctcaggtaaggaatgaggacttttattccaagtgtgataggaactcattgaatattgattgattgattttagagcagaatctcattctgttgcccaggctggagcgcagtggcataatcatagcacagagcaacttcgaattcctgggctcaagcgatcctccttcctcagcctcctgagtagctggggctatgggcatgggccaacatgcctgaccaattatttaattttttgtagagggggagtctcgctgtgttgcccaggctggtattgaggtctagaactcctggytttaagggatcctcgttccttggcctcccacagtgctgggattacaggtgtgggccatactgcctg

SEQ ID NO: 848515 - DNA, 612 bp, Homo sapiens
tggtggacacgtggattgttttcagtttttggctatgaaaaatctagctgctatggacattcatgtacaagtgtttktatggacatatgcttttattttggataaatacctacgatatgaatggtggagcaatatgataggcatatgtttaactcttaaagaaatttttcaaactgttttcaaaagtgattataacattttactttctcactggcagtatatgagttccatttttttccacatccttgccaacacttggtatggttagtctttttaattttagtaattctaataggtgtatagtattttcttatggattttcaaagttcaaattacctttttaactaatgatgttgaatatctgatcatgtgcacattcgtcattcatatatcttctttggtgaagtgtttgtttatggtatttccatttttatgaggttgtctgttttcttattgagttttgaaagttctttatatattctgcatgcaagtgttcaacaggtatgcaatttgcacatttttcccctcagcctgtggattgtcctttcattctgttaacagtatctttttaacagtatcttcttaattttggcaatgtatcgattgttttgt

SEQ ID NO: 848516 - DNA, 601 bp, Homo sapiens
aaataaatacttgtactttgctcagatcataatagctcattagaggaggctgattttggacctagactacaacctaacaccagagggctggggaggccccttgaacctattgcgtgaaagctccactctctagggaagcgaggaactgaggaccggggattcaaccttcttaattgtgaacctcattagtgacggttgctaagcaaaacacacacctaccttcagtgcatgggaaggagataaacaatacgtcacaggctctaatgacatcggtgcttagggcgacctttaattattatatttttgttctcttataccttagtcattaatgtagaaaaacaaattagtttatttttgtggaccacagcagattcataaattgtcttccagtttttgtctgaattatatttcacgctgataatctgcacacgcttcattcattttcctgtgcgtgcatctgtctgcctcrtgtgtggctctcgaatgtgggacctcgggatagaggatttgtcttaaaaccatttagttttacaggctctttgctctaaaggattcgatcatgctgttttgtttgcaattcacttaaaaaaacactcacatt

SEQ ID NO: 848517 - DNA, 635 bp, Homo sapiens
ggtgtttgctggaggtccactccagaccctgttttcctgggtatcaccggcagcggctgcagaacagcaaagattgctgcctgttctttcctctggaagctttgtccsagaggggcacctgccagatgccagccagagctctcctatatgaggtgtatgttaggccctactgggaggtgtcttcctgtcaggatacacgggggtgagcgacccacttgaggaggcagtctgacccttagcagagcttgaacactgtgccaggacatctgctgctgtcttcagagccatcaggcagggacatttaactctgctgaagttgtgcccacagccaccccttccccccaggtactctgtcagcccctgacttcgactgctgccttattttcagagatgccctgcccagagagaaggaatctagagaggcagtctggccacagtggacttgctgagctgtggtgggctccgcccatttctaacttcccagtggctttctttacactgtgagggtaaaactgcctacccatgcttcaccaatggcagacatccctcccctcaccaaacttgagcttcccaggtcaacctcagactgctgtgcctacagcgagaatttcatgccagtggatcttagcttgcta

SEQ ID NO: 848518 - DNA, 321 bp, Homo sapiens
gtattagttgttttttaaatgtttggtgggatgcagtggtgaagctttcgggtccagggcttctctttacaggaagatttttaatacaactttgatctcattacttgttattgacatgtcaggctttagatttcttcatgtttcaatcttgatagattgtatatgtctaggaatttgtccactttttctaagtttttcaatttattgacttatagttgctcayagtaaccactaatgatcctttaaatttctgcagtatcagttgttaggtctcttttttcatctctgatttcatttatttgggtcttctctttttaaaat

SEQ ID NO: 848519 - DNA, 650 bp, Homo sapiens
tccactaaagataaactctaagactctcacttgctactacgccttgtgggcccatttgttataactttagaatgaaaaatttccccaaataatggagacaaaattgcaagataaaaaaggtacccaatgcaagacaagtacaagaaagagacaggtatttcagaaggcatctttgaagactgcatgcaatttctttagtttcaacagaaagaaccatctgtataagatctataacttcatagcatttgtgtaacatgaaatgctttcccttgagctttcccaagaatagagggaaaaggaaaacattcttgtttattttgtttgtttccctctcctaatttcacattttttgtgaaagcctgcacttggatgtaccaagaacaagttgttgatgtaataagtcaagctggatcaattcaccacttattaataaaaatgaattactagtactcacatcctgctaaattttaaaaaatgttcctcctatctttgttttctcacactgctataaagatactacctgagactgcgtaatttataaacaacaacaaaaaaattgactcacakttccatacctcaggagacctcaggaaacttacaatcatggcagaaggtgaaggagaagcaaggtatgtcctatatggcggcgg

SEQ ID NO: 848520 - DNA, 487 bp, Homo sapiens
atgtacttataaaacctattacttttcccttcaaagtgatataagacccagtaaaacctgggtaataagcttcagcaactaatgatatttgtagaggcttttgaaatgcatattaggtgataatattccatctctcactgttacagtattattatgatcccaaaactagtaacactgttgaagtgaaatccatataaaataacaaaattcttagaactttcaggcagtgtgtttgacattttcttacaaaaagtcaatccagtttctgtgctcttggttcattttgtttgtcttctaagtgagtcaggatcaataggatcactatgtttatctattcaaatctgagatattgacttgcaaatagacaatttcattatcctcatgggcatgattttcctattggtgtcaytggtactaactgagccttttgggatttctactgaaaggtatgatagcttgtgttcaactcagtgagagtttactaaat

SEQ ID NO: 848521 - DNA, 621 bp, Homo sapiens
tcgtcttcataaaaagttattgatggaaaataatttttaggtgaaacaaaataaagsgatactatgatatatatcacatatatatcatatttaaattcactctagtaaaaagttatttggctatgaagttttataactgaaattaacaatgagaatctttaaaaaatcatagttctatgtcatccatttatgaccgtagtatgctggacaagttatcctgaccaactttttctgcaagagacctaaatttatagaaaaactataaaaattcattgttaagtacatcagtgggctgccaagactgtaagaaatatgaatccagataaatattaagtcaattgaggaatgtagagtagtaaacagagcaccaaagccagtttagccttgaatgcagttaacacatctgatgaaactgaacattgctcttcaagattctcagagcttacaggaaaagaaagaaagtaacatgcccactgaatgacaatactctaataagagaccctcggtaataagcagaataatggccccacgcaaagatatctaagtcttaacttctggagcctttgagtaagttatattacatgatgaaagggaattaaggttgccaattaattgatctta

SEQ ID NO: 848522 - DNA, 621 bp, Homo sapiens
tcgtcttcataaaaagttattgatggaaaataatttttaggtgaaacaaaataaagcgatactatgatatatatcacatatrtatcatatttaaattcactctagtaaaaagttatttggctatgaagttttataactgaaattaacaatgagaatctttaaaaaatcatagttctatgtcatccatttatgaccgtagtatgctggacaagttatcctgaccaactttttctgcaagagacctaaatttatagaaaaactataaaaattcattgttaagtacatcagtgggctgccaagactgtaagaaatatgaatccagataaatattaagtcaattgaggaatgtagagtagtaaacagagcaccaaagccagtttagccttgaatgcagttaacacatctgatgaaactgaacattgctcttcaagattctcagagcttacaggaaaagaaagaaagtaacatgcccactgaatgacaatactctaataagagaccctcggtaataagcagaataatggccccacgcaaagatatctaagtcttaacttctggagcctttgagtaagttatattacatgatgaaagggaattaaggttgccaattaattgatctta

SEQ ID NO: 848523 - DNA, 621 bp, Homo sapiens
tcgtcttcataaaaagttattgatggaaaataatttttaggtgaaacaaaataaagcgatactatgatatatatcacatatatatcatatttaaattcactctagtaaaaagttatttggctatgaarttttataactgaaattaacaatgagaatctttaaaaaatcatagttctatgtcatccatttatgaccgtagtatgctggacaagttatcctgaccaactttttctgcaagagacctaaatttatagaaaaactataaaaattcattgttaagtacatcagtgggctgccaagactgtaagaaatatgaatccagataaatattaagtcaattgaggaatgtagagtagtaaacagagcaccaaagccagtttagccttgaatgcagttaacacatctgatgaaactgaacattgctcttcaagattctcagagcttacaggaaaagaaagaaagtaacatgcccactgaatgacaatactctaataagagaccctcggtaataagcagaataatggccccacgcaaagatatctaagtcttaacttctggagcctttgagtaagttatattacatgatgaaagggaattaaggttgccaattaattgatctta

SEQ ID NO: 848524 - DNA, 556 bp, Homo sapiens
gtggtgcacacttgtaatcccagctactcaggaggctgaggcaggagaattgcttgaacccgggaggcagaggttgtagtgagctgagattgcgccactgcactccagcctaggcgacagagcgagactccatctcaaaattaaaaaaaaaaaaaatcattgaaatgataaaatagaatcttaacttttccagttattttacaggttatgataatcaaacatgtgacaacattaagcaccctggtagaggcaagatttgccaggcggctctcacatacccctgcctcccacaatactacccccgcctcccatgatatgatgagatgacaaggcactttacctctgcattatactccacaaaacccgtaatcccagacaatcatgagaaaacatcagacaaacccagatcagcagacattctacaaaacaccgagtccttcccaacactgtccacggaatgaaaaacaaggaaaatctaagaaatggtcacagacgagagaagactacaagaggcatgatgactgaatgcamggtaggatcctgggacagaaaaaaa

SEQ ID NO: 848525 - DNA, 622 bp, Homo sapiens
taagttaccaagacaagcaacagccccaccacagggctacttatatgcttaccactctgattgtcaatcccgcttcatttttgcccctttcattctataaaattagctctacattaaaaatcacctttattacatttcatccagtgttcctagtattttaagtggggtggttttcagggtatctagactaccagtttgctagaaagtgaagtctccaaagttcttacctttctatgccttttcttttgattatataagggagacagctcaattagctactgctatttttaaacgatttcttatagtttctcattatctgtgaggaaggtaggaacaccatcaactaaagctttctacaagtaatcatcatcttgtattagaatgagaaagggtagatgataatgggaagtaaaaggccactaaagttatgagggattatgaggagatatcctgtgtaatgaatattttgaattgaaaaccaataatatcttgaatccaaatgctagaaggtcccctgtaatcaatatctayagtgtacaacatagaaagtataaacttattatgattcttcccccaaaaaaggtataatttaaacaaattaaacataaacacaatgaagaaa

SEQ ID NO: 848526 - DNA, 542 bp, Homo sapiens
acacatacacagtttcaaagtactaacccttcttgcttggatttattcagctactccacatctgtgggcaaacgaggatcatagaatataagaggtggtaaagatccctcctctatactcctgcttcttacagtaactcaaagctcaaagcagcacacgctgagctaagggtccctgcattatcccttacagacctattagtagtatctgcccatttggaaaaatgtattagcataggttgttgatctttatcaagtatcttatgttacataatactcatttcagaagtggagctactaataggtaacctgatccttttgtttttctgtctatgggaaatgcactttatttttattttatcttatatttttgaaacaagatctcactctgttgcccaggctggagtgcagtggcacaaatatggctcattacaacctcgacttcccaggctcaagcaatcttcccacctcagcctcccaagtagctgggacaaaaggtacatgccatyacgcctggctaatttttaaaatactttctatttg

SEQ ID NO: 848527 - DNA, 583 bp, Homo sapiens
taatcctgaggcactggctgaagaaacaaaaccaaatgagcctgtagctgtgagctgtccctctgtgtgctcttcaggaggcagcaagtcttcccagggrtgcacagattccagcgcagtttcccaagtaccatcacagttctccacccatttgagctttccatcaccccaggaagatgggtagacagcaccatattacagagaaggaaaaacagaggtccagggaggtttagtaacttgtccaaggtcacccaactcataagaggcatgccctttgtgaaaaatcattaagaatagaatctacacatttggagatttgggccgattccacccttgggaatctcagtgtattctgttcacacactgaaaccaatagggtgctatgtggaaaggaaaacagtctgtactgtggccgttctccacgccaataattagtgctggtcaaatttggatcaggtaaattttgctgagatctccctgccctctgttctgcatttgtggccatcacctggggatgatgtgtgctgtggcagaagttcatatgggcagcggctgggagcacagtccttgggggtctgatagc

SEQ ID NO: 848528 - DNA, 583 bp, Homo sapiens
taatcctgaggcactggctgaagaaacaaaaccaaatgagcctgtagctgtgagctgtccctctgtgtgctcttcaggaggcagcaagtcttcccagggatscacagattccagcgcagtttcccaagtaccatcacagttctccacccatttgagctttccatcaccccaggaagatgggtagacagcaccatattacagagaaggaaaaacagaggtccagggaggtttagtaacttgtccaaggtcacccaactcataagaggcatgccctttgtgaaaaatcattaagaatagaatctacacatttggagatttgggccgattccacccttgggaatctcagtgtattctgttcacacactgaaaccaatagggtgctatgtggaaaggaaaacagtctgtactgtggccgttctccacgccaataattagtgctggtcaaatttggatcaggtaaattttgctgagatctccctgccctctgttctgcatttgtggccatcacctggggatgatgtgtgctgtggcagaagttcatatgggcagcggctgggagcacagtccttgggggtctgatagc

SEQ ID NO: 848529 - DNA, 618 bp, Homo sapiens
taattaaacatgtactgtgtgccaaaccatgaggagacagagatagcacgtatgctcaaagctgtcaccgtttacaagtgagataaacaaatgcacaacttgactatgagacaaaatgttcacggaagctcagccaagcatgactgagacggagaagggttctgtccagggagaggcctttcagaagagtttgttagccagatatgaagaatgatcacttctgtactctccatactgagcctgaatggtcctctgcaatttgtataaggatgaagatttgaagatcactctttctagaactcatatgaacaattaaacatctgagggcttgttttcctctgagaagcattaagatctcagagctcccagaagaaaaaggaagccccttaataacaaacattaaaaaaaaaaggtcttttgccctcagggtccttcctagaggtggacttcaaacaaattgtgtattcctctcatcaaatggccagaaagaaagccttttcttattcataatttcagttttaagwgaagttagaagctgtagaactttagaaggaatggttgtcaggaactaaactctagctctataaactggttttaaaaaaccccaggctcacaaag

SEQ ID NO: 848530 - DNA, 615 bp, Homo sapiens
gaccttatttggaaatgggattgttgaatatgtaaattagttaagatggggtcatacttgagtagggtgagcccctaatccaatataackggtgtccttataaaaaggggagtttagacacctacacacaaacacacagaaagcatgctatgtgaagatgaagacagggacctacaagccaaggaaccccaaagacccagcaaaccaccagaagctaggagacaggtctggaacaaattctctctccaatcccttaaaagaaaccaaccctgccgacaccttgatctcagccttctggtctccagaacttccagggaatacatttctgttggttgaaccacccagactgtaataccttggtagtcctgggaagccagaacaagggcattccaggaagcagagagaaggcatggcgaagctcattggtgggagtgtgcagagagtcggggaggggagacagtcacgtgatgctgacatgtgaggctcttagaaaacggccatgaaaaacaagtttagaaaagcacaggccaggccttcacacccttagcccaccagatggccctaaatgccaaattaggggatctgaattttattccaaattcaatacaacttccg

SEQ ID NO: 848531 - DNA, 669 bp, Homo sapiens
ttagagtgcttcatgtgctcaatacacatatcagttctcttggcaggaatcttgcccttaacttgttggtttacaacaaagccaacggcatgctggggaacactgtagactcttccagctttgccatggtaacacttgttgggcttcctttttgaacagttcccattcccttgatgtctacaatgtcacctctcttatagattcgcatatacgtagccaaaggaacaactccatgttttctaaaaggtctaaagtgactctcctctctccctttgcttttgtcattttggcgaattactggaatatggcggttctggctgaaaaggccaaaattgattatttcaaccatttttaagtgtatagttcaggggcattaaacgcattcgcattgctgtgccaccagcaccaacattcatgtctagaactttttcatctttccaaagtgaaactctgtgcccattaaacactcacttcctgtccccctcccctgaccccagcgccattctacttcctctcttacgaatttgactacataagggacgtcawataagtgggatcagacagtatttgttcttttgtgactggcttatttcacatagcataatgtcctcaagcttcacccaggttgtagcaggaactagcattttcttcctttttaaggctgagtaa

SEQ ID NO: 848532 - DNA, 542 bp, Homo sapiens
catatttaactggatttgttattccccaytctctcctacacattgcatcatcctcggtctttgattttcctgaagtactttattgaataatttctttgagtgttcagaaatgcctttctttgtctctcatatataaataatactggattgattctaggattacagtgcttttcatctaaaaaatctgtcagtattatccactgccttctgcagataagaaagtcagtgccaacctgattctcgctccgctgtgaataacgtaaatttatctgggaacctgtgatgttttctcctggagttcaaacattcatcaggatgtgtcttgacgagtgacttttaggggcttcctaccaatcagtaagattgtctgaaattcacctttgttctgttcaggaagattttctctctccatctccatgcctctttctctcctgcatctgtctgttccatccttctagaatccctgttactcaggcactaggtctcttgttctagtcttacttataattcccactcacctatattctttatctgtattgtga

SEQ ID NO: 848533 - DNA, 605 bp, Homo sapiens
ctaaaaattcttacaaaatatggagcaaaaaaataaatttggatgagtctttacaaaggtatccacaatacatgtaaagaaaaacatagtccaataaaaacgaaacaatatagaacacaakaattcatttgaaataattacaatgccaggtaacagaaatgtcactaaatatttaatacctggtgagcagtagggaaaaagtaagttctgcttgaacctagtagcaatgtcgccattgctttaggatcacacctctggatggtattcagttcaaatcttaaactttgtaggaaaatctcaggttctgtgtccaatcggctgtgacctacggccgaggctgaggctggagcctttgcccgggtgcctgatgatgctgcccaacaccagcagggggcagtgttgccacccacatgccagggaactcatgtccccaaagaaagccatcggaggcagggacgttccaggacatatttttgagaaaataacacgtatggtacctaaaacaacatcaaacctcagttcatttgtgaactatgcttgggggagccaccaataactccacagcagcattcaagtcaaaccacagcgcctcccaagcattgggg

SEQ ID NO: 848534 - DNA, 543 bp, Homo sapiens
tgaaggcttgcagtggactgtgccaacccacccaccagcaatgcgtctggcccttcatagaatcgaagactcccattcagctaagagagatcaasattgtcccccaaactagaaagctgctctcaacacagagttttcatttcgtacctgtcaaaagagcagtttttacttatttagacataggtttttattgatatcactcctttgtatacttaactaggaaaataaggcaaaaacaattggtctcgattcctctgtgcttcttcagggtacgtctgtcttcccagtcaccgctccaagcaggactgcatggttggcctccttgtgccacatcctttcctgtggcctcaggggcctgaattgggggcgttgtgagggtccccaccaacgtctgccagcggcttctgtcccacaagtttctatgcagacaaggagacaatgcagccaggcgtgtcctgaatccagaggtggtaaaatggggacaaacaggcctcttagagctgggaacacgtggtgtgtggcatctgtaaatacatgggtatg

SEQ ID NO: 848535 - DNA, 574 bp, Homo sapiens
ataaattcagtgagtgtttcacctgactggtatgtcccccctcctctgtaatctttcaaggactaactcctctccttggtatgaattttacgtgaagcacctccttcctacttctctataattatttagtttttacaaaattattattgttattattattttttatcttttgagacagagtttcgctcgtgttgcccaggctgcagtgcagtggagcaatctttgctcactgcaacctctgcctcccatgttcaggttcaaacaattctcctgcctcagtctcctgagtagctgggattacaggcgcctgctaccgcgcccggctaatttttttgtatttttaatagagatggggtttcaccatgttggccaggctggtcttgagctcctgacctcaggtgatacacccgccttggcctcccaaagtgctgggattacaggcatgagccactgtgcccagcytaaataattactttgaacaatctcattaaaaataagctttaaagtatatttaaagcttccttcttccttctcttcctccttccttcaaccttttgcagaggaaatcaccatc

SEQ ID NO: 848536 - DNA, 568 bp, Homo sapiens
agatgttagatgaaaaatattacagttctccatgaatatttctcgatttaaaatgaactctatgctccacatacaaacttaatttagcatttgttgtaatcctccttttccratcctgaaccctatctctgtgagttatgcaatctgtgtaacctcattcagagcaggatgctgccagtatcagatacgacactttacagactcctggttttctcatattagtccaatttctaatccccactcaaccagagagagatggaaagagagatagaaggcactgaagaaagactctattaattttatagccgttcaactaaacgattatttctgcaacttctacgttctcatttagccatctgggaaagtatgccaagacataagactaagacaaacaagtacaaagtttgtttgcattttgcaaagagctggaaatcaaatacatgtttactgtaagctgaactccatgagtgttctaattaaacattatataagtctacacatatattccagccctgatttgagagtaggaaagagcagaaaatgttcttccttcccctccctccatgac

SEQ ID NO: 848537 - DNA, 317 bp, Homo sapiens
gttgtaagtgtaagttctcctggcattgcggtgtaagtatgaccaggaagataaaaggcagtggtgtagcaaaacagagctattcagatatgtgtacagacaggatccccgggagccaagggatgctgtgttgtgatatgctgcagttacatctgctcttgtcctgtgtggtcagctcacttctgataagatgtgggatctctgaggaattaagtyaggacctcaatctaaccactagagagcctgtcgttggcattagcagtgacattggccctgcagtatgcaatagctgagcttccccttgacaatcacaaaag

SEQ ID NO: 848538 - DNA, 516 bp, Homo sapiens
aaattatctgaattttgcctaatttatgttcatttcacatgaatataaatttcaccatgtccatttctctgtggatacaattacatcactgtataatgtccttggtttaaattacagtattgtcaaattagcaagaacataaacagacaagaacagcaataaaatggttaatatatatgctttcaaagctacaatatgtgcaataatacgtacattctttgaatatacttgtatcacataactgaaaaacaactaatgaatgtgaatgtcttctgtctttccatgtcttttaactcccactgcagaacaccactatctaaataactgatcctcatggtttctaattacaaaatgccatatgcctttcttttaattaaaatgatttccatattatatccagtttgctttattaagatgaaaacaaggaagaaagccttattgaatagactacaagatgagcatataaggcctgacttaattstacatgatatcacacattcctatgaactatttttt

SEQ ID NO: 848539 - DNA, 605 bp, Homo sapiens
tccaacactgataaggaacttaaacaaatttacaagaaaaaaaaaatctcattagaaagtgggcaaaggacataaacagacacttcaaaagaagacacacatgcggccaacaagcatatgaaaaaaagcccaatatcgctgatcattagagaaatgcaaatcaaaaccacaatggcataccatctcacaccagtcagaatggttattattaaaaagtcaacgccgggcatggtggctcacgcctataatcccagcacttcaggaggccaaggcaggcagatcgcatgaggtcaggagttccagaccagcctgcacaacctggcgaaaccccgtctctactaaaaatacaaaaattagcccagcgtggtggcgggcgcctgtaatcccagctactcaggatgctgaggcaggagaatcgcttgaacccgggaggcagaggttgtagtgagccgcgatcatgccactgcactctccagcttaggtgacagagcgagactctgtctcaaaaaaaaaaaaaaaaaaaaaatttgaattttgtttaaatcrctaacacatactgggcatttaataacaaaaaaaaggacatgagattgtgatccttagga

SEQ ID NO: 848540 - DNA, 605 bp, Homo sapiens
tatcattttgccagttatatcttaacaggtataaatattgaaacctccttagcgaaaattataacggtgagcaaattatgacagcggaggagatctgacctaaccatctccttcttgccttttaayctctaaactgtcctgggtcattttggggcatgggtcaagctaactttaggagaaatttagtttatagtttaaatgatgatagaccttcccaaaactaagtcatctttgtaaaactaatgaaaggccaccaggtcaaaagaatgagaggggcctgaattctgctgagatgtagacatagttaagcaatcaccagccgttattctggaggtcatgaaatttgcaactttctcaattactcctataattaacatcactcctctagaccctaaaattggccttttcagattccttttcagacttttgtatttctgaaaccaggtgactttacctggacccacgacccctacctgtggtccctgacctagaagcaggctcagcatatgaggaccattttttccacacccctatgattgcatctccaaccaatcagcagcatctgttctctagccacctgcctaccaaactatcttttaaaaacc

SEQ ID NO: 848541 - DNA, 639 bp, Homo sapiens
cagacgtcttcttaggaagcattggragatatgagagagtggtgtggggtgggaagcaaatggttggggagacatagcatctggcttttttgggaagccctgctgggtttagacaaatctgcagacaggaggaagaatgagatgaatggcacttaagtgttattcctctccagatcatgattctcccagtttgaattaagactcttctctgagttttggaggagagatgcttggaaaggatgattgaagagattcattcacccattagactccctactattgattaaggatgtaatgaagtgatataagtcatccaataagctatgcttactatgtttttttttaaacatagtaaatgcaagccaaatagagccctctcccaccttagccagtagagtgacatcttaggatcttaggtgaagtctttttttttttggttcttttagtttttaaatttggaggattaggatgacaaaaatgacacctatgggtgaaggggtatggaaggactggaatgacattcagacttttttttcagtaggtttgctggtttaaaaactgtatctgaggacaaaatgcttggattcaaatcttggctccctaactaactgagatctgtcttctctgttctttgtcatc

SEQ ID NO: 848542 - DNA, 572 bp, Homo sapiens
agatgacaggtgggacgtgttatgaaaacccagctctttcccttgagttgggacatacttggaggtgtaatgtacatttcaaagctcctctgcatcatcaagctaaagctaggattttgcctaaaagtacactctcccttgacttctcttccctttctggctgccccactcattcattagcacttccataactcatcacttgcatatgaatccttgactcaaggtctgcttctcatgaatccaagtcaggaaccaccctgtattgaacaaacttagtacagagtttcctccagagaaagcactgtccttaaagattgcccctgtctccctcttgggagttgtatttgctctacccactaggatggttgattttatccatcaacttgactgggccacaggatgcccagatagccgtttaaacattatttctggaagaggttagcatttgagttggtgaactgagaaaggcagatagcatcatctaatccattgagggtctcaatagaacaaaaaggtagargcaagttgaattaattctgcctgactgcttgagctggaacatccattttctc

SEQ ID NO: 848543 - DNA, 420 bp, Homo sapiens
tccatgccactgtgttcaggaagtaagcggtctggrtataagatttctagccatccttgaggtgagtggacagaaggaactgtcaggttagagatgcagcatttcaaaaacaaacagaagggatgaaggaaggggaagtgaaggaacaggtaaagagatatgagactcagagaagagtaatgtctctgtagccaaaattaaagaaaacttcaaaaagaaagtactagatgatacattctttaacagatgactaatattcctggcaaaaactttttaaaaactaagtatacatttaaatacataacattccatcctttagccttcaacctaacaacatcaattcctttaaaacagcatttttgaaaagctggtttttttttttccatctgtactcaaaatggtacatctatggtggacaca

SEQ ID NO: 848544 - DNA, 359 bp, Homo sapiens
gtggagcctttttttgtggcaggatcccctttgctagtgctgcaagycacctgctgtttctcattggaggaagggagtcttaggcttggtgagtaaggagagtgctttcctgtcttcttatggtcagcaggtgtattagtctcatgctgctaataaagacatacctgagactgggtaatttataaaggaaagaggtttaattgactcccagttccacatggcttggaaggcctcaggaaacttaacaatcatagtggaaggggaagcaaacacgtccttcttcacaaggcagcaggagagagaagtgctgagcaaagtgggaaaagccccttataaacccatcagatgtcgtgataact

SEQ ID NO: 848545 - DNA, 498 bp, Homo sapiens
cttgtttattctactgccagtactacacttttttgattactgtagctttatggtaatctttaaaatgtgtttcggtaagtgcccccattaatccaaccttttataagccccataggcttttcttccagatgaatattttgtcaagttctagatatatctttgctgaattttaattatgttcaggaaataacatacatctaataatatcaattatcccatctcaagacatctttctctatttaaaccacttttacttttataattaaaatttagggggcttttttggggttgctgttgctaattatatacttcttacacatttattttcatgctcaccagtgggatcattcccagattttttgtaactttgaragtaacataatatatatattttaacaagctttatttagaatatattgaatggtacctatttatttttaactacctactcacctgaactctttgatgtttcataatcttcagttactcattggctag

SEQ ID NO: 848546 - DNA, 498 bp, Homo sapiens
cttgtttattctactgccagtactacacttttttgattactgtagctttatggtaatctttaaaatgtgtttcggtaagtgcccccattaatccaaccttttataagccccataggcttttcttccagatgaatattttgtcaagttctagatatatctttgctgaattttaattatgttcaggaaataacatacatctaataatatcaattatcccatctcaagacatctttctctatttaaaccacttttacttttataattaaaatttagggggcttttttggggttgctgttgctaattatatacttcttacacatttattttcatgctcaccagtgggatcattcccagattttttgtaactttgagagtaacataatatatatattttaacaagctttatttagaatatattgawtggtacctatttatttttaactacctactcacctgaactctttgatgtttcataatcttcagttactcattggctag

SEQ ID NO: 848547 - DNA, 560 bp, Homo sapiens
tgtgggtattgctcaagaaagatagatgtactttaaaaaatcattttctgattggaacagtacaagtttattgtggaaaacaataatataaataaaaatatttcataatctcccaaataacaaaactctactcaccatcttggtgtattttttttttaattctctttctctctgttggcattatacaaattatatctatctatatatttatatgtataaatacataaataaaaatataaaatatatacataaacatgcatacatatatacgtgtatgtctgtatgtacatacatatgcacatatatacatgcatatagttttattctattctaatattttagttatgctcacttatatatttcaaatatattatttctattttcctacttatttctaagtatgtgttttcatggctgcaaaagagtctatcatatgaatgtactatacacacatacaarttcattatatatacacacatatacagtcacgtatcacttaatgacagtgatacattctgagaaatgcatcattaggcaattttgtcattgtgtgaacatca

SEQ ID NO: 848548 - DNA, 583 bp, Homo sapiens
taaacttttattaaatatcagataagtaagaaatccaccgtgaagaacttgtycctttgggagcatactgtatgactgacaatattgtcaggtctctgggacacaaaagggtatgagaaatgtgttgggaatttttctgtaactgactcatcccattggttgagtcattccattggtcaacctcatgatttcttgtgagccagtagatcattctataccatatcccttctcttagagaaggcaatttatgaagtagctcataaatggtttccagatttagaatgttactattaaattttaaaaaggaaaaagaaattatatgtgtatagattatatgtatatacattcatacatatatgtgtacaggcatttatgtgtacatacatatatgtacgtgtgtatatgtgagtatacatatgtatctacatatatatgttgtgtatgcaaatatcactaaaaaccaatatatgttagtcaactttttctcttgctaagggcatttaaggatacccacctaatacttctaatgaccattattgcacaaaatagggaacatttgtaatatcataaaacaaaacagaag

SEQ ID NO: 848549 - DNA, 595 bp, Homo sapiens
gcttaccttcagaagaaagataaacgattctttatctggagctccacagccttttaaatcctggagagtatttcacagttacaaagttccctgtttttaaaattctttgactgtgcactgggagctagagaggattatttcagcccagaaaagttttcagttgctatggagagagctgctctgaaggtaacaatgaaggtggataaaagggagaactttctgtctggtagattttcaaggtaatcaaatcagtgtggttcatgaatttaactttttagatcaagaattaaccaattttcttaggctcacctactgtcacttgcctttcaagggacagaatctaggtcaaaggatttcacctcgcagaatagaaagacttcagtgttagatgaagattttttcctctccagttgattctgtaataactgtttcatccaggctcaaaccaaagatttgttgaaaagataggctctttggaaccatatttgttttgcragatgcagaagcctaaaagattgaagtctttcgtaatgagatgctttcaaatgaaaagtattggttgaaggaatgaaattcttaccagggatgtaggtag

SEQ ID NO: 848550 - DNA, 558 bp, Homo sapiens
gcattttattatgacagcccaagcaaagtaataggaagtacatcaggaaggtaattactaaaaataatgtgtaactgtccccagtgtgtgatgtttgttgcagttaccagcttttaataatttgcamcttctcctgatttcttttcttgttctgaatacattttcacttttgtacctattttttaatattcttttttttttttctgagacagggtcccactccgtggcccaggctggagtgcagtggtgtgatcacagcccactgcagctttgaaactcctgggctcaagggatgctcccacctcagcctcctaagtagccgggactacaggcacttgtcaccatgcccggttagctttttaaaagctttttgtagagacagattctcactatgctgccaagtctggtcttgaactcctggcctcaagcgatcctcctgcctcagacttccaaagatctgggatcgcaggcatgagccaccacacccagcctttttcttaaagagggcccccaagagcaacatctccaggccccacaaaacctggttctgcccctgcc

SEQ ID NO: 848551 - DNA, 487 bp, Homo sapiens
aaatggctatgctcattactaaagggctggtggctggagggaagaactcacagcaagggatcttcaaagccaggcaagagactaagattgcttttccgaattgggggtggcaaatttaaaggcctacaggcaccaggcaggaaacgtaaatgaaagacgcaggccagctcggaaaatgtgagagcacatatgaagtgtttataaatgaggctgctgcaattcagtccatgaatcttcccattttctttttttttttttaattgaggtagggttgccaaataaaaattgatgttttgatatacatacacattgtgaaatgattaccacaatcaagctaattaatatatccatcatcacaaacagctaccactgtgtgtatctgtatgtttgtgtgtgtgtatgygtgtgttgtgaaaatagttgagatctattccattagaaaattttaagtatacattattaactcaaatcaccatgctgtgcatta

SEQ ID NO: 848552 - DNA, 519 bp, Homo sapiens
gtcttcttaatttatctttactgtgctggtgctcagatagggtaatagtgggtcaccaagagtaccattgtgaccttgtattggcctcactgtcaaaagccagacctggtccctgggtatagagattaggaccaatcatgaagaaaagggagatgattatgttatccacagactggtccaagaacacagtagagagttttcagtttcttctctaaattgtgggccagcatcccttccttcctgaactgctctcctccatcctgtgtggtttcattgtgacaatcttttgtggtgccaggagctgatatgcaacacaagtggggctaatcaccacagttttccttaagtgataacaaaagactattttatgcttttttgaagtcaaagtgctggggtggagatgtgaatactccactgctgattgtccttacccttactatatgsagagatcctgtctgcaaaaataaagccacatatgaaaggaaataaagctaagtgacagagggaaagtcagatagc

SEQ ID NO: 848553 - DNA, 581 bp, Homo sapiens
atagggataaagcttaactytatgaaagttaattcttttggaaatgtttctagcatttgttttcttgttggacatctacaagcaagtctgcatttcagccgtgttagaaagaaatacttatggggagaaaggattagagttgtctattccctacagatacatttttttgctgttccttaagatatcaatgccatatttttgtagttatgcagaagtgtgatgctttctgagtggattggttataaggaataatgtcctgtgtagtaaagaacaaaataaaccaagagggaacatcaagactttgaagagccgtgatggagaagaaacacacttattttatacaactcagtagggcagaacccaagctggtagccaaattgtaagcaggctatggcttatactagcaaaaggatgtttcaattgaacattctaaggacatagctgctgcagaaggagatagctcctcatcccttcctttgagaattctgctgggcattggcagttgagaaaacttgtctgcagtctgaggcaacctgtctaccatctaggaatatgtattcccagctcaggaacaactgcca

SEQ ID NO: 848554 - DNA, 520 bp, Homo sapiens
gagaggaaacaaagttaaagaactttagatctgatgtattgagtgttaggacaccctgtaggtgtctgagttagggccctagtgtgtgaataaacatttttaaaatgtaatactaacatattgcaaaaataggttgattagatatatctttattgggatgataattatttatggtatttggtaattttgtgtcaatatatgagttaaaaatagacgaaaaaaacaaattgtgtgacattttgattcttgtctacataaaatggaggagaaatatgtcttctaagcacccagacttccttttctctactctcttcctttgtggatgagccatgaccctcgcttccccattacaatgcacgctccctggaaagggactcatttaagccattcaaatgttaatatggttaagcccagggccccttgctctagaagcttgatckctcatgaagaacaggccttgtaataggtggggcaatgtcattcattgggaatagagggaaataaggatgttggtgggtca

SEQ ID NO: 848555 - DNA, 454 bp, Homo sapiens
taatcattttaaagcgtgtggttcagtwgtactaagtgtattcgcagcaaccatcaccatcatccatctccagaacccttttcatcttgcaaagcggaaactctgtccccattaaaccctcacttctcattccctcctgctcccagcccagccaatcaccattctatgtcctgtctttatgaatttgactgctctagagacctcatataaatggaatcatgcagtatttgtccttttgtaatgggcttattccacttagtataatgccctccaggttcatccatgttgtagcatgtgctagaatattctccctttttatggctgaatactattctactgtatgtatgtacctcattttctttatccattcatccacatgtggatgtctgggttgtttccatctttaggctattgtgaataatactgctgtgaacatgggtgtacaaatgcctct

SEQ ID NO: 848556 - DNA, 478 bp, Homo sapiens
cttttgtggtcttattccaggctctatgatatgggatgaggcaactgttagtctagtaaaatttcactctgctgctgaggccatacgtttctgaaagctttttctgaagtccatggagtaggaagctttctgctctggctggtgggaacacaatctattcctgagactgtgtcagccccagagcttgctttttttttttttttttgctccctttagttgggtctctgccttcttttgcatagttttctcacatttacaagctcatcaacactcatgtaaagacacaagggagcctctgctgatcttgcagcctcttgtgaactgctctctcctcttcctgactctgccctacagacttcaggcctcctgcaacctcagccctatatccccaatgcagggacatggctgagctcygcttggattcccctgcactgctctgtggccaagagacgaaccccgtgaagaaaccaggccaacc

SEQ ID NO: 848557 - DNA, 484 bp, Homo sapiens
ggcatcaaaaataataatatactaactaataagtttaattaaaaagtgctagacttatacattgaattctataaaacgctgttgagataagttaaagaggatttgtataaatggagagatatttcatgcttatggattggaagactcaacaccattaagacaacacttctgtccaaactgatctctagatttaattcaattcctatcaaaatttcaatggcttattttgcaaaaattaacaagctggtcctaaaagttatttatttattcatttatttttttttttttgagacagggtctcactctatcacccaggctggactgcagtggtgtgatcacggctcactgctgcctcaacctcctgggctcaattgatcctsctgcctcagcctcctgagtagctagggatactggcacatgccaccacatgcagctaatttttttaaaatgcttttttgtagagacagagtcccactatgttgcc

SEQ ID NO: 848558 - DNA, 601 bp, Homo sapiens
tgttttagccagttcttttacaatgaaatactgctttacagaaagaagtatttcattgtaaaagaacaaccctgrtcattttatggcaaacgtatggtgatagaatcaataaatagcattcatagaaacaaaaaacgccagttaaagaaatctctctgtcccaagggtgggaggttgaggtgtgtgtctagaattttgtggtgggagctagagggatatggcagcaggctgatatgtatttaagtcttaggcttatcatgcaccgtttgaaaatgttatgcttacattgataagaaaaataattaagataaggcttcctgaaatagagatattttcaaattcttctctggactcgtgatctaactcctgaaatccctgttgtatttcaggttaatttagatttgtcgtgttccaggaacagttcaatagtcatctataaagcatcagtgtgaaggggaaggactctctgggagtcaagcaattaccttggagtccaattccggagctctctgcagttgtgaaaaggaacagaggctcctctttcatcatcgatttgtggggatggactgattaatagttttttttatttttttaacttatg

SEQ ID NO: 848559 - DNA, 653 bp, Homo sapiens
ggtacccactgctgttattcagggagcttcttcagtggtgaagaaaactttaatctcaattaatctgaagtcaaactctgttgatgaacacatacagmcagagggaagatgaccagaaccatttttcattaggaaatgactttcttgatccctaagagtaatggttacttcaaaatctactttgcttaaaagtataggcatttcagctattaaaaaaaaaatttcaacttttattttggatccaagagtgcatatgcagatttcttataagggtatgttgtgtgatgggtaagatttggggtacaattgatctcatcatccaggtagtgagtatagtgcctaataggtcgtttgtagaacctcccccctctagtagacccaggggtctattgttgctgtctttatgcccatatgaatccaatatttagcaccgactcatatgtgaaaacaagcggtatttgttgtactattcctgcattaatttgcttagaatcatggcctccagctgtcatccatgttgctgcaaaggacatgagtttattcctttttatggctgcatagtatttcggggtgtatacataacactttctctttattcaattcactgttgataggtatttatgttgattccatgcctttgctattgtgacgag

SEQ ID NO: 848560 - DNA, 635 bp, Homo sapiens
catttatgaggtgaatgaccaactctttacattaaaatccttctagtcatttttctgtgcatatgaaactcacttcaaatttaatgacataaggargttgaaagtaaagaataggagaagatatctcatgtaaatgttaatcattacagaatagaatttactatattagtatgtgaaaaatagacttcaaagcaaggaaaatcactagatgcaaagagagatgttacataactataaaataatcagtccacagtgaagacataggaattccaaatgtgtgcacaccaaacagtagaaccacaaaatatatgaatcaaagcctgatagagctgaagcaggaaatagacaattccacaatcatagttgggatgtaaaaacctctatgtaagtaactgacagaacttctagagaagaaatcagcattgatacggacaaactctacaccaccaacaaccaactgtgtctaattgaagtgtattgaacatccaaaaaacaacagcagaatatacacttttttaagggcttatggagcattagccaaaatagactataacctaggccatacagaaatcttcacctatttaaataattgaagtcatacagaatatatactctgaccataacagaatgaaacc

SEQ ID NO: 848561 - DNA, 579 bp, Homo sapiens
gttagggaggcataaagttggtgcttcacaaatgcatcctggatgggtttactactgaactgggttttcctaagtgaaggaatctgccttcacttcctatagcctaccatctctctctagataaagagaagcaggccctaaacagcaattaaactgataaaccaagggaaaggcaactaactatcagtctctacaaacattactctccaaagacagtttagcagaatgaagacactccatttgtactgataagagttttctaggatccattgttaagaggcaaaagcaatatatatatattatacacattccccatgtatgtatctgcatatagaaatcttggaaggatacgcaagaaactgataaaagtaactacctatctgttggataatatataattcatcacctaaactgggacacttttgaaaatgaaagagggtgtgattgatcattcactggaacaaagaaggtaaaccggaactgctctggacaaactagttcattccarctaatggaggtggggtgagggagggagtataggggacccagcaggggtaagaatgaaatttttcaatgtat

SEQ ID NO: 848562 - DNA, 594 bp, Homo sapiens
ccacactggggctcttacaaatatgtgtcacatctatagctgtagatctaacgagctctctttcgtgtgcacatgcttctgtacatgagcctgtgagccctccttccttttgtggtttttcagtgttgtggcttagatttatttctatttataatgcttactgtcttgatttattcagttactagttcctgaaaagttggaatttgggaagttttttctttttctttttttttttttggagatggagtcttgctctgtcgccaggctggagtacagtggcgtgatcttggctcactgcaacctccacctcccgggttcaagtgattctcctgccccagcctcctgagtagctgggattacaggcgcctgccactacagccagctaattttttgtatttttagtagagacggggtttcaccatgttggccaggctggtctcgaactcctgacgtcgtgattagcccacctcggcctcccagtgtgctgggattacaggcgtgagccactgtgcccggccagaatttttttttttttygagtcttgcactgttgcccaggctggagtgcagtagcgtgatcttggctcactgcaac

SEQ ID NO: 848563 - DNA, 589 bp, Homo sapiens
gaatttgggcaactttaatgatttttgcaagctatctgccagcctatatgtatgtcctctgtgttcatgtttgttctcatgtgtaaccacctctagctcctacctttttttgggttgctgaatccagmcattgcagatggattttcaaatggatacatggcctttgaagtcacctagttctacttcccaccaatgaggggatttctgtggaaaacacctctacatgtcctcgtctaatctaggggatatcctggattcctccctttccttcggccactcccaagcaaaccttgtttctatcttcaaaaaagatcttagatctctcctctcctgctagcaccattggcactctcctagagtaagcctccttcaccccacacataggcagctagtccctaatagacttactggctattcttccccaggaaccagggtactttctaaaaatgtaaatcagatcatgactctctctctatcctaggctgggttcccagaagcagaccctgacacagaaattcatgagcaagtgttttatttaaaaagagccccaggcagaaactggtaagaaagtagggaaagctggacaggg

SEQ ID NO: 848564 - DNA, 606 bp, Homo sapiens
aaagcttgagcaatgctgtatttacacattarcaactaggctgatggtaagagaggaggcacagatggatttattgatctaccatatggaacataatcttactagactgagagcatacttttatccctaactgtgccagttgttaacagaggaacctcttgtcatttcccaatgttcaatgaaaatttcatgagttaactcagtaatttaaagcagataaaattataatggcatcatcttgtggtgtaccattgaatcccttttgttcccaatgttctgattatattttacattccattccttaatatgcaatgcagcctccttgggggcatgactatatatattcaacagcacataaatattttaataatccaattttgttaaagaaagtgaattagaatgaagtaataaatcaacatcactcaatttaacacacaacctccagacaataatattcctaacacatttcaggaggaaaaaaagattaatcctgtattggaaatccttgaatgagattctataatcttaatttcattgatagcaagttacttcttactcacagttactaatacttactttatttcttcatcttcttgaataaatgac

SEQ ID NO: 848565 - DNA, 632 bp, Homo sapiens
agaagctgggaaagatatgggtttagctgaagtctagcctcagtctgatcccacagggagttctggagcctcagttctgtacacccgtatcaatcagtcattggctgtgagctacccacgggggaaggctgttaccttccaggcattttctgaaattgttggcttgaatggaatcctcagggaaagagtgtgaactattagcagccaacactctcagcagctaagggatgagtacgccagctcattgaagagattctggacaggacaccaacagcatcttcagtaaagatgtacttcaatggtaaggacactgaacccagaaagaaggagtcacatgcaagaagaaatggtggaccaagaaatgtataaacatctggctatatctgaataagcactcttatacacaacaataatggggaacaatggctaatttggagatggagggtatttaaaaggcagaatttaaacaataaacattaataaggaatatggggtaattagtattgaaagtttctaaagcccttgtatttytgaggtgaagggtaaatacattaattaaatttagattttattatgtcaagttatacttgtaaaaatttaatggagctcccagatgtagggagtaaattaaa

SEQ ID NO: 848566 - DNA, 460 bp, Homo sapiens
gtgggagccaagcccatgctggtgccccttctctaggtcacgtctatactgcttgtttggattccttggcaaaaactgactatgcaaagacagtaggatgcctgactcaaattgggtcaatcagatcctttttcttggaatttaaaaaaaaattgcatgaaaacgtatagttaaatgcacaggtcttaagtgtacaatttagagttttgacaaatatatacattcatgtaactgaaccccaaacaagatatggagcatttccatcaccctagaattttcgttcatctccacttccagtcagtctccatccatgatggccaaccaccattctgatttctatcactatacactagtttgatctktgtttggacttcatgtaaatgaaatcatacagtatatattcctttgtaactggctttttttaacctaagaatgtttttcaggcttatccatattttta

SEQ ID NO: 848567 - DNA, 539 bp, Homo sapiens
agtcagaagcatgatttgatatttgatgttaaccaggtaattgaggggataaggtgctttctcagcagaaaagacatagtaggcaaagtctttaagataaaagcatagtgaaagctcaaaactaaaaggaggcttgggtgtctggactccagagacaggaagagtttagagagtctagcagagatagcagagaagactttatctttttttttctgtagcaaccatctttcctgtgaaaaattccctctcctagtactttagttctgtggatccaaaatttatagcattcttctaccaccacaggggtgagtatataataaaaaatgtcagttattcaagtatgtaagaaacttgaaagtcatcactcccatccttacaacaagaaaaatgctgtacaaacagactatcaacaactcattttagatccattagaggactgaggtcacagaaaaactgctgcscccaccctaaatccccattaaattagagagatgggaaaatgcaaagaattatagcctagtggagcaaaagcccaggag

SEQ ID NO: 848568 - DNA, 539 bp, Homo sapiens
agtcagaagcatgatttgatatttgatgttaaccaggtaattgaggggataaggtgctttctcagcagaaaagacatagtaggcaaagtctttaagataaaagcatagtgaaagctcaaaactaaaaggaggcttgggtgtctggactccagagacaggaagagtttagagagtctagcagagatagcagagaagactttatctttttttttctgtagcaaccatctttcctgtgaaaaattccctctcctagtactttagttctgtggatccaaaatttatagcattcttctaccaccacaggggtgagtatataataaaaaatgtcagttattcaagtatgtaagaaacttgaaagtcatcactcccatccttacaacaagaaaaatgctgtacaaacagactatcaacaactcattttagatccattagaggactgaggtcacagaaaaactgctgcgcccaccctaaatccccaytaaattagagagatgggaaaatgcaaagaattatagcctagtggagcaaaagcccaggag

SEQ ID NO: 848569 - DNA, 605 bp, Homo sapiens
cagtgtgttaaaaaaaaggaaacagccaaatgcaaataaagttaagttttagatttcctttaaggcattttattcaaatttgtcctcatagtatcatggaactctagaatcataagccgtctagtcagatcttcaaagaggcaacatccacaagggttgagcatagatcgtggccaaagaactaggtttgaatctggactctagctctgttttattttttgtctctgggaaaagtacttaatttcaccatgtctcatgtctctctctctctctctctttttaaaataggctctcgttcagtcacacaagctaaagtgcagtattgcgatcatagctcactacagcctgggctcaagcaatcctcccacttctgcctctgaagtgctaggattacaggtgtgagccactgtgctcagcctcatctaaatgttcccgatctttttttttttttttttttttccttttttgagatagtctccctcygtcacccaggctggagtgtggagtgcagtggtgcgatctcagctcacttcaacctccacctcccaggttcaggtgattctcctgccttagcctccagggcagctaaaattacaggcatgtgc

SEQ ID NO: 848570 - DNA, 597 bp, Homo sapiens
gccattctcatctttaccatcaacagcagcatcatctcaggagctaattgataggttccaagtcctattgattccagaggtttcgtcaaggacctctcagaccattataaaaatatggtgaacaaccccaggctccaggggctaaatggctggtgtgtaaacaaccagaaaagttctaccctccctaagtggtgcacttatacagaatattccaaattccttccgaaagtcctttcctttgactcaggaaagctattctggttccaaaatctatggttggagtttttcagaaaacaaccggccttaaacatgcaatcagtcgaattttgtttaaccttggcatagtcccccctctgttctatctactttaaacaaacctttagggagattgagagccagagagagtacagagggccaggaggcagcggggcaggtaatcaattgtaccagagatatattttttttaatatcaaggataaaactcttgagaaggggacatgattggggccaggcacagtggctgacacctataatcccagcactttgggaggycaaggttggtggataatttgtggccaggtgttcaagaccagcccc

SEQ ID NO: 848571 - DNA, 527 bp, Homo sapiens
tgaacaccagattttgaaggttttatacaaaaaatatgtatatataaaaaataccttaatttttctatttattacatgatgacatgaaaatatattagatttattggtctaaataaattatataaaatatctaatatatataccttaaagtaatttaatataaacatattattagaatcacttttaactattcctttttttgcctttgcatattgatacataatatttgtacatattcatggcatacatgtgatattttgatacatacaatgtgtaatgatcaaatcaggacttttagggggtccatcaccttgaacatttatcatttctttgtgttgagaacatttcaaatctaggtattttcaaaaatataatgttgttggctatcatcaccctactgtgctrtcaaacagtagaacttatttcttctatccaactgtaggtttgtacccattaaccaacctctcctcatgtcccctctccaacacacctctccaagcctctggtaagtattatgctactctctg

SEQ ID NO: 848572 - DNA, 627 bp, Homo sapiens
agagagttttcatgagatctggttgtttaaaagtacgtagcatttccttcttcacactctctcctgccactgtgtgaagatgtgcttgctcccccttcaccttccaccatgattataagcttcctgaggcctccccagccatgtctcctgtacagcctgtggaactgtgaatcaattaaacctcttttctttgtaaattacccaaactcaggtagctctttatagcaacgtgagaatggactaaaacaggacctacaggaaggagagctggccgggatgaggtgtgccacctcgggacatgaagcacactcactcaactgcccatatacatctctgatagtcacagcccatctcccacctttcctgagggtgggaaatatggtgttgatggactgatgaatcaacaatgtgtttaaaatgacaagcagttgccaggtgtggcggctcatgtctgtaattccagtgctttgggaggctgaggcaggaggatcacttgaacccaggagttccaggctgcagtgagctatgatggcaccactgtactycagcctggatgacagagtgggaccccatctctacaaaaaatacaaaaactacccaggcatggtggcaatacctctagttcca

SEQ ID NO: 848573 - DNA, 567 bp, Homo sapiens
taatgtctcaccaatatttgatcccacattcttttgctgtaggattttgataactaaggctaaagaagttccttcaattcatttttttttttttgctaagtgctkattttttaacattatagtatttgatacctacaaaataatacacatgcaagttatggattataatattgtggaatcacaaatacttgtgagtccacaaccaacttaagaaatagtttgttgagtctatatgtgaactgtttcacctactatctctttgatttctttccctgcaaaggtacccatcttcctgaaagttgtgtttaatcatccttttgctttttaaaaagtctttactgcatatgtgtatcctcaaacaatactgttgagttatacacacacacacatgcacacacatatatacacctacatatgtatgtatatataaacacatatatatttatatgtatggtgtctttggtgactcacttcttttactcaacattatgtttataaaatttttaagattcagccacaaaaatatatatagtagtacttcattaattttcactattgtacaatatg

SEQ ID NO: 848574 - DNA, 567 bp, Homo sapiens
taatgtctcaccaatatttgatcccacattcttttgctgtaggattttgataactaaggctaaagaagttccttcaattcatttttttttttttgctaagtgcttattttttaacattatagtatttgatacctacaaaataatacacatgcaagttatggattataatattgtggaatcacaaatacttgtgagtccacaaccaacttaagaaatagtttgttgagtctatatgtgaactgtttcacctactatctctttgatttctttccctgcaaaggtacccatcttcctgaaagttgtgtttaatcatccttttgctttttaaaaagtctttactgcatatgtgtatcctcaaacaatactgttgagttatacacacacacacatgcacacacatatatacacctacatatgtatgtatatataaacacatatatatttatatrtatggtgtctttggtgactcacttcttttactcaacattatgtttataaaatttttaagattcagccacaaaaatatatatagtagtacttcattaattttcactattgtacaatatg

SEQ ID NO: 848575 - DNA, 392 bp, Homo sapiens
atgttaatttaataatgttgaattttaatagccttaaagtcaagcattaagaaaaatgctcagatcatacaattttatgaraaatagactattcaactcttaatgattcaacataaagggccacttcagtgaatgttcaaaatgtattatcacttctgtggtgatctaatcttatttattgaatctggtaacatatatttatgtatatatgaatatgagaatcttaatatatattttaatatatatattattacattattctgtgtaatatactttttgagttcttaatatcttatattttctataaagtcatatatgtggcagatacatatatggagatatttcagattattgtattgcaagctgaggaatgtagtatcttcagaacttgc

SEQ ID NO: 848576 - DNA, 424 bp, Homo sapiens
ttccagaagaccctacctcttatattagagagtttcagtgcctcacccagtcttatgaactaacctggcatgacctctrtgttatcctctcttccaccctcaccccagaagactgggaccgtatctggaccctagctcaggcgcatgctgatacaattcatcaccaagctcctgcccagcctagtgacacagaggcagtccccaaccaggcttagaggcatccccctaagaccagatgatcagtgagtgcctggcacatgccagagccttcttggaccaacattggatctttggattggagaaaccaagagaggccacgtggatttttctctgttaacccggctcctgggaaatttatcagtagatgagatcagtgactggtgtgcatgcacagagaggtgactggaggctgaggagcttcctt

SEQ ID NO: 848577 - DNA, 424 bp, Homo sapiens
ttccagaagaccctacctcttatattagagagtttcagtgcctcacccagtcttatgaactaacctggcatgacctctatgttatcctctcttccaccctcaccccagaagactgggaccgtatctggaccctagctcaggcgcatgctgatacaattcatcaccaagctcctgcccagcctagtgacacagaggcagtccccaaccaggcttagaggcatccccctaagaccagatgatcagtgagtgcctggcacatgccagagccttcttggaccaacattggatctttggattggagaaaccaagagaggccacgtggatttttctctgttaacscggctcctgggaaatttatcagtagatgagatcagtgactggtgtgcatgcacagagaggtgactggaggctgaggagcttcctt

SEQ ID NO: 848578 - DNA, 644 bp, Homo sapiens
cttctgtgaacattagctaagagcaagatcaaatatctccgctcaagttctcatggctgtttgwtattcagttctcttaccttcattttctctccgattgtcttgctgcataggttcttcagcttgttcaagttgtctgcccgaaatctacctaggaataaagaatccaagactataccaaagaaatgcccataattaagatactcctttctcctgatcttgacttcttagtactgatttcaggttaaggcccaaatgccggcagagctgaaggatctgcctcatgaagttataaaatcttacagctttttatttttattttttgagacagcatcttgctcttgttgcctaggctggagtgtaatggtgcaatctcggctcactgcaacttctgcctcccaggttcaagcggttctcctgccacaacctcccgagtagctgggattataggtgcccgccaccacactcggctaatttttgtgtttttggaagagacggggtttcgccatgttggccaggctggtcttgaactcctgacctcgccctcccaaagtgctggaattacaggcgtgagccactgtgcccggcctaatcttagagctttagagccccaaatgtagttggcatacaatggtgactacaat

SEQ ID NO: 848579 - DNA, 644 bp, Homo sapiens
cttctgtgaacattagctaagagcaagatcaaatatctccgctcaagttctcatggctgtttgttattcagttctcttaccttcattttctctccgattgtcttgctgcataggttcttcagcttgttcaagttgtctgcccgaaatctacctaggaataaagaatccaagactataccaaagaaatgcccataattaagatactcctttctcctgatcttgacttcttagtactgatttcaggttaaggcccaaatgccggcagagctgaaggatctgcctcatgaagttataaaatcttacagctttttatttttattttttgagacagcatcttgctcttgttgcctaggctggagtgtaatggtgcaatctcggctcactgcaacttctgcctcccaggttcaagcggttctcctgccacaacctcccgagtagctgggattataggtgcccgccaccacactcggctaatttttgtgtttttggaagagacggggtttcgccatgttggccaggctggtcttgaactcctgacctcgccctcccaaagtgctggrattacaggcgtgagccactgtgcccggcctaatcttagagctttagagccccaaatgtagttggcatacaatggtgactacaat

SEQ ID NO: 848580 - DNA, 613 bp, Homo sapiens
attttatacctgaccaaaacatgttctgatatgtgtaggacagagacctggatgtgctttgatcgttaatgaggtggtcacatgagaartgatacctgttactactgtattgtttttagagtcctgaagtctggaggctagacttcctgaaagcaagtcaagaatatagagcaccttgcaggagttcaagatggcctttggaaccaattatgtatttgtttcctcctacagtggagcagcattcaaatcaaatatttacatattgcttatcactttttctccattttaataatggaatgaactaaaataaacaagaacaaaagaatagtataattatatcagtaacaagaagactcaaaaaagaaacaggagtacctatccctatctgaattttcaagttccccattggatgaccagactggcaaccatttcaaatcccagtctatttcattgaaatttcttggttaagtttaattttctctgggggcatgatctcacaaagaatactcaagtctttttcttcttatggaatcatcgaaactgctatttatcataatcaccacttatgagcctgggtttgggattttgtgcatgtagttcagtctagtgttgg

SEQ ID NO: 848581 - DNA, 610 bp, Homo sapiens
gaggcactgtgaccggcctattttcagccttcttaaagctttactcttcccatctgaaaggcctttatccaattccagcaaagccctrcacatctttcctattctcacaagactaaaagctttcacagaacctttcctgatttcccaaactttgagtgattcttccatgtttgtacatccatagttagttcataacttctacaactcttcacattctgccttataataatcatttgtggacatgtctttacctcttctattaggttatcaggtgcttaaggatgtagacagtatcctagtcatctttttattcctcttgacaacaaatttactgaataaacaccctagttctcagaggccgatactctttccaccaggccaggctgcctcatttaagggtgattgtagtccattactcttgattctgagttttctatcaataaaagctttatcaaaaccatacacactaagaaaagtctacgccttataaaaaagatggcacgtattgctttctttttctgcaaatgtagaaaatacacagcaaacaatgattcacagagtgtcgggagggcctagtgtcagggatccttaattagtaaggaatccaaaa

SEQ ID NO: 848582 - DNA, 588 bp, Homo sapiens
aaataatgcctacaaaacactcagaaccacacctggcakaaagaaaggggctagtaaatattaattaccattgatattgctatttttttttttttttttgtgagacagagtctcaccgtgtcacccaggctggatgcaatggcacagtctcggctaactgcaacctctgcctcctgggttcaagcgattctcctgcctcagcctcctgagtagctgggattacaggcgcccaccaccatgcctggctaattttgtatttttagtagagacggggtttcaccatgttggccaggctggcctcgaactcctgatctcgtgattcacccgtctcagcctcccaaagtgctgggattacaggagtgagtcaccacacctggctgatattgctattatttcctaagattcttacaagaacaaaacaaacttgcacagaggagactgctgagctatagaaaggtctgttggctgggaagtagactgtattgctgtttgcaattattcatgccctcgttcccattgaaagtgatacacatcctcacccctttgactttgggcttcattgcatggcatgcttcagctcacagaatg

SEQ ID NO: 848583 - DNA, 577 bp, Homo sapiens
tttaaatacttactctaatttttgtaatcagcaaatatattggtaggaagtaaattaataaactattaatcttcaaaattatttgttacacttcagcttttacagatgcatatttggcttcattccagaattgaaccattgaaaccctcacccccacacctgtagggtagaaagactacagggatgagtttttaaaccatgagtaaaattcagtgttttgggccagacacggtggctcatgcctgtaatccctgcactttgggaggccaaggcgggtggatcacctgaggtcaggagtttgaaaccagcctgcccaacatgatgagacctcgtctctactggaaaaaaaataaaaataaaaaaataaaaattagccaggcggcgtggcacattcctgtagtcccagctactcaggaggctgaggcaggagaattgcttgaccccgggaggccraggttgcagtgagccaagatcgtgccactgcactctagcctgggcaacagagcgaggctttgtctcaaaaaaaccaaaaaacaaataaacaaaattcagtgttttgtcccatttaaactagttt

SEQ ID NO: 848584 - DNA, 577 bp, Homo sapiens
tttaaatacttactctaatttttgtaatcagcaaatatattggtaggaagtaaattaataaactattaatcttcaaaattatttgttacacttcagcttttacagatgcatatttggcttcattccagaattgaaccattgaaaccctcacccccacacctgtagggtagaaagactacagggatgagtttttaaaccatgagtaaaattcagtgttttgggccagacacggtggctcatgcctgtaatccctgcactttgggaggccaaggcgggtggatcacctgaggtcaggagtttgaaaccagcctgcccaacatgatgagacctcgtctctactggaaaaaaaataaaaataaaaaaataaaaattagccaggcggcgtggcacattcctgtagtcccagctactcaggaggctgaggcaggagaattgcttgaccccgggaggccaaggttgcagtgagccaagatcgtgccactgcactytagcctgggcaacagagcgaggctttgtctcaaaaaaaccaaaaaacaaataaacaaaattcagtgttttgtcccatttaaactagttt

SEQ ID NO: 848585 - DNA, 613 bp, Homo sapiens
tgcctgtcataaagtagtgattgatttattttgctgaaattcgtagttcaggtcatctgtgctggatttgctatcacatatatggccaaggcataaattgtgctrtaaaattatccattcgttttttttcattatctatgtcatttttcattgtggactgtttaataatatattagcctcaatactttttcccatttataaatccaagccttttcattcctaaaagcacacgcatattatttttgtgccttaatctttttttttttttttttggtgagttttgagctctgtgtgatccctgcatagttcatttgctccactcccctaaacgaggtctgtttttcctgtttcaccttctccctctctggaatggccttaggaaaaacactttccagtcctgttttaactcttttccatttcttaatctggattgctttatatttacttaatctgtctgcacatgtgatatcccaaatattataaagaaaatgatgtgtttttacttggcttttggcagttcctcaacatttgggttagactaattaatgatgtgatacacttctgtaataccaggaaaaaatttttataaagagagccattttgtttatatata

SEQ ID NO: 848586 - DNA, 615 bp, Homo sapiens
agggccagtgtttgctggggatgtaagttcttcagtgagattgatggagcagttggtggacatccttgatgcacagctgcaggaactgaaacctagtgaaaaagattcagctggacggagttataacaaggtagagagaactcttctgttattttgaattagacacttggtatggcagctctttcttgtcttatagcagttgagagccaaatctttggccccgggacatatacttagaagcaaaatttctaatttggttcatttttccaaggaagaattacagttgagaaaagagcaatgtgccctgccctcccaaaagagtgtaaatgatgttaattacctgagagagatcttagttggtggcaaactttatctatctgattgtggtcaatactgtaagtttataatgcattatctgcacttggagagattatatgttatacagttgatatactttatatgctaatacatggaactcttatagttgcagcaaaattttgacacatataggaatattagmcactgacatatttctttcaatggcagcttttggaagaaggacaagttgccgtctccaggaatatattgttatcagtgccattaatttttcctatt

SEQ ID NO: 848587 - DNA, 634 bp, Homo sapiens
ttttttcattagtttactgatcacgtttgacacagctgttaccamgtattgtgtttaaaaaaacagttgaggagatgtgattcctctgctgtgccttaaaatgcaagttgatacttacgtaactacactgtattggaagattgtctacagaatgtttggctgttgtgataagtagagtgaataaatgcccacagataaaaaagtggatctccaaataggcaaagaaaaataaatttgtgtggttatggtactcatatctgcttcagttgattgactcttttttttttttttttgagacagagtctcgctctgttgcccagtctagagtgcggtggcgcgatctcggctcactgccagctccacctcccgggttcacgccattctcctgcctcagcctcccgagtagctgggactacaggcgtcctccaccacacctggctaattttttgtatttttagtagagacggggtttcactgtgttagccaggatggtctcgatcttctgaccttgtgatccgcccgcctcagcctcccaaagtgctgggattacaggcatgagccaccgtgcccggcctatttgattgactcttaagagcttgtaggtactaacaatatgatttacattgctgctagt

SEQ ID NO: 848588 - DNA, 429 bp, Homo sapiens
gtgacagtacaagactctgtctcaaaaaaaaaaaaaagttttattcatttgctagaggraggtcatagaattgaacataaccttcccaatcactaccatgaaaaggaaaatactatcagttacaatatttacagattccatacgaaaaaagaaactagtcactaaggaaaagcacaactatttgtggttctgagatgagagtaaaattcctccatgcatcctaagcagaggctgctgcctgatttaacgaagagcatctgtaaacctgtccttctgggaaacaaaatgacaaagtgcacaaagctgtttcttaggacatccctcaatataggctgatggtatcatgacaaaatgcaattcagtaaaagcaactttatgagggtgccaatatggtatatccaggtactaagcttactgatgttctactta

SEQ ID NO: 848589 - DNA, 620 bp, Homo sapiens
ttatgtgtgcaagttttgattgaggatatcagccatgagtaagctggggctgactaatcaagcctcagccctcacaaatgtgacttgtgtcttctcccttcagcctaggaaagagcctggaagatgttccacaggttgcccttttcccagtatgccccagaccacagtgagaagagacacagacatcttgagatgtgtataaatattgctactactttggcttttacacccttcctgaagggtagaagagttgaaatacttttgtttttttgaagcagggtcttgctctgttgcccaggctggagtgcagtggggcaatcttggctcattgcaaccactgcctcccgggttcaagcaattctcatgcctcggccacccaagtagctgaaattacagggatgtgccactacaccgggctaatttttgtatttctagtagagacggggcttcaccatgttggctaggctggtctcgaactcctggcctcaagtgatccacctgcctcagcctcccaaagtgctggrattacaggtgtgagctaccatgtctagccgaagagttgaaattctgacatctccaaccaatagactcagctggctaaaaaatgtgcccctagtatt

SEQ ID NO: 848590 - DNA, 620 bp, Homo sapiens
ttatgtgtgcaagttttgattgaggatatcagccatgagtaagctggggctgactaatcaagcctcagccctcacaaatgtgacttgtgtcttctcccttcagcctaggaaagagcctggaagatgttccacaggttgcccttttcccagtatgccccagaccacagtgagaagagacacagacatcttgagatgtgtataaatattgctactactttggcttttacacccttcctgaagggtagaagagttgaaatacttttgtttttttgaagcagggtcttgctctgttgcccaggctggagtgcagtggggcaatcttggctcattgcaaccactgcctcccgggttcaagcaattctcatgcctcggccacccaagtagctgaaattacagggatgtgccactacaccgggctaatttttgtatttctagtagagacggggcttcaccatgttggctaggctggtctcgaactcctggcctcaagtgatccacctgcctcagcctcccaaagtgctgggattacaggtgtgagctaccaygtctagccgaagagttgaaattctgacatctccaaccaatagactcagctggctaaaaaatgtgcccctagtatt

SEQ ID NO: 848591 - DNA, 618 bp, Homo sapiens
gtttatggcaaaattctagtaggaaaacttacaaaaaatatacaaacttaacagtaaatttaaaggtattccatccaaaccatggtccatcattcagctgtaacaagattgagacagatcctgtctctgtttggaaaggcagtacggtagagtggttaggagcacagggtctgaagacagacagccagggttcaaatccggatcccaccacttacaaactgtgttgcttgaccctctggccattcacactcctctttggtaaagtagggattgcaatagtgcctgtcctttaagcttgttaggagcagtaactgagttaattatgtgaggtgcttataactgtgcctggtacaggataactgctcacaacctattggcctgtagcctagaaagactgtccatgaggaaggccgagtgctgaggaatgtacataggatgataccatttttagaaaaacaaaaattgagcaggtgcagtagcacaagcctgtaatctgagatactcaagatgctraggcgggaggatcatttgaagccaggaattttgagaccagcctgggcaacatagtgagactccatctcaaaaaaaaaaaaaaaaggctccccatcttccccactt

SEQ ID NO: 848592 - DNA, 623 bp, Homo sapiens
ggtagtgagttccctgtcactggagagttcaagtagaggccgaacatccagggggctggatgttgtgggaagaactgtagtaccaggttacaaatttaatagactcttgtctccacctatgattccataatggaaacaataatgttaaaatcaccatataattttgcagaaccttggggtatttggtgattatcctcatttacataaaaagttaacttgcccagggtcatttagctgataaagaggctgactgtgaatccagagctctacatgccccattattctccaagttaaactttcgtggctgaaagctacttggaagaacatttattgagcagcgactgcatgtgactctctgagctgagccccaggcaggaggctcagggacttgcagaagccagagactgctctctgagagttggcagtcctattcagggacaaagagcagacccagaaagagaaaacaagtgctttcagggcagtgggagctcagaagagggagtgatgctctgggctggggcgcagatcgggggtgggaggacactgcaagaggggaaggtgtccgtgcctaccaagccwgctgcaggccataggctcctgggggccttttatttcttacttta

SEQ ID NO: 848593 - DNA, 623 bp, Homo sapiens
ggtagtgagttccctgtcactggagagttcaagtagaggccgaacatccagggggctggatgttgtgggaagaactgtagtaccaggttacaaatttaatagactcttgtctccacctatgattccataatggaaacaataatgttaaaatcaccatataattttgcagaaccttggggtatttggtgattatcctcatttacataaaaagttaacttgcccagggtcatttagctgataaagaggctgactgtgaatccagagctctacatgccccattattctccaagttaaactttcgtggctgaaagctacttggaagaacatttattgagcagcgactgcatgtgactctctgagctgagccccaggcaggaggctcagggacttgcagaagccagagactgctctctgagagttggcagtcctattcagggacaaagagcagacccagaaagagaaaacaagtgctttcagggcagtgggagctcagaagagggagtgatgctctgggctggggcgcagatcgggggtgggaggacactgcaagaggggaaggtgtccgtgcctaccaagcctkctgcaggccataggctcctgggggccttttatttcttacttta

SEQ ID NO: 848594 - DNA, 550 bp, Homo sapiens
aacttttgaggaggaaagggagggacatttttttaaaagcactctgcagtactcaaagcaytttggccataaaattatctcttttgtgttttactagggttttatctcgtgagatagacaagataatgcttattctcatcttaagagttaagaaactctcggtcccaaactcagaaagttttgctacagccattggaaaaatgcagtaaagttctgtgtcctcttcttttttcctaattatacctcacatacagcaagtagctaggattgggctctgtataagtaagggtattatatttgatgtatccatttctatggttgattttagtaattacttagggtttagttattttgactgtcaacagacagttctaaaaagcccaaaggcatatttggtatcatttctatcacctttctgctttatcacggatgagagttaacttagaagtttcagaaaaaaaaactaaaaataaaattatacttttcagctggataatagaggagaatgtgtaggagtttacaatctatgtatgcatggttgacaatttta

SEQ ID NO: 848595 - DNA, 550 bp, Homo sapiens
cacatacacatttatacatataaatgaaaatatatttatatctttttccctaaatttgccactgccaggtagggagtgctgatctttastcctaaggggtgtcaggaaaggcctccctgaggaagaaacatttaaactgacagaccctaaggcatgaatggcaagtagaacataaagaaggaagggaaaagaatattccaaatatatgaagtattggattggaaaattctaaatgtacagaaccactcattgtttttcagaaacagggagaaatccgggcatggacgcttagtgtgctagagggcaaaggcccacgtggctccgtcatccggggcttttcatatcttacgctgacccgcctgacttctctgatcctcagtttccacatatggatgctaagacaatacattcctccgaggcagatgtggagaattaatctgagaaatgtaagcgtaagactggatacagaaccttggctgactcttttctctttcttgctgtaactcccctgactacctatggaggtttttgtattgttttgtgagagaca

SEQ ID NO: 848596 - DNA, 625 bp, Homo sapiens
catgctggcaaatatgtggtaaaacagacggcatcatacatctagcagtacaactttttagaatataatttgatcaaaaaaagcccaagagccttaaaaatatccacacatgttgacctagtaatcctagaatttcaatgaaggaaataatgacagtagtgttcaaagctgtgctcaaagatacagataaaacctgcatggctaacaatatggtttttactaaattatggtatactcctatgctagaatgctttatgttgattgaaaatattgttgtagaagaataattagtggaaaaatgtggataagtaaaaaataggttacaaagcagcgtgtatagtttaatttcaactttgaaaaaattatttttatgtaaacaagaatggtgatatatacacaaaaaaatcttgattgggtttatatctaagtggtgagatttcacataatttgcagtttttttctttatgacttttctacattttataaattttctacaataaatatataatacttttataaacwgaaaaaagcataaggaccaggctctatcaactaccactgtgtaactttgggccagcaattaagcactctgagcttcaggtctaccaccagtaaaactgcatgt

SEQ ID NO: 848597 - DNA, 646 bp, Homo sapiens
aatctggcactaaaatctggctctactgctatttagctgcgagaccttgggcaaattacttaatatttcaaagcttcggtttcttcatttgtaagatgagaataattgtacctagytcatgttgtggctttaatgtcagtttttaaaaagaaaatatataaagtgctgcacaaagttctagtacatagcaggagctaaataaacaacagctgttgttaatagttaaaatgctgcatttcatcatgtggtttcggtcaagtttttgaactttctttctttctttttttttttttgagatggagtctctctctgtcacctagactggagtgcagtggcactattttgccttatagcaacctctacctcctgggttcaagcgattcttgtgcctcaacctcctgagtaactgggattacagacacgtgccaccatgcctggctaatttttgtgtttttgtttttttagtagagatggggtttcaccatgttggccaggctggtcttgaactcctgacctcaagtgatctgcccgcctcagcctcccaaagtgttgggattacaggcgttagccacggcgcctggccaagttatcgaactttctgtgcctctgtatcctcatctctaaagtgggaattttgatggcaatc

SEQ ID NO: 848598 - DNA, 598 bp, Homo sapiens
atgcaactatatctgattataacctaagtgacatacatcacttccaggccaaagtgcataagcattggatgcaaccctccagctccttcttctcctgtctggataactatraggctttgggtggtaatgtagaagcatccatcagctcgggctcagtatgactctgtgcatgagtggccctgccagcccagatggtacctgtagcttgaatgaaagatgaatattggtcattgatattttatggttaacttagcctatcttaatatattaaaccacaggtcttccagggtaatatacatcaggtggtgtttataaattttaatttctgcaactggaaaaatattgctcattcattctttactccttttattaattcatctatccatgcatttatctgcctatatattcaacaaatatttgtttagcaacactcattgctagatactaatctgggtgctgaggatatattaacaaaaagccctattacccccgccttcttggggccataacctagctggagaaacagacaagaaaaatccataattacaatcccatggggcaagggctgtgatcagtaagccctcctatgttataggag

SEQ ID NO: 848599 - DNA, 630 bp, Homo sapiens
tgtttccttttgctgtgcagaagcttttcagtttaatatagtcccatttgtctatttatgtttttgttgcccatgcttttgaagtatttgcctagatcaatgtcctgaagyattttctctcttttcttctagtagttttatggtttcaagttttacatttaagtccattttttgagttgatttttgtatatgttgagagacaggggtctagtttcattcttctgtatgtggatatcctgttgttttagttttcagaatttattagaattatttttagctgtcactgacccacagaattttgtattggatttcctattgtctccaaataggcaagaaaaaaaaacaagaaacaccatttcccatttcttaagttacggttttttcttttaactcagttgcacttcagaaattaagcttttctttatcagatatacttaatcagtttatcatgatcctaaaacaaacttttttcttaactgttctttgttataattgttttatttctggcaggggaatttggtgatttcagttgcagtacttcataatatgcatggggaaagaggattattttggcctctcatcatactatgtatttgttcctattctgtcttttatgccagataattatat

SEQ ID NO: 848600 - DNA, 603 bp, Homo sapiens
  misc_feature 365, 425: n = A,T,C or G
agtgacattctctatgaaagatgaaatagacaaaagaaagataaaacaggagacataatatttggacgtagaggcgataattgtaccagaaaacttaggttaagaaagagttacttcagtcgcgcacacttcgctgtgaaattcatggaagtcataacagaaagggaaacatgagccagtgtgtgcctctccttgggtaataaaggagagacatgccattttatagctctaaaggtgtgtttcctatggaacttaaagagacagtggaccttacaagagcttggttttgcagccgcctacacccttctccagtccttttcccatgtatttgtcctgggcctcttctttaaaaggttccagaactntcaaccattctctgggtcctgcctgctgctctgctgcttttgtggagctgtgtttattgnacttatcttctcttctcccttctctctcaaagaattcttaaataagaaaagatctgwtgctaaatcatgcaagttgatctcagtctagctgcttccttttcctctttaccttgctaacttcttagccttcaaatcttatttgaaacattacttcctcagggaggcagcctttgaccct

SEQ ID NO: 848601 - DNA, 522 bp, Homo sapiens
tctcgctcaaaaaaaaagacagtgtcctaggagaaaaacaaaaagtatgaaggccttttaaatacacacacacacacacacacacacacacacacacacaccccttggatgttaccttttaattaaactgacttttaaccattgagcttcttttaaaaaactttttaaatctcattaccatatttcagctggcacaaattgctactattgcagaagtaccaagcatcaaaccagaaagggcttgatttaggaaccaaacccaggctgtcccggtggaaaaaaaagaaggcagaacccttagctatggaactgcagcatggggcgacagccatcactcttttggtttggcatggctagcaaaaaggtggccgtgtgacgtaaataaagccctttaagtagtcaaaaaatctttccttttttttttccccttttgctggccattyccccccaccccccacaccgacaacacttttgtgtgtgttgggggtgagggggatttagccactttagaggcctcgttcc

SEQ ID NO: 848602 - DNA, 522 bp, Homo sapiens
tctcgctcaaaaaaaaagacagtgtcctaggagaaaaacaaaaagtatgaaggccttttaaatacacacacacacacacacacacacacacacacacacaccccttggatgttaccttttaattaaactgacttttaaccattgagcttcttttaaaaaactttttaaatctcattaccatatttcagctggcacaaattgctactattgcagaagtaccaagcatcaaaccagaaagggcttgatttaggaaccaaacccaggctgtcccggtggaaaaaaaagaaggcagaacccttagctatggaactgcagcatggggcgacagccatcactcttttggtttggcatggctagcaaaaaggtggccgtgtgacgtaaataaagccctttaagtagtcaaaaaatctttccttttttttttccccttttgctggccattcccccccmccccccacaccgacaacacttttgtgtgtgttgggggtgagggggatttagccactttagaggcctcgttcc

SEQ ID NO: 848603 - DNA, 665 bp, Homo sapiens
acctctgaaggcagattgaacctagatgtgttagaagtgtggcttgtacagactacaatgtttgatctagaacttatgctggttcgtggtctttcctgggtttgatactcagtgactagtcactgggctcytcagggcatttcgtaataatttacagacatgaagaattcttttcactccagtcagccagttcagatccttccagatgccagggttgactcacactgcattctttgtgactactctgccccccatcttcatcagcacgagtgctagaagagagaaaagacgatttactttcacttgttgtgtggccctgggagaaacaggaacacttggagctctttcctttttgaaaatcaactctgggtcccatgtgcacagactgcataccagagacaccaaggaagagaaccaggagcaaggaagatgagcgccccctcgcagggctcccctgcctagtttttcggaagttaccactcttattcattttttactgtatctgctagatcagacaactgtgtatcaagtcaagatagaggcttcctaagagaggtgataaaagagatggataaaagtggtggttggatgtatttttatgagcagggcaatgaaacattctgtgatttaagaagtgcactcagtgatgaaattccttttcctgg

SEQ ID NO: 848604 - DNA, 592 bp, Homo sapiens
tcatttttatgttccattcaatagatatttgttgatcatctaccatgctctccaagccctatgctaggaacctcagcatagaaggtatagcacctactcacagggaacttacattcctrggggacacaaactaacaggcaattccatcatgagatacaatgaaaactctaaaatttaattctatctgataacagatcaattctacttaaccttctaagaaatgacagaataccatctctgggttttaaagtaagagtgaataagcaacatatccttcctatcatgatgatatcaacataataaagcagaatacttcattgttacttgtggttttccagggacaaaaagcattactgtgtgtatgtgtgtgtgtgtgtgtgtgtgtgtgtgtgtgtgtgtgtgtgttacaatgtacaattgttatttatgaattatcactatacagtaccgctaactggaatatgagcccctatatttcccattcatatactcaaggccaccattcactgaataaatccaacattcattcaatacaaattaatgagtactctgtgttgcagcattatgctaggccctgggttaatacagatgg

SEQ ID NO: 848605 - DNA, 616 bp, Homo sapiens
taattttttcattaccttagtaaagaaatagggttaggcaaagckttctgcttctcttctctactagaaaagatccaagtccttctccattcattaaacatggtcacatgtctcatatatacatacaaatatatacatgtaaactttcactgtgagaattcttatccattgatttgtagatcacaaggaacttgttgagcaatgacagctgctgcttttcaatgcactggcatggttgggagggggctggggattttgccttttggcacacaagtcaataaacacactggagattaacagcaaagagataagaagcttgggtgtggggaggactagaatgatggtttaggggaaaaggaaaaaggagggaatttcaggaaaaggaatcgaaattatagatcaaatgaccagataacaaaaagaaggggagagattcaataaggttggaggaaagatttagagagaaaacaagattggaggaaggaaagtggagtggttaaggataagaaagaaattaggaacagaggcaaagagagaagaaaaaggtggcaaccagctggtcatccacttgagaaagaaagcatgaaggaaaatatttaagaataagtaaatacag

SEQ ID NO: 848606 - DNA, 552 bp, Homo sapiens
ctccaagtccccaccccactcaggagcccagctggcttctcctagtggatcccgtgccagggccataggcggagctgcccaccagtccagtgctatgtgcctgcactcctcagtccttgggtggtcaatgggaccaggcactatagaacaaggggcggtgcccgtgggggaggcttgggccacacgggagcccaggagttgcggcgggggcggtgttgcttgggcatgggggtgctgcaggtcccaagccctgcagcatgggaaggcggctgaggttcggcgagaattcaaccacagcgcgggtgggccgtcagtgctgagggacccggcgcaccctcctcagctgctggtctgggtgctaagccccttactgcctggggccggcggcaccagccggctgctgggagtgtggggcccgctgagcccgcgcccaccaggaactcatgctggcctgygagcactgtgcacaacctcggttcccacctgtgcctttttctccacacctcccagcaagcagagggagctggctctggcctcagccagaccagagag

SEQ ID NO: 848607 - DNA, 598 bp, Homo sapiens
ccaagtccccaccccactcaggagcccagctggcttctcctagtggatcccgtgccagggccataggcggagctgcccaccagtccagtgctatgtgcctgcactcctcagtccttgggtggtcaatgggaccaggcactatagaacaaggggcggtgcccgtgggggaggcttgggccacacgggagcccaggagttgcggcgggggcggtgttgcttgggcatgggggtgctgcaggtcccaagccctgcagcatgggaaggcggctgaggttcggcgagaattcaaccacagcgcgggtgggccgtcagtgctgagggacccggcgcaccctcctcagctgctggtctgggtgctaagccccttactgcctggggccggcggcaccagccggctgctgggagtgtggggcccgctgagcccgcgcccaccaggaactcatgctggcctgcgagcactgtgcacaacctcggttcccrcctgtgcctttttctccacacctcccagcaagcagagggagctggctctggcctcagccagaccagagaggggctcccacagtgcagcggcaggctgaagggctcctcaagcgtggcc

SEQ ID NO: 848608 - DNA, 598 bp, Homo sapiens
ccaagtccccaccccactcaggagcccagctggcttctcctagtggatcccgtgccagggccataggcggagctgcccaccagtccagtgctatgtgcctgcactcctcagtccttgggtggtcaatgggaccaggcactatagaacaaggggcggtgcccgtgggggaggcttgggccacacgggagcccaggagttgcggcgggggcggtgttgcttgggcatgggggtgctgcaggtcccaagccctgcagcatgggaaggcggctgaggttcggcgagaattcaaccacagcgcgggtgggccgtcagtgctgagggacccggcgcaccctcctcagctgctggtctgggtgctaagccccttactgcctggggccggcggcaccagccggctgctgggagtgtggggcccgctgagcccgcgcccaccaggaactcatgctggcctgcgagcactgtgcacaacctcggttcccaccygtgcctttttctccacacctcccagcaagcagagggagctggctctggcctcagccagaccagagaggggctcccacagtgcagcggcaggctgaagggctcctcaagcgtggcc

SEQ ID NO: 848609 - DNA, 627 bp, Homo sapiens
ggcatgatctcggcttactgcaacctccacgtcccagcttcaagcagttctcctgcctcrgcctcttgagtagctgggattacaggcgggtgcttccatgcctggttaatttttgtatttttcacagagacagggtttcaccatgatgatcaggctggtcttgaactcctgacctcgtgatctgcctgcctcagcctcccaaagtgctgggattacaggtgtgagccaccacatctggccatgtacatgctttttatcagattggggaagttcccttttatttctagtttgttgaatttttttatcacaaaaatgttgcttgttaaatactttttctgcattgagatgataatatgacttttgtcccttattctattaatatggtgtgttacattaattgatttttaatgataagttaaccttgtgctcctgggataaatcctacttggtcatggtacataatcctttttatatgttgctggatttagtttactagtatttttttaaagaattttcccatctctattcagaagataattcaccagagctattttttttccttatgatatctttgtcaggtttttatatcaggttaatactgaatttatagattgatattaattctat

SEQ ID NO: 848610 - DNA, 486 bp, Homo sapiens
ctttttagaaacatcagcaatttaccaaaggtcaatcattcttctgatttacaatatgtatttgtccatcccaggttttgctggactaagcaygcacaaaattaaactgagatttcaactagtttacatgttctgaaacctgcagagttgtgataagcatttgacaagattttgatctgcagggttcttccttctctgttaatttattagtcaaggtggaaaatagctggtccacatgcttcagagaaaactctgtgcaatggttgactaaaatcataacaactaaggtgagtgatcacttgctacctgccacacttccttccattccctcctccatggcactatgaggaggtgctccctctagcctcaggttacagatgagcaaactgaactgagagaggagtgttttacctgcgatcacacaggagaatgtagatgcagctcagaaaatgtttccttactgatggtgattaatggttcataatt

SEQ ID NO: 848611 - DNA, 486 bp, Homo sapiens
ctttttagaaacatcagcaatttaccaaaggtcaatcattcttctgatttacaatatgtatttgtccatcccaggttttgctggactaagcacgcacaaaattaaaytgagatttcaactagtttacatgttctgaaacctgcagagttgtgataagcatttgacaagattttgatctgcagggttcttccttctctgttaatttattagtcaaggtggaaaatagctggtccacatgcttcagagaaaactctgtgcaatggttgactaaaatcataacaactaaggtgagtgatcacttgctacctgccacacttccttccattccctcctccatggcactatgaggaggtgctccctctagcctcaggttacagatgagcaaactgaactgagagaggagtgttttacctgcgatcacacaggagaatgtagatgcagctcagaaaatgtttccttactgatggtgattaatggttcataatt

SEQ ID NO: 848612 - DNA, 486 bp, Homo sapiens
ctttttagaaacatcagcaatttaccaaaggtcaatcattcttctgatttacaatatgtatttgtccatcccaggttttgctggactaagcacgcacaaaattaaactgagatttcaactagtttacaygttctgaaacctgcagagttgtgataagcatttgacaagattttgatctgcagggttcttccttctctgttaatttattagtcaaggtggaaaatagctggtccacatgcttcagagaaaactctgtgcaatggttgactaaaatcataacaactaaggtgagtgatcacttgctacctgccacacttccttccattccctcctccatggcactatgaggaggtgctccctctagcctcaggttacagatgagcaaactgaactgagagaggagtgttttacctgcgatcacacaggagaatgtagatgcagctcagaaaatgtttccttactgatggtgattaatggttcataatt

SEQ ID NO: 848613 - DNA, 605 bp, Homo sapiens
acttttatcatcctcaggatggaaattttgataaatgatgtgaagacctgacagaagacatgaagctgtaagaataatagggtttaaaaatggcagaaatcatattctgaagaatagcaatacctaagccaaattactctttaaaacaaaacacattaccccagtaataattctctatgtccaaaacacagcaatgcaaacaaatcagcttccttcaactattattgagttttccactatgtaccttaagacaataatgactctaattttatatatatttaattcaaaaacacttatttgatcataataagagtataaacaactcagtaaattttctagttcatctttcctgttgtagacagtctaacaaaaacatcaagataatttctatgagaactaagttccatgaattcagtggacgcttcatagcagagtactaggaggaaatgccaaagccattgtgcagttcagtcmtgctagaatgctatccttttcctggtgcacgactgtcattaaccacatttcaatactcagctcaatgtgaccctctctggaagccttccatatctgctcaagagtgcccgctatgtttgtttctgtgacag

SEQ ID NO: 848614 - DNA, 645 bp, Homo sapiens
ccaaacttccgctataccccagggcagggaaggtacttccacgcctacagcggcrgcgctagataaaatggcgccaggaaccccgccagaacttcctgcattaccaaatagtaaaataacccaaacttgcatttgtataactatggtttttaaaagttctccatttgagcctcgcagctgaataaaacagaaagaggagagcatgtcaccattttacaagcggaaaaaagagtttcaatgaccttccgacgtcataccactacttacagtatcaccacaccctcgcatcaccacccctctggatttctcatcatttaagttgcaagttccttgaagcacgaagcaaatctctctccctctttttttgtgtttttgtttttgttttttgcttcacacacattttaaaatgctgaccactggcagcatatttactaacagtgtcatctttaaacatcttcatttatattcactaatcttttaaaatcctcatgaccttaacagtttttgttttgacatactttcaagtcagttactactgttactctagctgaagttggattttctagcttttttcctaaaaaccaaaaacaggaagagagtcccagcagtaagagcctctagcataaaccttattagctttccatc

SEQ ID NO: 848615 - DNA, 570 bp, Homo sapiens
cgttggaaagaatgactgttgatccaagagccagttttcctgctttagaggagataaaaatactccaggagagaaggsagcaggggacagaggagagctggtgggagtaacatcgtgcagaggaccagagccccgcccaccttgggctggccgcagagaaggtaggggagcaagagaacaaggacgttctctttgctgtcgtgacacaggagcatagagagagaggtagaaggtgtgccaggccgatgggcctggggcaccttcactggctggggtccaggaagcagactccggtttcatggaaagaatccacagccagctggaagctctgggtcggcattaggcaaccccattagcagatgcagcttcagccacctggtctatacctgatgccacggtggagggcgaatggacagcagtagcccagagccagatgtgggcagtgggcaccaaagtagatgctagtgtgtttagatctgaccgatagctggccacctccacaacgccccacccccagaatctagaacaacagcaagaatgacaataatccagggcggaagaacagagagg

SEQ ID NO: 848616 - DNA, 545 bp, Homo sapiens
tagaaaagaccatgtttttattgctattactactgttattgtcatcaatatttttattattsgtgggattgggagaggctgaaaaaaggaagaatgtcatttgagcaaggttctgacagatagctgatggaaaagaattccaagctgaaggaataacaggagaaaaggccacagtgaggaagtcagcaatgtttgatgacagcagagcccaagtcagtggtaggtgtcagagacatcacagggagcccaggcatgaaaccctaacaggccatcgtgaggactcaggttttaccctgagtgagatggaaagccaagggagtgggttggcggggtggggggggggggcctgtgtggatatgatttagaatttaaaatcatccttgggctactcggatttcagtggattgtagtggtacaaggacagaaacatggacccttgttaggaagctggtgcaacacacagtatatacaaggcaaagagtttgtgttcctcatatggagcatctctactgcctctgggtgtctttttccttcttttaaaaggc

SEQ ID NO: 848617 - DNA, 593 bp, Homo sapiens
acatgagccccttcccaggcaggccaagaagctgtggcacacagcatcacaagcattggctacaaagagtattaaggggctcctaattttattttggagaagggagaggaggttccccagagtaaacaagcccgaagctaaacctcaaagaggagtgggcaaaggagaaaaggccttctaacatacagaggagcttgagcaaaagagggagcacacttggagaagtgcgaatatttaggtagggataatgtgcaagaatagagagaaagagatgaatccaaaagaaatttaggaagttgactgacaagacttgtgtaaggcaaatggtgttttaatgggagaaaaggggagaaagaagtttctggttatggcagtagagtaggtggatacagagggaaggatagaaaacttgtttatgggatgaggaatatggcaagttcagctttgctcattagatgtctatggtgcctatagaatgtacaggtggtaaygtcttataattagatgtctgaaacatgaatccattcgatacctgcctttattcgatttataaaagcactctgaacctatttaagcactgggtgcatctggcc

SEQ ID NO: 848618 - DNA, 601 bp, Homo sapiens
tttccccaaaccttaaacttcttggcttaagaytgagctttaggaaagggaacccagaagcctggcatgctggcaaaagggtaaaggttttttgtttgtttgtttgttttgttttgttttctccagtcagacttctggcctctctgtctccgtgcaaaccagtaaaagtaatggtaaagactactgtaaagttttgaaaaaacttgatgatatctccatgttgttttaggttttttggaacttggccttgtaaccacgtggcagtactttcttttggtctttgccattttacaatggtgttctgggttcaaaagtggcttagggaatgagcactttctggttaatatttgtgtaaattttattatttgctgattctcttcctcttcatgaacaacttctagcttcctttcttgaatctttctttctctgagctacctttaaagattctaggttttgtaaaatgtgcttatcacctctttgaaaatacctcatatactcacaattaagttataaccttagttgaggcttattagttttatctgtgaggttacttttggtaaagttcaaaagccaggaattttggccactttgcatggctaag

SEQ ID NO: 848619 - DNA, 631 bp, Homo sapiens
tgcttagaaatgccttggctatttggactcttttttggttccatgtgaattttaaaattggtttgtctagttctgtgaaatatctcaatggtagtttaatagaaatagcattgaatttgtaaattgctttgggcagtatgaccattttaatgatattaattattttcttttccatgagtatggaatgtttttccatttgttttgtcatctcccatttctttaagcagtgttttgtaattatcattgtggagatctttcacctccctgattagctgtattactatgtatttcattctttttgtggcaattgtgaattggattgcattcctaatttggctaagagattggctcttgctgttgtataggaatgctagtgatttagatgttgattttgtattctgaaactttgctgaatttgcttatcaattaaagaacgtttagactgagaccatggggttttatagaggtagaatcatgtcatttgcaaacaaagatagtttgattttctctcttcctttgggataccctttagttctttctcttgcctgattgctctggccaygacttccaatattattttgaataggaatggtgacagagggcatccttgtcttgtgccagttttgaaagg

SEQ ID NO: 848620 - DNA, 327 bp, Homo sapiens
cctgccccctaggggcctcctttgagcacaaactctcctgtcactgccactccagcctggacacacatggggagtagtggttcacgctcagtcaccatggcccctcactcacacaaggcagtgggtccccaaagccagagccctttcctctcagtcctcgttcttcaagtttctttcctcataggcccaaccctgagggcacaatggtgagaagttccctatggattcactcactgcccacaatggctggtgaggtgatgattccttccccggagaggcaactccatccttgctrgggccacatggagacagggacatgcccaaatg

SEQ ID NO: 848621 - DNA, 595 bp, Homo sapiens
caagacagcagctccaaggaaggggctgctagtcccattttacagaggagaaaatggaggcgcaaagtggtgatatgactcctcagaaccacacaggcggtccagggcagaggctgggtacractccaggcttctgacttccaggccatacccttcccttaaccacactgcctggaggaggctgagccaggctgggccacgcctctgcgcaaagatcttcaaaaacctgcccactgctctgagagtggtgtctggggagtagagggtaggggctcagcgtataacctctagggcaactgcctagattcaaatgccagccctgctacttcccagccgggtggctcaagcaagacacttgacctctctgatccttggcgtttctccctggaagtggggtgctagaagatctggccagattggaccgtgggctcatgggccaggtactcagtctccttgggcctcaacaagctcctttgtaaaatgagacaggtatattttacattcgtactttaaaaaagtgaatcttatttcataaaagccaagtaagtgttattttctgttttctttttttttttttttttcttttgagacagag

SEQ ID NO: 848622 - DNA, 429 bp, Homo sapiens
ctggatgctccccgaggtgggagcggygttggtcaaagcggagaccacgtgtgccacaccccagagctgcctgcacttacaggcgtttcgagctgatccgggccaggtcaccaggtggaggaacgtcctgggaccagatgacactggctgccattttgtttccatggaggttttcatcatactttagaccatgttcaaaaaaccaacaaaaaccaaagctcaacagacaatttcatgcagtaaaggaaggactgatgtgaagatactgtgctatagctaaaatttagtctcacataaaaacagtttgatatagaacttaaattgtgaatttggttttatattctagaaacttccatgtgtgtattcattccccaggtagtgctggccattctaaggtgtattgggagagaattggcacagccgtccctt

SEQ ID NO: 848623 - DNA, 547 bp, Homo sapiens
ggcaatcacctgagtgccagccccgctgccctcccagagctcactttcaatttcaatatagtgccatttggagcaggagaaaaaaaaacagttgttctaaaattaattaccttgtcagtagctattatgattaaaacgtaggcccacatcaatatcatgtgcctaattcaaaaagagaattacaagaagagccataaaaatcaattttttaggccttgaaaatgggtgtctctctctgttttgacaagtggtctcattacgcggcggaggcactgggaggaggggctgcctcatcgtcccagcagctgctccaccgcgacggctggggggctcgtcagcgtgtctccaggacaactgcgacctcacgacaccgcagattaaagacttagggagagtcacgggttgaacgttccgaattacatttccaacagcgggcgcttycctaacacagcagtgggaaccgggcgcgaggctgctggggcctgggacaccgtgggaggccccacggtgacagggcaggtggcgggagagcgtcatcggcagtctc

SEQ ID NO: 848624 - DNA, 650 bp, Homo sapiens
ggttacagtttgtccccaaggtctcaaatatagaagtatagagtccttctcatcccatatttagtttaacaatgggaaatgggaggtcaagtgactttcttataaggtactgtaagactacatgctgattcagttaaaaggaaattataaagatgtatgggcagagggatgatacaatgtcatgagtggcatccttttagagttatgaaatatgaccctgctccgttaatggttgtttccacttggagtacatctctggttacactgtttccgtcacaaaaacataagacaccttgttgcactgacttaattaatcttgaaatcccaaccacacacctgctatagcttgtttttaattttgtaaccttctaaacaatgttataatgtatgatggatttttttcctggtttaccattaatccaaaggtgcaaaactgtcttttaaataggaatggtgtgtgctgcttctgtaccatcaagtgctctggtactgtaaaaacatttagtacacaaggaccactagaaatcttctgaattactgatcagcaacaaagtcattcttcagtatccatggggcatgggtttcaggaccccacggaagctaaaatcagaggatgytcaagtccctaatataaaatgatgtagtatttg

SEQ ID NO: 848625 - DNA, 394 bp, Homo sapiens
attcccaaatgagttgcttctatttgagtcccttytgttttgcaatagaatgctcagttcagaatatcatagtattagccaaatgcatttagggtccaaacaagttcattgctcttctgttatagatttcagtttctatatattactataatttatattcttcaagaaaaaggaaccattatctgaacataattttgtttttgaagtggatttgaagagtcattaattggtctttaagataaatcaatttgagaggacaagatgggatatagaaatgcatcttgaaaagtgattaatgacattgagggaaatgataaatagcatgtttccttggaaatggattgtaaacccgatgtctaaatgatattgtacagcagcaattcacagccttgcc

SEQ ID NO: 848626 - DNA, 611 bp, Homo sapiens
cagcagttctccaaatgtgccctgctccctcaccttcccttggaaggttctcctaggtccaccaccaccccgtctagcttgggcagtcgtcttctgtgttcctagagcattctgtgatagcgtctttcatagcatcaaaatagtggtaagaagtctccccaacagaacagccaataggaattgtgttagactcttgtgacagctagtatataccataaaacaataatgtgttactctcttctgcttattggcttttatgtcaatgctttgatgctcttcttcagaaagaaagtgtccacgtatttaaaaattgttatgagccatcccttcattggcctgccttccttcctcaagggaatttacctttcactgaaggttcctcagtcttttcccacaaagcttgagttccaaaccttagcatcctttattgctctctttcaggctccaacctcttaatagtttgtacttttctaccacttaggatttgcaaccctggatcttgttttgtagacatgtaattaartaacaattaaatgaacttagggatcaaacaagtctgttttcaaattgtagctctgctgtagtaaaatttagaaatcactttctctttc

SEQ ID NO: 848627 - DNA, 636 bp, Homo sapiens
tagcagtaagaaccttaccattcattttgcagaacaccccttctccataatggtggctatagcagtaacaatcattgcttgcaatgggttagaaagaacctctttctgccaggcgtggtggctcacgcctataatcccagcattttgggaagccaaggctggcggatcacctgaggttaggaccagcctgaccaacatggcaaaaccctgcctctactaaaaatacaaaaattagctgggcgtagtgatgcacacctgtgatcctagttactcaggaggctgagacaggagaatcacttgaacccaggaggcagaggttgcagtgaggcgagattgcaccactgcactccagcctgggcaacagagcaagactctgtctaaaaaaaaaaaagaagaagaaaaaataaacagaaaaaaaagaaagaacctctttcaatgctcccagacattatcatcaagccaattgtgttttagggaggaagggtgtggatagtgaatcatcaamcatcatcataagataaacctctttcctacaagggaaagaacagcagccgagcaaacacaaatgtctgcctagctacagatactgtcagaagtgaccatggaagagctggcataatcatgaaatggtggctg

SEQ ID NO: 848628 - DNA, 626 bp, Homo sapiens
tattggataacagtgactgactgggctgacatttttttttagtcagggccaagttgtcattctgggatactctgtgggaaaacagctttgaattcagtttgtaaatttatactttttctctttgttcacatttctagtccagctttctcaatggggaaacaaatactgtagcagagaaaagtgtgatggctttttaaaaaaatcaaaatgatttatatgcatctaatattgttctattacagatttgctgctgcttttcattaagtaatagacccttaataaatataaccactttatttttgttcgtgtcattgatttatacaagcatttatttgttcacttagtcattcaacaagcacatgttaagtgtttactttggacacatgatctgggaggtacaaatgaagttatgaagaaaatgggtgggaatgttagaaatcacacctttcgcagaaaacccagactatgtggcagctgcacctgcggatggaattggaactgaataaaataggccagcacatsatgtatattttgaacatttcctctgaggaatcaaagaataaatgcatgctcatgctaacagcaatacctgtcacaatctggaaaaacacataatttcagagaat

SEQ ID NO: 848629 - DNA, 516 bp, Homo sapiens
gccctgagcatgtgtggatagatggacctgggctattaagagatgaaataatgtgttttttatgttgatttccagagacctcctgccagggtggaatattttcatggcatttcagcctaaaagtttgtacaggttataaatagacttttatctctaaaaagtagatagccagcttctcttgaaacaatttgaaagcctagcatttctgggcacacattccagtgcagcagcaatcagttggggcccacatgtgcctattctcaacagtcctcctttcacactgttggctcatacatggcccatttcatttctttgttatctgtgctcagcatttataggcatttgggttggatggggagaagttccctgaaattgttcattcattcactcatcaaactcatgataagkgcttattttatagtgaactgttaagtactgggacagtccctgtcctcagggaagaaagtcaagtaatgaagaaagaaatagaaccagttaattataacacaagagcaa

SEQ ID NO: 848630 - DNA, 516 bp, Homo sapiens
gccctgagcatgtgtggatagatggacctgggctattaagagatgaaataatgtgttttttatgttgatttccagagacctcctgccagggtggaatattttcatggcatttcagcctaaaagtttgtacaggttataaatagacttttatctctaaaaagtagatagccagcttctcttgaaacaatttgaaagcctagcatttctgggcacacattccagtgcagcagcaatcagttggggcccacatgtgcctattctcaacagtcctcctttcacactgttggctcatacatggcccatttcatttctttgttatctgtgctcagcatttataggcatttgggttggatggggagaagttccctgaaattgttcattcattcactcatcaaactcatgataagtgcttattttataktgaactgttaagtactgggacagtccctgtcctcagggaagaaagtcaagtaatgaagaaagaaatagaaccagttaattataacacaagagcaa

SEQ ID NO: 848631 - DNA, 652 bp, Homo sapiens
taggccatatttcttcattatacacctcaaaattttatttttccaacattttcttactcctattgtgttctatatttttagaattcaggacagaaggtaagtataagaatgaaataaaatgcgatatgtaaagtgcttagcactagaggtggcatgtgttgggagatcaatgatgaaagctataatttacaggttcttctcaaatgaactctacctggctagcatggtagtgtgcatatttgtaatttacaatcattaaaatctttattgatgacacgtgcatttctgtgtactgagagcttatactctcagccctgtgggagaaaacaagagaacataaggtctggctggcctctctctgaggccagagagactctccctacttgggagtcgagaccgagagccatgaaacagggataataagggacagcactttatcgagaggtaaatggagtcataataatagcaacacctcattattttatggagttgatatagtcttttatttgctcttctcaacattgcaaaatcactctatagatgaagaaactgaagtcytgaaatctgattctcccttcaaaagcgacagtgtctaagttcaagcccattattctcgctttgggttcagtgcccttgtcaatacagttttcat

SEQ ID NO: 848632 - DNA, 652 bp, Homo sapiens
taggccatatttcttcattatacacctcaaaattttatttttccaacattttcttactcctattgtgttctatatttttagaattcaggacagaaggtaagtataagaatgaaataaaatgcgatatgtaaagtgcttagcactagaggtggcatgtgttgggagatcaatgatgaaagctataatttacaggttcttctcaaatgaactctacctggctagcatggtagtgtgcatatttgtaatttacaatcattaaaatctttattgatgacacgtgcatttctgtgtactgagagcttatactctcagccctgtgggagaaaacaagagaacataaggtctggctggcctctctctgaggccagagagactctccctacttgggagtcgagaccgagagccatgaaacagggataataagggacagcactttatcgagaggtaaatggagtcataataatagcaacacctcattattttatggagttgatatagtcttttatttgctcttctcaacattgcaaaatcactctatagatgaagaaactgaagtcctgaaatctgattctcccttcaaaagcgacagtgtctaagttcaagcccattattctsgctttgggttcagtgcccttgtcaatacagttttcat

SEQ ID NO: 848633 - DNA, 702 bp, Homo sapiens
aacaagtttctgttcttctagtctttctatatgtaagaattattataaatatttatattataaagaaatatatataaatatgatatattataatatatacatatgtgtttctcaaatccaagcccatggacygtatatcaagcaaaatttaacagtgaagtctgaacaccgtaaaagattgtaaacactcttttagagtgccttataatggagtttggcctaacaaaaatggcacagaaatactttgtgtcccttctttgcaccttggtaatgttctctgcagccaggttttgactaaatatattatatgccaaggtcagtgtgaaaaaatattagaacaggcatttttggggggaatatatttagaaaaatgagaattccactgattttcattgaaacaataactggggaagatattccagagaattcctgtgctgtacatagttttattaaccttatttatttagttacagtctcattgtttttgcagtttttcactcactaaaacaaatgtactgccagtgcagctatgagatcttgaagtggtggccagttttgggttactgcaacagtatcaatgtccgtgccagctgggtgccttcagaagggttttggagcgtgctccaacccacttgcctatgtggccatgaaggagtcttggcctggctgttttgtgaatcttgatagagatcccacgacctc

SEQ ID NO: 848634 - DNA, 601 bp, Homo sapiens
tcccctcaaccacagtgaaaatctgcccaaaaatgtatcacgcacacttgtgacacaaatcctttcatagaagttttcaaattgtactgacaatatttaacattgtgtagctgtttaaatgccattgaagtgtacaaatgttaaatcacaaaatttggggtaaacagatggactatcataaaaatgaagacttctgaattttttattgtgataaaacctacaaaaggtaaaatctgtcagtttatccctttttcagtgtatagttcagtatgattatttcttttataaattagaatctgttgttatactgtctctaaataaatcactgttaacatggacttctaagaataggaaatagcttcactggttagcatgggttgatataatgtacttaaacaaaaattctacttgtcacattaaaattcattgatagatctgttttgagctactctggcattactatagaaaagctaagtaggcatgcccatctgtacctagactgggcagccaataagtgtttttgaatkaacctttaatggcttgggagccattaatatcttgtgcctaaaacactagccaaagtgtaggttggttcctggtt

SEQ ID NO: 848635 - DNA, 418 bp, Homo sapiens
tagcaaatatcaggatgggagaatactccagagagaacagcatgaacagaaatagagagctgagaaacataatgtttcaaaatgcagctatttttactttttcactctatccattctagacaagacttaaagtatccccaagaatacataaattacaacaaagtaatatgattaacaattatattaaagaacactacaggtatttcttagtcgagttcaggctactattatgctagtagtaagaaccaaagttggaaaagtgaattgggatcagaatttggtgagtttgaaacgctgaactaagagttttgttttattcttagggaatcaaaaggcatagaaattgggtgagcagragttgaggggatattgatgggcacttgaaagagcacacaggcagcaggcttgaagatgggtt

SEQ ID NO: 848636 - DNA, 279 bp, Homo sapiens
gcctgtaggagcatctgaatggttctagttcccaggaagagcttccaaagaacacatggtcttacatagatattttcaaatagctgttttcctcccaattattttagtaaacctatgattgttgtagataaattagaaaagtaaatataaacaggaaaataaacttatscattattccataatctgaagatgcctttgataacattttggtgtatagctcatcattttttcttatgcatatatattttaaaatccatttagattatgctgaatatataa

SEQ ID NO: 848637 - DNA, 556 bp, Homo sapiens
atgcactgagattcttatagggccccaagtcacttctattaggctaaatttctaagagatgctaggttcttagaaatttcacaaaaatacttgtctgatggtaatacaattaaatgttctaaagtaaaatgattttcacttcactgaaacaygtcaatcagaaagcttatttcaaaaaagggaactatcttagttaagtaagaaaatgctccatttcattttgattgtttactggctataataacattcacaagtcttacatatctgctatctttttcctacccaaggagctgctactttgtaaggtgtggagaatgggtatttttattccattatatggattagaaaactaaaactgggaatcacttgttatgtcacaaagaaaaattggtagaatttcagtaagaactatagtctcctgatttttcatccaagacaattttatttatccatacagtgtcattgattgagtgcctgttatgtaccaagtattattctgggtcctatgaataacactgtcctgccttttatcctattgttaactatatataaatgt

SEQ ID NO: 848638 - DNA, 608 bp, Homo sapiens
gacatgcctaggaatttatcagaagaagaaactagaagaaagtgtgtgtgtgtgtgtgtgtgtgtgtgtgtgtgtgtgtgtgtggtcattttcaagttcttattattcttcctttacyccacccccaccccaaccccaaattgtcatttttgctttttctaaaatacttttttaaagatttttttattaagtttctcaggaggaatattcatttcttatttcaattatggcatttgtcatgttttttaatgtaatacatttcaatgcttctttctataaaaatttagaaaggtaagatctaaaatatcttttgaaaatcataaattgtttttctgtcaaccatatggccaaatcatcatttgtgctttaaaataactggatcaaattcctactgggattttacttggtaatataagtcagtctattataaaaacttttcagaagatcagagtaaaccaatgtcatttaaaataagtacaccttatttaaaagatatttaaaagtacaacttaagaaaaatcacctcaacctatatatctagaaatttaaataaatacattttattattttataaatatctaaaatagataattatgtccagttgtggt

SEQ ID NO: 848639 - DNA, 501 bp, Homo sapiens
agaggaaatgtgaactcactctgcctgagctgtggcatctctctactttcctgctctcagatattggtgcttttgattctccttagaacacaggacacagacaaggacttacgccattggctccccagttctcaggcctctcaactcaggtgaattacaccagcttctccagctttccagcttgcagacagcaggtcatgggatatcttgacctccataatcatgtgagccaatttctataatatttttgtgtatgtatgttatactggctcttttctttccctggtgaactgtctaatataggttttgttactgaaagaatggttctagagaaagaaaataaaaatacgttttctaaactggttctggggtttctgaaattggctttctaatctgattagattwaaagacactaataactctatttccagtaacagagagcagtgatattctatggcataaactcttcatagagacacacaaaatatctgcattcaatac

SEQ ID NO: 848640 - DNA, 626 bp, Homo sapiens
ttttgtggttccatagcaggactattctctttacttctatctctacctcttttgagatgttggagactctctcactccaggagttctcaatcctgggtaagttaagagaatagagcagttagaggtataggctttggaatcagaaaatctgggttttagtcttggctctgtttcctcttggctgtatgaaggtaagaaactcatactctctggccttagtcttctcacatgtggaatgaagctagtagaaacacctacttcatgaggttatagtgagaattcaattaaaaaggtacacaaagtgctttcacgatgtaagcatccaatagctggccactgttgctgtcatgaagatggtgcaagacctcaacgctgtcgccttgctctttcatcccaggagtatgtgctgccttactcatctgtcggtgactcatcatgtgtccttggaaacccaacttaacaaccaattaatcttctaacaatgcacactatgacrggagacatttattggttaatctggatgaaacatattaatgaaattttatggccatccccgatgtaaaagattttttaaagactcatttcaaatttctcgtgttgagctgatttaggattttattttatat

SEQ ID NO: 848641 - DNA, 527 bp, Homo sapiens
tccagagactggatggcatttgcccaagatcacttggtgaagtagtgaagaatcaagactagaacccagcctgtccgaatctgctccacagagctccacacacacacgtgttcaggccatgtgcaygagtgcacctacatgcccactctgctgtcctctgcagactgaagcctcttatccctctctgacccccaggctgtctgcaggggatgtagcttggggaatgagagggcagcatccacccaaagccactgaaactgtccttcaaggtagctgctcacctctcgtttgattaaaaaggataagacactcaggtgggttgaaccaggccaggcaaaactcatattgcatactattgtgatagaacacccttgaataaagtgtgtctcagcatttttaacgtgtcacaaataattatttctttaacacccacccccatcatctacacagtccaatatggtagccactagccacatgtgactatttgcatatttaaattaattaaatttaaataaaatgtctcacaa

SEQ ID NO: 848642 - DNA, 447 bp, Homo sapiens
agcctccccagttatttgggggttcaccaagtgtcctctgaggtgcaagggttcttcctctctagctcccttgtacatgtccgttgcccgtgtgtccctggagaggtaccttatcattgccactggggcaratgtcctccatgggattaatatctgaaagagcagaggaactgaaaacaaaacccaaacaagctgctgcatttaaaactctgtcagatctggagacaggagcagcgtaacagacagtgccactctgaagggagaagacatccatcttcacctcacctccaaccatttcccagcattggtcctgaggtgtccaccactttagacaggagtgcccagtgcaggagcattcaggcccagaagggcacttgggaatgagtttggggggacaagaggatctgacctatgtatgtggatgcgataggccagtgaaactttagt

SEQ ID NO: 848643 - DNA, 477 bp, Homo sapiens; identical to SEQ ID NO: 823975

SEQ ID NO: 848644 - DNA, 628 bp, Homo sapiens
ggatgtggaaaaacgggaatgcttttacactgttggtgggagtgtaaattagttcaaccattgtggaagacagtgtggcaattcctcaaggatctagaaccagaaataccatcccattactrggtatatacccaaaggattataaatcattccactataaagacacatgcacatgtatgtttactgcagcactattcgcaatatcaaagacttggaaccaacccaaatatccatcaatggtaaactggataaagaaaatgtggcacatatacagcatggaataccatgcagccataaaaaaggatgagttcatgtcctttgcagggacatggatgaagcgggaaaccatcattctcagcaaactaacacaggaacagagaacaaaacactgcatgttctcactcataagtgtgagttgaacaatgagaacacatggacacaggaaggggaacatcacaccttggggcttgtcagggggtgtgggggctagcagaaggaaagcattaggagaaatacctaatgtagataatgggttgataggtgcagcaaaccaccatggcatgtgtatacctatgtaacaaacctgcacgttctgcacgtgtatcccagaacttaaagtatcatttaa

SEQ ID NO: 848645 - DNA, 646 bp, Homo sapiens
cctttcactgattagataattatgtctctcaaataaaattgtgttttcctatgtatgtatttttcmtttatgccaacaatagcacacagtaccagaactatcctttgtgcttactgagtattttccgaacatgggatttttttctcaactctttattcttccccagtgcatatgaggaatacattaacagttccacgcgtccatcaattacaacaaagtggctatttttaagtaaatgtgtgtttcaaatatgtgttgagtttggaggagagataagagaggaatgtaggaatctgacaaacttttccaagtatatctggctctcccaatcccaggaaaagtgattgttttatacttttttatcaacatctcaattccagtgaaactattcttggtttccaaaatattttgaatcttgtttctgcctcaatacctagtgtatccttcactcataagttttcctaaaacctgaattacaataacaaaatgtatttatttgtatcaagcaccattggcatttctgtgtgtctactgactccttaaatcctttgaggtagccactattatattccccaaaattcagatgaaacaactgaggcgcagtaaggtcatggaaggttggatcctagccgactctctgcagtgc

SEQ ID NO: 848646 - DNA, 627 bp, Homo sapiens
tacatgaaaaataaatggtgttttctccatattggcaccacgtggcattcttaaaggaactgtgacttttcaaggaacccttgtgacagggtaacaacctataatttaatagactaaaacrtatattaatctctttatacttaactatttgtcttttttttttttaagacagactctctctctgtcgcccagactggagtgcagtgatagcattttagagatgaggagggtaagctcactgcaacctccacctcctgagtttgagcaattcccctgcctcagcatcctgagtagctgggattacaggcatgcaccaccacactcggctaatttttatatttttagtagacagggggtttcgccatgttggccaggctggtctcaaatccctgacctcaagtgacccacccactttggcaccccaaagtgctgggattacaggaatgagccactgtaccagcctactatttgtctttttaaggaaaaagaaaaagaagtaactgctaatttaactttcaccatggtaaattcatgaaatatgaatttttcaaataactaaggctaatcctgttaaagaagaaattaaccaattaaaagtagaaattaatgagttagcatcttatatgc

SEQ ID NO: 848647 - DNA, 618 bp, Homo sapiens
ccctggcttccttcattcagcatactgattttgagattaatccacgttgttgtgtcagtagtttgttcctttgcttttactactgagtggtattcctttgtattggtatattttgttcattcattcatttctgatgaacatctgggttaatttcagtggagtttttgtgaataaagctattatgtacatccatgttcaagtttttataggaacatatgctttcatttctcttgggtaaatatctataatggctagatttttctccataagttttgttttgagacagggtcttgctatgctgcccaggctggtcttgagctgctgggctcaagtgatcctcctgcctcagtttcctgagtagctgggaccataggcctgtgccaccacgcctggcttctgtaacagctagattttatgacaggcttatgtttaacaactgctaaactgttttccaaagtggttgtaaaacttcacattcctatcatcagtgtaggagttccaattaatccacattttggccaatagttggtrtggttagtcttttaaattttagtcctgctaatcaatgtctagtggtagttcaacgtgagtgtaatttttgttttcctaataactaat

SEQ ID NO: 848648 - DNA, 606 bp, Homo sapiens
cacttccgggttacaaccgacctccggcccaggatacttacgttgccgccatttttgagtagggctaatgaaagatgtctsatgtcactgtctataccggtgatcacttgagccgtatgtttaataacgaaagtacggaagacagcgtcttgaaaaaaaataattcttcctaaagcttggaaactttcccttacctttttgcctttatcgaagatggctgaaacagagtcagtagctgctctagctgccggaagtgactgtgcctctatgatccaaaaggctcttttgcgttgcactttcgacgacttccggcggctcctctcgcgaggattggctgttagcggcgttgtagttaagctcgtgtaacggcggcggtgtcggcagctgctgtagcgaagagagtttggcgcgatggtgagaaaggcctccgcggctacccgagtccgagtccccggcctccagagcgaccccagccccatacgttttcccctccccacgagccccatgcagcgccgcgtgatgctccccgccactctagtcggtggattgacccttcttcccgccgcagggacgccaggcctgactctaggcctcggagccccggtc

SEQ ID NO: 848649 - DNA, 396 bp, Homo sapiens
aggtgtggccacatgtacgctgtgccctttctgtcattaaatcacactttcctttccaaccatctcactcagcctgagttgccatccagtgtaatgattcagggtaattgtgcttwgggacgattgctagtgggatagcaaggagttgcaattcagccctggctgtgctctgaattcattagtgaattcattttccagcttcgtgtcctgctcagaagaatgatcctctctccaagcagggcattgctgtctttctcatacttagcaataacaaccaaaaacaaacccaaggaaataaaatcaccagggaggctttcctctttaattaaggagttctaatgagtcacagtctcaccatgcatgggactcaattatcctttataaataggggattgt

SEQ ID NO: 848650 - DNA, 587 bp, Homo sapiens
gattacaggatgggttgaggagagtaaatagggagaaacaagagaaaggggggaatgtgaagtccagaatytcatgggagtcacagattcagctgagtgctaatgatgtcatttggtcttcactctagcaaaagggatcccccaccccgaaaccctgcactttcaggaggagtaagctaaaaacttggcaaatggcatagtaacgaagtcctgaattggcagccaagatctggatgtgaattttaagttgttttctccccaaatgtccaacaagatctgctgtgatttaagggggggggggggagagagatttattgaggtataaaaagccacatttcagagttgccagtgctaatcaataactggaatttgacaaaagaccatgttaggctcaaaaacgaaaaggacacacatataaaggcaagtataattacatggtataaataagggagaggttgccaaagactgcatgttgccaagtgcctcaaatattcatgttctttgaaagacttatttttgtgtctacggaggatgaataaacctcacttaaaaaataagactcttcccaaacctttgctcatttctgg

SEQ ID NO: 848651 - DNA, 587 bp, Homo sapiens
gattacaggatgggttgaggagagtaaatagggagaaacaagagaaaggggggaatgtgaagtccagaatttcatgggagtsacagattcagctgagtgctaatgatgtcatttggtcttcactctagcaaaagggatcccccaccccgaaaccctgcactttcaggaggagtaagctaaaaacttggcaaatggcatagtaacgaagtcctgaattggcagccaagatctggatgtgaattttaagttgttttctccccaaatgtccaacaagatctgctgtgatttaagggggggggggggagagagatttattgaggtataaaaagccacatttcagagttgccagtgctaatcaataactggaatttgacaaaagaccatgttaggctcaaaaacgaaaaggacacacatataaaggcaagtataattacatggtataaataagggagaggttgccaaagactgcatgttgccaagtgcctcaaatattcatgttctttgaaagacttatttttgtgtctacggaggatgaataaacctcacttaaaaaataagactcttcccaaacctttgctcatttctgg

SEQ ID NO: 848652 - DNA, 572 bp, Homo sapiens
gagggcattacagccaggaataactagctgagtggcgctaaatgaaatgtattctaagcctcccattaagccacccaycctcattgtgcttatggtaccttatttatagggactcctgtaattggataacatctctccccttagttctcttcctttcccttcaagcagaagccagctggggtcagaggagaggccgctttcacctgcagtctccatcactccgtctggctttccagatctcagtcttatagggggacacctgtgcaaatgattccagggcatttagtcatgcctgcccttgccctgtttcccaagacacaactgccggaggcagccatttaaaaatgtggtatgtagtcttttagactccttcatacatttcccttttttacatacatggggtgatactacatactgtagtcttctctgtttatgtactcctatattgatggcatttttcatgttctcagctgcatgaaattccatcgtataattctagcatggtttacttcaccaggtccttattgactgttgttcctgttgctacaattttcagatgttgtgaacaacgg

SEQ ID NO: 848653 - DNA, 611 bp, Homo sapiens
gtgcctgtagtcccagctactcgggaagctgaggcaggagaattgcttgaaccagggaggtgaaggttgcagtgagccatgatcacgccactgcacttcagcctgggtgacagagagagagagagagacactgtctcaaaaaaaaaaaaaaaaagttaacatagtaaacatcatgttatgcatattttaccataaaaaaaagcaaggtagggaaaatgtgtatagttttgagtaaggagggagataaatctaggtatattattacttatgtattacaaggaaaaataaatataaattttaaattgctaactttagtggaaaagagggaacaggttggagaacacagggatataagctagacttatttgaatataccttgctttgtagattagattttgaaattgtgtagatattttatataattatagaataaaataaataggcactctcaaaaagagaagaagaggaactatacctcctctatctctttcttcytctactccggcaaccttatagaccactattccagatgatagtggtacaagctaggagggggctgcctgaccactatggacttcatgtgagccaataaataaactcgtgttgagtta

SEQ ID NO: 848654 - DNA, 623 bp, Homo sapiens
caatggagactaatatttttctgtgtcatatgtatatatatatatttgtctacatatctgtgcatctgtctagctagctagcaagaatacttcacaggtaggatgcattctttgtcaaaggcagataacatttgacacccatgagttactattactgaaaagattatgaacaataaatgtcgatgagactgtggggaatcttaaactttcacacaccactggttagaatgtaaaatggtaaaacccctttgataaaaagttctgatagtttccaatataattaagcacacggttaccttgggaactagtaatgacactcctagaaattcacccaagactgaaaacatgttcacaaaaggacttgtacacgaatatttatagcagctttactcacaacagtccaaacctggagaaatcccacgtgaccatcaacaggagaaagaataagtaaaccttgtggtattcataccaaccaatcataccaaccaatcataccaaccaatggtactccgcagtaaaaagactggagaaacamgtgatagcaaggtggaatttaaaaacattctgagtgaaagaagctttacgaaaggaggatatttggtgtgattttgtttgtatgaact

SEQ ID NO: 848655 - DNA, 488 bp, Homo sapiens
gtcttacgcttaagtatttaacctattttgagttaatttttgaatatggtgaatgaaaagagtccagtttcaatcttctgcatatggttagttacttatcccagcatcatttattgaatatagagtcctttccccattgcttatttttgttgactttgtcgaaggtcagttggttgtattgtggctttgtttctgggttctctatcctgttccattgatctatgtgtgtgtttttgtatcagtattatgctgttttggttacagtagccttttagtatagtttgaagtcatatagtgtaatgcctctgggtttgttctttttgcctatgattgctttggcaatttgggctcttttttggtgcmgtatgaattttagtatgcttttttctaattcagtgaaaaatgtcactggtaacttgataggaacagcattgaatccatacattgctttgggcaatatgtccattttaacaatattgattatttcc

SEQ ID NO: 848656 - DNA, 488 bp, Homo sapiens
gtcttacgcttaagtatttaacctattttgagttaatttttgaatatggtgaatgaaaagagtccagtttcaatcttctgcatatggttagttacttatcccagcatcatttattgaatatagagtcctttccccattgcttatttttgttgactttgtcgaaggtcagttggttgtattgtggctttgtttctgggttctctatcctgttccattgatctatgtgtgtgtttttgtatcagtattatgctgttttggttacagtagccttttagtatagtttgaagtcatatagtgtaatgcctctgggtttgttctttttgcctatgattgctttggcaatttgggctcttttttggtgcartatgaattttagtatgcttttttctaattcagtgaaaaatgtcactggtaacttgataggaacagcattgaatccatacattgctttgggcaatatgtccattttaacaatattgattatttcc

SEQ ID NO: 848657 - DNA, 488 bp, Homo sapiens
gtcttacgcttaagtatttaacctattttgagttaatttttgaatatggtgaatgaaaagagtccagtttcaatcttctgcatatggttagttacttatcccagcatcatttattgaatatagagtcctttccccattgcttatttttgttgactttgtcgaaggtcagttggttgtattgtggctttgtttctgggttctctatcctgttccattgatctatgtgtgtgtttttgtatcagtattatgctgttttggttacagtagccttttagtatagtttgaagtcatatagtgtaatgcctctgggtttgttctttttgcctatgattgctttggcaatttgggctcttttttggtgcagtatgaattttagtatgcttttttctaattcagtgaaaaatgtcactggtaacttgataggaacagcrttgaatccatacattgctttgggcaatatgtccattttaacaatattgattatttcc

SEQ ID NO: 848658 - DNA, 537 bp, Homo sapiens
aattggagccgcctgtaatcccagcactttggaaggccaaggcgggtggattatgaggtcaggagatcgagaccattctrgctaacacagtgaaaccccgtctctactaaaaatacaaaaaattagccaggcgtggtggcgggttcctgtagtcccagctactaaggaggctgaggcaggagaatagcatgaacctgggaggcggagcttgcagtgagctgagattgcgccactgcactccagcctggccgacagtgtgagactccgtctcaaaaaaaaaaaaaaaaaaaaaaaaaaaagaatcggagcctctcccatgggcaggccccgtggggaaagggccacatgcagagatgcattgcagaaggtctcagaagaccaaggctcgttgggagcagggtttggggacttcccttggggataggaggaaccaccagcaagtgcaggaggcttcacgtaggcatctagcttgtgaggaaggagcaactgatgagtggatacatgtgcctcctcacttggcatcatgttttccatgtc

SEQ ID NO: 848659 - DNA, 537 bp, Homo sapiens
aattggagccgcctgtaatcccagcactttggaaggccaaggcgggtggattatgaggtcaggagatcgagaccattctagctaacacagtgaaaccccgtctctactaaaaatacaaaaaattagccaggcgtggtggcgggttcctgtagtcccagctactaaggaggctgaggcaggagaatagcatgaacctgggaggcggagcttgcagtgagctgagattgcgccactgcactccagcctggccgacagtgtgagactccgtctcaaaaaaaaaaaaaaaaaaaaaaaaaaaagaatcggagcctctcccatgggcaggccccgtggggaaagggccacatgcagagatgcattgcagaaggtctcagaagaccaaggctcgttgggagcagggtttggggacttcccttggggataggaggaaccaccagcaagtgcaggaggcttcacgtaggcatctagcttgtgaggaaggagcaactgatgagyggatacatgtgcctcctcacttggcatcatgttttccatgtc

SEQ ID NO: 848660 - DNA, 608 bp, Homo sapiens
tagaaaatgcctttcttctgggatccttcctttaccactgtggtggtcattagagctgtctgcaaaaattcctcctctccctttgagataataagagtgtacttccttggccctctgaagttacaggtaccatgtgacagcctctggccaacaaaataaacagaagtaacatgtgccagcattgagcactttgcggtcttctccttttccacttgcatgacaaccagcagtgtcctggtagtgtctgccgaggtcctagattgaggaagaagcctccagagaccttggtagacatttagcaggagggaggaataaatctttgatattgtaagccactaagatttgggagctctttgttatcaaagctcagtttaagtcaccctgactgacacagctacttactagtttcgtgaccttgagaaagtgacctacctgctccagtttgccatctattcccctgaaaatctaggtgttagcattcctactccatasggttggagggcaaaatgagctccatatccaaagtgcttggcacatcctggcacctgttaagtatacatggaatgacaggaactgttaccatttaacacgctggcttctctccccat

SEQ ID NO: 848661 - DNA, 606 bp, Homo sapiens
cttgttatgctcctttttagggccatcacctcgtatttcttcagcagctgatggtttctccagtttttcaaagtaattctggtaataaaaatcatccaggtggggaccattgctttgcagttgcatcatctgaattttagaggcccaatccttttcccacagcaacatgagattggcatatggatcctttcggagatgatcttgatgactgctccagtgacttcctctatctcctgcaccactgagattctgatgctgatttctattctgttgctgtctctgatgcaagagtcaatggtgctgtggatggaggggagttgcgtccagtctaaacactgggacttgagatcttaagttttgcaagtgaggtcctgggccaggagggcgctgctgtggaggtggtgtagcggagggtggagcactaaagaaggcatggaagcctggtgctgggggaagcatctgcccaacttgcccttgtagcaacttgggattcatagcagcatgcrgactaccaacaaatccagggacccatgcaaactggctgggagacatctgtccaggctgtagctgtgctcctccaagaagctgtgctctctgaagggggct

SEQ ID NO: 848662 - DNA, 614 bp, Homo sapiens
tgttattgtttcaccctttaggatataacagaatattataattaatacaggaatttttcaaacattacataatttcarttaccttagtattcataccttttcgaatttgtactactttggacaatatattatatattcagctattattgatttctaatttaattccatttttgtcaaagaatatgctttgtatgactcgaatcctcttacatttattgagacttgttttatggcccagaatatggcctatactggtaagtatcccctgtccacatagatgaattttactgtcattgaggagagtgttctcaaatataaatgagatcaagtaagttgatatgtagctcaaatctgctataccctgttgcttttctgtgtttgttctatcaattaccaagagagatatattgaaatatctgactataattgtggatctgtctccttttcgatctaatagatttttcttcccatacttagaagctttgcttttaggagcaaaatttatgtttgtttttttctactcgatgagctatctcctttatcattattatgcccttctttatctctggtaatagtctatgtccggagtctactttgtttttaataaagccact

SEQ ID NO: 848663 - DNA, 648 bp, Homo sapiens
gggatcactcggccgcacggcgggatcccatayatcactcaccgcctgacccaatcccaacgccgggccaccgacctcactaagcactaccggccagggttcgaaatcaatccgtctcaaagacccactaacgtcactcactcccccagccccgctttctgagccttacctcctaccatcactcggccacccagacaggccttcgaatggcacaaagctctccaccgaggcctctaaaataaccccaacctgggccggggtcctggaagccattcctccccccactcaggtctggcttcaccctctccccgcgagcccggcccggactaaaaagcccaagtccccactgtacctgagccttctccaccaagatgcctatctcctccatagtgaccaagccggcctctgtgtggcctgggatgatctgtcaccgcttccgctgacgacaacggaagtccctggctgaggaggcttctgggaagtgtagtttaagttacggctgagaggtgctggaagggcaggataggacgaagggctggtctgggctccgccctcaacataagctcatgcgctgtccgtacccgcaggcgcgagggcgggacgggagctgtgggcgtgcgcagtatcacgcggtggcgccatctcgcc

SEQ ID NO: 848664 - DNA, 563 bp, Homo sapiens
ctaacacggtgaaaccccgcctctactaaatacaaaaaattagccaggcatggtggtacgcgcctatagtcccagctacttgggaggctgaggcaggagaatcgcttgaacytgggaggtggaggttgtggtgagccaagatcgagccattacactgcagcttaggcaacaagagcgaaactccatctcaaaaaaaaaaaagaagaagaagaaagagaccaggaagattacatgctaaacttttcatagattacccacataacacttcacagttatcataattgtctgcttacagctctctgtctggtacaaggactctgtctatcacaagagatgttcaataaatgtctccaatgaataaattactgaatgaatgagaggtgtttccaagtacaccattactatttacccaaataagaatttagcttgtcttggtgtttgtgtgtacacaaagagaaaataaggtaagtctttcagaaagtaccttactacctgtttcggatctaagatggtgaaaccagtttttaaaaagagaccacggatcttccaaatgcatatacgtg

SEQ ID NO: 848665 - DNA, 462 bp, Homo sapiens
ttgttatgtgggagtcccgcacacgccagctcccctgtggaaacgtgcagggaaggcagccacrggtgacatttccagcactggttaaatatggacaaacctcgcagcttcccacccaggtagggcagtcctgtacaaatggtaaccggcagggtttattccgaaggacacgagtgtgccatgatatattcagtagttgctgtacttttaaaaagggagttgtaaaaattatctttaaaatgcttgttgatgccctgtgggtatgagtcactttgtgaagcaggatcaaaatggattctctattacgggtttctgctggctctttgattctaaacaactttattaatgttaataggagttatatacacatcaatgagagaataaattcccagggtttagtggagcttccattaatgatctgtaataagcaacgtaaaatgctttcaaattttctttcaagta

SEQ ID NO: 848666 - DNA, 590 bp, Homo sapiens
acaggtgggatttggataattttcacctttttctatatatttttctgtatttttgtttttttaaaaaaacatagcaaccacatattttctatttggttgagggaagtcctattctttaaatttttatcccaaccactcaagctatagaagtattattaagtaacagataacattcacagggtaaaatttaagacaatttctttccccttgatttctcaagtactatcgtactaaaagtcctcttttctgtaagttactcctataatatggccaaaactaaacgaatacatggtgtatccgttttaaagcaggtgcaataaatgccctcgtagctatcccactgaaaaaagaatctccatgcatgctatttcactggtttgactttctctgtccacagcccttctgaacccagccttgttaactttctggcaaaccctcatggcccaaggatgctctcctggactctgtgtgcatccaagtgcattcatcatcaatggactccatctgtcrgctcctcacacaaagacctcaagttatttggcgaagatacattgctttccttaaatgctggattgagtttaaaagtagac

SEQ ID NO: 848667 - DNA, 588 bp, Homo sapiens
attgtgtgcttaattaaggctggaaagtgctgaggctttttgcaggcgcagttagcaggcgaactggtcagcagggtttctggggaacgtagatttgcgtgacaggggccctgtgttgctaaggaattamtgcaggcactgagaaaagtctcagcgtcagacactcctccacctcccgggtcctgcttccctccctctcccctttccaggcaactcacagtttaggggtgtggttgtgtgtgttcaagctcttgggttttacatataaatgcctgagacttttctgcagggtttaaaaactaacatcttgtcttacagctcttttaggatttgtcttttagaatctccagtcctcacaggaaaaccccccaattaaaaaaataaaagaataaagaataaaaagaataccactactactataaaaaaaaaaaaaatcctctaaaatttgtcttcccagatcagcagagtgaatttgaactgtgtggacttttttcctctttctttcttgagtcatgttagtactgagaacttttttttttttctgtcaaatcatctgtttgataaataagtccaggagacttggatcct

SEQ ID NO: 848668 - DNA, 571 bp, Homo sapiens
gtaaatggtttttaaaccatgacactggctcccagtgctttgggaggccaacgaggaaggatcccttgagcccaggagttcaagacaagactaggcaacagagcaagaccctgtctcaaaaacaaaaacaaaaaaacacaaaaaccatgactgctggaatcccaagggcccggagatgaagaagtgctctcccctccacctgcctctgcagggctgtgtgggttgggagtagccatgagggcagtgtctgaggacacagggcagcttcctggaacctgggctgggaagagggtgcaaggggcagagctgggagcaggggagcctctctcctggggccccgggcttttgtgcatgtgcctcattccatcctctgcagaccagccccctctgctatcatggctgcccctcatggatccctcaccccaagtccagtttctcttccagttagrcagggcccaccccatgtgaccagagtctcccagacccgattccaaatggccaggagagctcaaacccaggcccagcttgtgtccagccctggccgagcccactcagctgaggctgctggcgg

SEQ ID NO: 848669 - DNA, 555 bp, Homo sapiens
gtgacttgaacagcattctgctttagagttgttttgaaaatactcccggccgggcgcggtggctcatgcctgtaatcctagcactttgggaggccaaggcgggcggatcactaggtcaggagttygagaccagcctgaccaacatggtgaaacctcgtctctactaaaaatacaaaaattagccaggcgtggtggcatgtacctgtaatcccagctactcagaaggctgaggcaggagaatcgcttgaacctgggaggcggaggttgcggtgagccgagatcgcgtcagtgcactccagcctaggtgacagagcgagatttcttgtctcaaaagaaagaaagaaagaaaatactcccaagtcagatttttttttttttgagacatagcctcactctctcccaggccggagtgcagtggtacaattaacagctcactgcagcctcaacctcccaggctcaagagatccttccatctcagcctcctgagtagcagggactacaggcatacactgcaatgccaggctaattaaaaaaaaaaaaatttgtaggccgggc

SEQ ID NO: 848670 - DNA, 541 bp, Homo sapiens
ttgttttttggtttttttgagacagagtctcgctctgtcacccaggctagagtgcaatggtacgatcttggctcactacgacctccgcctcccaggtttaagggattctcctgccatagcctccygagtagctgggactacctgcgtgtgccaccacgtccagctaatttttgtatctttagtagagaccgggtttcaccatgtgggccaggctggtcttgaactcctgacctcaagtaatctgcctgtcttgtcctcccaaagtgctgggattacaggcatgagcccgctccaggctgggggtctcttttcaagcagaaaggccagctcgtggagtagtggggagaagcaagggagagccttgagcacacaacccagaacacacagcccccttgaggtggcaggcagggtcccacctccagctgtgggccacagggcttcactctctgcatgtccagccacatctctctctaagcctcagctctgtgctttgggaaggtcactggctggaagcccagggtaggctgagggggccaggctg

SEQ ID NO: 848671 - DNA, 637 bp, Homo sapiens
cctactggcctttctcagttgttaaatatcttgtgatgttgrcactttaaaaagtgtcacacgctgctgtttggaatgtattaataaaatgatacggccactttggaaaacaatttgacagtttcttgcaaagttaaacatacaactatcatatgatgcgggagttctcctgggaatttacccaagagaaaaaatgaaaacgtatgtccacacaaagacatatgtgcgaatattcaaagcagcattgtggataaacaaattgtggtacatccatacaatggaatactactcggcaaataaataggaatgaactattaatacatgcagcaacataaatgactgtcaaaataattatgctaagttaaaaagctaacaaaagaatacatactagatgatcctgttaatataaaattctggaaaatgtaaactaatctattgtgacaaaataccacaacttcaagaaaggaatttttgtagtaacattgtcttcttttttcagaggacaaaattgagggcttagatcttggagaagtcatgtgtaatgatggcatctagttgagcaagtttctgaatctccttaagcctttgcttgaaaacctgtaagtgggcagttaggatatttactctacctcattgt

SEQ ID NO: 848672 - DNA, 642 bp, Homo sapiens
tagcattaacacagcaaaagctgactgatacatcgtatatgaatctctgtctatcaacttttctattctggcaagctgtattgagcagtgcagaaggaaacctcagagtgttcattactttcctttccctaaaatcctagaccaccggttaagcagtcagctcctcatttgttttttcatattgcttttagaaaattagtcaaaagggttttctacactgaaggcactctagtcctaaggaaaatcccaaatcatgatattctaagtggttctcaacatctaatggcttataactccaaaaaggaaaataagcaaaacaagcagctattttctctcacttaagagtgaaccacaatttcacaatatcacaaaggaaggggaggaagtccgccatctttttcctggaatctggggaaacatttgtctttccttgttctatttttctgctagatgctgatttcaagcccctttcgaaaggaggtagagggcaggtaggaagaattgagggctcaaatcctgggttgaacattggtaagataggcaactaccaaayttccctcatgaattccataatattgactgcactttagtttcatccttaggcaaaatttcatcgtgtgcaatgtaaatatttgcaaaatc

SEQ ID NO: 848673 - DNA, 583 bp, Homo sapiens
tgtccgtatgtgcaaactggttttaagaattattcgttataaaagagaaacaaaggattgatttaatcctttaagtgrtgttaaatagctggtttaatgaggttttaagccagctatttaagcagcatatgaacatcatacctgaaaaaaatacatgttgcacatcaatatccacaccgacatgtttcaaagaaatatccacatctcttcactctactgaagctgtaatctctcagatgttgccagactgagattttaaaatccatgtgttatacagaaatttccgttatagtgacattcccatagtccccttattttaatgatcatccactaaaagtaatttatgtgtttagcattatttaccctagctctaagcctggctaacatatacaactgtgtgataatagtgagtttagccccaagagaataaactataaaaaattttaaaaaccttaatataaaataagaaaaatgatgtaaaagatcatgtaacttcatgataaagtagaacatacacatttttttcctttggggccttaactaaatttctgattgttaaaaacttttttagtgttttttagta

SEQ ID NO: 848674 - DNA, 524 bp, Homo sapiens
aaagatctttaaaaaacttatctttctataaagagtgctggttacatcataatgyttctctatcctaaagcactgttaatagacaattaatgacagtgatgacagtcagtgtctttgatttctgaagatgattaatattgatttacgtatttccatttatgcttccaaatgtgccctttgcgtacgtgttcatgattttgctgagatgagcttttctctttccctacactttcttcttccaaaaattaccacactctcaacctctcactgtctccttctcccttattattatcaccattttttggcggggaggggcacggatttgttccaaatctttagccatgcttaagaacaaaacagatgatgccctactgaaaaggagtgggggaaaagtggcacaacttgcttttgcacatagtaaataataccaattacttattgcagtgtttcctgaatggaggatgattcccacttacggaattgataattacagattgaggagagatgggatatggctaacacat

SEQ ID NO: 848675 - DNA, 605 bp, Homo sapiens
taatggtgtatttattcccattataagtgttactttgctgccaaggctgtgtaatctaagataggcaacttaaaaaaaggagtattaatacttatctgtaagggatgttataattcaatgagttaataaatatctcaaggtgctttctaatttttagagtgcagttcaacttttattaagtgagagttttggatgctctcatgtaaaataataatgtgaattgctttcctggacactatctactttaaaatcaatttctctttctaatgtttgtcagtatgtgaatggccaggacaaattggttttgcttaatccacacaacatgtcatcaacaaagtaaaatcgactaaaagtaaagtcatcaattacattcaccattggtgcagtaaagatagtttatttaaaagttatttgatagactttttacaaggtttctactttttataagagactatggaagtctgaggaatgcttcaagaaaagagagagcttctcccctgaaggggctcaatacactgacaattgactgtctctrtgaaaagcatttgaaatgaatccagggatgtgactgaaaaattttagtacccaaatacttattaatgaaa

SEQ ID NO: 848676 - DNA, 635 bp, Homo sapiens
cctcctctattgcgatcttacattagtatggtatatttgttacaatgagtgaaccaatactgatacattctcattaattaaaatgcatagcttcttcatactgccttargttttacctaatattaattttctctttttgaaaaaaataatttcaactcttattttagactcaggggtacacgttcaggtttgttacctggatatattgtgtgatgctgaggtttgggatatgattgatcctgttacccaggtactcagcatgatacccaagagtcagtttttcaaccctttcttccttcctgcctcccttctttagtagtccccagtgtctactgctgccatctttatgtccacgagtaccctctatttagctcccctttataagtgggaatatgtggtatctaattttctgtttttgtgtttatttgcttaggataatagcctccagctgcgtacatgttgctgcaaaggacatgattttgttggtttttttatggctgtgtagtattccatggtgtacatgtaccacattttctttaagcagtacgctcttgatgggtgcctggattgattccatgtctttgctattgtgaatagtgctaagcctcaagtcttgaagggtatactggaatgcc

SEQ ID NO: 848677 - DNA, 588 bp, Homo sapiens
attgtctgacttccagcccaatagccttccaggagagcaacagacattgtgaggaacacaatgtcccctgtgacayaggacacaatgtcagaaatcagcacccattttccttctttggttaacagttatttggttttcttttgggaagtcatgcttgctcaacaataagtcctcttggtcccccagagggttacttccccagccctaagggtgtactcacaacccaggccagcttaattagcatgtcttatacccttgactatagccaatgggtttgtcaaaggcatgaaattcagcttggctcagtaaaactcaattccagaacttttgctagaattgtggtgaagactccgtgtgatcattagccataaagatggggtgaaccttggtctgttgggggtcaccatgtggaggtgcttagttgagagtgaagttagcagaaagagaggacagcccaagagagaaggaagtggagagagagaaagggaggaaaagaataagggcaggggaggatgagagagagcatgaaatccagatttgagtcgctggatccagctgtacttgaagcctgcaggaagtcctagaatt

SEQ ID NO: 848678 - DNA, 516 bp, Homo sapiens
tgtcccacacattcagggttattaacactgatgccatgttcactttattctcaacaactactcatttctgaatcataaggttcctcatggaggtggagataaccctacctaccgggacattctgtttatgttttagggactgtcctttccatggcttccctagtccctcaggtgctgtgtgagttgtatttcctccattaattctacactagaaaaaggtgtatatgctcaagctgggataggaaataaacaatgaactcaggagtagcatcagcccagagatccctgccattgggcattcaatgattgggtaaaaagttaactatcagcaccttacaccaattagaaaggctactataaagaagatttttaaaaaagcccaggtgcggtggctcacgcctgtaatctcagcactttgggaggccaaggtgggtggatcatgaggtcaagagatygagaccatcttggccaacatggtgaaaccccatctctactaaaaatacaaaagttagctgg

SEQ ID NO: 848679 - DNA, 607 bp, Homo sapiens
aacaaagcttttaatattttgaaaacgatttaaagatcagtttataattgtaatttatcctgttgattaaaattagtttgcacaacatctgcctcaatgatgaygtttacagcaccataacacaaagtgagaacttaacctgtgcatgtgagtgtgtgtgtgcatgtataaatacaaaagtaaaaataaacacacatacacccttgatttgtgataaaagatgagttccactttggaatattttagaaccatgaggtgaacttccaccagggttcatttgggaaatttatggggttatttttttggttgctatgatgattgaaagactgatagcatttggtgagtgaagtcaagaatgctaaatgtcctgctatgcacaggacaagacttaaaaataaagaattgtctttagtaacacaaaacatatgagtgctgatgtggcttggctgtgtccccacccacatctcatcttgaattcccacctgttgtgggaggaacccagtgggaggtaattgaatgatgggggcagatctttcctgtgctgtcctcatgatagtgagtaagtctcacactatctgatggttttaaaaagggaagtttcccttca

SEQ ID NO: 848680 - DNA, 512 bp, Homo sapiens
ctgggttcatggaggcttcgatccatgcttcctgtactcctgcctcctgcccaatcctggcgctgcctgggcagccctgtgtggcatgccaatgctcctttttcttaggaactgtaagaaacaagctcttatttcaaaggcagttgttcctgtctgtgtctatcactttaccatacctgaattaaacaaatcctgaactcaaatcataaaacatggggaatgcaagcatattatatgagcagaaggagtggaatatctgtggacagtcctgatggctcagacccttagttcccacagtgttctgagaatgcccgctgatctctgctgacactgacttccgtgcatggtatttgcctgccgtccctggcacgataggaggttatggttgttgagtgyagtcattccttaaccactttgctatcctgccttattattgtcaataaatactataacatatgctaaattttagcattctgtgaaatgagagagggtgtatgatattgtttctaagg

SEQ ID NO: 848681 - DNA, 307 bp, Homo sapiens
gaaaatgtaaatattttttctttggtttacagtaataaggagtgtgattccttttttttttctacctcttctacttctacgttttaagagctctgtagcttagtgagctcccaggcttatgaacaccctgacacagctagtcttgaaatgttgccagcattgtaggatttgcatacttaacatgctacttatactgccataaagtatgtaaggtggaaaggatattgtcttttagtgtgggtacatagagcatggcacragttgttgccagcctcacatcacatctgtcttctgattttatacttta

SEQ ID NO: 848682 - DNA, 618 bp, Homo sapiens
aaaaaaagcaggactagagtcaggggtcctgggttaattccagctcaggaggtactacctaggtcacttaatttttctgaacacccagtttctcamctataacatggaaatgggtcacattaccacacaacacatctcattttaatgaatgagtttttaaaaacacttgtctgctaaaaaacgaaagttctataaattacatttttggtaatgtattcagccatggaagatgacctttattcactatatttttaatttcttttttttaatgcagcagaacacttcttataaaccccacagactactgtaggataaggatatttcaaatgataaggtgggtcacaaaacacctagaagcttagctaatttctagcttatggcaaagaatatttccccatccaacttactattttgaaaaatttcaaattcacttaaaagttgaaggaacagtataatggacactcatttatccttcatctagattcaccagtagttaacattttaacatatttactttctgtgtgtgtctgtgtatgtttataaaacttcattttggctgaactatttgaaaataaattgtagatacatttattatcttttaaattactcttcattgca

SEQ ID NO: 848683 - DNA, 724 bp, Homo sapiens
ccttttctgttctgggatctcattcaggatcccaagaaacatttagctgtcaagtctcctgaggctcctctggctgaggcagttgctgggacattttctgctttgtatgaccttgcaggtttggaagagcaccaatcaggggtacagtaggatgccccatactgaaatctttatgttgttattctcatgattagactggggtcatggcttttagggaggagaaccacagaggtaaggtgccatcgtcatcacatcatctgaagggtacatactgtcaacatgactaatcactatggtgaccttgttcaccttgccaaggtggtgtttgttaggttttctctttccatagtgcactctttagaaggaggctactttgtgcagcccacacttaatgagtgagaagttttgctccacctcctgagggtggagtatccagacaaattatttagaattcttatgcataatttgtctcatatctcccatttaaatatttactcaattatctattagtaccagtatggactcatggatatttatttggtactttgagttaaaattatatattattctatttattttattgctcaaatttttccagttcaaaaattacccactacaatakttatgtagtggtactttgttgtcattttaagttgcaattctctgttgacaaacaatattgagcattttttcatatccttatttggcatctgtttaccttctt

SEQ ID NO: 848684 - DNA, 551 bp, Homo sapiens
tggaactgtgactccattaaacctcctctttttttttttttagatggagtctcgccctgttgcccaggctggagtgcagtggcgcgatctcggctcacggcaacctttgcctccygggttcaaacaattctcctgcctcagcctgccgagtagctgggattacaggcatgcgccaccacgcccagctaattttgtatttttagtagagacggagtttcaccatgttggccaggcttgtctcgaacgcctgacctcgtgatccgcccgcatcggcctcccaaagtgctgtgattacaggcgtgagccaccacaccctgcctaaacctctttttctttataaattaccagtctcaggtatgtctttattagcagtgtgagaacagactaatacccccctcatgcaaagatgagaaccccaagaaggggactcacccatggagctaagttaatagcaaaggcaagataagaactcagatcttgggctgcagccacaggcccctccctttataccactctgactcctggaatcagtaagaaaatctccgtctcac

SEQ ID NO: 848685 - DNA, 552 bp, Homo sapiens
agtaatcaaatgaaaaatgtaacaaatttatgagaaggttaacagggaaaggccactgagtttcacactaagagaactgctggagaccagaacatgcaattttagcagaacagctgagagaaaactgaggatcaggaataaagtgcgtgaagacagaacagagacagagggtattcaatgagaaaaactcagagaaccaagccaggcaacgtaccattagacccaactatttacagtatcaactgttggagtactttctgtcaccagtaagatttaacccaatgaaaagaataaaatagcccatttcttttcattgatatgatgcaccatgacttactgtgtgcactgacttaatatgtacagtgatttaatgagggagtgtctctattcctgagagaatctttcataaaactgtggtttagatgaaagcttacaaggatgcaaaatgccatggtagtcaaatgtcctactaaacgtatggatatctgttcaaagccgctgctattaggcccaaagayagaaaacgtaggctgctcccctgcatgaggacag

SEQ ID NO: 848686 - DNA, 440 bp, Homo sapiens
agaatggtttcagacaagctgcttactttccttagcctcggtttacttagtcataaaatggggccaataatagtagctatagtaaaggggtttgtgaagaataaaataatcgagcatataaatgttggctgatgattgcagaagcagctgcagcagcaggaccttagaagcttaaaggaagtgatgaaatcactttaggaaaatctatcccactcttagtacgctgtactgaaatctctcttcaagtgtctgctctcacacaatacaatcagttccatgagaacagggaccatgtctattttgctgtctttccagagtcaaggataatatttggytaaatagtaagcacttaataagtgagagatgagctggcactcactaggcctatggccttagagaatgtcttgcacctcagtgggacacatacagcagataaagat

SEQ ID NO: 848687 - DNA, 624 bp, Homo sapiens
tctatgcctgaaaatggaattgctctggttttttgagtgacttttcactagagggccttccagttactcctgtaagctgcctaacctggcacaccaygcccaagtgtaaccgtgaatccaaatgagtgggctgacctaagggaatgccaccaggcctcatcctgagcccaggctcacgctttgccctcctgggaaccttggcctgtgcatctttccttatctgtggagtcacgtctttggagcacctgggcttaggaagaatgattagtgaatctgtgtaagccaagcaaagttcaaagacctgcccagtcttcatttccaaacaatctcgtatctatgagacagtggccggcagcgtgactcagcctgaccccagcctcagtaacaaactctggcaaagacacgcggggagaggctgcagcgcttagaacttggagccatggtcacctgaccccggaatgaaacccgataaacaagcatttactgaacacccactggaagtgcttacaaggcactaagctaagcaccatcaagaaccttgatctcaaaggctgcaccacctctgtggcaggtgacggaagggaatgcttttcccatgcaactgcctaggaaagaaatcccaga

SEQ ID NO: 848688 - DNA, 624 bp, Homo sapiens
tctatgcctgaaaatggaattgctctggttttttgagtgacttttcactagagggccttccagttactcctgtaagctgcctaacctggcacaccacgcccaagtgtaaccgtgaatccaaatgagtgggctgacctaagggaatgccaccaggcctcatcctgagcccaggctcacgctttgccctcctgggaaccttggcctgtgcatctttccttatctgtggagtcacgtctttggagcacctgggcttaggaagaatgattagtgaatctgtgtaagccaagcaaagttcaaagacctgcccagtcttcatttccaaacaatctcgtatctatgagacagtggccggcagcgtgactcagcctgaccccagcctcagtaacaaactctggcaaagacacgcggggagaggctgcagcgcttagaacttggagccatggtcacctgaccccggaatgaaacccgataaacaagcatttactgaacacccactggaagtgcttacaaggcactaagctaagcaccrtcaagaaccttgatctcaaaggctgcaccacctctgtggcaggtgacggaagggaatgcttttcccatgcaactgcctaggaaagaaatcccaga

SEQ ID NO: 848689 - DNA, 467 bp, Homo sapiens
gcaggcgacctggaataccagctccatagttctataatctaccatcctgaggccacacaggaaatcagacggcccctgggcagtctgaatggtaatcatacgggggagaagggacagcatgtttctcctgaaagccgaaggcaagacgagcaaagtgaaccaagggagaagcaggtaacaggcacacctacagtgcagcagtcaggagtgagccgccccactgcacatggcggcctggctctggggcagtcactaccatggctgccttaactgaaggtagtctagcacaaaaagccataaaccaaaccttaacttaaggtagcctagtacaaaagccacaaagcaaacaaaaaacaaaaaccccaacagggcttgaaagaccaataggaaagcaccaggccctcccaggaatgkataagcactgaagcctacttacggctatatattcttgggcttccataacagga

SEQ ID NO: 848690 - DNA, 599 bp, Homo sapiens
tggttcttgtgtccagcgcatttaacacaaggcgcacatgctgatattcacctatgtcaactgcaagtgattttgagagcctcctggatgccaggcgtcgggcaggacataataatgcaggtggtatctctggcctcaaggaataacttcaccaaataaaacagtaggggatgcatcttctggatgcattttcaggggcatttcacagaggtgctgagaatgccctcctttagaggacagcacttgactctcatttgtagagaacagacagacccaagagcccttggtcagacagggagatgaagaccctgagaggatcagggactttgtccgaggtcccacagccacatggtgatcaggaccagatgtgacaccagggcccactacacagactatctgctacttgcacaggcaagaggcctctcccgggcccagccaaccacctggttcagagggtccctctagggtgraggacacagatcctgacaacacctggggcttggccccttcccatgccaacagagacccccaaagcattaggtagtgggcatccccaagaaggaagaacagctgcaggaaggcctgttcacatgccagga

SEQ ID NO: 848691 - DNA, 606 bp, Homo sapiens
aaagatgtaatgatacatgagagtaagtagatgttacagagaataatgtgtgaggcaggaagcagaaagtattgtggctgcagaaaagggcagggaccaactaaagaatcttgagggtcacgttttcaagactkgcctttgtcttgtggatgatggtgcaatattgagagcttttaagaaacaatgatatgacttcttaccaactccaataattcatagcatgtctgaagccttagtataattaaatatgggtaagagaaaaaaaaaacaaaaacaatggagagactaatagaaagaaggaataaaggaaagaagaacaagataaagggctctgttattatttgcccctgaaaccaaggtcaccactcaatcctggcaatgcctgttttgctgatgaatgggttataacaaggtgtagttgctaaaagcttactcaatgataatgataataaaaccacagtaatgatctgatgtaccaggcaatgccgttgtactttccaggattaaggtatgatttaaaactgttttcacaacctctctgcattatgctgtgctaatttcaaaagtagcttttttgtttgtttttttcaaatcaaatatctgtat

SEQ ID NO: 848692 - DNA, 591 bp, Homo sapiens
acacacaccgccatttctcatttgcacaaattgttgcatacccagttacatgttcactttcatgaaagtcacagtcatgtgacacacctattcccacactcacaggaatacatgcacacaatcttacgcatgcacacatacacacgcacacatacacacacacacatacacccacaacgtaaggacaaccacagaggctgaacattccactgagaatcccaacctaagatatgagataaagattcccagagacctggcctcagcaacaacaggacatgctccctgtatgtcttccccctatacatgaggtacactaggtgggctccaaatgcaggtgtttactctgcttccaaagaggggacagtagcttgaggtatgaccctctaatctccagcttgtcagagaggaggcagagcatccctagaaaaggacagcagaaataaaaatcaggaaaggacagtggaaataaaaaccaggaaactgagaacaacaataatggctaatcagtgatggayatttgccattgcatctgtgctaagacctttctccttgcaacagcatcacaaggatggggatactatcatcatcatt

SEQ ID NO: 848693 - DNA, 257 bp, Homo sapiens
gtcttacagtttggccctctcctttccgtttagtcccaggagagggttcactactcaggactcccccgctccccccccaagttctccaagccaccacaagttgggtgataaccttttaaagcagcaatttggggagctcttggaaaggtctacgaagtaggagaaccagaaaaaaagcagaagctgccctcctgctcggagcttagaccacaaaaaagcttgagttgggatccktgctcccctctctctttgaagtt

SEQ ID NO: 848694 - DNA, 430 bp, Homo sapiens
ggcctggcctcgcgccggggtggggtggggtggggtgaggtggggggcttggttcggatttccggcatctttgaaccccaggccattcccggagaagctctgccccctcccgcgcccctccctgctcaggacagctgcagaggttctgagttccggcaaatgagccgtcaacatctgcccgaagtctgcaaggcccggaaaggtttatgactctccgggcttccgaactagagtttatgtgcaattattttctttctttcgtttgcaacagaattagatttggagattttgtgttcttcttccttttccctttagtctaatgcacaagcagaraaaagcaaaaacaaaaacaaacccaagactgtgcagagggtgctacggcgggaagaagtcagttattttcatcttaaagaatctgagttgaatagag

SEQ ID NO: 848695 - DNA, 570 bp, Homo sapiens
agaaaagacaacacttatatactgttcgttggaataaaaattaattcagccagtatggagagcagtttgaagatttctcaaagaactaaaagttgtgctaccaattgacccagcaatccaatcctgttactcagtacatactccccccaaataaattattttatcaaaaagacacaggcacttatatgctcatcaaaacactactcacaataacaaagacatgcaatcaaccccagtgcccatcaacagtgaactggataaagaaagtgtggtacatatacaccatggtattctgcacagccattaaaaacaaaagaaattatgttctttgcagcaagatggatgcagttggaagccattatcctaagctaagtttgcagaacagaaaagtaaataccacgtgttctcagttataagtgggacctgaacactgggtatacatgcacataaagatgagatcaatatgacactgtgcaatacaagaaggagaagggagggaaggacgcaaggttttaaaactacctgttggatacyatgctctctaccggcaggacagattcattcatactc

SEQ ID NO: 848696 - DNA, 602 bp, Homo sapiens
ctgttcttgtcatctgcatatgcagcaccaactgtatctttagaagaagacaaaaattgaggtatataaacagtatacctacccagaaagagwtgatagtatctccatttttgttaagaaggcaagaaaatgcacaattagcttagcaatgttttcttcccaaaccagtcttgattacaattattttgaaagtgtgcttgtccagaacttgttgttttccatgattcttgaaaactgtatttctggaccttcatttcatttttaacattctttttaaggcagaggtgtttgagttactaaatatatcaatattaaaacactgaatagtgaccttcatttgtcccaatgttaatgtattcaacttgttgagaggagaggagatggttcttaatctgggtcattctaaacaagtggaatttttatctgcatagcaatggtatgagtagaaatctacattttctaaaatatgtgaaaatatattttaaataacattagacttttaatataaaaatgttttctggctgaagtttatttttaaaatctttgctgacttacccatactcatgaaaaaatatgtatatgtgcattacttctaatgttag

SEQ ID NO: 848697 - DNA, 602 bp, Homo sapiens
ctgttcttgtcatctgcatatgcagcaccaactgtatctttagaagaagacaaaaattgaggtatataaacagtatacctacccagaaagagttgatagtatctccatttttgttaagaaggcaagaaaatgcacaattagcttagcaatgttttcttcccaaaccagtcttgattacaattattttgaaagtgtgcttgtccagaacttgttgttttccatgattcttgaaaactgtatttctggaccttcatttcatttttaacattctttttaaggcagaggtgtttgagttactaaatatatcaatattaaaacactgaatagtgaccttcatttgtcccaatgttaatgtattcaacttgttgagaggagaggagatggttcttaatctgggtcattctaaacaagtggaatttttatctgcatagcaatggtatgagtagaaatctacattttctaaaatatgtgaaaatatattttaaataacattagacytttaatataaaaatgttttctggctgaagtttatttttaaaatctttgctgacttacccatactcatgaaaaaatatgtatatgtgcattacttctaatgttag

SEQ ID NO: 848698 - DNA, 565 bp, Homo sapiens
tatataaatgttaaatatcttatatgtacatatatcttctgcctatgttttctggctttctgtgtctctacccaactctccaatccccttctaaaaggagagaggcacacacactcccgtggattctaccagaaattataacagaagaagactaaagatgtcaagagatgttggcaagtctacataaatcagtctggatctaaaataatctgtaaaatcccattagcttacaaaatcagtgtggttactatcctgtaggagatttataggaacacagttctagcatttttattgctatttcagttgttgaccatactttcccaaatgcagtggagtgacttaagtgactttcccaaatgcagtggagcctccataggtaagctttttgacaataaaggaagagcatgaagcacggcagatagagcaaagaatcaagttttgagtmttcacagctcccttaaaatctgatgagatttcttccttttcaaatgacattcttgtaagaaaggtttataaagcataaaaacatttattttctgtaaaattgttgtttcttttgtgacag

SEQ ID NO: 848699 - DNA, 511 bp, Homo sapiens
ggtacgttgttctaaataagtaagataagtttgttaatttttttttccccctgtcttctatagccctgctaactttttctctttgtctatctgttactgagtgagttatgctaaaatctcacactrtatttgtaggcttgtctattactcattttagttctttatgcctttgctttttaagactatttttataaattgacatatatatgtcatatgtatgtgtgtatatatatatatatacacacacacgtatatatgtatgtatgtatgtatatattcctgttggagtggttcttttgtcagtaaactgtcctttttagtttctagtaattattctagcttaccatcttttttccctagtatgactataactgtaccaaccttcttttgctttgtatttgcctagtgtttttttcattcatttactttcaacttttattttcttatatttaagagttactacatttaagtttttcttaaaaatcgaagctataattttaaaaccataaaa

SEQ ID NO: 848700 - DNA, 581 bp, Homo sapiens
ttgaaattacttattatctctcccaaaaaataccaaaatcaataatattcaaaaaccttttctcttttttataaaaacaagtatggaggaacaaaaacttgttgaattttaaacagaaaaactacctcaagacattggtatggaactgcttctcaaagtttttacaataacaaattataagggatgagagtttagtatgagaaattatttgaggacatcccatattttctatttttattagtttatactaagtttttataatcaccatattctacaaatgttgctatagcattttatacttttttattgcttaactgattaattaggtaatagtaaaactgtctagtggaagaagcctgcctacctcacagaatgaataaaggaaagggcatttcagtaattcctcagttctttgtttagcatatatgcagctgggcggtgagccagtagtgaaggctgagagaataaagggagcccccatttcccttcctacttcggatgtgtatttctggtatgcaygagcaaaggaaaatacgatagggaagttggattttcaaaatgctaataataaaaatacaaag

SEQ ID NO: 848701 - DNA, 523 bp, Homo sapiens
aggagggagggagggagaaaagaaggaaggaaggaagggagagatggagggagggagggaggaaggaaagaaggaaggaaggaaagaaggaaggaaggaaagaaactttggtctattatcacaacagaataaaaagcaaaggatggataagcccaaagattttgcaaaggatgtattaagatttggtgatctggagagtgggtacatagaaagagggagatattgaaggtgaattgaagatctgaagattgtttaatattttagcttcattccattaataaggtggctcttttatacttcatggccacaacagaaacaaaagattcacaaggaactgttttcaatattggttgtcttccaactagaggcagatgaattggcttccccagtgggagccagaacctaaagagatattgtggaaggtctggctcatgttaccagacgacaaggggacaggtgaagaagtattcataatgacgtggctcagggaggggagacacaaraaccagaagataaatgtgtg

SEQ ID NO: 848702 - DNA, 578 bp, Homo sapiens
accaaatcaactactgtagatattttgaaatgtacaataaattattgatacctatagttgaattatcatgctgccaaacagtagatcttatccctactacctaattggggtttttttttgaacccattaaccatctcatctttatgcaaaacctccccactatccttcccagcctttggtaaccaccattctattctctacctccatgagaccatttctttttttgctcccacataggagtgagaacatgcaaaatttgcctttctttgcctagcttattttagttaacataatgtcctccagttccattcatgttgttgcaagtgataggatttaattcttctttatggctgaataatattacattttgtatatgtgccacatttcctttatccattcacctatttattgattgacacttaggttgatttcatatcttggctattgtaaatagtgctgcaatagacatggaagtacacgtatctctttgacatactgattttctttcttttggatatatacccaacagtaggactgctgggtcawgtggtagttctatttttagtgttttttttttt

SEQ ID NO: 848703 - DNA, 575 bp, Homo sapiens
gccatttcattatgtgtacatatttcaaaatatacataataaatacatataatttttatttgtgaatttaaacaggaaattatgtaataaccagtaattgtgcatctattaatggaaaaaaatctaataatatyacagataacttctaaaacattatagcttgtatattaatttaatatctttctcacttaattaggaaatattattcatttagaagggaaaataaataagaaaaacaagacacggatctgtttttgcccagaaaacagcagatcccaaatcatgtcactatctttagcacttacgtatctctaattctattcccataatgtattaggtcatttgttctttattttgactttttaaagtttatcatttgcatcacattacatatttcatgttaaataaattgcaacaataagttatatctcaggttaaaatatcttttgatatatatgtatgtatatacacatatatgtggatatatatgtatgtatatacacatatatgtggatatatatgtatgtatatacacatatatgtggatatatatgtatgtatatacacatatatgt

SEQ ID NO: 848704 - DNA, 544 bp, Homo sapiens
atcccagctactcaggaggctgaggcataagaatagattggatcctggaggtggagattgcagtgaactgggattgtgccaytgcaccccagcctgggtgacagagtgagactctctcaaaaataaataaataaataatttttgaggctgggcacagtggatcaggcctgtaatcccagcactttgggaggctgaggcaggaggatggcttccaacttccttgagaccagggagttcaagaccagcctgggcaacatagtgagaccttgtctctactaaaaataaaaataaatacgtggtgcatggtggcgcatacctatagtcccagctacttgtgaggcgaagtaagaggataacttaagcccgagatatccaggttgcagtgagccatgattgaaccactgcactgtagcctgagcgacagactgaaacagtatctcaaaaatacagcacagtggctctcgcctgttgtaatcccagcactttgggaggccaaggcgggcggatcacttgaggtcaggagtttgagaccaacctggccaac

SEQ ID NO: 848705 - DNA, 558 bp, Homo sapiens
aaaaactgaacggtcagtggagactaatgcaagatcttagactcatcaatgaggcagtaattcctctatatccagttgtacccaacccctatacaytgctctctcaaataccagaggaagcagaatggttcactgttttggacctcaaggatgccttcttctgtattcccctgcactctgactcccagtttctctttgcctttgaggatcccacagaccacacgtccaacttacgtggatggtcttgccccaacggtttagggatagccctcacctgtttggtcaggccctggcccaagatcttggtcacttctcaagtccaggcactctggtccttcagtatgtggatgacttacttttggctaccagttcggaagccttgtgccagcaggctactgtagatctcttgaactttttagctgatcaagggtacaaggtgtctaggtcaaaggccaagctttgcctacatcagatcaaatatctaggcctaatctttgccaaagggaccagggccctcagcaaggaacgaatacagcctatactggcttatcctcaccc

SEQ ID NO: 848706 - DNA, 570 bp, Homo sapiens
ttgataacttatttcctttatttttggctgagcaacatttccactgtawggatgtgctgcagtttttaaagttcattcacttactgaaggacgtcttggttgcttccaagttttgccaattatgaataaagctgctataaacatttgtgtgcaggtttttgtgtggatgtgagtttttacttcctttgtgtaaatatcaaggagcaggatcactggattgtatggtaagagtatacttagtttgataagaaaccaacattctgtcttccacagtggctgtacgatttttccttcttaccagcagtgaatgagagttcttgtttctccacatccttgctgacatttggtgttgtcagttggattttggccattctaataagtgtgtagtgttatctcatgttaatttgcaaggccctaatgacatatgatgttgatcatctttttgtctgcttatttatcatctatatctctttagtgatgtgtccagatcttttgtccattttttaatcaggctgtttttctttgagtattgtcgaattttaagtgggttttttttttcgggtataattt

SEQ ID NO: 848707 - DNA, 519 bp, Homo sapiens
ttgaacttattcctccagtctaactgaaattttgtgttctttgtttctcatggtttctagaacaggagatggcacatcctagacaccttatacatatttttttttttttttaagatggagtctcrctctgtcacccaggctggagtgcagttgggcgatctcagctcactgcagcctccacctcccgagttccagtgattcccccgcctcagcctcccaggtagctgggatggcaggcacatgccaccatgcctggctaatttttatatttttagtagagatgggatttcaccatgttggccaggctggtctggaactcctgacctcaggtgatctgcccgcctcagcttcccaaagtgctaggagtataggcatgagccaccacgcacgaccccttatacatattttcaaggtaagggaggctggcacttgacataacatagtacttatctagcactgatagaattgtggggtgattaatcttcttttggttttagtttatgaaaaataaactatttc

SEQ ID NO: 848708 - DNA, 622 bp, Homo sapiens
caagaagaaagagaaaatgatcaactgcccatttagctgagaggcagtgtacgacgaagaaggaaggaactgaaaacccggcagcacagagcctactgacccccccggacaagaacagtgtcaggggacagtggagcagtccaggctggaggagacagagatgaaaagagaatggaagtcaacatgtctgtgattcttttgagaagttttgctttgaagacagcagcagagaaatggagagtaactgtatttattttattcacagataagtcttgacttgtgaaaggtaaagcattatttgggaaatgaaatcacatgctatacctgctagatttgtttttggcacagtaactgggggtccttaattaagtcgttatttattaagtcagttcctcaaattctatcttcaggtttgcatttaaaatggtgctaaattaaaatactatattcattttaattaacaaagtttgtaaaactgaaacaaatgttccyaaaaagacattcactgaaaaagctttactctggttgagtaaaaaaataatactgcaagtcctcacctcccgcaaataggatttttaggagcatatacgacacaaatattcccattttaaatattttcacc

SEQ ID NO: 848709 - DNA, 591 bp, Homo sapiens
gcttaatgtccactgctctgggtctttctgaccaacatgcccctcaccccaacacaagtatttcctctgcaataacctccaagctctgtaattaaggtataccctgaagaaggagagggaaattctcgatgtggagaaaacaaaagcacacatttttttttcctttaccggacaaagcaaatgggtggttggtggaccccaaatctcatttcaatcttgttgccatggaacaactgagggcctgatagctgaaggggtcataaaggcctcccaggcacagctgttattttcatgtatggtaattctcaagttggatgtttacttcttgggaactgtcctataatagtaacaaataagaattctaatactcagaaaactcaaagtcataattaaaaaaaatcactgtgggaatcataccaaaccctgatacaactataaaacttaaatcagatactgattctgaagagataggctatatgtctcaaaaatataattaaaaaagagaaaaatgtaagaaaatctaccaaaataaaaatggaaacaaaatwaagttgatactactttataaaattaaaactagctaggtcatgt

SEQ ID NO: 848710 - DNA, 543 bp, Homo sapiens
gatgtacttttagcattatacggctagggttattactttacacagaaaagagccgatgttatgtaaataggagaaatgtgattttttcatataggaaaaataggtgcttttgacaggaaattaatacttggagtggtgaggtgtgtttaatttcacgtatgtcacaaaacatggtgaaatctctcaccattttcctctcatctgtgggaccagagctgccttttctccctttctccccaacagctctgaacagctgtcctggggaccagaggctcacccttccctctgcagaaccagtagaaactgggcagaacagtgaatccatttacctccagaggacactagagactgtaggtttaaagacataagagaattatgtggcagatggccttgattatttgtgtggggcaratggtatgtacggggaaacacagagcgggggcttaggcgggagcttcccttcgtgggcagcatcttgcatctgcaagcttaatcctgggcacgaggcccaattctatgctcctctttgttgccttctccagc

SEQ ID NO: 848711 - DNA, 503 bp, Homo sapiens
gtgaaggacaagcagtcacagagtaacagtcagaccctctcagagcccagtcatggattaaaactgaaactcacagatacaatatcatcactacaaattttgcttataaatgacatctgttaagtttttccctattagttctatattagtcaccttggactaccataatgaaatgtcatagtttaaacaacagaaatatattttctcacagttttggaggctgggactatgagatcggggtatccacatggttgcgttctggttagcgctctttctggcttgcagatggctgtcttctcaccatgtcctcacatgatggagagaaagagagagcaagatttctagtgtctctttttataaagtgctaaacccattgyggtggtcctgacctcatgacttaatagaaccctaattacctcccaaaggccccgtctccaaataacatcacattggggatttcaggactttaacacttgtattttggggagacatatacattcagc

SEQ ID NO: 848712 - DNA, 580 bp, Homo sapiens
cttgacagactcatactgggactgtttttcagttctctcactctccaatcggctacacagagctytcagtgaatgtagaagaggctaaggaaataaccacttacgtgtggcaaaatgttccagccttgcagagattttcccaaaatcattagacccaccaaaatgctttccactggccaggtccacaccttcctcgtcagattttccatactcctccagcctccaagtactgtccatttgtatttcctaagagagccagtcatttatagctgaaaatgtaaccaagtttactctcataaaccagagatctccttgactgttaaccagaaaagaaaaatactgcttctcctaactcatttcaagacgatcagaatatgaagatccatacatacctactttccccaaaaaaggaggtgaatttggggcagctacattttaagggcatatagagatgaaaatatagagaggaggagagccaggcaaatcagctgctccatcatggtgagccgggaagaggttaagggttaattgcatgtatcccacctctggtctcttttagaccctgttctcagcaggtggc

SEQ ID NO: 848713 - DNA, 493 bp, Homo sapiens
gtggtgactggaaggccccacagcatggaagcactcagcctctgcagtcccttctcccccacctgggttgaactggcccagagacaggaaggacttctcattgcagagtgaaggtaagcagaagatccccaccagccccactgccatcacaaacacagagtcttaaggaaaatctcacagtatttgcaagccctgaggccagtatggagtactgccaggaatttacacagctgcatgtcctggactaggagtacaaggtgaaggcttcccacccccagagacctaagttgcagcaacacagcaccatcttgagaccagagtcatctcttgagtgtgccctactctgggggccagtagccactgtgcgtctccagcactggagctttaccttcagtawaccaagcccacatgggtgggttaaagccacaaccccagctgtgtggaggttggtcccagaattggcggtaactcaagtcctgaagagcagggagaa

SEQ ID NO: 848714 - DNA, 625 bp, Homo sapiens
tatatctctctacttatgtcttctttgacttctttttgcaatgtttgcagtgtacaggttttacacatctttttttttttttttgagatggagtcttgttctgtcgcccaggctttagtgcrgtggcgcaatctccgctcactgcaagctctgcctcctgagtttgtgccattctcttgcctcaacctccagagtagctgggactacaggcacctgccaccacgcccagctaatttttttgtatttttagtagagacggggtttcatgtgttagccaggatggtctcgatctcctgacctcatgatccgcccacctcagcctcccaaagtgctgggattacaggcgtgagccaccacgcccaccctacacatcttttgttagttttatttctaggcattcgataagtttttatgctgttttaagtaatatttgaatatcttcattttctgattatttgctattggtatataggaacataattaatttttgtatattgactttagttttgtttttaaattttaagttctgggagacatgtgctgaacgtgtaggtttgttacataggtatacgtgtgccatggtggtttgcagcagctgtcagcccatcatctaggttttaagttc

SEQ ID NO: 848715 - DNA, 603 bp, Homo sapiens
tgttgtatattttctttgaaaaaaatgtcttttgtccatattttactcagattatttttatttattattttgctactkggttgtagaaggttcctgtatattttggatattaacacctgatatgttttgactctgtgtccccacccaaatctcatcttgaattgtactcccataatttccatgtgttgtgggagggacctggtgggagataatttaaatcatgggggcagtttcccccatactgttctcatggtaccgaataagtctcacgagatctgacagttttatcaggggtttccgcttttgcatctttctcattttctcttgctgcctccatgtaagaagtgcctttcacttcctgctatgattctgaggcctccccagaactctatgttcaattaaagctatttttcctcccagtctcgggtatgtctttatccagcagtgtgaaagcagactaatgcagtaaactgttaccagtagagtggggtgttgctgaaaagataccccaaaatgtggaagcaactttaaaactggttaataggcagaagatgaaatggtttggagggctcagaagaagacaggaaaatgtgggaaagtttg

SEQ ID NO: 848716 - DNA, 367 bp, Homo sapiens
atcatcacatttagccttattaaaattcgctgatacagaacactggaaggcattgccacacatgacattaactgaaagtgggtcaacttggttcttaccagtctattacacaaaatttctatgaaaattgctattattgttggttagattccaattattcataatatccatgaaatggttaggacaattttctgcttaatattgctcttcagaataatagcaagctatagagcayaatgataatttccttaagaaagtaatttccagagagttatttctgggcaatgtagtctttgagttcataaaagtaaacacatgcatccactatatatatacacacacacatatatatttatatgtatatata

SEQ ID NO: 848717 - DNA, 503 bp, Homo sapiens
aaaagggtcagatagctgcttaggaagtcttctgaaactcctgrcgacctgcatctgagccacaagcagtgtgttcccagtcaggaaaccaaaatctactaccgaaataccataggtattgtccagatcctgctgtttgccacacagaaagccaatcattgagataacaagtactgccaaggaagaaggctttaagtggacactgcagccaaggagacaggagatcaaactcaaatccatctccttcaccaactaaaactggcattttatatagcagggaataaatgtaactatgtgtgggaaaacaggatttagtgtgcggtaatgaagaggatttggtcaacaagaagcagacagtcaggtaggaaaacagaaatttgagaggagcaaggaatcatgaggtctggaatctcattgtctggatgcggtgatttggtgagtctcagtttgtttctgctttgtgagaggcccaaggattactttcctgaggaaggacctccgat

SEQ ID NO: 848718 - DNA, 503 bp, Homo sapiens
aaaagggtcagatagctgcttaggaagtcttctgaaactcctgacgacctgcatctgagccacaagcagtgtgttcccagtcaggaaaccaaaatctactaccgaaataccataggtattgtccagatcctgctgtttgccacacagaaagccaatcattgagataacaagtactgccaaggaagaaggctttaagtggacactgcagccaaggagacaggagatcaaactcaaatccatctccttcaccaactaaaactggcattttatatagcagggaataaatgtaactatgtgtgggaaaacaggatttagtgtgcggtaatgaagaggatttggtcaacaagaagcagacagtcaggtaggaaaacagaaatttgagaggagcaaggaatcatgaggtctggaatctcattgtctggatgcsgtgatttggtgagtctcagtttgtttctgctttgtgagaggcccaaggattactttcctgaggaaggacctccgat

SEQ ID NO: 848719 - DNA, 592 bp, Homo sapiens
atcataaactacttgtttcttatccatgattctttcaaactttaraaatattcagaactgtgagatgttcaagagaaataattgagtatgtaatacctaaatagagagtcagtagtgtagataatcagcttcaggacataataaaacactaccaattactagtttttgaacattagacacaccacttaactttccttaatctctgtttctttaacttttaaatagggatatttctatcatttttactgttttgggatttaagttattaaaataggtttaatatagtttcaatacagggtaggtattatgtttaataactgcaaatattttctttttcttcttttttttaagacagggtctcactctgtcacctaggctggagtgcagtggtgcagtcctggttcattatagcttcagcctgctaggctcaagcgatgctcctcccttagcctccaaggacctgggaccacaggccacaaatattttctgatgcatttgtaccttttataacacagatttttcataacactgtcatttaattttacttactttctataatcacaaattaaatccttcattagactagacagta

SEQ ID NO: 848720 - DNA, 597 bp, Homo sapiens
atattttgaatgatacttatggacacatgtgcatgtaatagtgataactttgttatgtttttccctggttaatctcttttttgttataggggtgtaggctgtaaacttttacaatggggagagaagggatcacaccctctcagcccccatagttctagaaacaaaggtaggacgactgagacacctgacttgcttccaagcctacaattgaggacctaggacaactgacaaaaagctgacaaagaaagataagaatttttaccaagtttagctctcctggatctctacctggagtacctgatggagaatggaaggtaaacatttctctttatccctttctccctaaattcaggttggcaggagaaaatcatttgtttaggttgtgactcttgtgtaagtttggtttggaagacctatttataattatctttctccttttcatgggcagttatttctttcctgtctgtcttgttttgtgtcctgagawcttagcttggcctgctgcctgtcggggtcatgcaggttgttgggtcatgcagatggtcaactgaaagaggttgaggcccacatataaaactaacatatcaacttgccagc

SEQ ID NO: 848721 - DNA, 597 bp, Homo sapiens
atattttgaatgatacttatggacacatgtgcatgtaatagtgataactttgttatgtttttccctggttaatctcttttttgttataggggtgtaggctgtaaacttttacaatggggagagaagggatcacaccctctcagcccccatagttctagaaacaaaggtaggacgactgagacacctgacttgcttccaagcctacaattgaggacctaggacaactgacaaaaagctgacaaagaaagataagaatttttaccaagtttagctctcctggatctctacctggagtacctgatggagaatggaaggtaaacatttctctttatccctttctccctaaattcaggttggcaggagaaaatcatttgtttaggttgtgactcttgtgtaagtttggtttggaagacctatttataattatctttctccttttcatgggcagttatttctttcctgtctgtcttgttttgtgtcctgagatcttagcttggcctgckgcctgtcggggtcatgcaggttgttgggtcatgcagatggtcaactgaaagaggttgaggcccacatataaaactaacatatcaacttgccagc

SEQ ID NO: 848722 - DNA, 592 bp, Homo sapiens
gtgggtgagtcgccaccagctgtcaattccaggaggcccagcagaaatcaaaggcccgggactggctcagagccctgttgtaccacctggtatatgtggtgagcatgttacactgaggacattttaggtgaagttacaggaaagttgtgtatctgggcaacagatacacgcctgtggggtgagcgtctgcgaggacacagacttttgtcttgaccagtgaccttcgggctccacggccccttatcatgccccaccccacacaccggtatctccttctccatgcagcagctccacagctgggtcctgctcctcagacaagatggggccagaggcggccccagcagccacgcatgctgccccacaggccacaagagagaagatccggtccaggttccacggcagccacgacctcatccaccgcctgttcgtctgcatttcaggtgtcatgtcagggcctgagaccggtgcatggcttgaggacacacgggctgcgctttaggggaggtcaggyggggcgtgtacaacctccccctcactttcctgtaaacagcagcccactctgcccctaaggagccagcactcctgttcatgg

SEQ ID NO: 848723 - DNA, 573 bp, Homo sapiens
ggaggtttcctcagccagcccagacaagtagctgggcggagcagggggccagaggatctctgagcccctgacttgtccccrcctgtgaggcttccatgctctgccaaggtgagggaggggacatggcacagtgaggctggggcaagggtagggagtggggccggaggacagtgtcagggttgagggaggcggcagagcactggggccagcctgcaggggggtccattctgtgggaagtgtgcttgtctcctggggtcacgggaatgctgggaacgcacttggcctggcctcagcggggacaggtcccacctctcctgagggatagagtgctcctgggacccatgttgcaaacatccccctcgatggaccccaagggtctctgggcccaggaggagctgcaagaggggccctggctgctggaggagggccccctgcctccagggtggggtccagccccgtgccacccttcaaggggtaggcaggtaggcttttatgttgaagggcacctgctgaccccgacctccctcttgactacagacccacgtggccaggctgcagtttgggctgaggaca

SEQ ID NO: 848724 - DNA, 601 bp, Homo sapiens
aagatgcatgaaaaaatacttaaaaatgctctacttcagttttyttaagaaaacacatgtaggtggagagtgggaaaatagacacagagactgggaagggtgagcagtggcggggcggggcaaagatgaagagaagcaggctaaagggtgcaaacatacagtaaaataaaagaaataaattcagtgtttgatagcagcgtaggatgactgtacttaacaaaaggtattgaacttgatgatgggtgctctgaataccctgacgtgaccaccacacattatatacacgtaatacattttctcatgtacctcatacatctgcacaaatttttaaaaggctaaagcacatgccaggagcatctttaaaaaaaagtttaaaggaaaccccaatataaccatcacctggttcaaacacaactttccagatcctgtgtgctttccctatcagaacccctttcttgctgccaaaagtaactgcaaccctgacttttgtagccttttcatcgttgcttttctttctagctttcccacttcaaagcctaagcaatgtagtttagctttgcttttgaactgtaagtaaacagtgacttacgtgtggcctttt

SEQ ID NO: 848725 - DNA, 612 bp, Homo sapiens
tttaggcagctataacaaaataccctcacatgagcaatttataaagagcagaaatctatttctcacagttctggaggctggaaagtccaagattaaggcacatataatccattgctatggtttatatgagtcccccaaagttcatgtgttgaaaactttatccccaatgcagcagcgctgggagatggaacctaataagaggtgactaggtcattgagggttctgctctcatgaatggattaataaccttatctctggagtgagttagttatcatgagaatggttttgttataaaagcaagtttggcctccttttgctctccctctcttgtacctctcttgcttttctgccttctgccatgggatggatgatggagcatgaatgccctcaccagatgctggtgccatgctcttcgacttctcagcctccagaatgtgatccaaacaaactcctattgtttatcaagtacacagtctgtggtattgttatagcaatataaaacagactaagacatgtgtatcagtagtttgttcctttctgttgctaagtagtaatccgtggtatggatawaccgtggtttgtttaaacattcacccgttttatgttacctga

SEQ ID NO: 848726 - DNA, 425 bp, Homo sapiens
tgtccccagcaactagaacagggcctggctcattgtaagctctcagtaataatgtgttgaacgaatgaaaggaggttagggagggaatcgtggataacttgggggaagagtgtttaaggcmcaggaaacagtcagtgaaaaggctctgaggaaggagagtatctggtgagttcctgaaacaacaaagagaccagagtggctagagctgagtgagccccaggaagagaagagacagacagctcagggggatagaaggtatctctgggcccattttaaaggcttcagcttaactcagtgaaatggagagccactgaggggttttgagcagagaagtgaccagaatctgacttgtgttttcatagcatcattctggatgatgttggagaacagacagaaggaggcaagtccagaagcaggaagaccaa

SEQ ID NO: 848727 - DNA, 425 bp, Homo sapiens
tgtccccagcaactagaacagggcctggctcattgtaagctctcagtaataatgtgttgaacgaatgaaaggaggttagggagggaatcgtggataacttgggggaagagtgtttaaggccsaggaaacagtcagtgaaaaggctctgaggaaggagagtatctggtgagttcctgaaacaacaaagagaccagagtggctagagctgagtgagccccaggaagagaagagacagacagctcagggggatagaaggtatctctgggcccattttaaaggcttcagcttaactcagtgaaatggagagccactgaggggttttgagcagagaagtgaccagaatctgacttgtgttttcatagcatcattctggatgatgttggagaacagacagaaggaggcaagtccagaagcaggaagaccaa

SEQ ID NO: 848728 - DNA, 588 bp, Homo sapiens
aaggggaataaacttttcctgggaacctgctgacaatacaaaggaccaaggcatttctatgccaggccttgttcccttatctgagtgagctggaggtttgtgcaagtttttatccaaatgggccgtaggtttttccatctgtgcagtcatgggcatgtctccaggcacaacaccctgtgctagttcccttattggtgcctgcagcttttttcccaggctgctttttatattatctggggataaggcactgactcatgagccaggggctctccaggacccttctcttgttacctacctaaggtaagctaactaaccggatccccacactcttgctgtgcctctcttcatgggatgaaaaattgaggagccaagggactatgcctacttggaatccatgttcctttacccacagaattctatactatgttatcagccagaaccccaggattccttgcctcatcagcytgaagcttgcttccaggatatgtgcaggccttttgtccaaatccatcctgaaaaaagactactacagatgtatatacccctatggctggcagtttgtgggaagtacagatgaagcttggatgt

SEQ ID NO: 848729 - DNA, 581 bp, Homo sapiens
ggtttaaaaaattaaacattttaaaatagaaaaaagcttatagaatagggatagaaagaaaatatttttgtccagctatacaatgtgtttgtgtcttaagcaaagaattattataaaagagtaaaaatgttttttaaaaaaatttaagtttagacagtaaaaatgttatggtaggctaaggttaattaattattaaagaaagaaaatttttaataaacttagtgtagtctaagtgtacagtatttataatgtctgcttgagtatacagtaatgtcctaggccttcacattcacccccactcactgactcacccagagcaacttgcaaccctgccagctccattcatggtgagtgtcctatacaggtgtaccattttttattttttagactgtatttttactgtaccttttctatgtttatattgtttcaatatacaaatacttgctattgtattacagttgcctacaattttcaataaagtaacatgccraacaggtttatagtctaggagcaataggctatattagacagcctaagtgtgtatgcagctaggtttgtgtgagtacactatgatgttcgca

SEQ ID NO: 848730 - DNA, 581 bp, Homo sapiens
ggtttaaaaaattaaacattttaaaatagaaaaaagcttatagaatagggatagaaagaaaatatttttgtccagctatacaatgtgtttgtgtcttaagcaaagaattattataaaagagtaaaaatgttttttaaaaaaatttaagtttagacagtaaaaatgttatggtaggctaaggttaattaattattaaagaaagaaaatttttaataaacttagtgtagtctaagtgtacagtatttataatgtctgcttgagtatacagtaatgtcctaggccttcacattcacccccactcactgactcacccagagcaacttgcaaccctgccagctccattcatggtgagtgtcctatacaggtgtaccattttttattttttagactgtatttttactgtaccttttctatgtttatattgtttcaatatacaaatacttgctattgtattacagttgcctacaattttcaataaagtaacatgccgaacaggtttatagtctaggagcaataggctatattagacagcctaagtgtgtaygcagctaggtttgtgtgagtacactatgatgttcgca

SEQ ID NO: 848731 - DNA, 575 bp, Homo sapiens
gaatatctatttatgtaaatcatatgctataaaggttatttgctgttaaagtctccaattaaaattccaaytgacagtcaagaatccttgaaatagcctaatcaaataagagtagatcaccactttatccaaggaataagcatcctctaggcagaggcaccatcctgtttttcttttttccacacctagaaaatcttcagcagctaacaaaatcaactgactagtatatgaaatgtatttgtaaataaataaataatcagcaactcagagaacatttattaaaagttttctaaagggtagagtaggtggctaaataaatgtgatacaatcatttcctttatagtgtttgcattaacattttacctaataataaaacgtaggttatttgtggcaaatgcatatcacagatgcagatatacaaagatgacaaggagaaacactaaatagcaataaatggtgcaaaccaagaaacagaggaggaaatgttgaagcaattgtgtagcagtacataaaagtttagagttctacaagcagagacctgtatgtaactatcacacatagaataagcaatgtat

SEQ ID NO: 848732 - DNA, 537 bp, Homo sapiens
cactggctccaggccagtccccacggttccaggctccagtggccccagggtccatgcccccaccagtaaatcctsgtatcaggccagaccctaaggaccaaaactccaggatagcctctgcagacccaggcttatctcagggtctatttagaagactcatgtgtagccttactctagcaccaggtcagtacccacagaagttcctgtggacccaggcttcagttcagactttatggatacaggctccagccagcctcaaggaaccagtctccagacacaccattacagacccaatcaaaacttctggcacagtttacccaggctctaaggccatctctgcatacccgggtgccaagcccactcacctattgaccttggtactgggccagcctgcctgatgactccagcagcaagtccatctatgaatcatggcagatagtctgcccataacctctggacaagctgaatgataaagggctttcccagacaaagccagtctgcaaagactgaaatgagtccctacttcttcaaatgtga

SEQ ID NO: 848733 - DNA, 577 bp, Homo sapiens
acccaggttccatgccatccccagcagctggctggccactggctccaggccagtccccacggttccaggctccagtggccccagggtccatgcccccaccagtaaatcctcgtatcaggccagaccctawggaccaaaactccaggatagcctctgcagacccaggcttatctcagggtctatttagaagactcatgtgtagccttactctagcaccaggtcagtacccacagaagttcctgtggacccaggcttcagttcagactttatggatacaggctccagccagcctcaaggaaccagtctccagacacaccattacagacccaatcaaaacttctggcacagtttacccaggctctaaggccatctctgcatacccgggtgccaagcccactcacctattgaccttggtactgggccagcctgcctgatgactccagcagcaagtccatctatgaatcatggcagatagtctgcccataacctctggacaagctgaatgataaagggctttcccagacaaagccagtctgcaaagactgaaatgagtccctacttcttcaaatgtgaaggt

SEQ ID NO: 848734 - DNA, 603 bp, Homo sapiens
tcatcttttctaaattaactgtaaataacaatggggttatattacaatgagtatatagttatttcccagccagttctagtgcgtgaagtgtgtcctcaagctgcttgatgagatggaaagccacaygtaaaagcagatggacagttaataagccatgctgtaaggttgagcaacatggcatgattggctagagatgctacaatcccactgaacctctctcagaaacaggcagtaaatttgaatcctaattacagtggtccagttcatttcctaatcagactgctggataagaaaggatctcattttgaagcattaaccctcaaatacagttaatgaccatgcaagaagcttgagtctttggttcctgtcatagtaattagagctcttgccaatggtgaggcttagagatttataagccaacagcaatgcaaagctgttcaagataggtgggggcaacctgacagcctcaaggtagtgctttccactggacagtttttgatgatctcaggagagtgtatactgagcaagaacttataaaaaataataccaagaaataatttagatgaagcctaaccatgatccagattggtaaacaatttttca

SEQ ID NO: 848735 - DNA, 598 bp, Homo sapiens
ttgcactgaattaataattttagtcaaacaaatgtatgtgtatatatataatcacatttggagataacactaaaaatccaaaaactcaaraggtgacaatactagtcctcctctactagatacagcagaaagtatcagtatttttccataaatcattaagatccctgtcccctaaatctgacttccagttgcactcaggaaattatcaaaagattgataaaagtacctgtacaacatcattcctcaagagcacaaagcagaggtaaagagcatatgctggatccattttatttgttttaactttaatggataggggaagagggtattgaaaatgaactgacccagtctaagggctaagactgtttgttcattatacatcacaagctgcaggataaaaatggtatagatctagatattatctaaggtagggatgggtcagcctgcagctccctcccccatcaatattcataaactcttagtattacagagaacaaaggcttgagtgtgcattttcacctcaaagtatgcacttagcaaatacttactaatgagtatcaaggtagaagtttagaagaggcaccaaaatatatttttcaac

SEQ ID NO: 848736 - DNA, 598 bp, Homo sapiens
ttgcactgaattaataattttagtcaaacaaatgtatgtgtatatatataatcacatttggagataacactaaaaatccaaaaactcaagaggtgacaatactagtcctcctctactagatacagcagaaagtatcagtatttttccataaatcattaagatccctgtcccctaaatctgacttccagttgcactcaggaaattatcaaaagattgataaaagtacctgtacaacatcattcctcaagagcacaaagcagaggtaaagagcatatgctggatccattttatttgttttaactttaatggataggggaagagggtattgaaaatgaactgacccagtctaagggctaagactgtttgttcattatacatcacaagctgcaggataaaaatggtatagatctagatattatctaaggtagggatgggtcagcctgcagctccctcccccatcaatattcataaactcttagtattacagagaacaaaggcttgagtgtgcattttcwcctcaaagtatgcacttagcaaatacttactaatgagtatcaaggtagaagtttagaagaggcaccaaaatatatttttcaac

SEQ ID NO: 848737 - DNA, 551 bp, Homo sapiens
ccgttgcacttaagatgaactcaaatattttatggtacctgcaaggcctgggatggttcctctgtttacttcttcaagtttatctttttctgctccctcctcttgctcacaaggcgggatctctcaccctctttcagattgtccttgaaaatgcacagctcagtgtttctcttcaaggacttaagctctgggttcctccactatagctggctggcaaccttcagatcacagatccactggccccgtctggaaactcttactgacaatgccatctgatgctgtccctcagtcactgcagtccctttcaagtatcaccttttttcctctgtagcagttatcaccatttggaataatttttgtttatttgctcattgtctccatcctcccactaaaatataagctctgtgatgacaaggtcctgtctctcttgctcacagctatgtgctcagtgtccccaagaggtgtttgccaygttgtaggtgctgggttagtttgtgttgtatgaagcagtgagcttaaacaaagggtttgaattaccttccctaagtagg

SEQ ID NO: 848738 - DNA, 566 bp, Homo sapiens
tgtttattcagtatttatccaagtgcccaaaaggttaacagttataagtttcatgactgccagcatataccaacaccttctctcaaaggaatattttttctcatcaatgctatcatcaaaaagcatttattaaacacccatctgcatgtggtattgggtacaatacagcacaatggcaattttttaaaattatgctctaagttctagggtacatgtgcacatcgagcagttttgttacatatgtatacatgtgccatgttggtgggctgcacccattaactcatcatttacattaggtatttctcctaatgctatccctcccccatctcccctccccctgacagaccccagtgtgtgatgttccccaccctgtgtccaagtgttctcattgttcaattcccacctatgagtgagaacctgcggtgtttggttttctgtccttgtgatagtttgctcagaatratggtttccagcttcatccatgtccctacaaaggacatgaactcatccttttttatggctgcatagtattccatggggtatatttgccacattttcttaatcca

SEQ ID NO: 848739 - DNA, 713 bp, Homo sapiens
taaaacagttcctggatccactgattttttttttaagggttttttcatgtctctatctcyttcagttctgctctgaccttagttatttcttgtatcctgctaacttttgaatttctttgctctttcttctctagttcttttaattgtggtgttagggtgtcgattttagatctttcctgctttctcatgtgggcatttagtgctataaattttcctcttaacactgctttagctgtgtcccagagattctggtacattttgtctttgttctcatttgtttctaagaacttctttatttctgcctcagtttcattatttacccagtagacattcaggagcaggttgttgagtttccatgtagatgtgcagtttgagtgagtttcttaatcctgagttctaatttgattgcactgtggtctgagagactgtttgttatgatttctggcttttgcattttgctgaggactgttttactttcaattatgtggtcaattttaggataagtgtgatgtggtgctgagaagaatgtatattctgttgatttggggtggagagttctgtagatatctattaggtccacttggtccagaactgagctcaagtcctgaatatccttgttaattttttggctcattgatctgtctaatattgacagtggggtgttaaagtctcccactattattgtgtgggaggctaagtctctttgcaggtct

SEQ ID NO: 848740 - DNA, 529 bp, Homo sapiens
ccaaaacctttgggatatggtgaaagcagtgttaataggaaagtttatagtgataaatgcatagtgcaagaagatagaacttaacttaacaacttaatgttgcacctaaaggaactagaaaaaggaattaaatccaaaactagcagaagcaaagatcagagctgaactaaatgaaattgagaccaaaaaaccatacaagaataaacaaaatgaaaaattggttcctggaaaggaaaaacgagattgctagaccagtagctagcttaatcaagtaaaagaaagaacatctaaaaaagcttgatcagaaatgacaaaggtgacattgcaactaatgttacagaaatacaaaagatccacaaagactactatgaacttctctacgtgctaaactagaaaacttagaggaaatagataaattcctagatacatacaatctgccragattgaaccaggaagaaatagaaatcctgaatagaccaataacaagttccaaagttgaatcagtaacaaaaagaaaaatctaccaacc

SEQ ID NO: 848741 - DNA, 623 bp, Homo sapiens
tgttctcaatagaaatccagactccaktccttgtacttgaacatttaattgtttgaaagtaacacattttattatgaagaaaaataatctatattcaaaatttagcaagtataccctggcaaaaaaatatataaagttgttttcaaattttcccattcaagaatggtgatatttaaatatattttctccttgactttttcccgtatctattaattatattaattaatatattaataccatattattacatattatatcatgttataataacatatcttataatccccatgcctttaaaaatgtcttattgttctgtcactcaaacagttattttggactctcatttgctgttttgacttctaatgttgcaaaatcttcttgagccaataacatttataattaagggagcagagttcttaaaattgaaaatgaaacctgtttggttatgaaatatcagagagttacaactttttccttaaatagatgtgagttgactttcattaaagggggaataaaagaaagaacaaacattttaagcaaacgttctaaacaaaggttgcaaaatcttactatctaaggcatggctcctcaattggatcttactgagatttactgataggtca

SEQ ID NO: 848742 - DNA, 577 bp, Homo sapiens
atttaaattaagagtaaagttaaaaattcagttcctcattcacgccagtcacattccaagtactcrttggccacatgtagctagtggcaactgtattggacagtgtagatatatgacattttcgtcattgtagaaatttctattggacagtgcttatctaggctttaaaagttgagaatagtgaaattgttctcttgaaatttgttattttggcaagaaattcattgtagtggcattgtagcttaccattattgtcttctggtgaaagaaacagttcttcaaacatttattgagctgcctttcctgggacatgtctcaggcccagggctggggttatctttggggttgagactagatttgactgatctagtcaagagttttattgggtgccaaatcatgatcacgggagacaaggtagatgggaaactgatacagctgactagaggggattggtctaggaaagaccagtgaatgactgttgtatatcaatagaaaacctgggtaaagatttttaactttttcttggggatcctggaaaaacagacttctctgaaaccttgggttctctgaattcagg

SEQ ID NO: 848743 - DNA, 457 bp, Homo sapiens
tatctctttattttgtcggttgttttctttgctatgcagaagctttttagcttgatataaccccatttgtcaatttctgcttttgttgcctgtgcttttgaggtctaactcaaagaatctttgccagacccgtgtcctgaagcatttccccagtgttttcttgtagtagtagtgtagtctcaggtcttacatataagtcttcaacccattttgatttgatttttttatgtagtaagagaacaggatctagtttctttcttctgcatatggacatctcgctttcccagtgccatttattggagtgactgtccttttgccaatgaatgttcttgatgcctttattgaaaatgatttgactgtaaatgtgtggatttattctgggttctctattctgttccatcggwctatgtgtcttttttttttttttttttttttgtgccagtaccacactttctta

SEQ ID NO: 848744 - DNA, 690 bp, Homo sapiens
cagctccacctgcagccctggtgcgggatccactgggtgaagccagctgggctcccgagtctggtggagacgtacagaacctttatgtctagctcagggattgtaaatacaccaatcagcaccccgtgtctagctcagggtctgtgaatgcaccaatcgacactgtatctagctactctggtggggccttggagaacctttatgtctagctcagggattgtaaatacaccaatgggcactctgtatctagctcaaggtattgtaaacacaccaatcagcaccctgtgtctagctcagggtttgtgaatgcaccaatcgacactatgtatctagctgctctggtggggccttggagaacctttgtatccatactctgtatctaactaatctgatggggacgtggagaacctttatgtctagctcaaggattgtaaacgcaccaatcagcaccctgtcaaaacagaccactgggctctaccaatcagcaggacgtgggtggggccagataagagaataaaagcaggctgcccgaaccagcagtagcaaccctttaggtccccttctgcactgtggaagctttgttcttttgctctttacaayatatcttgctactactcagtttttgggtccgcactgcttttataagctgtaacactcaccgtgaagacctgcagctttgctcctgagccc

SEQ ID NO: 848745 - DNA, 443 bp, Homo sapiens
ttgggatcccaaagatatttttttgtggattcttccagctacaaaagagaaatgtgtacatctcasctagcgtaccctaaaattccagtattctgtcacatgttctaatggatttattcctagttgtcaaactatgtgtcacaatttttggtctcagaaagtagtttatataagcccaaatgtctgcagagagtgaacttaagactgaatgttacagatgaaggaagaaaaggaaattaccatttacttgtgtatttggtattccttgtgtgccaggcactttgcgtatattcagtaagtgtgagaaggattatagcatataaaatgatctgattttaagtttgacttggtaatacttagttcatttaacgcacttattgttcttttctccctccctactttgggtgccaagctgagacatagttcttgcccagaaaggactc

SEQ ID NO: 848746 - DNA, 625 bp, Homo sapiens
ttctctgttattaaaattgcaggcagtcagcacacttatgaagtattcaatgtgcacaaaaccagtagttccaaacctcgactttagctaaacaaaagaactggggttatttttaaaagactcctgacaatgaccctcactctcctcccattactgtgagccccgtgagaacaaagagtcagtatcatgcatttctcagcatctagccctgcgcttggcattttggctaacacatatctgtggagtgaattaagatgatggcaaatacagttacttaaaggaaggtgagtcaatcaggaggatgtaggttatgttatgataacaaaaagttcaaaaatcacagtggcttaaaacaatgaaggtttttgtttctcacttgtgctacctgtcctttgtgaagtttgctgtgtcatcctaactcctaaccccaagctggtcactatctagaacactgccatttgctgttgcagggagaaaagatgcatggcaaacctagaacttgcttttaaagcttcagcttggaagtggtgcatcactgctgctagtatctcatggactgaagcaaatcagatggtcatatctattttcaaggragcaagaaagtgcagttgcattgtgtgcttca

SEQ ID NO: 848747 - DNA, 645 bp, Homo sapiens
ctaaagtaattcttcttctgtatattatttatctgccttctgcatgtgatgtttctttcaacgcctgccaygttctgtgtttatctatttggtagaatccatattgtgtcctttactcactcatcttttactgtggtaagttctctacatgcctgcacttagctcatgaagtttggagaggaatgggaggtaaggaatgaggtggagtcatctgaaatacctgtcagcttaaaatcagcttaaaaccacagataacataaaatctatagatcctctgcatgagccagatcttgccttaacttttagcctcctctaactgcagtgagaaagcacatctagatgagctcacagcatggctcgtaatgaagtctaatagattgcagatgttttgtgtttaataatttggtgtttatttctattcagtccactttggtcaccactataaatatgcttaatacgctcccctctctccatcatactctgtttttttaattggcatattcatttctttgggctgcctcaacaaatgaccacaaacttggtggcactgaacaacagaaatttattccctcacagttctggaggctaggaatctgaaatcaagcatggttaaggctccaggggagaatccttcattgtctcttt

SEQ ID NO: 848748 - DNA, 617 bp, Homo sapiens
aatttaaggcagtctatttgggatcctgtctacaatgacttagtcatgaaaatcatcaaaagacttttttcttttttctttttttttttttttttttgagatggagtctcactctgtcgcccaggctagagtgcagtggcgcgatctgggctcacttcaagctacgcctcccgggttcacaccattctcctgcctcagtctcccgagtagctgggactacaggcgcccaccaccatacccagccaatttttttgtgtatttttagtagagacggggtttcaccgtattagccaggattgtctcgatctcctgacctcgtgatccacctgcctcagcctcccaaagtgctgggattacaggcgtgagccgtggcacccggccaggacttttttcttacatgctgtgtctgaaaaactttaccaatcagcaagtccagatcacaatctgagttccagaactggacagtcaactggacctctctaccagggcatcctcccaacccccaagttcagcatgtccagactcttgacctgccctcccrctctggtatttctgttctcagtgaatggggtcatcatccacccaggcatccatgtcagaaactcggcagccctcct

SEQ ID NO: 848749 - DNA, 617 bp, Homo sapiens
cacaaatttttggtactttgtatttttatttcagttaattcaagatgttttctaacttgcctgtctttgacttttggactatttagaagtgagttgtttgctttccacatatttgagaatacatctacataatctgatattgatttctggcttaagtaaatcacagtcagataacatactttgtgattttttttaatttaaagttggtttatgataaagtttgatttatatatgtagtatatcttgttgaatgttccatgtgtgcttaaaaagactttgtgttctgccattagtgagtagagtgtaaattaggtaaaaacatttaatagtatcatgcaggacttctgtatccccgccaattttctgtctgcttgttctatttgttaccaagaaaggggtgttgaaataaccatccaagtataatgttggatttgtcctatttttctttcagttattgcctcacatattttgaagccctgtttttagataggtacacatttaatattgttacttctttgtggtgaatttattcttttatcattatatgacaatcctctttttcatggatgtycttgttctgaagtttactttgtttgctatttatattcatttttctt

SEQ ID NO: 848750 - DNA, 617 bp, Homo sapiens
cacaaatttttggtactttgtatttttatttcagttaattcaagatgttttctaacttgcctgtctttgacttttggactatttagaagtgagttgtttgctttccacatatttgagaatacatctacataatctgatattgatttctggcttaagtaaatcacagtcagataacatactttgtgattttttttaatttaaagttggtttatgataaagtttgatttatatatgtagtatatcttgttgaatgttccatgtgtgcttaaaaagactttgtgttctgccattagtgagtagagtgtaaattaggtaaaaacatttaatagtatcatgcaggacttctgtatccccgccaattttctgtctgcttgttctatttgttaccaagaaaggggtgttgaaataaccatccaagtataatgttggatttgtcctatttttctttcagttattgcctcacatattttgaagccctgtttttagataggtacacatttaatattgttacttctttgtggtgaatttattcttttatcattatatgacaatcctctttttcatggatgttcttgttctgamgtttactttgtttgctatttatattcatttttctt

SEQ ID NO: 848751 - DNA, 611 bp, Homo sapiens; identical to SEQ ID NO: 845087

SEQ ID NO: 848752 - DNA, 664 bp, Homo sapiens
ggtgtctgctcccactgcctggcctctctccactcctggtgcctgctctgatcttgagcaggagttggggccaagccctggggccatgaatggcagctctggaggcagatggatttctgggcggargctggccagtaagtccccaccttcatgtcagagagggcctgaaggctgggggctgggctgccagtcctacagatgggaggggggcccatggtgcctcttctggccatccgtggctggccacggaccaatcacaagcacttcttcccctctgaggtctataaaagccctgggctcagtcaaagcagggcaggggatggccagaggatgaagaaggcagagagagaatgggatagaagaccaactgcagagacgggtaccctcctgctgatagctggagacgatgagacgaccagcttactgtctccattgagagctgcagagacaacctgctggcagaaagggtctaacttcttggctgaaagcttgagacctgcagaaacgtctgaatgacttgcctgcagagaggagccaccctctacagggcctcctctctgctgacagctgaacactccacaggatggcttgcctacagagaggagctacgcactcttcttagctgttctaacactaaataaaactcttcttcttcacccatcac

SEQ ID NO: 848753 - DNA, 612 bp, Homo sapiens
taaaaagttattgatggaaaataatttttaggtgaaacaaaataaagsgatactatgatatatatcacatatatatcatatttaaattcactctagtaaaaagttatttggctatgaagttttataactgaaattaacaatgagaatctttaaaaaatcatagttctatgtcatccatttatgaccgtagtatgctggacaagttatcctgaccaactttttctgcaagagacctaaatttatagaaaaactataaaaattcattgttaagtacatcagtgggctgccaagactgtaagaaatatgaatccagataaatattaagtcaattgaggaatgtagagtagtaaacagagcaccaaagccagtttagccttgaatgcagttaacacatctgatgaaactgaacattgctcttcaagattctcagagcttacaggaaaagaaagaaagtaacatgcccactgaatgacaatactctaataagagaccctcggtaataagcagaataatggccccacgcaaagatatctaagtcttaacttctggagcctttgagtaagttatattacatgatgaaagggaattaaggttgccaattaattgatctta

SEQ ID NO: 848754 - DNA, 612 bp, Homo sapiens
taaaaagttattgatggaaaataatttttaggtgaaacaaaataaagcgatactatgatatatatcacatatrtatcatatttaaattcactctagtaaaaagttatttggctatgaagttttataactgaaattaacaatgagaatctttaaaaaatcatagttctatgtcatccatttatgaccgtagtatgctggacaagttatcctgaccaactttttctgcaagagacctaaatttatagaaaaactataaaaattcattgttaagtacatcagtgggctgccaagactgtaagaaatatgaatccagataaatattaagtcaattgaggaatgtagagtagtaaacagagcaccaaagccagtttagccttgaatgcagttaacacatctgatgaaactgaacattgctcttcaagattctcagagcttacaggaaaagaaagaaagtaacatgcccactgaatgacaatactctaataagagaccctcggtaataagcagaataatggccccacgcaaagatatctaagtcttaacttctggagcctttgagtaagttatattacatgatgaaagggaattaaggttgccaattaattgatctta

SEQ ID NO: 848755 - DNA, 612 bp, Homo sapiens
taaaaagttattgatggaaaataatttttaggtgaaacaaaataaagcgatactatgatatatatcacatatatatcatatttaaattcactctagtaaaaagttatttggctatgaarttttataactgaaattaacaatgagaatctttaaaaaatcatagttctatgtcatccatttatgaccgtagtatgctggacaagttatcctgaccaactttttctgcaagagacctaaatttatagaaaaactataaaaattcattgttaagtacatcagtgggctgccaagactgtaagaaatatgaatccagataaatattaagtcaattgaggaatgtagagtagtaaacagagcaccaaagccagtttagccttgaatgcagttaacacatctgatgaaactgaacattgctcttcaagattctcagagcttacaggaaaagaaagaaagtaacatgcccactgaatgacaatactctaataagagaccctcggtaataagcagaataatggccccacgcaaagatatctaagtcttaacttctggagcctttgagtaagttatattacatgatgaaagggaattaaggttgccaattaattgatctta

SEQ ID NO: 848756 - DNA, 482 bp, Homo sapiens
atgtacttataaaacctattacttttcccttcaaagtgatataagacccagtaaaacctgggtaataagcttcagcaactaatgatatttgtagaggcttttgaaatgcatattaggtgataatattccatctctcactgttacagtattattatgatcccaaaactagtaacactgttgaagtgaaatccatataaaataacaaaattcttagaactttcaggcagtgtgtttgacattttcttacaaaaagtcaatccagtttctgtgctcttggttcattttgtttgtcttctaagtgagtcaggatcaataggatcactatgtttatctattcaaatctgagatattgacttgcaaatagacaatttcattatcctcatgggcatgattttcctattggtgtcaytggtactaactgagccttttgggatttctactgaaaggtatgatagcttgtgttcaactcagtgagagtttac

SEQ ID NO: 848757 - DNA, 516 bp, Homo sapiens
taaccacccagcaatgtgctaacattttggtgtctatcctttccagtgtttctcgaattttaatgctcatacaaatgccatacggaactgtcaaaatacaaattctgatgcagcaggtctggggtagrgcctaagattctacatttctacgagacaggcacattaccacttggccaccgtgcctgagttagagtctactttttttttttttttttttttttgagatcgagtcttgctctgtcgcccaggctggagtgcagcggcactatctcagctcactgcaaccttgcctcctgggttcaagtgattctcctgcctcagcctcccaagtagctgggattacaggtgcctgccaccatgcctggctaatttttttgtatttttagtagatgaggtttcaccacgttggtcaggctggtctcaaactcctgacctcaagtgatccacctgcctcagcctcccaaagtgctgggattacaggcatgagccaccacaccctggcctagattctacatt

SEQ ID NO: 848758 - DNA, 529 bp, Homo sapiens
tcaccttgtggctgggcatttcccacccgcctcctggcagggccctgcagcctcacccgggacttctcctccagccgtgtcatcatgaccacagtggccgtgcgctgttcccacaccatyctccagaaatcacccatggtctcgggcagggggccctgcgtggcgatgtaggcattctgcttgcggtagccatcgatgtagttggcattgatgtagtcactcccggggacgcctatggataagaaaggaggtgggagggcattactacagggtccccagcccagcccaccatgcctcagtgcacccctgagactcgtggacatcctctgtagaatgacatgttgccctagctagcaagggggagagcaaggggatgggaggggcacccccttggctcaccatcgatagaggtaaggatgactcgagagtggtcgtaggcgatgacattcgcatagcggttcttgggcttgttcacctccaggtttgaattctcccacgtgaactgctgtccagggtcgatggactgcag

SEQ ID NO: 848759 - DNA, 529 bp, Homo sapiens
tcaccttgtggctgggcatttcccacccgcctcctggcagggccctgcagcctcacccgggacttctcctccagccgtgtcatcatgaccacagtggccgtgcgctgttcccacaccatcctccagaaatcrcccatggtctcgggcagggggccctgcgtggcgatgtaggcattctgcttgcggtagccatcgatgtagttggcattgatgtagtcactcccggggacgcctatggataagaaaggaggtgggagggcattactacagggtccccagcccagcccaccatgcctcagtgcacccctgagactcgtggacatcctctgtagaatgacatgttgccctagctagcaagggggagagcaaggggatgggaggggcacccccttggctcaccatcgatagaggtaaggatgactcgagagtggtcgtaggcgatgacattcgcatagcggttcttgggcttgttcacctccaggtttgaattctcccacgtgaactgctgtccagggtcgatggactgcag

SEQ ID NO: 848760 - DNA, 622 bp, Homo sapiens
actcagctcaggaagtgttgctctgaagcatctggatagagaagtgaatgacaggaactacatccaaaactcagtattatttcttaggacatttgtgtgtttcttggttaagctctgagttgtgcagtcatcccctctccagatcctctgatggggccctgtgctgtggtaaggggttggattccatcccttgaagaagggacagaagcagcaaaatgttcatcagtgaggccacttgcctgaagtcacccagtgtatcttgcctcagaaacagctgcgctacacccacattgccaacctcttctcccaaaggcccccctggcacttgagtttaagtcaccacatgtgccagacagggggtcctgtggggttgggatgcgttcagacccttccccagtgcagagcagcgctggacagaagtcagctgagtgggctatggagtcagccaacttgggatccagttctgccccttaaccacaaagcagctctgsggccctgggcctgtagcttcatctcactgaacctgtttttcataattacagcaagaatagtaatagaacccaccgcctaggattctgagcacccaagcacaatcgccctggcatatacagaagggctctgt

SEQ ID NO: 848761 - DNA, 529 bp, Homo sapiens
cgagcaaccccctcttttctgagggccatatttggggagaacctcttgcctcatattgaagcacatgtagtagctgcccttcctcaagggcctrggggagtgctctggctgccggaggcctcctctggggcttggatcctaacacactttgaagcctggggcgtgttcggacctgcttggcatgacattcaaggcccttccggcatctgttctccaaccgcttccagcgcatctcttgccccaccctctcaccctgtgctccagccacatctgctggagtccctcccttagccccccaggaatactttgccctcaaggggacagatgtttggaggggagggctacagagcccagtgggttggggcaggcatctgagaagatgccatcaagctgaaccagaatgaggacgagccaggcaaggagagcattcctgggagaggaaacggtaggagcaaaggcccaaggtggggacgagctcaaaggaatggagaaaggccagtgtggctggcatgcggggggtgagagaaag

SEQ ID NO: 848762 - DNA, 609 bp, Homo sapiens
tattttaacaatattgattcttccaatccatgcacatataacaagtttccatttcttgtctcctcttcaatctcttccataaatgttcagtagtttttattttaaagatcttttacttatttggttaattcccaggtatttaatttatttggagctattgtaaatgggattatgttcttgatttctttcagattgtttattgtcagcacataaaaattctatgaatttttgtacgttgattttacattctgcaactttacagaatttatccattatagtactgttttttgatggagtctttagattttttttccaaatataagatcatatcatctacaaatagggataatttgatttttgacttcttcttttccaatttagatgccctttatttcttcattttttttctgattgctctagctaggacttccagtattatgtcgaataacagtggtgaaagtgggcatccttgttgtcttccatatcttagaggaaaagcyttcaggttttccccattcagtaggatgctagctgtgggtctgtcatatttggcctttattatgttggggcatgtttcttgtatacccactttttaaggatttttatcac

SEQ ID NO: 848763 - DNA, 616 bp, Homo sapiens
ccaagttaatttaatgcattagctyggatcctttttaatgtccttttgaaattacactttatataaacataaatcatttggttaagtcaattagcgtagagtatgaagcaaacaagagtactaaactactgtttatgggcacacttttctgtgtttatgactgtaattctcaaagcacaagcttgtagagccatcagttcaggaatttggaaatgtctggcgtctgctgtaaagaatgcagtatctatgtttacagcaaaggtgtgacctgaattctaacagaggcaaagcaacccagacaatctagtctcattcaacacacaccccatggctgccggtgggaacactgttgctattctcatcccatattcctcctgcaaatgtgcaggctaatgttgatgtcttggaggcataatgtgatttattaagagatataaatttcctaaatatgtggctaacaaatgggtttagaattctgggttcatggaagtttaagtagacaaggtggggaaaggaagaagggaattatcatgtatcaggcatattctaagaaggtgctttcctgtgtcatttacattaattatcaaaataaaccacagatatagctaataatagc

SEQ ID NO: 848764 - DNA, 610 bp, Homo sapiens
agcttccctttgtgatattaattaagaggaggaaaatgtcctggacaagaactggctcccgtttttcaaccattgtcccttcatgccactccccactgcttcatccctcccaaatgtgtcrtgggtatggtgcagaatcggaattcagaaacaaaaggtttgacccgctacccatgtgccccccattcctgtgtcccccaggggctgcctgggcccctgaagccaatggaagaaggcctgcccctgctcagaggccatggaccgatgggtgctgaatgctcaaatgtgtgataaaataggccatttgcatttaaatattaaccctataggaaaataatacactattagttaataaacggaattgacaagctggctgcattccaattccacctcagacagttgcagtgctcagctcggcccagctgttgagatggtcctagaaaaacggaaaccacccgtcttatctgcttggactccccttgggctccttgtcccagacttcccagttggaaatcttaagccaactgccaattccactccatgagctggagaacatctcaccatcattgcccactaacttgctgtgtgaccttgagttggttactttcct

SEQ ID NO: 848765 - DNA, 635 bp, Homo sapiens
acaccagagtgggaacttatggtgtattttctgggcttgcctatagccacccatggaccaatcagtatgcacttcctcctctctgaggctcatgaaagcttcaggctcagccagagctgggcagacattggatgaccagctgccgagaggagctacccgctccagggcctcctctctgctgagagctgcagagatggcagaacaacttgcctgcagaaaggagcttcccattccagggtcttccctcttctgagagctggaaagtcgacaggatgacctgcctgcagagaggagcttcccattccagggtctcctctctgctagcagctgaacactcatcaggacaccctggctgtggaaaggagctgccccctgagggaggctctgcaggaggctgagctgttctatcgctcagtaaagctcctcttcgtcttgctcactccccacttgtctgcatacctcattcttcctggttgcaggataagaacttgggacccatcaaatggtggggctgaaagagctgtaacacaaacaaggctgaaacatgccccttgcttgccatgatgcaggtgaagggaaggaaagaagagctgyggccctctggggaacccagacctgggagctccccaagctgg

SEQ ID NO: 848766 - DNA, 590 bp, Homo sapiens
ggaggttatatatttccaggaattcatccatttcttctagattttctagtttgtatgcatagaggtgttcatcataatctttgaggtgtttttgtgtttccgtgggatcagtggtaaagtacccctggtcatttctgattgtgtttatttgaatcttctttccttttttctttattagtctagctcatggtctgtcttaataattttttcaaaagaccaactcctggagtcattgatcttttgtgtattttattttgcatctcaatttcctttcattttgctctaattttggttatttcttgtcctttgctggctttggggttggtttgctcttgtttctctagtttctctaattgtgatggtagttattaatatgagttctttctaacatttttatatgagcgtttaatgccataaacttcccccttaacacttccttagctatgtcccagagattctggtatattgtatctttkttcttattactttaaaagaatttcttcatctctgccttcctttcattatttacacaaaagtcattcagaagcaggttgtttaatttccatacaattgtattgttttgagtgatt

SEQ ID NO: 848767 - DNA, 639 bp, Homo sapiens
actaacatgagaacagtgtgggggaaacaacccccatgactcaaattatctaccactgggtccttcccacaacacatgggaattatgggagtacaattcaagatgagatttaggtggtgacacagagccaaaccgtatcaactgtatactccataagggtttaaaatctttattcacttcactgatgtatatcatgcacctgtttccttgtagatagggcagaataaatattttttcatgaatgaatgcactgaggcacttcagaatacatcaatctacagtgtttaggaattgactatgacctgaattaatatgctttgttcacctcacatccccagatcctggagtgtagtaagtacgacatgtatagtagaatgaataaaaaataatggattcaggcacaacacagcttcctatgaggctagggaattacccagactcaggcaaaattcattactatcattctcctctttatgaacctgacaaccaaacataatggcttaggaattttttctgttaaatatatttgattgatattatatacccagaaggtcaagataatgtggaaaatattatctactgcccttgagtcaaggactctgatgtatatcrtggtgaatatttatgcttactatgtca

SEQ ID NO: 848768 - DNA, 614 bp, Homo sapiens
caaactgttccaacttctgcctgttacccagttccaaagttgcttccacattttcaggtgtcttttcaccagcttcccacwctactggtagcaattttctgtattagtctgtttttatgctgctgataaagacatacccaagactgggcaacttacaaaagaaagaggtttaattggatttatgttccacatggctggggaagcctcagaatcatggtggaaggcaaggaggaggaagttatgtcttacgtggatggcagcaagcaaagagaacttgtgcaggaaaactccctcttataataaccatcagatctcttgagacttactcacttttatgagaacagcatgggaaagacctgcctccatgattcaactacctcccaccaagtccctcacacaacatgtgggaattcaagatgagatttggttgaggacacagccaaaccatatcagtactattttaattctatcattgtttctttaattattatatatttttgtgttattttctcagtggttgcctggggactgcaattagcatcttaatttaaaacaacatcatttggattagtaccaacttaattgcaatagtatatgaaaactttggtccaata

SEQ ID NO: 848769 - DNA, 493 bp, Homo sapiens
tatattccaattaacactaaatcatcaagtttttcatgtcattattagtgccaacatacttgagataattacaagtttaccttcagacaatgtggtttttattgcatcacataaataatctggtctcatccccaccaactccctacaacaaaataaattcctaaaaagctgaaattcccacttatcaaagtctctctttatgaagcaaacattgatgtacctagaagtttcttgttcaaatatcaatagactgaaagccgagtatatcaagacttagaaatctttaacactttagtgtggatagctcatcagtgtcttttttttcttccaagaaactgggaagagaaaattctgaggttcataagtgtcctgagcagttagagtttcacmaaataactcacaatcaactgttaactagtagcagttcagagggagtgagacagactggaaagacattcttgatgaagtagaagagggagagataggtccatag

SEQ ID NO: 848770 - DNA, 598 bp, Homo sapiens
caaaaaacttctggtgcccagcatttcagataaaggatactcaatctgtagccaataagggattaaaatccaaaatatataaggacctcactagcaaaaaataaaataaactaaaataactttattttttataakggacaaaggacatgaataggacattctcccaaagatacacaaatagccaataggtagttatatgaaaagttgttcaacatcactatcagggaagtgcaaatcaaaaccacaatgaggtattccctcacacctcttaggatggctactaccaaaacatcaaaaaataaaaagtgttgacaaggatgtggagaaaagggaacccttgtacactgttggtggaattataaattagtacagccattctggaaaacaacatggaggttcctcaaaaagttaaaaacagaactaccatataatcgaacaatcccacttctcgttgtatatgcaaaggaaatgaaatcagtacctcaaacagacaattgcactccaatgttccctgcagcattattcacaatagccaagatatggaaactacctaagtgtctatcaatgaatgaatgaatgaatgaagaaagtgtgtgtg

SEQ ID NO: 848771 - DNA, 647 bp, Homo sapiens
tccaccagggctctgcgcggctcgggctggggcagtggaacggcttccaccagggctctgtgaggctcggactggggcagtggcctccgagtcgggggttggccagaaatgtgcagtgaccaggcctggaagggaccggccaccaccactgagctctaggaactgatgtttccaacccactgcaacatgaattgaatgtctttacattaagggaaaaaaattgctcaaaatataaaaaccaattcaacttcatacaacctgttgctgtgggagtggaacaattactattgcaaaagcgaataactcggctgacctaaaatgggttttctctgtacctggctgagttgagggtgggagaggagggcacatggagagcaggtgccaccaaagtgcctcctcggaggtgcccgggctcatctgggccgtggccacgcacacatgggtgtcagggacaccatgccccaagtgtttggcccagttgccccagacaaagctggccaccctggtgtcttacctgagctgggggaggctgtgccggctccctgggctgggtctggcggttccccagagctcatcctgtggctctgrgggtggagggtggaggggcttctgttctgccatcagcgaccctcacaagggacccaggc

SEQ ID NO: 848772 - DNA, 620 bp, Homo sapiens
atatattgaattcctctctccccacttcagccttaaaatattactagtgtctttgtaatttggcccaaatrtcaggaattaggaaggaagctcatgaaataaacgaatccagattttatgcagccgggcctgtcagcacacaaacccgattgtgggcccaggcttttgtcattgtttcccctctttagactcgaagagtgaagtattttgatgatgctatttttaggggaaatctacatgggaaattgcttcatagtgataataaaaccttacatgtgcgaggaaagcttggtgtcaagtcccgtggcactcagatggttaacgccgtcgtgacgctcggatttggcggaatgcggttgctgagctagaaatctggaggattttcactgggatgggacaaaaaagtgtcaaactccggcattttgaatatgttgccaacaagcatacctttggatcttagggaaggagaaaggaagatgaaaacaatgctaaggccttttctcatctattctaaaaaaaacactacttttgttgagtaaagagtaagtatatagatttggttcctctcaaaaatgaagctatagtttgactaattaaaggggaaaacttctaggagcgtt

SEQ ID NO: 848773 - DNA, 650 bp, Homo sapiens
atgcatagccagtttcctgaggcttgcatggatatattgaattcctctctccccacttcagccttaaaatattactagtgtctttgtaatttggcccaaatrtcaggaattaggaaggaagctcatgaaataaacgaatccagattttatgcagccgggcctgtcagcacacaaacccgattgtgggcccaggcttttgtcattgtttcctctctttagactcgaagagtgaagtattttgatgatgctatttttaggggaaatctacatgggaaattgcttcatagtgataataaaaccttacatgtgcgaggaaagcttggtgtcaagtcccgtggcactcagatggttaacgccgtcgtgacgctcggatttggcggaatgcggttgctgagctagaaatctggaggattttcactgggatgggacaaaaaagtgtcaaactccggcattttgaatatgttgccaacaagcatacctttggatcttagggaaggagaaaggaagatgaaaacaatgctaaggccttttctcatctattctaaaaaaaacactacttttgttgagtaaagagtaagtatatagatttggttcctctcaaaaatgaagctatagtttgactaattaaaggggaaaacttctaggagcgt

SEQ ID NO: 848774 - DNA, 373 bp, Homo sapiens
ttagagtttcatgagtatccttccagtgatatatatttcatgcatttatgaatacatgtgtgtatgaacgtttataaccactcaaatgatagatatgttcctgtccagcatcttgctttttcacttaaccttataccttaaagattgttccacattagtaattgaggcctccctattgtttttcacagttgaatatgattccacagtacagatgtgtcagatttagttcagccaggccctatgagtggactsttaggctgtcttcaatttttgcctgcaatgagtatccttgctgttatattgtttgacatatgtgtgagaatacctatgagctgttggcctagacttgggattgttaggtcaaaatatatgt

SEQ ID NO: 848775 - DNA, 574 bp, Homo sapiens
tgacattttggggccactgagaagcaggtaccatttcacagatgtggtgaggggtggacattaataagaaatactatttttttaactacttattcattggctgaataaatacgtattgagygccatcttggtggaagacactgggccatgttctgtgaggggatagagagacgtaagaagatctgtgctctcatatttgttggggtttattttagggattttaactgtatacattcctccttgagattctgaactagttgagaaataaatacagaattaagtttaggataaaatatatcagttttgttgctggccaggctgtaactacatggctccatgtagttattaacacaatctagctccctaattttactcatagtcttactcagtagacacaagtggcagacactgaagccctatctcggtgagattactctccactgggagcacacataatgcaagtaggttggtcccagaaagagatctcagaagggatcacaagtctttgagtctcattgttgagatagatggtcactctgtttcccttggaagaggagtgagcgggagtagaggg

SEQ ID NO: 848776 - DNA, 474 bp, Homo sapiens
ctaggggtgctgggtacattcaaatgacctccctcttccatgagctcatcctggcagtacaaagcaagccacccaagaaagccaatcrcagataattgccacgggaacctgaaggcaacaaacctgctcctgtgggactgggctttgcattgacttagcactggtcagtgttccttcattgtggacgcacccagctcaagtggaggtgaagtcaccactgctctgctatggacttcactgttcttttggtagctgaatatgcccataaaaatgataatttttggagaaatgactgggctccccagatgtttttcaatatctatggttaagcatgatataatttccacgctgtaatgtggcagtgaatgctgaccttttttctcttttcttcagaattgtgaaaatttcaggtatgacatatcttgtattttgtctctagaattttcatatttagatttagatgacatttattga

SEQ ID NO: 848777 - DNA, 613 bp, Homo sapiens
ggttttataaggggctttttccccttttgctcagcacttctccttactgctgccatgtgaagaaggacatgtttgctttgccttctgccatgattgtaagtttcctgaggcctcctcagccctgtggaactgtgagtcaattaaacctctttcctttataaattactcagtctcagatatgtctttattagcaacatgagaatgaactaatacaggaaggaaaaagagagaggcttgactagcaaaggtggtcttgttatatagatgaagccttacaggtagaattccttagagagaatagatggaaaactcttcagacttaaaggtgtcagactctcaatcactcctaaatctgggaaagtcctagaaagagaaggcctggctgcactaatgaggattctctatgaatacaaattttccccacctcagtctactggccctgcagcagccatttcaaaatatgtcaaggaaatatattttggggtgaaatattttgatttccttcactgcccaatggttgccctctattctgaacaggtagaatccttacttcctctgcaacccccctccacaakgtccgctttgactctctttatcctcctcatccttccag

SEQ ID NO: 848778 - DNA, 614 bp, Homo sapiens
ggtgtacactttcgcagggagagagaaaatgatattattcccaatattgcagaatgtgcacccccccacactacgatattgttccaaatatccagggagggagaggatgatattactctcaatatcgcaaggggtgtacaccccgtgtgatattgctcctagtatccaagtgaggagaggttgatattactcttaatattgcagggggtgcacaacccccctttgatattgttcctaatatccagggggtgggagagaatgatattacttccaatatcacagagggtgtactaccgtctgtgatattgtttctagtttccagggttggagtggatgatattacattccatatcgaaggagttgtacacccttcctgtgatattggtcctaatatccaggtggggagaggataatattactcccaatatcgcaggggctgtacacctcccctgtgacattgtttctaaatgcagataagagaagatgacattacttctaatattgtaaggggggtacactccctttgtgaaatcgtttctgatatttaaaggggagaggagracatttctttcaataccacagagggtatactcaccccctgtgatattgcttct

SEQ ID NO: 848779 - DNA, 610 bp, Homo sapiens
tgtaatctcagctactcgggaggctgaggcagaagaattgcatgaacccaggaggtgaaggttgcagtgagccgagatcgtgccattgcactccagcctgggctgtaagagtgaaacttcgtctaaaaaaaaaaagaaaagaaaaaaaaaaaaaggaacaaactctgaagtataagatacacaggcagagtaaataaatatcagaatataatggctgctcaatgttaaagaaaaaacaaagtaattttgaaaccaagtgcttgtaaaagtgcctaaaaggatagaaaggtaacaactgactctactataaatgaaatattaatttcgttatttagttttcactttacatgtctttgtttgttaataattgtaggccattattctctattaaaaaaacaaagactgcctttctattctcaaaacaacatttatttgaggtggatatatgctttctggatgaaaaaatattttcagaataaatttcaaatttaatgtgttaaatggttgtttaccaccagagtaatcctatgtaacaaactcccacgaaacttcagttcttacgacaagctttyattgctttcatggagtaggactggctagttaggcagct

SEQ ID NO: 848780 - DNA, 633 bp, Homo sapiens
agactgaattttgtttccagatctgtctggatggaataaaatctgttcctgtcccactgcagcacattgcttgrtacatgttctatatgatagatttgtatcagaataaaataacttgtatatgttgctatgtttactggaaaataaaagcatctttaattccaaatatttttaaatatggtactatttttgaacagatttaaagtatgatatacatacaatagaatgtattcattttaagttctatgagttttgataaaagtatatagtattgcagctccaccatgttcaagatttagaacactgttatcactccagaatgttttctcatgtctccttgcagttactctccatttccacctctaacctcagggaccattgatctgcttgttgtcactatagttttccttttctagaacttcacatagcatcataaattatgtagtttttatgttagcactttttaaatattcgactaagttgtgtgagtgtgcatcatcggtttactccttttaattggccagtagttttttattgtatggatattaccacattttgtttatcattatctgttgatggacatttgggttgtttccagtttggggctattaggataaggttgttataaatatt

SEQ ID NO: 848781 - DNA, 624 bp, Homo sapiens
gtgcttgtctttactccttaaatttcttccttgacatgtatatttatagctgttcttttgcataataacatactctgcttgtttgagtttgatgtgtctcctttaaatatatgatgaatgtagcttctctgtgtgctacatgaagaatatgtctcaccagcacaggaataatacacttaagatgcattaatgaaactaggtttaaaagccattcttcatttcataccatccagcactcttcttttaaaaaagagtaagtttattattcaaagccatatttaaccagaagaatttccaccagttagccattctttcacagagcagaaatgcaaattgtatgctgcttatagtctaagtgcaactgtcttattgaacattttaacagattgtaacaatgctatgattatagagaatctattatgagaagttttctaagttacaggccaagaattgcattgaatttcagtcaaaaatggtacatgttgaattgtaattattaatrgagtcttcccaccatttcaaaaagagagaacacaacagctcaatggttctcttttctttgttttgcattcccttagacagtttaagtgaccacgatggaatctcttgttaatttttgtccaa

SEQ ID NO: 848782 - DNA, 562 bp, Homo sapiens
aactttatattttaacttcatcatcccacattttgactttttgtttttttaatttacatctttttatattgcctatctcttaatagtgtgcagctattattgctttcagtagatttgtcttttattcytcatgctagaaatatgaatgaattacacaccacaatagagtattagaatattctcagtttgtctgtgaactcagttttaccagtgggttttatactttcaaaatttttttttcatgttagtgttttttcttttagattgaaggactccctttagcattttttgtaagacaggtctagtggtgataaattgtctcagcttttgtttgcttatttatttctcatgtgtcaaggtagcttttgtacagcatactcggcagttgtttttttttttctgtcaacactttgaatatgtcttctcactctctcctggcctgaagggtttccattgagaagtttgttgccagactaattagagttctttatatgattatttgcctatttttatcttgctgcttttaggaccctctcttcgttcttcactttgattgtttagt

SEQ ID NO: 848783 - DNA, 609 bp, Homo sapiens
gatattagaaacaatatctcaggggggtgtacaccccctgccatatagggagtaatttcatcctctttcaccctggatataaggaaccatgtcatggggggttgtacatcccctgcgatattkgaagtaatatcatcctctacctccctcgatattaggaacaaaatcacagggggtatgtacactctttgcgacatttggagtaatatcatgtctccccagctggatataatgaacaaaattacagggaatgtgtacacgcccagcgttattgggagtaatatcaaactcgcccttcttaaatattagaaaaaatataaaagggggtgtgtaaaccccttgcaatattgaaagtaataccatcctctctctttctggatattaggaataacatcacagaagggtgtataccctcctcgatattgggagtaatgtaatcctctcttttcctggatattaataacaatatcacggtggggggtgtaaatctccttcgatattggtagtaatatcattctctacacccctggatattaggaacaatatcacagaaaatgtgtacaccccctgcgacattgggagtaatatcatcctctctgccgtggatac

SEQ ID NO: 848784 - DNA, 609 bp, Homo sapiens
gatattagaaacaatatctcaggggggtgtacaccccctgccatatagggagtaatttcatcctctttcaccctggatataaggaaccatgtcatggggggttgtacatcccctgcgatattggragtaatatcatcctctacctccctcgatattaggaacaaaatcacagggggtatgtacactctttgcgacatttggagtaatatcatgtctccccagctggatataatgaacaaaattacagggaatgtgtacacgcccagcgttattgggagtaatatcaaactcgcccttcttaaatattagaaaaaatataaaagggggtgtgtaaaccccttgcaatattgaaagtaataccatcctctctctttctggatattaggaataacatcacagaagggtgtataccctcctcgatattgggagtaatgtaatcctctcttttcctggatattaataacaatatcacggtggggggtgtaaatctccttcgatattggtagtaatatcattctctacacccctggatattaggaacaatatcacagaaaatgtgtacaccccctgcgacattgggagtaatatcatcctctctgccgtggatac

SEQ ID NO: 848785 - DNA, 543 bp, Homo sapiens
agcacatggtctcttgtgtytggcttcttccacttagcatgttttcagagttcatccatgttgtaccaggtatgagtgcttcaatcctttctattgccaactactattccatcgtatgaacagaccacattttgttgatccactcattagctgatggacatctggggtgtttcactttttgtctgttaaacataatgctgctctgaacattcacacacaagcttttgtacggacatatgttttcacttggcctttgcattctcaaagtgttttcacaacattctctctttcatgtattacatggctacttaattttccgatggagaaaagtgaggcttggggcagctaagtgactttctcacccactcaactaccctcagcaaaccacagtaaacccatagtgaagagccagtactcctttcataataccacactgcctatggttacggctccctctcctgtgaaataaatttcaagcgacagtgtgcagatgagggaaaacattttttaggtaaggaactccctaaatcattctcaatacgt

SEQ ID NO: 848786 - DNA, 622 bp, Homo sapiens
ataaaaataatgacggatttagtttatatraagcatgtaatgaaatctgttaactgctaaattttactgttaaatttcactttcagttccttcctctcctatacacacacacatatatacacacatgagaaaaaaaaaacatttcacagaataaacaggactcttacaatataatcagaaaacttcccacccttcccccctcccccgtacttccacaccaggttattcaaaatcctgtggtcctgagtaaaatctttagcagactttctgtcaattcttagataataagaagtattcacaagaaaatttatctcaaggtaattagtttcataactgaaatgtcatgtcgtattttcttttttgactgtaacctctttccttctgtaattcggacttggttcccatgggaaatcttcattgggaaagatgaggaaggcaattttgcatctctttcttcattttgctctccagtcctctcaccctcctctgagattagcaacctcatccatatgatgtccttttcacggctgtcacagaggtcctggtgtaagctcaagggcacaaatgtttttcaatctctgatgcttcagatctattaacatcccactggccaaaggaaaag

SEQ ID NO: 848787 - DNA, 589 bp, Homo sapiens
tgaactaatttacattcccaccaacagtgtaaaagcatttctttttctccacagcctctccagcmtccattgtttcttgaatttttaataattgccattctgactggtgtgagatggtatctaattaaactaaaatgcttctgcacaacaaaacaatcatcagagcaaacagacaacctacagaatgggaggaaatttttgcaatctctccatctgacaaaggccaaatatccagaatctacaaggcacttaaacaaatttacaagaaacaaacaatcctagacacttctcaaaagaagacatttatgtggccaaaaagaatatgtaaaaaaaaaaactcaacatcactgatcactacagaaatgctctgattctcttctaatcataagttccaatttcagaccatctcttttgtgaacccatatgactgtatgctgttaggagcagcaaggtgacttctttaatgttttgctgcctagaagtttcttctaccagatattgtaaatcatctctctcaagttcaaagttgcacagatccctagagcagggacacaatagcaccagtctctctgctaaagcatgataaaag

SEQ ID NO: 848788 - DNA, 520 bp, Homo sapiens
gcacactctcaactgtaagtattagtgacttttacttgttgggattcttagtgtaaagaatacaattttaaattcatggtttcaggagagaggtcccatgtctccacttgacaagtcctatyttagatgccattttctggtccttaaacgcccccttcccctctcctccaaccactatgcttcagatgctgctgcattactagcaccaggctgatcataacagtggatactacaaggaaaaaagcaagtatctgaccatgctaagtcatttggaggcagtgtagttgaaagaactttggagtcaaaaagactttggttcagtctctgcatttgccactcactagttgtgtggctttgggcaaattacctaatctttctgagccatagttttcttgtctataaaatgagaataataatactaacttcacaggattgttatgagaattcaatgatgtaaagcacataaagtgagggcacaaagttggtattcagtaagtctgaaaaagcttctagagaacgt

SEQ ID NO: 848789 - DNA, 369 bp, Homo sapiens
gccaggatattcatatataattaggggaaagatatgcatttccctactttatcagaaatttcttaaagaaagattaataacatccttgcctaaagcattgtttcttaaagaaaaaaatctttyggcaacctaaatcagaatcacttggattgcttgtttaaaatgcagattatcatcttagttctgatgaatcagaatctctgaaggaagaggtaaaaaaaaaaaaacacatctcagattctgggtaatttgaaaaaaaaaagataaaaaaagaaaaaagataaaataaatataaaaatataagacatgcatacacacacaaacatactgaaatatgaaattcagaggcttttagtatattcacaaatt

SEQ ID NO: 848790 - DNA, 596 bp, Homo sapiens
aacagggacttcacctccataggggctgataaggagaagcttatctacccacggacctctgaggactggcagtgacagggaaaaaaagaaggttagggagcacatgaaaagccaagctccagatacttggatctcatttatgtgtgttatcaggtcacatcatgccagcaatctgatagtcaaacaatcagaactcctatgatagagaaaggaatttccctgacctctgagtctcctgtgacctttgcaagtcacttatcccctctgaacttcagttcctttatttgttgagttagaacacatattatcctcccttctcctggcatgtgatatgcatcaaatgaaataatgaatgtgaaagtgctttgcattggacaaacataaaggactaagaatgaaggttcaggtgggtaagactgaaataatgatttggtctgcaggaatgaatccatctacagacactaaggtagcctcttggcatctgttataayatcagaaagcatgttcctggtttccttaaaggcccgagaggtgtcagagttagaaggttccaaccttctcattttagaaactgggaaactgaggctcagagaagt

SEQ ID NO: 848791 - DNA, 568 bp, Homo sapiens
caatacttacgacattttgcccactcattcatggacatgcaaatagctatgaaaaatgtgagtcaccaatatatacattctgagcttgaaaagggggatactgccttcttgtttcakctctcatactataaaacaattgtccttttcctggtctatttagtgccacatttgtcacatttttctacttcttgttgatgggttagctgtttaacatggccccttagcatagtgctgaagtactatctggtggtcctaaaggaaagaaggctgagacatccttacagagaaaacaagtaggtgctagataagcttcgttcagccacagcttctagtgctgttagccatgaattcaatgttaatgaatcaactatatatatgataaaatatggggtctttaaacagaaaccaggtaaaacaagtttatgtattgatggctgctgaaaacgtggagaggctcacaggtacctaaccctgtatttcctctaggagaaatggttcagtattcactaactaaatgtttacattgactttacagagcataactaccatgaataacaagaattgacta

SEQ ID NO: 848792 - DNA, 515 bp, Homo sapiens
agtaagaaagttcacagcactcaagcatggaaattgcctgtgtctggtcatctccataaatgaatataaattggggaaggaattatgatggggagaagtgaggaagggcatccctgtgatgttctcaaaagtatactgttggggctgggtgcggtggctcacgcttttaatcctagctctttgggaggctgaggcaggcagatcgcttgaggccaggagttcaagagcagcctggtcaacatggtgaaatcccgtctctactaaaaatacaaaaattagctgggcgttatcgtgcatctctagtcccagctactcgggaggctgaggtgggaggatcacctgaacctgaggaggtcaaggctgcagtgagccatgatcatgccmctgtactacagcctgggcgagtaaggccctgccaaaaaaaaaaaaaaaaaaaaaaaaaaaaaaaaaagagcgggggagggccttgaaaagtctgaattgcacacttcttatatgattatgaagcttgccta

SEQ ID NO: 848793 - DNA, 541 bp, Homo sapiens
caaaactgattttaatttctacatgtcaattatgttttcattttcttttacttaagttaaactcgacatttattcatttctggacttgtgggaaaaaaatccccaaacttaaaaaaaaaatcaacaaaaaaaagcgacagcaatagttacaaaatgcaatattttgttagaaaataccagctgtgaatgttatggacaggattcctacagtatgaggtaattggactaaatgaccctaaagcgtcatctaagttggaaacactgtgattataattataagcaagaaaagaaatgataaccataagactaatactgatagtgacactaaaactaatattaataccaatgaaaggtcaatactaacaccaatgcaaatatttatattaaatccactatcaattctaattaatattaatattaagcaagcaaccatcatgcatgacattgagttttgcatgaatttctattaaatcctcaygacaatgttataaagaatatattattatatttataaataagaaaaatgaaagtctatataatt

SEQ ID NO: 848794 - DNA, 541 bp, Homo sapiens
caaaactgattttaatttctacatgtcaattatgttttcattttcttttacttaagttaaactcgacatttattcatttctggacttgtgggaaaaaaatccccaaacttaaaaaaaaaatcaacaaaaaaaagcgacagcaatagttacaaaatgcaatattttgttagaaaataccagctgtgaatgttatggacaggattcctacagtatgaggtaattggactaaatgaccctaaagcgtcatctaagttggaaacactgtgattataattataagcaagaaaagaaatgataaccataagactaatactgatagtgacactaaaactaatattaataccaatgaaaggtcaatactaacaccaatgcaaatatttatattaaatccactatcaattctaattaatattaatattaagcaagcaaccatcatgcatgacattgagttttgcatgaatttctattaaatcctcatgacaatgttataaagaatatattattatatttataaataaraaaaatgaaagtctatataatt

SEQ ID NO: 848795 - DNA, 601 bp, Homo sapiens
tgccattttcccatctctgaaatgggaatgataatagtgaattggtacttggaattattgtgaaaaattactgcaaaccatttggaaaaatacaaagtgctacccaaattattgctaattataataatcacactacatgtgagtgtcctatgcacaaaatcataagctcagaaatgtaagtaaattattgagaaactctactaaaaaaattacttggctcacgcctgtaatcccagcactttgggaggccgaggtgggcggatcacctgaggtcaggagtcagacaccagcctgaccaatatgatgaaaacctgtctctactaaaaatacaaaaattagccaggtgtggtggcatgtgcttgtaatcccagctacctggaaggctgagaaaggagaatctcttgaacctgggaggtggaggttgcagtgagccgaaattgcgccattgcactccagcctgggcaacaagagagaaactccatctaaaaaaraaaaaaaattgccttgatggacaaaactgaaccatgttagttttttagaaggcatggatcagcagaaatagtgatacgctgaccacagagagagctgtagtaattagtac

SEQ ID NO: 848796 - DNA, 647 bp, Homo sapiens
aatttatgtttaaaattatcttaatatttcgttagaaattgtattgaatctacaactcactatgggcaacaatgtcatcttgataataatgaacatrgaatatctctccacttatacatctttaatttctatcagcaatattttataatgatcattatgcaactcccgcactgctttaactattttattttccaatgttattttgattagaattgtttcattaattttattttagattgttcattgttaggatatcaaaacatagttgaattttgtataccagtcttacatgcactgagtttgttaaacttgtttgttactctcttttctacacacagtcccatgttgtcttgtaggttgcattatagtgaagggaaaagtgcaataattcttgcactattctatcaaaatagggggaaaaatggagtcatgtatttcaagaaaaattggagagacatattgctttttggaaatgcagtatgttcttgtgtgttttgtatatgcaaaatgcatttgcagtttttcaatcaagttaatattgatcattcttcttatttatattatctgtctggccccttacttgtatttgtgattggtttatgaatttagagtcaggtaacctgcgttcaagtcttggttctactaca

SEQ ID NO: 848797 - DNA, 578 bp, Homo sapiens
gcttaaaactagacaattcctattattgtaaataaatctgccaagaaaggggagataaaggcattgaaatattcagcaaagatcagtcattcacatttctgcagtaattgtaggtctggaccattctctaccattccaccatttatttcaatgtatcatggcaaactaaaaacagtatggtaatttgtagtcagacctaccttggctggaatcccaggcccatcaattactaattaatactagagcatgggccttgcctctctggtcttggttttctcatttgtaaaatgggggtatatatgaagattagatttaatatatgttaagtgtttaacagagaataagtcctgaataaatgaaaaataaacattctctcctatatgacacaccttttatctcagggattataaatggagaacaagtaactgttgttgccagcaaagattagtgtttccagtaagttttcaaaaacttttacaacatagtattttataaagtggaaccccycagtgactaattcttattgggcctcaaccatggaatgttctcttctgacctctgcaggctagattcatttg

SEQ ID NO: 848798 - DNA, 631 bp, Homo sapiens
ttgagcctatatgtgtctctgcacgtgagatgggtttsctgaattcagcacactgatgtgtcttgactctttatccaatttaccattctgtgtcttttaattggagcgtttagcccatttacatttaaggttaatattattatgtgtgaatttgatcctgtcattatgatgttagctggttattttgctgattagttgaggcagtttcttcctagcctcgatggtctttacaatttggcatgtttttgcagtggctggtaccagttgttcctttccatgtttagtgcttccttcaggagctcttttagggcaggcctggtggtgacaaaatctctcagcatttgcttgtctgtaaaggattttatttctccttcacttatgaagcttagtttggctggatattaaattctgggttgaaaattctttcctttaagaatgttgaatattggcccccactctcttctggcttgtagagtttctgccgagagatcagctattagtctgatgggcttccctttgtgggtacccgacctttctctctggctgcccttaacatttttttcctttatttcaactttggtgaatctgacaattatgtgtcttggagttgctcttctcaaggactatcttt

SEQ ID NO: 848799 - DNA, 616 bp, Homo sapiens
tatacttttcagtcaaattgaagctattccttttaccctttgaatgcaacttgtctccattctcctgtcccagaggatgtctcagccttactttcaagttctgaggtattcacaaaggaattcttgtccatggatagttgctagttggatttctgtgagggagactggagccaaagaactattctgacaacttgctcttagatcaagctttcttgttttgatttccttctcatttctttttctgtatattttaaagttttttccttagtggttatctggagattacaattaatatcttaactttacatcagtaaagtttaaattaataccaataccttattttcaatagtaggtaaatactgtactcctttccagccccatccctttcccctttctgttgttattgtcacaattatatctttatacattgaatgcacattaacatagcattttaataattgttttattcatttgtcatttaaatcatatagaaaagagttataaaccatatatgcaatacyattgtcctttatatttacttatgtagctacctttacccttgttcttagtgtccgtccctttcaccctggaggagtccctttaacatttattgtag

SEQ ID NO: 848800 - DNA, 583 bp, Homo sapiens
cagccagagaatttcagagtgtctgtatctgaaaatggatttatttcctaccctacatgccttaaaaaggaggcaggggcagttgtagccatatgaaccacactgctggccacctatcctgttcagtctagccttggatagtaacgtgccttggtcagactggatttctaattttgacctgtgcaaaatatgtagaaattcaaggtcatccttctttgactatgtacaatatgttttaaagttattccagaaagaatgatcagaaagcgtgtttgtatgcttatgtatgcgtctagtggaggcaaaacagttaaaatggctgagaaaatgaaaaacaaaagaagaaaggcaacctaagcagttgtacctcaggagaaagtgtttgaagagaagtctgttctgcttgttaatttggaagaaagggaaggaaaagggggtggaaggcataattttatacataagtagtaagaataaagggatctaaccttaacaaktcttcagttttaaggaactcaggaagagataaaggagagaagttaatagagtatggcaagcagtttcctgaatgtatttgaataagtgt

SEQ ID NO: 848801 - DNA, 624 bp, Homo sapiens
tttttttttttttgagacagagtttcgctctgtygcccaggctagagggcagaggcgcaatctccgcccactgcaagctccgcctcccgggttcaacgccattctcctacctcagcctcccgagtagctgggactacaggcacccgccaccgtgcctggctaattttttgtatttttagtagagacggggtttcaccatgttagccaggatggtctcgatctcctgacctcgtggtccacccgccttggcctcccaaagtgctgggattgcaggcctgagccaccaagtccggccaatgtgaaactcttttagaaaggcccaagagattttttttcagtagaataaaatactgttggataatcactggtatatgaagattctatttctgttaaatttgttgagttttaggtggcttacagttagtgacagtagttgcaccctccattcaacaagcttaattttacagtttagggagggaggatttatacttttggattaacagcaagaaaaatagcaaaaattaagatgcatcttaattagcactttcagaaattatttgtggaatgagactgcagttaccagagctctctgcattctgccagtgcacaagtcttggagtccag

SEQ ID NO: 848802 - DNA, 624 bp, Homo sapiens
tttttttttttttgagacagagtttcgctctgtcgcccaggctagagggcagaggcgcaatctccgcccactgcaagctcygcctcccgggttcaacgccattctcctacctcagcctcccgagtagctgggactacaggcacccgccaccgtgcctggctaattttttgtatttttagtagagacggggtttcaccatgttagccaggatggtctcgatctcctgacctcgtggtccacccgccttggcctcccaaagtgctgggattgcaggcctgagccaccaagtccggccaatgtgaaactcttttagaaaggcccaagagattttttttcagtagaataaaatactgttggataatcactggtatatgaagattctatttctgttaaatttgttgagttttaggtggcttacagttagtgacagtagttgcaccctccattcaacaagcttaattttacagtttagggagggaggatttatacttttggattaacagcaagaaaaatagcaaaaattaagatgcatcttaattagcactttcagaaattatttgtggaatgagactgcagttaccagagctctctgcattctgccagtgcacaagtcttggagtccag

SEQ ID NO: 848803 - DNA, 588 bp, Homo sapiens
acacccatcattggattagggcccactagcatgacctcatctttacttgattacatctgcaaagaccctgtattgcattcacaggttctgggtggacaagtgttagggagggatgctattcaacccagtatacatctatttatgctctttatctagacagatgaggatcaggggtttgaaagcccagcaatagcctaataattaaacatctgaaggcttttctctgtgcccctctctgtcctctgtatggtagtaacctatggccagttctttggccctatctagcctgtgcattttttgcaggcaaacactgtgtctccagccccctaacatagcccagacacaaaggaggaacttggaagcatttgctgaacaaatgaatgaaatgagacatttggaagcacagcccaaagaatgtaatttccagaagtgaaacagcagctaaatgaattgtagcaatgttggcgctcacttctcatactcttgtagcctcctgctttcacagkgggcaactgacttgctgggagtccagcaaatttccggggaatctccctgtgggagtcaggaacaaagctggcatttggcaac

SEQ ID NO: 848804 - DNA, 655 bp, Homo sapiens
gtgaggagttgtgatcctttgggggagaagaggcattctggtttttggaattttcagcctttttgcactgtttcctccttaccttcgtggatttatctacctttaatctttgatgttggtgacctttggatggagtttttatgtgggcatgctttttgttgatattgatgctattgctttctgtttgttagttttccttctaatagtcaagcccctcttctgcaggtctgctagagtttgatggaggtgcattccagaccctgtttgcctgggtatcaacagaggaggctgcagaacagcaaagattgctgcctgctccttcctcgggaagcttcatcccagaggggcacctgccagatgccagctggagctctcctgtatgaggtgtctgtctacccctgctgggaggtgtctcccagccaggaggcctgggggtcagggacccacttgaggaggcagtctgtcccctagcagagctcgacagctgtcctgggagatctgctgctctcttcagagttggcaggcaggaacatttaagtctgctgaagctgcrtccacagccaccccttcccccaggtgctctgtcccagggagatgggagttttatctatagacccctgactggggctgttgcctttctttcagagatgccctg

SEQ ID NO: 848805 - DNA, 628 bp, Homo sapiens
gcagccttccaaatgtaataagggatccagttaacaagaataccctgtctgggactttttaaaaaagartattttagcatcaccctacctggcagctccatggacatcaaaggcactggaccttgtaatcatatcaagttaccacccagtatgactaagctcttttactgatcctttcaagcagcagggagagcatggggctgttgaaaagatacaccacaggggaaaatgcaaacgtgggttcttttccttcgctgttttaagatacaaataataccagggaggttagcatgtggagcctatccaagtagctggtccacaacaacatagcttttggattttgttctgtggtagagcatattttctgtcattttcaggtgtttgtttttgtggcatttgctgtcacactacagcaggctagaaaagatcatctcccgcaacctgaccaagcttctcaacaagaaagagctaaaaagccagaacacatggattctggaacctctctcctgacaacaccttggttttacaaccacagcagaaacattaattctgaaagtagaaaggaattaagcctttgacagttcagaaatagtaaagcagcagttcagattttctctcaagagtcagg

SEQ ID NO: 848806 - DNA, 598 bp, Homo sapiens
tgacccaggtagctgttttttaaccrttttgttagataaattttctccatcactaaaaccaaagagtgggatttttttgttctagattacatgagcaacagtctcgcgatttccccaagctctctccttctctttgagaattaccacagggtgcacacatgcaacaagaatccctgcctgtttgtatatggaccgaggatttccgagtgttcctagtttacaggtgggctttgtgagaaaagtccatcggtcacagtctcacttttggaacctaacattcagagaacaactatttctaccatgtatgcagccctctgagaggtataagacctatggactgtcacgcggtcacgccaagagatggaactttacctgtttctgagagattgaccaaaatgtgcagcaggaagtataccgagcactaccagacaaaaccttgacttcagtgaggcccagattactttccaggtcaggaggtgacacgaatttggatctgacttccctagaacaactgtctctcctgtcacatgcttggatctcctttaggaagtaccaacactgcagttacaaaacaacaaatttattctcttacaagttt

SEQ ID NO: 848807 - DNA, 598 bp, Homo sapiens
tgacccaggtagctgttttttaaccgttttgttagataaattttctccatcactaaaaccaaagagtgggatttttttgttctagattacatgagcaacagtctcgcgatttccccaagctctctccttctctttgagaattaccacagggtgcacacatgcaacaagaatccctgcctgtttgtatatggaccgaggatttccgagtgttcctagtttacaggtgggctttgtgagaaaagtccatcggtcacagtctcacttttggaacctaacattcagagaacaactatttctaccatgtatgcagccctctgagaggtataagacctatggactgtcacgcggtcacgccaagagatggaactttacctgtttctgagagattgaccaaaatgtgcagcaggaagtataccgagcactaccagacaaaaccttgacttcagtgaggcccagattactttccaggtcaggaggtgacacraatttggatctgacttccctagaacaactgtctctcctgtcacatgcttggatctcctttaggaagtaccaacactgcagttacaaaacaacaaatttattctcttacaagttt

SEQ ID NO: 848808 - DNA, 583 bp, Homo sapiens
cttctaactgatcttttgtcttgctgaaaaactgatcttttgttttgctgaaaaaatgatgggtgggaatacaaaagaaagtgaccaagagaagactaaattgyatgacatgataaaggatgaagaaatcctaagggacaagatctggctaattggctggagaggcctgggatgaggagacacaggagaaaagggaaggaagggaaagaaaagggaggcaggtcacatttcagctgatactcacaatctcaggaagctattcccactgcctgagctaactcccatcctcccttctccctcaaagcacacagcacagctactattacttatccaaccctggtgctggtaaccttgactttagaaaacccttcctcgaggatgtcagaaaagacccctttctccctaaaggctgtgggacagaaaagggaaacagaggaaaggctttcagaaatcaaggatgttgcaatcacttctcagggaccatggcaggaagcagaagtgcaagaccttcttcactgcaggttctcctcaaatccccaccatacctcaattcccagaagcagcttgtagcgatcccaccctc

SEQ ID NO: 848809 - DNA, 562 bp, Homo sapiens
gtacccgaagtctgctggcaacaaaggaatgagaagagacaggttaagagttcatgaaggtgggagccaggggccagttgcaaaatggaggctgcaaaaggcgcagagttctggtctccacactattgagtgcagtcacttagctctaagaagcacatgttcagggcgaaacagtgaaagggaggcagtgcctcataggaggcataatctatagcaatagcagtttaaatgaatctcctttgtgctcaaacagcgtgtctttaacttatcggagagtagctggtgggagcgggcttaactaggagcctgcacatctgtccacttcccagtgtttcaaaggagtgtctttctccttgaacacagtgtttacagataggagagcgggtctcgctctgagcatgggaacatgatggcaattagtaggctttcctcctccgtggcctcttctggctttccacaacttattgtcccctatttttatggccagtttatacaggcaccccacaagyccttttcccaacattcccccggcatgctgggccccgcacagccatgggcagac

SEQ ID NO: 848810 - DNA, 577 bp, Homo sapiens
ccgcctcttccactactcacagtgtgaactcaggcagctccccttagcactctgaacctcctctgtaaaatggggataagggtagwagggtaccttggtgtgagaaataaatgtaaaaatgcttggagaggccgagtgtggtggctcacacctgtaatcccagcactttgggaggccgaggcaggtggatcatttgagatcaggagttcgagaccagcctggccaacatggtgaaaccctgtctctactacaaatacaaaaattatctgggcgtggtggtgcatgcctgtaatctcagctacttgggaggctgaggcaggagaatcgcttgaccccaggaggcgaagtttgcagtgagccgagattgcgccactgcactccagcccagcctgggggacagagtgagactccatctcaaaaaaaaaaagaaagaaaaaagaaaagaaaagaagatatatagagagcctagctcccaccttaaatggcagccattcttatgatgcccgaggtgacatggctccagtcccctgcccaccaggtctcccctctctggacatacacccctttgcttttgcca

SEQ ID NO: 848811 - DNA, 644 bp, Homo sapiens
attagctggtcagtcaatatggatccattaaataaaaagagaagctcagaaaagtcacactataaatatgtcagtttattttgtgtctatcagaatcaatacaycatcatatgtagcaattccaagggagctatagttcctgacttactaactggtgatgcaataaacctttccaaattctacagtacagcatggtatggaaagaccaaacaatgagctgcctctgccatttgctgcctgcataacctggggaataattacatgacttcgctgagcctcagtttccttatatgtaaaataaagataacaatcagtgacctgctgctatgatttgaatgtgtctcctccaaatttcaggtgttgaaacttaatggccagtgtaacagaattaagagacaagacccttaacaggtgatgattaggcaatgagggctcctcccttgtgaatgggattgaggtctttgtaaaagaggtttcacgcagcattcgactctcttgcctttatgccatccaccatgtgaagacatagcgttcctcccctcaggaagatgcagcccttgttagacaagcaaacttgttggcaccttgatcttggacttaccagcctccaaaactgtaagaaataaatttctgttctttataca

SEQ ID NO: 848812 - DNA, 644 bp, Homo sapiens
attagctggtcagtcaatatggatccattaaataaaaagagaagctcagaaaagtcacactataaatatgtcagtttattttgtgtctatcagaatcaatacatcatcatatgtagcaattccaagggagctatagttcctgacttactaactggtgatgcaataaacctttccaaattctacagtacagcatggtatggaaagaccaaacaatgagctgcctctgccatttgctgcctgcataacctggggaataattacatgacttcgctgagcctcagtttccttatatgtaaaataaagataacaatcagtgacctgctgctatgatttgaatgtgtctcctccaaatttcaggtgttgaaacttaatggccagtgtaacagaattaagagacaagacccttaacaggtgatgattaggcaatgagggctcctcccttgtgaatgggattgaggtctttgtaaaagaggtttcacgcagcattcgactctcttgcctttatgccatccaccatgtgaagacatagcrttcctcccctcaggaagatgcagcccttgttagacaagcaaacttgttggcaccttgatcttggacttaccagcctccaaaactgtaagaaataaatttctgttctttataca

SEQ ID NO: 848813 - DNA, 644 bp, Homo sapiens
attagctggtcagtcaatatggatccattaaataaaaagagaagctcagaaaagtcacactataaatatgtcagtttattttgtgtctatcagaatcaatacatcatcatatgtagcaattccaagggagctatagttcctgacttactaactggtgatgcaataaacctttccaaattctacagtacagcatggtatggaaagaccaaacaatgagctgcctctgccatttgctgcctgcataacctggggaataattacatgacttcgctgagcctcagtttccttatatgtaaaataaagataacaatcagtgacctgctgctatgatttgaatgtgtctcctccaaatttcaggtgttgaaacttaatggccagtgtaacagaattaagagacaagacccttaacaggtgatgattaggcaatgagggctcctcccttgtgaatgggattgaggtctttgtaaaagaggtttcacgcagcattcgactctcttgcctttatgccatccaccatgtgaagacatagcgttcctcccctcwggaagatgcagcccttgttagacaagcaaacttgttggcaccttgatcttggacttaccagcctccaaaactgtaagaaataaatttctgttctttataca

SEQ ID NO: 848814 - DNA, 598 bp, Homo sapiens
ctaggaaagggaattctgcgaccccttgcgctttccgggtgaggtgatgccccaccctgcttcrgctcacactccgtgggctgcatccgctgtccaataagccccagtgagatgaacccagtacctcagttggaaatgcagaaatcacccgtcttctgcgtcactcatgctgggagctgtagactgtagctgttcctatttggccatcttggaacctcctcctattttatggtactaaatacaaaggttcctggaactggaaaccttagtgaatagtttcagcctgatacctgtggcccaggggcacatgaactgaaagcatagtagacttcaggagtcacatctgtagagatgtgtgtggtccaaagaacagatggttagaggaggctgtgcaggctatccctgatttagttagagtccaaacctgttgggaagaactggtcaaccagactagtgcttcaccctcacaaactaaatgaattagtccattgtgcccatgaaagaaagaagtcaatcgaatgatcctggggataattaagaggtttcctctcttccaggacctcagaataatcctggtcaagacttgtactgttaccag

SEQ ID NO: 848815 - DNA, 538 bp, Homo sapiens
gcccttagtctctactttccactttcccagtgacagcatctttcagtggagctttttcccctcattgagaatttcatctatagctaaggtcctttactttggattcaggtgggccttttcagagctccatagccaggtgtgaacatttttttcttgtcttaaaaattacttttgggatgaattttttttaagctaaatgtattagggtattgtttccatctaccatgttactaacttatgtgtaggatagcattggattcctttgtacatagttaggtgatatactatggtcattttcatgccttgatctctctttccatggaattaaacacacccttctgttaggattatgtatatctgtattgtttacattgacctaagttagaaaatgttaaagaaaatatgtacaaaagaaaaagkttcctttcatcattgaatgtgcaaaaccccctgtgcttcttgtggaccaatttgcttgccagtgaaagaatgaaggtaatgaactcaaagaaagaattatgtgttcatctaaaaaata

SEQ ID NO: 848816 - DNA, 611 bp, Homo sapiens
caaaacgaagtcttttcttctaaatatggtattacctaattagttgcagctgcatcttttactcatcattactcacatacatctaagagcttttgccttaagcctctatttaacagtgagcatggtccagagtaagttttgtttttttaatgcctctgcctccatcactgcattgatgcaaaagaaactgagagacttgatcctcagtcctgggtctcccccaggtcctctcatgtgctatagaagatgtccatcctagatgttctctatcataaaggaatctgggcagcaataggaaacacccttttaaattctagtaggtaggggctgaacagccagtctagcctggagaaccacacctgccttctgatagccacagattttacctgcctaccatgagccaaagctccagaaagctgtgggagatgataacgttcagatttctgactgttcttaaaattgctctgtagaattctcaagtgtgacctccaactaaaggcacaccttcctactcattcttacttctrgctgataaacctcctggaccagcactctgcgtctttaaccactggctgccttgtctaaacccagatcttcctgggaagggatat

SEQ ID NO: 848817 - DNA, 565 bp, Homo sapiens
gccttgtctaaacccagatcttcctgggaagggatatccaaattaagggttttattttgcaccaacctatgaccaaaaataattttctacagatataaatgggaaggaattgcagaagctcagatggccaagttgcagtgcagtcaaaggtgctacattgttaaagagcaaatgacagggaagatgagccattatctgggaaaggcccattatcccaacatggataaacacctagacatttggcaaagaataacaggtagcttcaggaataattttatagtgatttaatgtctgttcgaaagaagaaagtggatggctcaggaacttactaatataattgatcattattcagagatgatggattaattttgttaggctattagggtactccttctgtattcaaatggttctcaaagtttggtccaggtaccagcagcatcagcaatacctgaaatgcaaattcacttgaaacacaaattcacttamaatgcaaattctcaggtcccactttaaaacgaatgaatcagaaacaggatttgggggccccagaaatctgttttaataa

SEQ ID NO: 848818 - DNA, 565 bp, Homo sapiens
gccttgtctaaacccagatcttcctgggaagggatatccaaattaagggttttattttgcaccaacctatgaccaaaaataattttctacagatataaatgggaaggaattgcagaagctcagatggccaagttgcagtgcagtcaaaggtgctacattgttaaagagcaaatgacagggaagatgagccattatctgggaaaggcccattatcccaacatggataaacacctagacatttggcaaagaataacaggtagcttcaggaataattttatagtgatttaatgtctgttcgaaagaagaaagtggatggctcaggaacttactaatataattgatcattattcagagatgatggattaattttgttaggctattagggtactccttctgtattcaaatggttctcaaagtttggtccaggtaccagcagcatcagcaatacctgaaatgcaaattcacttgaaacacaaattcacttaaaatgcaaattctcaggtcccactttaaaacraatgaatcagaaacaggatttgggggccccagaaatctgttttaataa

SEQ ID NO: 848819 - DNA, 546 bp, Homo sapiens
gagggaaagagagacagagacacacacatagacagagagagaccaactaaatacaatggtagagagaggaagcgagagagatggggagaaaaagagagagagagatgaactaaagacaatggtagagagaggaaatgagagagattttgttctgatataatttttttttttttgaaaccaggtattgctgtgtcacccaggctggagtgtagtggtgccatcacggcccactgcagcctcaacctccccaggctcaggtgatcctcccccctcagtttttgtttttttcctttttgtggagaatgggtcttgctgtattgcccaggcaggtctcaaactcctgggctcaggctatcctcctgcctctgcctccctaagagctgggattacaggtgtgagacaccgtgcccacccacagtttttrcatttttagtagagacgaggttttgccatgttgcccaggctggactccaaatcctgggctcaagcgattcaccctccttggcgtcccaaagtgctaagattacaggcatgggccactgagtc

SEQ ID NO: 848820 - DNA, 436 bp, Homo sapiens
cccttatattcctgtcatgaattttaattgatgttttaatatactgctgtattcaactataaaattttgtatttaggattttttgaactgtgtgagatttgcctatacttttattttttgttctttcttaactggttttgttttcaggcttatgcagacctggtaaataatttaatactcttggatcagtttcaatcatttatatttcttctcttcctatcactgatatttgtgtatccattttttcccccttatcatatttgccagggcttgtcactttgtaagtcttttcaactaattttttttaaaaatcaactttattttttgttgactatttaataatttcctctttcttaattcrtttttctgctttgagtattttttaacgttcttgaattgtaaaaagtgtgtttcttttatttttcatctttcctaa

SEQ ID NO: 848821 - DNA, 658 bp, Homo sapiens
ctcagaggtgggtagggcaaagtcagcattcttattagcaaaggattgctaaaagtgcttgctgtcttcttcaggcccaggaggggttcatctagagcagagtgagcccttgagaggcaagaggaggacctagattcttcctttttgctgtttgtggattgcattctataaatctatcttctggcaggactgacgtttttgtaactccaagtgagccacaacaatgactccaattataatgcctgtccttggacatgacaattaaattggtctttacattttattacattacatttgtcagggcagtgtttgaccaggagaactccctatgggaggtgggccagagagaaaccacattgtatttttagcccagcactgattttttttacacaaaatcacaggcagcccggaggcctattagaaatcaccagactggctgggcacggtgactcacacctgtaatcccagcactttgggagggtgaggcagacagatcacttgaggccaggagatcaagaccagcctggccaacatggtaagaccctgtctctactaaaagtaaaaaaattcrcaaggcatggtggcgcatgcttgtaatcccagctactcaggaggctgagacacgagaatccctcgaatccaggagggagaggttgca

SEQ ID NO: 848822 - DNA, 596 bp, Homo sapiens
agtagtgctgaggtagcaatactctgttgtggattttaaaaagcatgtatactatgtatttttagtatagtagagagtaagttaagtaatattgttgatccctccttgactgtatttaaaattatttctttgcaaatatgtttttacagctctcctttcattgcctgtttgtgtttccagtctaggcagatttcctcggctatgaatattctccatcaggacaaacattttaaagtattatcagaacctaaggactgggatcttgagtacatggagacattgatttacataaatttaatttgtctctaacttttaagagatttgcataaaatcaggaatacctttctaagggatatcactttacttggcccctcatcttctttccccttcttttttttaattaattgtttttgagagacagggtctcactctgtcatctaggctggagtacagtggcgtgatcatggctcactgcagsctccaactcctgggttcaagagagcttcccgcctcagcctttcaagtacctggactacaagcgcacacagctaatttttaaaattcttttgtagagatggaacctctctatgctgccc

SEQ ID NO: 848823 - DNA, 429 bp, Homo sapiens
atatttcccaggccatgaatgccactgattcatgtgcttggcatcacgaaccaccaaacccatctgctttaccactggaggactgccctgtractcagtctaaagcaagtcccacagtattgaagccttttccggagatgttatctctaggtagttctggtggatcatccacatgtgccccaacaatcagaggcattgacattcatgccctgcatcttcagaattctcctggtggcagcctcatgacaaggacttttttccttccactattgcaccatatgatttcatgcaagagcttcttacccttcattcttctgagatcactataggagggcactctgtggtcaacctcacagagcctattaacctctcatttatcagtcatgacattctggcactcctggagagacaagtcaaaaaaaggagtga

SEQ ID NO: 848824 - DNA, 470 bp, Homo sapiens
cgctggctttcttctcatacaccccctaccgtttgtgtctctgccaattgtagcacatcagagcggccattgagataatgaccgtgaagtctcatgatacactttgatgaagtgtaacattttttaaaggatttttgtctgtgccaaaatgatcgaggcagctgactaaaaatcgccccatcaaaatcagggctgatgaacagcaggcggaggcaggagtctccccagagaagatggggggatttcgcagccaaagtgtctttctttccaggtctgtgtgcaccacagattccttttttaaaaagttgtctttgtttcagatgaatatatgtcagttgctgatgcttcagcctccaacattttttaattcttttttttttttctatcaaaccccaraagatgcagggactgattcctttctgacaggtccttactaatgacttagaacataatgttattgttaataactc

SEQ ID NO: 848825 - DNA, 434 bp, Homo sapiens
ccaagcagctatctattggtggttctctgtcatcctgcctggtgcaggggtgcgggtgagggtggagagtgtggagaacctgtctagccaacgaacagccctgcctctcactagagagttgcttggaggaacccaacagctttggggcacgttctgagcctgaaaatccaactgtacaaatctgtctcagcagcagcttacatgaaaattgtaagtttggggtgagctggcagtttggcagtgccaccaaaaagtcaaatggggtctgagactgcattcacagaagcagagggtccaggacaaaggaggggactgcttgaccaggtgtctccyttgtgaaaacctctccagttctcagaggttaggaaaaacctgagtggctttccagatggcttggaccatgtgaggacagcatcagccagtcacagcctcag

SEQ ID NO: 848826 - DNA, 556 bp, Homo sapiens
tgggaacgagacatggactctccttgctctaggccaggccattgctcggcgtctgaaaccattcggtgtccagagatttctgtacacagggcgccagcccaggcctgaggaagcagcrgaattccaggcagagtttggtaagtgaagccttgatttccacaggagcctatctgtgcccagttgagaggctgtattttctctcaatggtggcattttcaggcagagggcaggagctccaggcatgtccaggggctgctgtctggtagatgtttaatctacctgcccctggacactggcccactcagggagcacagggacttacccaggtcctctccgagccagcagagcagtccagggctcccgtctttcagagtcctttgttaccattccccattgtgggcggagcagcggggatggtggtgggtgtgaggaagggctgggcactttcactgtcttttccttcataaactggcaagcactaccctagcctttgtgtgcgccccttagtccaggcggatccagcacctggcgggtccacagcctggtgagcagatgg

SEQ ID NO: 848827 - DNA, 654 bp, Homo sapiens
ctaagaggtagatgagagattccaggttccatctagcagtggagaggcagggctccagcatgtatcagagataagccccaaaagcaaagtccayttatgcttcagcagaggtaagcgggcaggctcctggcaccacctcctccaaatggaagggaaggagggctgcaccgctctgcctgtgtcactggctcctctccctgggtccaggcagggcctctcattttctccaggctaacccactgtgtcccaaggttaatctcacaagacactggtccctacatcatgtaaagggtggatggggagcctcctaacaccatgtcaacatgactgctaacaaggagccacacacacaactgaatttcacaggacctcatatcctccaatgggctctttcccacatctactcgaaaggaatcgtgggtttccctttgggcttttcttcctgggaatcagtccatgggagatgccaagcgcccctggaacatgaaattatccacacatgtgtaactgcacactctagattaacaggagagaaaacacgctcatttttgtttccagctacacatacttagctttctaaacacaaaaactgaataatttatctgatttatgaatgatggtttggtatgtctaagaaagctatataaaacataa

SEQ ID NO: 848828 - DNA, 646 bp, Homo sapiens
cccaggagttcaagaccagcctgggcaacatggsgcaaaaccccatctcttactaaaaatacaaaaacaattagccaggcatggtggtatgtgcctgcagtcccagctacttgggaggctgagggggatcacttgagcccggagtcagaacttgcagtgagcagagatcacgtcactgcactctaatctgggagacagagtgagaccctgtcaaaaaaaaaaaaagaaaaaagaaatatggaagtcaatagtggaagaaacagctgaaataattgaaagtggttgcctctgaggagtgggtaattgatggggaaaaggatgggacaggggactgctgttttgttgttgtttttgtttctttttacctataagccttatggaactataggctgggtgtggtagctcatggctgtaatcctaaccctttgggagactgaggcgggcagattgtttgagctcaggagttcgagaccaccttaggcaacatggcaaaaccccatctcaactaaaaatgcaaaaagtagccggccatggtggcgagtgcctgccatgtagtcccagtgtacttgggaggctaaggtgggaagactgcttcagcccagggggcagaggttatagagagcaaagatcgctgcactgcactgca

SEQ ID NO: 848829 - DNA, 653 bp, Homo sapiens
taagaggtagatgagagattccaggttccatctagcagtggagaggcagggctccagcatgtatcagagataagccccaaaagcaaagtccayttatgcttcagcagaggtaagcgggcaggctcctggcaccacctcctccaaatggaagggaaggagggctgcaccgctctgcctgtgtcactggctcctctccctgggtccaggcagggcctctcattttctccaggctaacccactgtgtcccaaggttaatctcacaagacactggtccctacatcatgtaaagggtggatggggagcctcctaacaccatgtcaacatgactgctaacaaggagccacacacacaactgaatttcacaggacctcatatcctccaatgggctctttcccacatctactcgaaaggaatcgtgggtttccctttgggcttttcttcctgggaatcagtccatgggagatgccaagcgcccctggaacatgaaattatccacacatgtgtaactgcacactctagattaacaggagagaaaacacgctcatttttgtttccagctacacatacttagctttctaaacacaaaaactgaataatttatctgatttatgaatgatggtttggtatgtctaagaaagctatataaaacataa

SEQ ID NO: 848830 - DNA, 651 bp, Homo sapiens
ggcccaaatgaattaggcaggagagtttggcactgccccatccccactccagactcttgaggacactctgctccttgtgtccctgaccccagatgataataactgacttttattgagtgctaagtttgtgcctagcatggtgctttgtgaactagtgagccccatgctgcagacaaggaaactgaggcttaaagaggtgaagtcatttgtccaagataacacttgcagtcaacccccggagcccatgctttttttttttttttttggacaccgagtcttgctctttcgcccaggctggagtgtactggcgcaatctcggctcactgcaacctctgcctcccaggctcaagctattctcattcctcagcctcccaagtagctgggactacaggcgcacaccaccacgcccagctaatttttgtatttttagtggagatgaggtttcaccatgttgacaaggctggtctcgaactcctgacctcaagtgatctgcccatcttggccttccaacgtgctggaactaygggcgtgagccaccacacctggcagagcccatgcttttaaccactgttcaatgcttcctggcaatggcagtataccttgtcccctctctttagagacatattttgctgtgcaccacgtgcatcagtt

SEQ ID NO: 848831 - DNA, 630 bp, Homo sapiens
gtgtctctgtctgtgtattagcagtgactttggacaagtcattttctggtcatctccccgttaataaggaggaggaccagaaagacagggaaacctcacagggccctcagccctcatatgctgtggttggctttgagtttgataaggttaaagagagtgatgtctgccctaaagacacttggatccaacaacaaacaaaaacaacagcagcgaacccaccaagttagtttattcacttgtgtaagaggacatttcgggtatttagttctgaagattgtttcgtggttattgtgagggcatattgagtttgattttctacccgtgtgaaaaccacttaaaatcctagactgtgtggccagtgacacgagagaccagctccttttctgctctggctcttcctgagaagcaggtttggggtttgggggttttttattttgtttttacacagatttatggggtatgggaggaattttgttacatgtatactgagagacagatttcctaggagttgggaaatataacagactttttatgggcttgaaaaaataatagccaccattaatrcataatgcttattatacgccagatgcttttttaagcacttcatagatatttacttgtcatttaatg

SEQ ID NO: 848832 - DNA, 532 bp, Homo sapiens; identical to SEQ ID NO: 846090

SEQ ID NO: 848833 - DNA, 540 bp, Homo sapiens
ttaaatagcttaactctgttgaattttgtgatttatgtttaagtctaactgctacctagacactgctctgagaatatggtgagctgactctgtcaagagtttattaatccccaaggctttattttaatacctgagtaagaatcctcaacaccaagcctgtaaaattccactgggagagtcactggtattgtgttgacagcagggacaccaggtgggtaagttataggaaaatagattgtcttggcaaattgatagcacagcacagcagggcaaggacaagagtattcttcaagttcagttccaagggcttgacagagtacatctctcaatattggcctttcttttaaggacactaaagcataaaattcataagtttgtgtgcgtacttattgtttgtgagaccccttaatccttacagcaacatcagtaagagtgggccctattattgcttccattacacaaatgaggaaagaggcatccaaatcacgtggctartaaagggaaggaccagggtttggatatgggcagtcaaattccaga

SEQ ID NO: 848834 - DNA, 552 bp, Homo sapiens
attataagtaaatgtcctttcttcagtcattcattcataaaatatggagaaaatgtctgctaagcaagtagtaggcacttgataagcactgrtccttgtccagagagaacaagagaagacaagtaaaatacgtctttccccttagggagctctcttggtaagttaagagtaagagctggccagcagaatacacttattagcaatctaatgggaaagaaaattatgaaacaaatcaggattaaaacaagcaaaaataaaactcaataattgaaaaccaactccccatagtttctgcttgctgatataagaacacgttactccttttcaggactatgctgaattagcagtgcctgactgcactaacaaactagtcattacatttacttccttgtctaaaagcttaagcctccttccctatcacgtcggtggtcccagtattccactcagggccaccttttcatgttgcgtgtcttctgcagtgttattttttcctcccgtgagtatttttcaatgatgacttataaatctctatcttcatctaaatgcattttc

SEQ ID NO: 848835 - DNA, 628 bp, Homo sapiens
gcgaggaggaaggagtcagggtccagcctaaagaggcagtctggccacgatctgtcacagctgctgtgctgcactatggggaattcctcctctgtccaaattgcccagtctccctggcaccagcagggaaaaaaaaatggtagactggagctgcagtgatggtggccgcctcttcccccagaagctcagtcatcttaggcagcaggcagccacagtgacagtggctgttcctccctccgataactcagtagtcttaggcagttttcagctgagtggccgccaagaatctacacagctctgtgcttgggacctaaggccctggtggcgtgggctcatgagggggatctcctgatctgcaggttgcacagatccatggaaaaagtgtggtttcctgagtggggtagcacaatcactcaccacctcctttggctgggggtgggagctctgcttgccccatgtggctcccaggtgggccgttgtaccaccttgctttttctcgctttctgtggattgcgccaactgcctagtcagtcccaatgagagaacctggatacctcagttgccggtgcaggattcactcactgtttttgttcttctcsgtgggaggctccggccacagctgtttcta

SEQ ID NO: 848836 - DNA, 588 bp, Homo sapiens
tctcttatatctctctaaacttaggttccttctctatttactcccctctgccctgtcaatttatttgtcttggacactgaaaaactgggtcattggtcctgtatctgttcccacagatrgaattttgccacttgcttcactgtggtgtctctgacactgtttgttggatttagaggcttgataatttccgtattcattttgtgtgtgtgtggtggaggtgggagagcacaaaatgttttcatagatggggttgttcacccatccagagacacataatgtctggttgtctccattttttgtgacttcagcagccatggatgatcataacttaaatccattaattcttaggagttgtgaattctgctatttaaattctattttatcactattaactgtaacttcccctcatctactgtttggttatctagtcaaacaggtagcactggaaagacaattcttcctcttgagttgtctgtttttaaaataatgagtttgttcataagcatcctttaagagattctaatttttttaaaagtatcattataagcctagtgtcatttatgacctatttgatgtgtttcagtccat

SEQ ID NO: 848837 - DNA, 605 bp, Homo sapiens
gcacctggaaaatcgggtcactcccactctaatactgtgtttttccaacaggcttaaaaaacagcaaaccaggagattatatcccgcacctggctcagagggtcctatgcccacagagtctcrctcattgctagaacagcagtctgacatcaaactgcaaggcagcagcgaggctgggggaggggtgcccaccattgccgagacttgattaggtaaacaaagcagccaggaagcttgaactgggtggagcccaccacagctcaaggaggcatgcctgcctctgtaggctccacctctgggggcagggcacagacaaacaaaaagacggcagtaactctgaagacttaaatgtccctgtctgacagctttgaagagaataatggttctcccagcacgcagcttgagatctgacaacaggcagactgcctcctcaagtgggtccctgacccccgagtagcctaactgggaggcaccccccagtaggggcggactgacacctcacatggccgggtattcctctgagacaaaacttccagaggaatgatcaggcagcagcatttgcggttcaccaatatccgctgttctgcaccctctgctgctgatac

SEQ ID NO: 848838 - DNA, 627 bp, Homo sapiens
gacagaatatttttttctattcctttctctggtcttgtcctgcattccatatgcaaatattggggtgctaaatggtgccccatgttgatctgagaccmtgcttccttttctttcttctttctgttctttagaatgcataatctctcgttatctctctttaagttcacaccgattttttcctctgttagctcaaatctactacggagcctttctagcaagtttttaagttcagggttgtacacttcaacttcaaaatttccatttggttcatttttataatttctatttctatgtattcagtcattgttgtcattctgttgcttaattctttaaacatggttttctttagttctttgaatatattcataatagctgctttgaagtttttgtttgcaaagttcaacctctggggccttccaagcctgttttttgtttgtttgtttgtttgtttccctttcctgtgcataggtcacactttgttatttgtttgcatgacttagagctttcttttgagagctggacactttagataatacatggtagcaactctgtgtactgatccttccctccctcttctccctcccgtctgagtttgttgtttggtcatttgtttgttcgtttagggac

SEQ ID NO: 848839 - DNA, 581 bp, Homo sapiens
catcaatcatcttagctagatattttggataacttgctgcagcttctccatcagcacctgctgtttcaccttgcactgttatgttacagagayggcttctttccataatcctcatgaaccaacctcttctcacttccagcttttattgtgcagcttccttacctctcagctttcatagaatcgaagagagttagggcctggctctggattcaattttggccaaggcaatgttacagctgtttgatcttctatccagaccactaaaactttctccatatcagcaataagtctatttcactttcttatcatttgtgtattcactagagtagcacttccaatttctttgaagaacttttcttttgcatttacaacttggctatttggtgcaagaggcctagcttttggctgtctcagctttttacatgccttcctcactaagcttaatcatttctagcttttgatttaaagtgagagatgtgtgactcctcttttcacttgaacattttgagaccattgtaggattattaattggcctaatttcaatactactgtgtttcaggtaatagggaggctttaaggag

SEQ ID NO: 848840 - DNA, 581 bp, Homo sapiens
catcaatcatcttagctagatattttggataacttgctgcagcttctccatcagcacctgctgtttcaccttgcactgttatgttacagagatggcttctttccataawcctcatgaaccaacctcttctcacttccagcttttattgtgcagcttccttacctctcagctttcatagaatcgaagagagttagggcctggctctggattcaattttggccaaggcaatgttacagctgtttgatcttctatccagaccactaaaactttctccatatcagcaataagtctatttcactttcttatcatttgtgtattcactagagtagcacttccaatttctttgaagaacttttcttttgcatttacaacttggctatttggtgcaagaggcctagcttttggctgtctcagctttttacatgccttcctcactaagcttaatcatttctagcttttgatttaaagtgagagatgtgtgactcctcttttcacttgaacattttgagaccattgtaggattattaattggcctaatttcaatactactgtgtttcaggtaatagggaggctttaaggag

SEQ ID NO: 848841 - DNA, 600 bp, Homo sapiens
gctttttacattactgtaaaatgttataacgttaatagtgcttttactttacagtttgattgaaataaattatatatgartttatgaacaggactgtggatcatgttacccactcccctcacaatagtgtccacttattgagtgagttatattgatctatccatatcaaattatgttgaataattatgtatctttcttgattatactgatttcttattctggttactattaattctgtgacaatgttctctttttttaactgaatctttttctgagaaaagctctttgggttattatttgttttaattttgtaaacggatgggatggaaggatttgcaatgccctatcattggtggagggctttttaacatctttgaagtatgactttagctgaattatctttacaaccatcttgaatatatcttctagagtgcacaagatttaacaaaaagataaagtctggataaaatatcattgtttttgttttttgtttttgacagagtctcactctgtcacccaggctgaagtgcagtggcacaatcttggctcacagcaacctccgcctcccgggttgaagtgattctcgtgactcagcctccc

SEQ ID NO: 848842 - DNA, 600 bp, Homo sapiens
gctttttacattactgtaaaatgttataacgttaatagtgcttttactttacagtttgattgaaataaattatatatgagtttatgaacaggactgtggatcatgttacccactcccctcacaatastgtccacttattgagtgagttatattgatctatccatatcaaattatgttgaataattatgtatctttcttgattatactgatttcttattctggttactattaattctgtgacaatgttctctttttttaactgaatctttttctgagaaaagctctttgggttattatttgttttaattttgtaaacggatgggatggaaggatttgcaatgccctatcattggtggagggctttttaacatctttgaagtatgactttagctgaattatctttacaaccatcttgaatatatcttctagagtgcacaagatttaacaaaaagataaagtctggataaaatatcattgtttttgttttttgtttttgacagagtctcactctgtcacccaggctgaagtgcagtggcacaatcttggctcacagcaacctccgcctcccgggttgaagtgattctcgtgactcagcctccc

SEQ ID NO: 848843 - DNA, 571 bp, Homo sapiens
cattaggtatttctcctaatgctgtctctcccctttaccrccagcccctggcaggcctcggtgtgtgatattctcctccctgtgtccatgtgttctcattgttcaactcccacttatgagtgagaacatgcagtgtttggttttcttgtcctgtgttagtttgctaagacatggcttacagcttcatccatgtccctgcaaaagacatgaactcattcttttttatggctgcataatattccatggtgcatatgtgccacaatttctttatccagtctatcattgatgggcatttgggttggttccaagtctttgctattgtaaatagtgctgcagtaaacatatgtgtgcatgagtctttatagtagaatgatttataatcctttgagtatatacgcagtaatgggattgctgggtcaaatgggatttctggctctagatccttgagaaatcaccacactgccttctacaatggttgaactaatttacactcccaccaacagtgtaaaagcattcctatttctccgcatcctcaccagcatctgttgtttccagactttttaatgatcac

SEQ ID NO: 848844 - DNA, 625 bp, Homo sapiens
ttggctctgggctgccctgaggctacacgggcaaatgctttgtttgtcctgaggctttagttgtctctgggaggttcatcccaatgcagaccagtgaactatattcagagtcctgccttaacattagagtagagtgaaatagaaagagcaactagtacttgctgagctctgacacaggctagacactaggtcagatgtctctgcatcatgatgtaggatgattatctgcttttaacggtagagaatattttgccatcatgaagctattaggttttgcaaggtaggaggaggttatagaactcacacccagatccctgattgcaatttatgggctttctcctacacagccctctctcttgttcataaaacctaatatagagtacttcaaagagaatggggaaacttattcaattctttaattcaaccaaataatgaatcagacaatcaggagttactaaatttgcgcaaagttccctgttaaaagctggacctgcaaaaaaagatagactgactgtcctcccggaactttaaaagcartaggaaaaggttttggagaaggaatcagtatatgtagccagtgggaggataattttagtacaaccattttgaaacacaaaatagcatc

SEQ ID NO: 848845 - DNA, 634 bp, Homo sapiens; identical to SEQ ID NO: 845910

SEQ ID NO: 848846 - DNA, 476 bp, Homo sapiens
tttaatagcccagcccagggtactcccacgcccctccataaggaaacttccaatctccaatttcaattcccccaaacccaaatctttgttctcttgtattatacttttcttatctttcttaggcatttattctgtctcctctggctacttttctgtgcctcctcccgcagataccagtacatttttcacaaataagcagccctcccatccccagtgtaaacctggattttttttcccctcacctattatattcttttagtcaactctcttcacctcatctcacttttttaaaaactctcacgttaactagtttaactagtgtactatgtaatgtgtacattttcccttccactcaggggaacatcawataaattaaagagccgtctcccataccaggtttctttaagtattcctggggaaaatgcacaatataggcaatgtaatctcaaaaaaaaaaaaaaaaaaaaaaaaaggtg

SEQ ID NO: 848847 - DNA, 449 bp, Homo sapiens
tgtagatattttcccacgaaggacagatgatgtggtttgactgtgtcctcactcaaatctcatcttgaattatagctcycctaatgcccatatgttgtgggagggacccagtgggagataattgaatcactggagtggtttcccccatactgttctcatggtagtgagtaagtctcatgagatccgatggttttataagaaaagagacccaagtggtttcgcttggctctcattctttctttgcctgccaccatgtgagatgtggctttgctcctcctggccttctgccaggactgggaggcctccccagccacgtggaactgtgaatccattaaacctcctttctttataaattacccagtctctggtatgtctttattagcagcgtgaaatcttactaatacaacagagtttattcatgtcttgtgacagtgactgtgtgggctttc

SEQ ID NO: 848848 - DNA, 573 bp, Homo sapiens
tgaggtcataaactattctgaataagctcaaagcttggattatgatttccacttaaaacttccctcagtactgacttacttccactgacttttcctatttacaaatctccccatttaaagcccagccctccttcaatgtatctatcgcttgagaattctcacgttagagctcaatagctcattagtcaattttctcaatccagtaatccaattcagctagtttcttagcattaaaggcatgcatatgtgtgtgtgtgtgtgtgtcctgttaaactactaccccctttttccatgagtaacgcatacattaactgtacccatcttcctttttgagctccctcaataatgatcaatgtagaacttgccaattagttcacataggaaattgagaaaggggtttatattgcttggtagtagtgatgtaacctctgcaacttaaagaatacaataaatccctccttttggctgactcgtggacttgagagtaatctcctttctcagccctctttgttggcatggcatgggtgtgaggatccwctcgtcctttcctccatactttatcttattaatatg

SEQ ID NO: 848849 - DNA, 459 bp, Homo sapiens
gaggcagaccaagtccgaaaagggagtcagcaaagrgagagaggggtggggcagttttataggatttgggtaggtagtggaaaatgacagttaaaggggttttttctcttgcaggcaggggcaggtcataaggtgctcagtggggagctcctgagattcactgtccaggagaaggaatgtcacaaggtcaactggttaattagggtggggcaggaacaaatcatgatggtggaatgtcatcagtaaaggcaggaattggctattttcacttcttttgtggttcttcagttgcttcaggccatctcaatgtatacctgcaggtcacaggggatatgatggcttagcttgggctcagaggcttgacaaactctaattcctagatgtaaaaaaaattataaatctataaaccaatacttttttgaaacctattttaacttctttgactctttctcttacttt

SEQ ID NO: 848850 - DNA, 595 bp, Homo sapiens
ggttgcagtgagccaagatcacgctactgcactccagcctgggcaacagtgcaagactcraaaaaaaaaaaaattctggccgggcacagcggctcacgcctgtaatcccagcacactgggaggccgaggtgggctaatcacgacgtcaggagttcgagaccagcctggccaacatggtgaaaccccgtctctactaaaaatacaaaaaattagctggctgtagtggcaggcgcctgtaatcccagctactcaggaggctggggcaggagaatcacttgaacccgggaggtggaggttgcagtgagccaagatcacgccactgtactccagcctggcgacagagcaagactccatctccaaaaaaaaaaaaagaaaaagaaaaaacttcccaaattccaacttttcaggaactagtaactgaataaatcaagacagtaagcattataaatagaaataaatctaagccacaacactgaaaaaccacaaaaggaaggagggctcacaggctcatgtacagaagcatgtgcacacgaaagagagctcgttagatctacagctatagatgtgacacatatttgtaagagccccaatgtgg

SEQ ID NO: 848851 - DNA, 595 bp, Homo sapiens
ggttgcagtgagccaagatcacgctactgcactccagcctgggcaacagtgcaagactcgaaaaaaaaaaaaattctggccgggcacagyggctcacgcctgtaatcccagcacactgggaggccgaggtgggctaatcacgacgtcaggagttcgagaccagcctggccaacatggtgaaaccccgtctctactaaaaatacaaaaaattagctggctgtagtggcaggcgcctgtaatcccagctactcaggaggctggggcaggagaatcacttgaacccgggaggtggaggttgcagtgagccaagatcacgccactgtactccagcctggcgacagagcaagactccatctccaaaaaaaaaaaaagaaaaagaaaaaacttcccaaattccaacttttcaggaactagtaactgaataaatcaagacagtaagcattataaatagaaataaatctaagccacaacactgaaaaaccacaaaaggaaggagggctcacaggctcatgtacagaagcatgtgcacacgaaagagagctcgttagatctacagctatagatgtgacacatatttgtaagagccccaatgtgg

SEQ ID NO: 848852 - DNA, 600 bp, Homo sapiens
ctggttaacccacagaaatattatttataagaattctgtggctattgtagtagagcgagatgttaggccactgcattacccccagcccctggaaaaaagcagaggaatttagagacgatatttctactctgcctrtatgtgggattaaattaatgtattagtgcatgattggggatacatacttgcatttctaccctaaagtattccatttgtgacagttactcactaatttcaggcttttatgctgctgcctttttttttttaatattcttactaaattccaaattcttctgtatcttacctgtttttccatgcttacgcctggatccctcctgcactccactactggaatatctatttttttaacctggatcttcaactctgttttctccctggacttatgtgcttcgtctggaatgttacatctcttcctctctttcttttttttttgtccccatgttgactgttttattggggtttctggatatctcggggccacctcacaggaagcggtttgcaatgagatcataaacattgccgaaaaatctgttcattactgcagcactgtttctcatccccttgactttcatcacaaggtat

SEQ ID NO: 848853 - DNA, 613 bp, Homo sapiens
ataatctcagcactttgggaggccaaggtgggaggatagcttgagcctggggattcaggatcagcctgggcaattttgtctctacagaaaaaaaacattaaaaattagctggtcatggtggtgcatgcctgtagtcccagctactcaggaggctgaggcaggaggacttcttgagcccaggaattcaagattgcagtgacctatgatcacaccactgcactctagcccgggtaacagtaaaagaccccacctcaatgaataaatacataaaataaaataaaacaacaccgagacacattttaatcaaatttcttgaaaacagtgataaggagaagattttaaaatcaactagaggaaaagggtacatcaccaaaactactgataataagcaataaaggatgaatctcaaaaagagtttgctgcctaaaataaattagaaatgagatactatgtgattccatttatatgaagatacagagcaggtaacactacctatggtgatagatttcagaataatggccatctttggcaagagtggggagattctattgggggaagagacrtcaaataactttctacaatgatggaaatgtttactgccttgagatgggta

SEQ ID NO: 848854 - DNA, 613 bp, Homo sapiens
ataatctcagcactttgggaggccaaggtgggaggatagcttgagcctggggattcaggatcagcctgggcaattttgtctctacagaaaaaaaacattaaaaattagctggtcatggtggtgcatgcctgtagtcccagctactcaggaggctgaggcaggaggacttcttgagcccaggaattcaagattgcagtgacctatgatcacaccactgcactctagcccgggtaacagtaaaagaccccacctcaatgaataaatacataaaataaaataaaacaacaccgagacacattttaatcaaatttcttgaaaacagtgataaggagaagattttaaaatcaactagaggaaaagggtacatcaccaaaactactgataataagcaataaaggatgaatctcaaaaagagtttgctgcctaaaataaattagaaatgagatactatgtgattccatttatatgaagatacagagcaggtaacactacctatggtgatagatttcagaataatggccatctttggcaagagtggggagattctattgggggaagagacatcaaataactttctasaatgatggaaatgtttactgccttgagatgggta

SEQ ID NO: 848855 - DNA, 337 bp, Homo sapiens
tgctcccaggcacagctgcagctgcccagccacagctccagacagggcatccctgcgttctcaggagcctgggaagtccctgctccccccacaggctctgaagtgcttgctcctgctccctggcctctccttgctcccagaggagcaagtttgtagtgcggagaaaatttgcagccaagcctggacactgttgccaggtgtgtgagcactcagggtggtgctgacatgctggtcccctgacgccttggccccctctggacttygggcaggggagggactgagggtgactctgcacaggcctgcagatgcctctctgcatgaacagcctgggcaccct

SEQ ID NO: 848856 - DNA, 451 bp, Homo sapiens
cccccattgccagttaacctttaatctgctttgtctctgtgaactttcctattctaaagatttcatataagtggaaccgtatrtttgtctttttgtgactggctcatttcactaggcataatgttttcaaggttcatccttgtagcatgtatcagacttcattcctttttatggctgaataatactgagtcctccaactctgttcgtctttttcaagattattttggtcatctgagactccttgcaattccatttgaatttaaggattggcttctctatttctggggggaaaaatggttgtcagaattttgatggggattgtgttgaatctgtagattgttttgaataggactggcattttagcaatattgagtctgccgacccaggaactaaggatctttccatttacctaggtctttttaagtttcttttaccaatgtttggtagtatt

SEQ ID NO: 848857 - DNA, 603 bp, Homo sapiens
catttttataaattaacaagctactgtgctatgccctaggcataccaattacaacagygtctttggagccattagtcccatggggaagcctcacaaaggctgttttaattgcactgacgactctttggaattactggcatttatttatttatctatctattattttttcagagacagggagggtctcactctgtggcccatgttagaattcagtggcacaatcatagctcactgtggcctgcaactcctgggcttaagccatcctcctgagtcagcctccccagtagccaggactacaggcctgggccaccacaactggccaattttttttttttagacaaggtctcactctgtcacccaggctggagtgcagtggcatgaagtcagctcactgcaacctccgcctcctgagttcaagagattctcctgcctcagcctccccagtagctgggattacaggtgcctgccaccatgcctggctaatttttgtattttcagtagagacggggtttcaatactaggctggtcttgaactcctgacctcaggtgatctgccagccttggcctcccaaagtgctggtattacaggcatgagccaccaca

SEQ ID NO: 848858 - DNA, 546 bp, Homo sapiens
aacatgcatcaggttggttatttcctgggctacataccttggtaggatagcattatacaaacaagtttcttttagagtcctggtacacttataataaccataaaataataggactgtagcaatcttttgtcctacctcagtgacttgatgaatatactggaaacagttctcagtctgaggaaggtcagttgaagtccttactatacaagtccaaattttaaggaaaatgagtcctgtgatgagtttcctcatgtttcggccgtgtgtggaccagttagcttccaggtgtgactggagcagggcttgtcgtcttcttcagagtcactttgcaggggttggcgaagctgctcctatccacgtgcagctcccagtctactgatggtctcggtggttgggcccactagaataaactgagtccaatacttttacacagttatgtttaactgagctctctgataccaggagtaaggtggcrgggttagggtgttgcaaactttaatggttatgcggggattttcacagagcaagctttggtatctagttagt

SEQ ID NO: 848859 - DNA, 641 bp, Homo sapiens
gtggtgactgtgtgttcctgagagcctgcaggaaggcctggagagcagggaggagggcgtgagcctggagccactgaggggcttcttggaagcggctggccttgaggctgtgtagaacctgggcatttcaggggtggcctgagccatggtggcggtgtggtgagaggcatgtggggtcagcggctgtccagtgtgatgggagcgcaggggtagaggtaatgaagctggacccccttgtaggggctggccccctgggggttctttcttggggtgtaggcagccacagagtgggagagggggcagtggccagagcactttctgaaggtaatctcggggtggcgatgagcagggtgggcctgagggggcactgctccctagtctatgtcacccagggtttacctccccacactgctttgtcctttgaagcagatttgaatcctgctcttgcccctggcagccagacagcccttggcaaggcattttacctgagaccctccactgtgctgcctaccaaatggggatgacaatcaccagcaccttccagggtggcggcgarggttgggactggcactggcaacaccctctgggaggggtgcgatagatgtgtgaatcaggatccctgcagctgccccatttcctga

SEQ ID NO: 848860 - DNA, 594 bp, Homo sapiens
tgcgtacgccataatccaggagctgatgttgccaagggatcccatcaaggccaaactcagggaggatgaggccatggcattcttcccctagccccctcccacctgcttgcctctaagactcggggctacagaagcacctcctgtccctgtgtggggtgacctccctgggggagatctcagaccaataacaaagtctgttgctatacttttccttgaggtcgtctgaaaactttcttccagaactacttggaacatttagattttgcgtctgtccatgttacatgccaggaatggcagaaaagtggtctgaattacagttccgctggggatgatctcagctcctctggcctcagttagccaggggcattgccgttctgcctcctgggggctagttcttccttgctcaggcaatagccattcccccaccgtgttccctaggggacatgcattatgccagggtttgcattcagaargatttgggatagggattagtaactgacacacataagcttgggagggagtgggagcaggagtaggtgaagcagaggaattaagcacaggctccatgcccgctcccttctgcttccccgtctg

SEQ ID NO: 848861 - DNA, 590 bp, Homo sapiens
ccacgtggtgctgggcgaggacagcgcccacgcgcggctgcaggacctgctgctgcactacaccgcgcacccgctcagcccctacggggagacgctcaccgagcccctcgcccgacaggtacgcgccccagaccctgaccagagagcccagggtctcgggccagcgcccctcccgctcagagcccaggcgcaggacgcggcaccaggcactttctcatcccgaaacaccactcgggcatgcctcccttacccaggcatcttcatcttcatgggagggtggcaggcccttcgagaaatatgagtgctgggggaccgtccttaagagaccagcccagccacacggagtcagaggggcaaggagaggccaggggcacacagagtcatttggggttttgttttttgttttcttttgctttgttttagacagagtctcgctctgtcgcgcaggctggagtgcagtggcgcratcttctctccctgcaaactccacctcccgggttcaagtgattctcctgcctcagcctcctgagtcagcttcccccctctaggccccattatcctcctatccctaaggcctcgaatgctggtat

SEQ ID NO: 848862 - DNA, 598 bp, Homo sapiens
aaggatgttaaacaaatattgaggaaagaaagcatggttctgaagagtattgaagtaatktgttaataagttacaatgaaaaatatttgatttctacgttaaatttgctatatctcacaacagaaagcaagaagagcatcatgcaataaatatttattgagccattgctaaatgccaaagtgttcagaaagctcaagggaaagcaataaatagagctcataaaatcctgcccttgaggtgtttacattctagtgggcagaaacaaccaatatggaagtaaacaagaaaaatctataatatgtaagggatgaataagtgattagaataatgataatgcaattaaggagaaccagatgttgtatatgtatagggtggtcaggagatacctttgataagaaagtatttgagatatgaagaaaatgtaaaagtgaactttggtatatctgatgtattagtttattttcatgctgcttttaaaagcatacctgagactgggaggaaaaagaggtttaatggacatacagtttcatgtggctggggtggcctcaaaagcatggcagaaggcaaggaggagcaagtcacgtcttacatgcatggc

SEQ ID NO: 848863 - DNA, 598 bp, Homo sapiens
aaggatgttaaacaaatattgaggaaagaaagcatggttctgaagagtattgaagtaatttkttaataagttacaatgaaaaatatttgatttctacgttaaatttgctatatctcacaacagaaagcaagaagagcatcatgcaataaatatttattgagccattgctaaatgccaaagtgttcagaaagctcaagggaaagcaataaatagagctcataaaatcctgcccttgaggtgtttacattctagtgggcagaaacaaccaatatggaagtaaacaagaaaaatctataatatgtaagggatgaataagtgattagaataatgataatgcaattaaggagaaccagatgttgtatatgtatagggtggtcaggagatacctttgataagaaagtatttgagatatgaagaaaatgtaaaagtgaactttggtatatctgatgtattagtttattttcatgctgcttttaaaagcatacctgagactgggaggaaaaagaggtttaatggacatacagtttcatgtggctggggtggcctcaaaagcatggcagaaggcaaggaggagcaagtcacgtcttacatgcatggc

SEQ ID NO: 848864 - DNA, 606 bp, Homo sapiens
actgtttggcaagatctcccaagcagtggtttacaaattgtgtggcttcactactattaggctgttcaattaattcaatgsgctatgaacagatttataattgaaatggaagagaataaaatacatcagattgaactttataatttttatgttacactgcaaatgaaaaacttgcaaaattttcagtgtttgtatgaatgtgtatgtatatgcttgtggtaaatatattacttttattacttactctggtttttatttgaaaagttttaaagcctagagcaggatttctcatgcaagagttaccaaataatccatttaaaacataggtaataataataataataataataataataataataaaagtatgcatagtatttgcttatatcgatttatgtaataaaatatacacgtacaaagatatgcaacaataatttataaagattaggaataaatttattattcattttactttacgtagtaaaaatgccagaaagttccagttaaataatacaatttaaataacattaacatggcacatgcacctgctttcctgaatttaaactgaccaggttgtgtttaataatatgaagctgtattagcacc

SEQ ID NO: 848865 - DNA, 584 bp, Homo sapiens
aaacttaaccgttacagaacccaaggagaataacacagctctccarcagaatggtttctgcctctccaccctattccctactgattctcttcctcaggacccttgctaagtgttctcttgaccagatgaaatggcaaagggtaggaagagcagggaagaatacagacaggatggatggaacaagaagaatttctgaatgagtttggggccaacccccttttgaggtaaaacttgattttggtaatctgccaaattataaaggggaattttaagtaatctcctgtgtttggcctagacttgtagtatattaaggcattaaattggattaaaattatatatttagaattttcaaggaggtaagcagtatcaagaagagacttttttaaaagaaaggcttaataagctcccgcaacgttcctggccctcatctgatgccccaacagccctttgagatagacactactatccccacattacagaagtagaaactaaggtaaaggcatgttcctgccacaatggtgaaacaaggactgacccaggtagttgtcattcctggcctgccgttcttcaccacctcacagaac

SEQ ID NO: 848866 - DNA, 476 bp, Homo sapiens
tctttctgagtttttgtggctatcattttgtattgggaatagagattttgtgcatgagctttagtgggaactaaagtttataaatgaaattcagctcagttaatgaaagacctttcttgagtgtttgacaagttggaatttggagagagcaaactgctaaggctgaggccctcaaactgatggtttgaatctttgaaaaaccagtagtgactgaaacagctgacacaaattcattgagaacatgtcacactaacctcacatccttttgggatggggtcgccagactgatacaggcaataatcatcagtgcttactttaatttaattttctgctgaacagcttgtgaatgtaaagggaaaaagtatcttgggcatcggttttactctgaactgaacctggcacggagktgctcagtgggagtaacctaaaagattgggtaataacaatagtgctattaaagctcacttttagagtct

SEQ ID NO: 848867 - DNA, 620 bp, Homo sapiens
gaactgaatagttgcttgttttgagtggggcccagaacaaaaaggtccaggctgccatgcaagtggctctgccacttgggtgtatgacccagcagatccaatggtgcttgacgtgtatatgcacatagagatgctacatggaagctcagaggggcatctgtgggtaaagcatagggcagaccttaagggttttggagcaaagccatgtcatcaactgcagaggactactctccttttgagaaacagtatctggcttgccagcaggtcttggtagacactgaatgcttgacctcaggttaccaagttatcatgagacctgagttgcctatcatgaactgggtgttaacaggcccatcaaaacaaagttcagcatggatagcagcaattgcataatcaaatggaaatggtcttgtgaaatcgggcttgaatagcttctgaaggcccaagtaagttgtgtgagcatgcccatggccctagtgcctgccacaagcctcctccttcacctataccyatgaattcatggcgagttccctgtgaccaattgcaggagaaagaaaaagacccgggcctgttttacagatggctctccacatatgctaccattccctgacagtggatgg

SEQ ID NO: 848868 - DNA, 507 bp, Homo sapiens
gtcctggaaagaagtgtttcacacctttggaggttgacrtctgcaccaggcagaagtgcaaaaaagtgtttaaggtccacatttatggatacctgataggtgcatttgagaaaatatgaacgttgctcaacggatgttttaaagaacacagaacacatgttaataactatgactgttaacattttaaagtttaacaacagattaatttggctgataagtacatatgtgactgaatcataaatttcacaagtgctggaaccatgtcttaaacatatttgcatgccccatagtgcctggcacagtgcctggtaaattgaatgctctcaataaatatttgatgataatgagtattttattttacatctacatcaaaccaaaacatcaagctgatggaaagggaatttttcacttctagattcctttactcccttatactcataccgtgtgtaattgctttttaaacatcagacagtatgaaattttctaactaaaaagaaatatgcaaga

SEQ ID NO: 848869 - DNA, 507 bp, Homo sapiens
gtcctggaaagaagtgtttcacacctttggaggttgacatctgcaccaggcagaagtgcaaaaaagtgtttaaggtccacatttatggatacctgataggtgcatttgagaaaatatgaacgttgctcaamggatgttttaaagaacacagaacacatgttaataactatgactgttaacattttaaagtttaacaacagattaatttggctgataagtacatatgtgactgaatcataaatttcacaagtgctggaaccatgtcttaaacatatttgcatgccccatagtgcctggcacagtgcctggtaaattgaatgctctcaataaatatttgatgataatgagtattttattttacatctacatcaaaccaaaacatcaagctgatggaaagggaatttttcacttctagattcctttactcccttatactcataccgtgtgtaattgctttttaaacatcagacagtatgaaattttctaactaaaaagaaatatgcaaga

SEQ ID NO: 848870 - DNA, 556 bp, Homo sapiens
agtatgaaattttctaactaaaaagaaatatgcaagaatgcaaaagatgatagagagagaggtttcacatttgcaagtaaagaggatcgttttggaaatacttcatgttattacttaggatctgaaataatgattagataagttttgaccctttgggggtatgttacgtttactttgtattttgggaccatggcatccaggcagtagaaatatagacaatgatatatcaagtcacaggcatgatacagcaataaataagtgctcatcttttgcatgattactgtcgtactgctttggtattatatttgttttcctcaaataattattagctatatataaataataaactttactccctcgctactggaaaatgatgtttgacattaaggaaaggtcaggtattgtgagtgggaaaccacaatgtgcattgcctttaaggattattgaattaagaggtacatatatttgacaaagtatagaaatcaaatagctaccatgttagcagtgccattttacakgccatagatttattgatcatttaataatatttttaaca

SEQ ID NO: 848871 - DNA, 634 bp, Homo sapiens
ccatcctcttatcttgctgctctgaggcttctctaagtggttgctggtggtgatctactctgcctttctctgcaagcawcttctctgcttcaagaattcttcccaaagccagttcttattgtgattgcctcgttgcttttgcccgtatagccctcggcatcctacccccacaaactatttacaaataattgttctttaagagtcagttaagcattcaccatgctcctgctttgcaggaaaattggcagtaaagtagaaaagctgatgccatcatcaaatattataacacacttctgaatggagttttcaatttcaaggccaacaatatatagctaagaataagttgttactttttgtacttcttgaaactactttatcattgctcaatatttattgagcactagtgttattggagtcaattttataacaatttatttctatccatttttctcttaatcatttttttaattttggataggaacatttacatttcaaccctgacacacaaaaattactttataaatatttggtgtgtgggtgcatgaggaaaaggtttcctttcggcatttgtggttttctcttcacaaataaaatatttaatgaaataagggtggagcagcatgaccaaattcat

SEQ ID NO: 848872 - DNA, 634 bp, Homo sapiens
aaggaaaatgtggtacatatgcattatggaatattatgcagccataaaaaagaatgagattgtgtcctttgcagcaacatggatggagctggaggccataatcctaagcaaattaactcaggaaaataaaactayggcatgttctcacttagaagtgggagctaaccattgagcacacacagacataaatatatagggacaatagaccctgtggactcctagagggtgtgggggcaggagggttaaaaaactatccatcagggccaggtatggtggctcacgcctgtaatcccagcactttgggaggctgaggtgggcagatcacgagatcaggagatcgagaccatcctggctaacacgatgaaaccctgtctccactaaaaacacaaaaaaattagccaggcgtggtggcatgcgcctgtagtcacagctactcgggaggctgaggcaggagaattgcttgaacccggtaggcagaggttgcagtgagccgagattgcaccactgcactccagcctgggtgatagagtgagactccatctcaaaaaaaaaaaaaagaaaaaagaaaaaaacctactcaacaggtggtgtgctcactgacagtgtggcaggatccatactccaaacctcggca

SEQ ID NO: 848873 - DNA, 716 bp, Homo sapiens
cttgttgctgcaaagatcatgatctcgttctttttttctggctgtgaagtagtccacctctagcctgttcttaaaattcatagaatcttacatacagtgtgtgctctttcctgtctgatttcttttgctcagattcctgcctgtagactctgccatgattttgcaaatgttgcagttgtcatttttttttgtagtacttcattggtgaatgtggttttattttgctgtctgtattgatatggattgcttctatgctttggctagtactaataatgctgttatgaacatttctgcccacgttttctggtaacatagcactcccctatgaaatgtttcgacctcagggtaggtacactttagctttcggaaatgtccccaagtaattttccaaagtgtatgaattccacttgtcacacatccttatgaacactatgttatctttttgttaaagcccattttgatatagagtaaaaagattatccccttgattaaatttaaggtaggctcctctgagttctcctttctttaaattttttaattatactttaagttctagggtacatgtgcacaacgtgcaggtttgttacatatgtatacatgtgccatgctggtgtgctgcacacattaacttgtcatttacattaggtatatctccyaatgctattgggaaaactggctagccatatgtagaaagctgaaactggatcccttcctta

SEQ ID NO: 848874 - DNA, 517 bp, Homo sapiens
caaaagaaagaattaaagtgagcttgaagacaggctattcaaaaatacacagtcagaggagacaaaagaaaacataataaaaaacaacaaagcacacctataagatctagaaaatagcctcaaaagggcaaatctaagagtatttggccttaaagaggaggtagagaaagaaataggagtagaaagtttcttcaaagggatagtatcaggccagatgcggtggctcacacctgtaatcccagcacttcgggaggccaaggtgggtggatcatttgagatcaggagctcgagaccagcctggccaacagggtgaaaccccatctctactataaatataaaaattagccaggcatagtggctcacgcccgctatcccagctacttgggaggctgaggcaggagaatcgcttcaacccaggaggtggaggttgcagtgagytgagatcacaccactgtattccaacctgggggacagagtgagactccgtctcaaaaaaacaaacaaacaaacaaaaaaa

SEQ ID NO: 848875 - DNA, 529 bp, Homo sapiens
tccaatggacctccaataccttcagtagcaggcttttcagcagaaatcctataggccaggagagagtggcatgacatatttaaaatgctgaaaaaaattwaaaaagttttaccctagaatagtatatgtctggcaaaaatatctttcaaacatgaaggagaaacaaagatcttcccaaagaaaagctaaggaatttcatcaataccagactgtttacaagaaatgctaaagggagttattcaatctgaaagaaaaggatgttaatgagcaagaagaaattatccgaaggtccaaaattcatgggtaatagtaagcacacagagaaacacagaatagcataacactggcattgtggtgtgtgaacttctcttgacttaaataaaaagactaaattatgaaccaatcaaaaataataactacaactttttaagacagtacaataacactaaagagaaaaaacaaaaagttaaaaagcaggggggattaaatctagagtttttattagtttccattttgcaagtttgtttgt

SEQ ID NO: 848876 - DNA, 668 bp, Homo sapiens
tttggtctgttagtgagacagtcccattgtgaactctttgttcataggcgattgactccacagtgcatatttccttcggatattaagagctaacatgtattcggtgctcgcctatgtcagacatcatgataaagacttgacatttgttatcacagtccgtcctttcaataatcatttcaagtatctactcttttgtttttgttttgagacaaggtctcactctgttgcccaggctggagcatgtggtgtgatcaaggctcactgcagttttgacctcccagggctcaagccatcctcccaccccagcctcctgagtagctaagactacaggtgggtgccaccatgcctggctagtttttgtatatattttttgtagagatggggttttgctatattgtccagactggtcttaaacttctgaactcaaactatcctccccactcggcctcccaaagtgttgggattacaggtgtgagccaccagacccagcctcgaagtaactactcttaaaaccctcgttttacacatgaggaaattgaggctcaggaaaatgacaagaacacaatgttagtgcagagtcacgtggctggttaagtggcagagccaggactcaatcctaggtctgtctgtttccagagcccgmtacataacaacttgcctttcaataa

SEQ ID NO: 848877 - DNA, 649 bp, Homo sapiens
ctagtggggaagatggcaagcagagcttacaaaccagcaattgcaggataacctaacaaataagacagcatatacacaagacatcacaagaacacaatgggtaggtacccaaccccaaataaggaaaccaggaatggctttcagaagatgatattcaacaggaatccttacaaatgagtaggacttgtgcattagtgtttatagcagcattgctcacaacagccaaagggtggaaatgacccaaatgttcatcaaaggacatacaaaatgtagcgtatacaagatgcaaatggatatacaaaacgtagcattatatacaaaatgcaaatggatatataacatgtagcaggtacaatggaatattagccttaacaaggaaggaaattctgccacgtgctataaaatgtgtgaacctagaaaacgttatgctaaataaaataagccagtcatagagggacaaatactgtgtgatcccgctcatgtgaggtcccaagagcaggtaaattcatagagacagaaagtagaatgstggttgccaggggctaagaatgggacgttgttgtttgttgagtacagagcttcagtttggaacagtgagaaggttctgggaattcaaagtggtgatggatgcataacattgtgaatgtac

SEQ ID NO: 848878 - DNA, 649 bp, Homo sapiens
ctagtggggaagatggcaagcagagcttacaaaccagcaattgcaggataacctaacaaataagacagcatatacacaagacatcacaagaacacaatgggtaggtacccaaccccaaataaggaaaccaggaatggctttcagaagatgatattcaacaggaatccttacaaatgagtaggacttgtgcattagtgtttatagcagcattgctcacaacagccaaagggtggaaatgacccaaatgttcatcaaaggacatacaaaatgtagcgtatacaagatgcaaatggatatacaaaacgtagcattatatacaaaatgcaaatggatatataacatgtagcaggtacaatggaatattagccttaacaaggaaggaaattctgccacgtgctataaaatgtgtgaacctagaaaacgttatgctaaataaaataagccagtcatagagggacaaatactgtgtgatcccgctcatgtgaggtcccaagagcaggtaaattcatagagacagaaagtagaatggtggttgccaggggctaagaatgggacgttgttgtttgttgagtacagagyttcagtttggaacagtgagaaggttctgggaattcaaagtggtgatggatgcataacattgtgaatgtac

SEQ ID NO: 848879 - DNA, 666 bp, Homo sapiens
tttcgaaggcctgattggtgaggatccaaaacaagctctcagtccacgttccaagaaaggcagatgacgaggcccagaggacacaacgctgggccatgctgggcctcattagaggctccacgaaagtcagcayggaggagcaaacgcttcggagcctcgggggtgattgacttggcagaacaattaggtcttggtgtgagatcattcccagccttttccttcggagtaagaaagagaatgtgctgatttccacaccactgcagaggctgtcacggtcacggagcggcaggaaggagcacaccagaagcctctctaggcaggtccgccactcaccaggcatgggagacgctcagttagtttttatgcccatttgtcccaactattcttagcctactctttaccaagagctacatccctacattgcattatttgaatcatactatggaaggccttcctggaacttgattgcagtgttatctttatttgtttatttatttttttgagacagagtttcactctcattgcctaggctggagtgcagtggcgtgatctcggctgtgaactccgcctcccgggctcaagtgattctcctgcttcagactcccaagtagctgggattacaggcacctgccaccatgcccagctaattttttgtatttttagtag

SEQ ID NO: 848880 - DNA, 629 bp, Homo sapiens
ggcaccacggcactgctgccctttccctggtggccttcggctctctgtgaactccaggcagccaggcatggccaagcccacgtacacaggaagcttcagcctgaattcagactctgaatccacttaaggtcacctccatggagttttccctaggcccctccacaggggacactgccgctgtctgtttggtctccccaccctcaccctggtctccactcccctgcttgtccatctcccttgagaggctgtgactgccttatttgaacatcaccctcagctaccaccatcctggcccatgaatgtctccaagtcggtgtctgatggatagaggtaagggaggaagtcagccctcctgactgtctcctgggcacctggcactggggccactgtttctgccaagcccgaagcttgcaatggtgcccttgagttgaagcttccaccacactgggcagtccaggctgcttgcttagtcttgagtgctgaccagccaggaagagtgcggrcctcagcggtcggcacgcttccagcctgtgctgcgaatagccttcactcttcccttttcccatgtgccttccgatgaaccaccgccctgcgtgatggttctctagtggaatgtgcatcctcagcac

SEQ ID NO: 848881 - DNA, 488 bp, Homo sapiens
tcagagttttctgatcttggatccccttcakctcctttcaggtgccgatgatgccagaatttatcttaccacaaatgtaagaggcaatattagtcataacattttggcttctcagtgaatttctttgctttccacagcgtgatctttataggacgctatcctttcaagtcccatgcttctccctcttccactaaaaagagttcataattcttgtcctgatttgccaattctgctatcctaaatttccaattaagatacacctacataagtgttgtcataggagtttagaaagagcttgttcaactcttgcttccaagtttgtctctttcctacttatcattttcctcctctaataaatgctaattaaaatacttttcttgctggtttagagccttctgttttaatattcttctgtgtaaagaggctaaatttagttttccctgaattcttcagaccattttaaacagaaatgaatatgtaaaaccact

SEQ ID NO: 848882 - DNA, 545 bp, Homo sapiens
ctggatcgacctcccttctttgacacagtggtaagacagagattgatggtgttatgtgtggcatctgagtctagggcatgtgagccgtgatgttgtgcttggagaaaccagagcctctatctatgtctcttcttggggccattttcttaagacatttgaggatggggtgggaaacagaagttagtaaattaagaaaatctacttttttttttcaatttactttattaacttattgcctaagagggtaaaacaaattaaatgagagaagaatatatttttaactaggtgttttagtttcctagggctggtataaggaaggaccaccaatcatgaggcttaaaacaacagaaatctattctctctcagttctgaggctacaagtctgaaataaagttgttggcagggccatgctccctctgaaggttctagagaagtttctccttgcctcttcctagcttctggttcccctaggcattccttgacttaaagcagcgtgactccaaactctgccyctgtgtgtgtgtatgtatgtgtgtgtgtgtctt

SEQ ID NO: 848883 - DNA, 658 bp, Homo sapiens
tcttttctgtgtgacagcgtggtgctgcagaaaatgctttggaccgagcaacaaaagatttcattccatttctgattcttttactaactgtgactttgagcatgccacctaatctctttgagctgcagcctagattcattcttctaaaactgagctatccatgtacttaaagggaaatggctccagatatgtgaagccacgagataaacccaaaatatcttctaagagcatcaattttactccatcattttgaggaaagcatttttatatgagaaacaaggctacccatggagtagaatggagaacttcacaacaatttttcagtaggtacaaggaaaacctgtttcagagaagtactgacttaaggtatgagttcactactctttgattttaggaatattttcatggcaaagtttgagaagcactagattagatcatcttgaggctgcctttcaactattacatttgaggattcaaccacaaacctctgttatgggctgaggtttgaacttgccccccacaagttcaaatgttgaagccctactccccagtacctcagaatgtgactatgcataaataggccttgaagaagtgattaagttaaaattrggccattaaggtggatcctaatctaatctgattggtgtctttatcgcaa

SEQ ID NO: 848884 - DNA, 661 bp, Homo sapiens
actttgtaggttggtagatactgctcagagcaacctatcaactactaacatcattgttcatacaattagaaaaaaaattctaaaattcgtatggaaccaaaaaagagcccgaataaccaaagcaatcctaagaaaaaagaataaagctggaggcatcacattacctgacttcaactatacaacaaatttacaaaaaccaaaacagcatggtactggtacaaaaacagacacagagaccaatggaacagaatagagaacctagaaataaaactgcacacctacaaccatctgatctttggcaaagtaaacaaaagtaagcaatggggaaacgattccctattcgataaatggtgctcgtataactggctatccatatgcagaggaataaaagtggacaccttccttatagcatatgcaaaaattaactcgagagattaaagatttagatgtaagacctcaaactataaaaattctagatgaaaacctagtgaacaccctttcaacataggtgtgggtaaagaatttgtggctaagtcctcaaaaacaattgtaattaaaaaaaacaacatgtgggaccttattaaactaaagaggttttgcataacaagagaaatgatcaacggagtaaacagacarcctacagaatgggagaaaatattca

SEQ ID NO: 848885 - DNA, 640 bp, Homo sapiens
accttccttatagcatatgcaaaaattaactcgagagattaaagatttagatgtaagacctcaaactataaaaattctagatgaaaacctagtgaacaccctttcaacataggtgtgggtaaagaatttgtggctaagtcctcaaaaacaattgtaattaaaaaaaacaacatgtgggaccttattaaactaaagaggttttgcataacaagagaaatgatcaacggagtaaacagacagcctacagaatgggagaaaatattcacaaacaatgcatctgacaaaggcctaatatccagaatctgtaagaaacttaaacaattcaacaaggaaaaaccaaataaccacattaataagtgggcaaaggacatgaacagaaacttctcacaagaagatatacaagcggccaacaaacatgtgaaagaaaaaatgctcatcatcactaatcatcagaaaattcaagtcaaaactacaagataccatctcacaccagtcagaatgacttttgttaaaaagtgaaaaaatagactgggtgtggtggctcccgcctgtaatcctagcactttgggaggccgaggagggtggatcacarggtcaggagttctagaacagcctggccaacatggtgaaaccccatctc

SEQ ID NO: 848886 - DNA, 503 bp, Homo sapiens
aatcagaaaatgggccctcaccagacactaaatctgcttgtacatgggtcatgggcttcccaatctccagaattgtgagaaataaagttttgttgtttagaagcccccaactccctcgaaaaaaaccaagtcaagtggtttcagctgtttcatgtttaaatcatttaacaaaatgttctgggcgcccagagcatgcagaatactccccctaaagcagctacagccgggccggcggcaacccctcatcctgacctgaaaactgggttagtcatggaagaacacagggagtgaaaaagttgaaatttcacagcatgctctgaaataacggaatataaaggtacacactgctcccatcaaaggagaaaaggtgtggttttatttccacataccatcaatatttttagcataaaaatacctaaatcatttgaatamcaaatcccatcttccattttgtcaaaaataatgacctttattctaaattgccaagagtttcattagttcta

SEQ ID NO: 848887 - DNA, 585 bp, Homo sapiens
agaactcttataattcaagaagacaatctaaaaatgagcaaaagatttgaacagacactgcacaaaagaaggtatacaaatgggcaataagtacatgaaaagaagttcaacatcactagttattagggaaatgtgaattgaaatcacaatgagatatcactacacacctactagattggctacagttggaaaggttcacaataccaagtgctggaaaggatgtggagcaagtagatctctcatacattgctggtaaaaatgcaaaatcatacaggtacttgggaaagcagtatagcaatttcttacaatattaaaggtacatttaccatatgactctgcaatctattcctgtttgcgcaaaggcaaaaccacaatgacaaaaatcaggtatgtggtaaagggagaaggtgacttggtgactttttaagatgaggaaactgttgtatatcttgatagtggtagtggctaaacaattgaatagccaaaattcctcaggccacacccttaaaataggtgaattgtattgtataaatatacyttaataataaataaaagtaaaaattacataaatgttcctatttatcc

SEQ ID NO: 848888 - DNA, 488 bp, Homo sapiens
ccaggaaggagaaaggcgacagcctttatctagcaataagggcaaatggtaagaataaagtgtcagcccaggcacactttatgtcaattcaagtgactaaaggccaatttggtgcagcgtgtttggatcatatgttgtaaaatgcatgaccttgtttcctgatgctgatttatagcttgatgtgcttcaagctttattttctttcatgaaaaaatcctcaacccttgatgggaaagtggcaaacctgaagtagctgcagaggtctgaaggcgcattgcttcttgaaggcagcgcagctcatccctggcttggattgctttgtgagtggaactaacaggcagggacagtgtcttgtcagaaataccataaagtgtaaaatagagtcaggttctttgccaggtgaagtgggcagagctgttagaggtacagccactccacttaaaggggattcrggtctcatcaggatccaatgaacgcagttcaatagc

SEQ ID NO: 848889 - DNA, 603 bp, Homo sapiens
ctgggatccagtagccactatttttctgtatccctgaagtcatgccatcattccagtatgctcgcttgagtggctgcatcaccactatcctagctgcttggagcctattgctgtgtggaatggctaagattttggtgttcaaacacatagagcaccccacccacaagggaataggtggacttgcacaatatggaagatgacacacagctggacagtctgatatacctacacacttggcctgccagccagcccagcaacccctacccccaccccacctcgcccagcaaaaccatatcactgccatcacaaaccaacagcctaggccactgaaacaattgcagacactataaatgaggattgcagctgaataaaatgcagagaccatgctactgagtccatctaaaaccaaagccaacacaccacacttaaacaacatcctatgactcatgtgcaggaaacagtctctccctctgaaaactactccaccaaatttgaaaagatgactgttccactggtatgcacagatatcaacaaaggaacacacacacacacacacacmcacacacacacacacacacacacacacacacagaaaaagtaagg

SEQ ID NO: 848890 - DNA, 633 bp, Homo sapiens
agggggttgactatgtccattctttttatgaatgttgtcaaagcttcagtaatcttgcccctgtgcgtttcttgtctgccctgcaggcagaatgaactgtgagtgggttatcaggaaaggtcaaagactgcatggctggtgtgaggggctgtggggctgggccagggaagcgggagggaagggtgagtcacttgaaagttttgtgtgctgagacatggctcttaaaggagttctggggtttttgcagaggagaaagtgcttaaaggcagattatgcagccaacagtgagccagtaaatggtttcactggggcctatattgggacattttggcagccttctttattgggtttggggctctctggctatcagatacctttctgttctctccttgtgaatgcccgtgaggggtttagggtaaaaatgtggagcttttaagcatcttaatgtgatttcaattgcattttaatttttaataaaatgttgaataaagttctgctcaaagagccacagggatgagaagattctacttaatagggagcgtagyattttcatactgggagatagatgggtttaacaagaccctggtacatctctttcaagtaagtgcaataaatggttctgttggaatggga

SEQ ID NO: 848891 - DNA, 636 bp, Homo sapiens
gaggatgacatctgcacacataataaaaaagtaaacaaagaaaaattgcaatggggaatgggaaagtgttgagtgtggattgaagggaggtggcttttacccacaagggtccaactgagagctgatgttttaaaatttcatctcacccgtaagactgagagggatttcccagggtctgggagcagaaatcagagaagcagtaaagtggaggatgtgatagctctagagaccaccctgtagcacagtgatggatgatggcttggcttccagggaataaggtaagcatgaaagcctcttttgtgaaaataggcttagagagacttgcttatagctagaggatgcttctaggtaggagatgatgctatgtgcaacctacatgcagaaagatgttgaaagagaggtcaaagttaggacatggaacaaaagccctggcaaaattcaagcagaccttgactttgggagagcctggagcagactaagtaattgtgaagtcagctggccatgtctccccaaaatactcctggtatttgctttttgtggtatgggatgtmccagactcaacagggaacaagatcagaagaagaaaacagtgacatttgtagccaagtatgagatgaatttcagtaactggtatat

SEQ ID NO: 848892 - DNA, 586 bp, Homo sapiens
ctgtatgcccattctttttaattgctttaggttttctctaactttgccagctcaccattttgtcatagaatagcaatttcttctagtatacaatgtgtgatagtctattcaatcaytggtaacaattttccatcaatataatagatggcccagattcattgtaggattaaatgagttcctgtatataatgtacttagaatagttagtagaagttatacctcacatatggtaaatactacataaacattagctactatgactatgattgtgtttatcatttgtattgtttttaccaagggaatacatattctgtccctttcccatttgaccttctattatagttttgattaagagagtgcattatgtgttacacagaatattacttctgtggcctattaggaggcattgcattccaaatgtgttctattgtcaaaaaaaaaaaaaatagaaaaactctagattagaggaaggtaggatttccgcagtccactagagttctcaaacagtggatctaaagcacttcttctctgtcaccatgtttatcccacttcttcctttctcctcctcccctgccatgctgccccaa

SEQ ID NO: 848893 - DNA, 565 bp, Homo sapiens
  misc_feature 323: n = A,T,C or G
agaattatcagcacttgaagtttactctcagatataacacacccaagcatagcattcacctcagatgcaaattcacacataatgctttttgcctcaaaggaaacaatggatagaagggacacaaaagtagatttytgggttgagttgtttcttaaaaaaatagaatttggctgggcgtggtggctcacgcctataatcccagcactgtgggaggccaaggcaggcggatcgcctgagctcaggagttcgagaccactctgggcaacatggtgaaatcctgtctctagtaaaatccaaaaaaaaaaaaaaaaaaaaaaaaaaanaattagccaggcatggtgacatttgcctgtagttccagctaattgggaggctgggacatgagaatcgcttgatccctggaggcagaggttacagtgagccaagatcgcaccactgcactccagcttgggctacagagtaagactccgtctcaaaaaataataataaaaataaaaatagaactcacttgtaccaatgtctgtaatttacttcatataatcaatgtactatgatgtttgaccag

SEQ ID NO: 848894 - DNA, 529 bp, Homo sapiens
ttttacttttagaatcaatcttgataatttataattttctaygtagaaggtccatttatttgaaaatttccatttttattgaccaggaattaaacacagtatttccttataacccttgctatgttctcatatgagttattctcaacaggaggaggcaggcagtattgagagaaatggtagctcatcatttcctggagggtatttttagagcacataccccgacattctgctaatgtccccggttcaccccactcccaccaccatctgcccctgcaattgttgaaaatcactgaagtggaatgagagcaactactgaggggcacacattacacatgtgaatggcataaagtcattaagaaaatgttgagaaccaccacacaagggtctcctactccagcccctcttctaatgggagagcctcaacatcactgggatagtatgactgtcatctgctttacccaataagaagcatgacttgaacaaacacacattatgcacatggtcatttggggctaacggtgcttagatt

SEQ ID NO: 848895 - DNA, 546 bp, Homo sapiens
tctttatagctgtcctttgcaagcctctgtagagtctttccaagcattaggcttaggtttttatagaaagaactctctctattcacaatagtctttcattggcatttaggtgatagctatttatataatgatagtattaagtagaacttttataaataagtttggtaaccggcacaagcgagtcttggtgagctgtagttcacagtcaatagcggactgtagggagtagccctgagtgttcagtatgctgtgaaagggtttttgttgttgttggttttttttttttagggaacttatagaaatgctggcaatttcaagaaaccaaaagttgttacaggctggagaggaaaaccaggtaagtggcttctttttaaattagttaatttctctttgttttttaattaaaagaaaaaaacttgatttctgcaagtttcctctttatatttactttgtgtgggaacaggaatgttggatccttttaagttattaattaaaactttaawattggtattttctttgtatcatttacttaagataacagtgcgc

SEQ ID NO: 848896 - DNA, 603 bp, Homo sapiens
acaagtttcacttcctggatcaggtggttttgtctcctttactgctgtgatgcctggttggtgtgcaggacattaagtggtgttcaccacagcaactttcrgtggcgcctctaaaggtggtttcctagcaggtttcaccagaatcccaaagggcagcttcccagcaagtctccctggaaccccagtgggtaatttcctgcttgccagctctggcctctgatgcctcatctaacttctctgccatggagtgggccacattacactgcaccctctccaatgacagcaccatgatatgagagtatcggccttgggatggagctggggaagactgtttttaggtctgtcccttccttggtccaaaatgtggcagtgactccccatatctgtttttcctgtacttttaaaacatgagaaatatgaggtgatatccaaggatatcacagttgagttcccctggttgtactttaggtagctaacaaaaatgatgcatacaaagcattattaatgacacagggacagccttatgatgtaacattaagcaaaaaatgtataggggaaaaaaggaaacaggctaaaatatttaaagtgactgcctcagaaagg

SEQ ID NO: 848897 - DNA, 631 bp, Homo sapiens
cacctattagttgctccccattgctccctcccccatccctttggaaaccactcatctactttctgtctctgaagatttgtctattctggacatttcatatacgtggaatcacaccatatggggctttgtgtctggcttctttcacttagtatctattttcttcaaggttcattcaggttgtaacatatatcagtactttattcctttttatagccgaagcatattccattatatggacttaacacattttattaacccactcattagttggacagtttggttgtttctgctattgactattatgaataatgcttctataaatacttgtgtacaagtttttgcacagatgtgttttcaagtctcttgggtatataactaagaagtggaattgctgggtcataaagtttaactgtttttagcttttttacatatatatttttgagacagagtcttgctctgttgcccaggctggagtgcagtagcatgatcttggctcactgcaacctccacctcctgagatgaagcaattctcgtgyctcagctacctgagtagctgggattacagacgtgcatcaccacatccggctaattttatttctgtatttttcttagagacaaggttttgccctgt

SEQ ID NO: 848898 - DNA, 617 bp, Homo sapiens
tctcctcagccccacttaccagaaatactcacagttgagaatttgcttatatttttcggggtttcctttttcccatgcattatttctgcaaaatggatcagtctatctgtctggctctccatctattcattctatgcatctattaatcacccatttggtttggtttggtttttgccaaaaagatatatatataaaaaatatatatcatattatatataatatatatcatataatatattatatatgatatatattcttttgtgtaagttttttatttaattgaaatgaaacttcatttcaatttaatgaagccgacttttccaaatcagatccattctttcttatagtgacacaatattccattgtatggatggtccataactttactaagccagtgccctactgacgaacatttgtgctagtcccagtttctttttctattacaagaatgctataataaaattcttaattaaaagatgtggttattaatggrtgtgttgtgttaaggatcagacattgtgctaagccctctacgggatattaggatgaataaaatatgtttcctgccatcttggagtttactcttttgtatgggagaactattaaaaaaaattgac

SEQ ID NO: 848899 - DNA, 621 bp, Homo sapiens
aaacaatacaagtgtccatcatcagatgaatggatcaagaaaaamacacacacacacacacacacacacaatggataccattcagccataaaaagaatgaaatcctgccatttgtgacaacatacataaacctggaagacatcatattaagtgaaataagccaggcacagaaaacaaataccacatgatctcatttatatgtggaatctaaaaaagtcaaactcatagcagcagagagtagaatggtggttaccaggggctgagagagggaggcattgaggagttatcagccaaactatacagaatttcagttacacaggaggagtaagttcaagtgatttattgttcaacatggtgaatatagttaaaaacaatattgtattcttgaaaaattgctaagggaatggattttcaatgttcttgccacaaaaaaaaaactgataagcgaggcaatgcacaatgccatttagcctgatttagccatttcacaaagtatacatatttcaaaacatgtttcacaccataaatatatactattgtgacataaatatatatatttatgtgaattaaatttgtgtcaattaaaaaatttgtgtcaattaaaaaaaaaaagacaggcca

SEQ ID NO: 848900 - DNA, 624 bp, Homo sapiens
gataaaatagctacataccacctcacaatctgcccaccaggaaattccttgtggacaaaggacaggcagaactcaaagccatccctctgcccacgtgacacaaatgcataccrgatggcttcctctgccctatggtttcactaagccagactaagcaaaagtgactgttcctctatgctcccctcacatgtaaattgtgtattcagtgaaaggctaatcagaaactcaaaagaatgcaacatttgtctcttatctacctatgacctggaagccccctcccctgctttgagttgtcccaccttttaggatagaaccaatgtacatcttacacatattgattgatgtctcatgtctccctaaaatgtataaaaccaagctgtgccctgaccactttgggtacatgtcgtcaggaccccctgaggctgtgtcacaggtgtatccttaacctggcaaaataaactttctaaattgattgagagctgtctcagatattttgggttcacattccacacctggctatctctacaacttttctttaaatctaaaaatattacaaaattaaaagtttatttttaaaaaagcagctggctggtcacagtggctcacacctgtaatccagcactt

SEQ ID NO: 848901 - DNA, 497 bp, Homo sapiens
tgaaatgtctccttttcaccaagcacaacccactgattatttttttaagaagtgcaaatcacagctctgtgctctgaggcagctggggtggtaggatccactcaccttcttcytttggtttagtttggctttcagatataggcggactctcagcatcagatgttttcttaatgaacccgctaaggtaatgcaaacgagcctgagaagcctaaaaaacaaacatgagcagctttttaaaagctcttcaaaagcaacaaccagtacaggtaatacatgttaatggtattcaatcgaaaacgaaacaggaaaatgtgaattaaatagggcagtctaaatgaagcagaccagctcttcttcattatcagataaactcaaattctgaatcatccatgattttgacagttatttttgagaatagatgaagaagcagccctaaaaagaatacatttctgggcatactatcttagatgcagtggttcctgaatctttttcatctg

SEQ ID NO: 848902 - DNA, 593 bp, Homo sapiens
catgcaaatgctatacttgtaatattttactgtactatgaagtttyataatttaagtggttacttgctactttattttcatttttaaagtgtcatgaaaacataaatatccatttatgaatctaactatcctgttcataaaggtacacttacactgggagctcaaacctttctcactcttcaagaagtgaaatgctgggattatagcttggccttttccagtggagctcaccatagtttcttcattttctaggacctgcagcttgatgaatgcatctggtttggatgtgcgtacctgtattgtagcaggttgtggtgttagaactttaaccgaatacctgtaaagaaaaaaagttaacattataagcaagtatgttggtctttctctcaagtcagtaagtgagatagtttggatatatgtccctgcccaaatctgctgtcaaactgtgaccctcactgtttgaggtggggcctggtgagaggtaattggatcttggggacaggtttctcacgaatagtttagcaccatctacttggtgccattcacatgacagtgagtgagttgtcatgagatctggttgtttaaacatgtgt

SEQ ID NO: 848903 - DNA, 567 bp, Homo sapiens
cataatgaggaacaaggagccactggtcatgttccgcttaaaggacaaataatcaggaagcttcttttcgttgggatctttcctgagtggaatcaaaactttkatccacaaataggcctacagaagctacagaggacacaggtgcaggttgaacattgccctgagaatgtcatcagccaactgcaaagagctaccctgccccaagtctacaaggccaaggcagggaaggaccccccaaaaaagaggaagataataaatggggatgaatcggacaccagggaaaagaggtagtcacccaccaatggcaatacggagacagagcagaaatgggagggaaatgccaatttctccccacaggggtcagctagagttatcctaatttccttaggaaaagtaagcctgttttccctaagggtgacccctcccccagtagaccatgacttccaggctgctcctgaccttgccaaacaaaagtggacaaaacgtaaagacagtgaagaagaaaaaagtgaagggaggaaaactccaaatgtacacggagaaacagagtgagcaatgaggttgaga

SEQ ID NO: 848904 - DNA, 596 bp, Homo sapiens; identical to SEQ ID NO: 848790

SEQ ID NO: 848905 - DNA, 389 bp, Homo sapiens
agttatggttatagttgtacaatttgtgaatatactaaaagcctctgaatttcatatttcagtatgtttgtgtgtgtatgcatgtcttatatttttatatttattttatcttttttctttttttatcttttttttttcaaattacccagaatctgagatgtgtttttttttttttacctcttccttcagagattctgattcatcagaactaagatgataatctgcattttaaacaagcaatccaagtgattctgatttaggttgccraaagatttttttctttaagaaacaatgctttaggcaaggatgttattaatctttctttaagaaatttctgataaagtagggaaatgcatatctttcccctaattatatatgaatatcctggc

SEQ ID NO: 848906 - DNA, 552 bp, Homo sapiens
aaaataaaattaagcctaaaagaatgtaaagatggtttatgtgctatttgaaattaatgtcttgtacatctccagctgaatcaaagatgcaaagggaggaatatatgtatattcatagcatracttcaaaaaacttcgttaaagttagtgttttccctaggaggaaaatataataagtcaaacttttgatttgcgagtaaattgtaaatctgatgttaataagtatctgtcaagggaatttggtattctgagatttgaaattatgcaatggatagaactaatttttaacagcaaggtaacttgtaaatatctgtaggatgtattttcagcacaaaagtacttgctttgttgcctacattaaaaggaaatgcaaaataaaagtgaaatttctttgttgtctcatacttttttacaactgtttctaatcacagtaaataataatacttggagaaagttttctcacgtttatattttattttaaaattctattatgtatccaaaaaagttagcaaactgtcaggtgagttgattgtcccttcacaaactgcaata

SEQ ID NO: 848907 - DNA, 596 bp, Homo sapiens
tggtgtcatcctagcatagcttctgcaaagaagcaagagagaatgcaggtaaaaacattttgcatctgcaccatttgataagcagcagccctcagggtcctgactgggggtgggtaagcaaaattygagcttccggcctctgtcctgacagggcctcttactgagaggctggggagcggagcagccattacaggttggggcacttgttaggctagagtgccctggaccttgttttggatatcaccctctaggcaaaaaagcacaacttgaccgtgaacctgaccacgttccgactgtggtgttacgcctgtgagaaggaggtattcctggagcagcggctggcagcccctctgctgggctcctcttccaagttctctgaacaggtaacctgtgtggtgggctctgtttggttgttggtgacactgtgttgaggatgaggcagtgtgacctgagcatccgtggagcatggggcagtaggtcccagaggtgtctgtttctgggtcagtatgttttcaggtgactttgaggagctcacatcagcacatgctcactgagcccaactctgtgccgaggcatgtgtgagaccatgagggtgc

SEQ ID NO: 848908 - DNA, 596 bp, Homo sapiens
tggtgtcatcctagcatagcttctgcaaagaagcaagagagaatgcaggtaaaaacattttgcatctgcaccatttgataagcagcagccctcagggtcctgactgggggtgggtaagcaaaatttgagcttccggcctctgtcctgacagggcctcttactgagaggctggggagcggagcagccattacaggttggggcacttgttaggctagagtgccctggaccttgttttggatatcaccctctaggcaaaaaagcacaacttgaccgtgaacctgaccacgttccgactgtggtgttacgcctgtgagaaggaggtattcctggagcagcggctggcagcccctctgctgggctcctcttccaagttctctgaacaggtaacctgtgtggtgggctctgtttggttgttggtgacactgtgttgaggatgaggcagtgtgacctgagcatccgtggagcatggggcagtaggtcccagaggtgtctgttyctgggtcagtatgttttcaggtgactttgaggagctcacatcagcacatgctcactgagcccaactctgtgccgaggcatgtgtgagaccatgagggtgc

SEQ ID NO: 848909 - DNA, 700 bp, Homo sapiens
ttagcattccatttactatcgattaggaaaacattcaatcatttctaataaggaaaagatttgattcctttgagacatgttaagggaagtgatcagaggtcagaataatatctatttgagaaatcatgtatcaattcaaaggcttatggaaaatcatagatttgagggtctcccgtctaacagtggtcacaatatatgctacccatggctacctttaaacaccatactaaaacactaatttacatccttgtgaaaatgaatccacgtaaaagttcactgcagtccatttcttcagtgaataatcaagaagggaaaaaactaagggcctattcacaaactactaggatcctagaaataccagttttcaagtcattaaaaccaatgtgtattattttttaaaacacaagactaataataaaagcaggaatattcaaaaggttatgccaaacatagagcctctcgaaatgagtggtgcaaaaaagttgaaactatctgcaagtgatttcaactcttgacgtgtattttgcttgacttaaaagctgggaatcaatttctttcttcaccctcrtcttcaactactgggaaggaatcaatgatgtgcctagaccgactagagaactctggagtaatgcccctgcagtaccaactcagggcttccctgataggcagcagtttcttcacttgacctgtctttggcctg

SEQ ID NO: 848910 - DNA, 571 bp, Homo sapiens
cccgcctcagccttccaaagtgctgggattatggccaccatgcccggccaacatactgtttgtttggtgttttattgagacagagtctcgctctgtcaccgaggctggagtgcagtggcgtgatcttggctcaccgcaacctctgcctcctgggttcaagcgattctcccgcctcagcctccccgagtagtgggattacaggtgcccgccactacgcccagctaatatttgcatttttagtagagacggggtttcaccacattggccatgttggtctcgaactcctgacctgaggtgatctgcccgtctcggtctcccaaagtgctgtgattacaggtgtgagccaccgagcccagccctgacatactgttaatagagtgaaaaaataacatgttcagagtaacttgtgacatcacatcagcactcaggaagttttggattttggagcatttyggattttcagattaggaatgcttaacctgtacttattatctgttttcccctcctaaattatacactttataaaggcaaggatcttcgcttattttgttcactactgtatccccagcgc

SEQ ID NO: 848911 - DNA, 533 bp, Homo sapiens
ctaagatttaatcattaaatacttgagggcctaacgtatgccaggcactcttctagctaccaaagcatacaagtgcaagcaagacataatctctgcgctcatggagccctctttttcttacctatataattagaataatatttcttacttcattaggtggtgggcaagaattttattataatgagctctcattaggctcacctccagtttaaagaaataatcattattacagcaatcttgagaaaaagagacaaagcatattacaagctcatagtgatatcttgagtaaagctttctttttctaaacaagtcagctatccctgactttaaaatcagttgaaaaaagcacagttagatgaatttccacatctctatcccaaacaagactttttctaactagcatgtcaagtactcagagccaggaaaatttacaaaaatgtttttaacaatccatgtcttttgagtgagtggcaatttgycccaactatagtatcaagaatcagggtccaggccaggtgcggtggctcatgcct

SEQ ID NO: 848912 - DNA, 622 bp, Homo sapiens
ccttgttagagaaaagcttgcttgaatgcaattattgcttcgcttgagtttgtgcattatttactaataacagctacaggaaaacaagatcttcaacagagataaaagaaaatttgccaaccaacagctctaagaatgggctgacgaacctgtagaagctcacgaaacactgatgaagaaagcaatgattaactggctgcctattgtgcacatttcacagaaatgttttggtcatcatttcccctaatttcccttaaaccccccctggatcaagatccagaagcaaagctccgagaggtggtctctgagtgctagttcactccctcctctggtttgccggcttcttgaatgaagcgaactttcttttcaccaaagctctcttgagtttttggctttcaagcaatgagtagcccagatctgagttcggttacaatgatagtgtttgtttgtgtctcttagtgtgggaatgggtagaaaaaattgtctgtgctgagagtcagccatcctcatgggccaaggttaaggcctagttgagaagatggctcagaggagccttagcttaatcaagaagagagtctttgtcagcgggmatgtaaccaagtatccccatttattaagacaa

SEQ ID NO: 848913 - DNA, 609 bp, Homo sapiens
aagaacatggcaaaaattcttccttcatgtcaatcagtagactccatcatattttctcatcatttaaccacccccatgactacattcctcctaattcagtttaggaggatgaatattctacagatccatagtgcaaccactcccattgcccatccttcagatctcttgcccctttcattctaggtcccaccccctggcaaaacactatccattggtaaacctggctgttgcaaaccgacagccatttccacttgtacttgaccatgaaaaattcttggttattttggaagagaaaacagtagtgtggaaagttctatgtgagtgagggttggctactttcctgccacctggttataataaaaccaagtcacagattcaacaccaccacgtatttagacatttttatacgtaatcgtttattagcaggcagatggggagggttctgcaagcttcgtggagactgagctccccgaccttttagagatctgtccacatcttgccagagactctgtgggtcatacacaacatygcagaaagaggactctgtgaccccaacgcctgtcaccaggcaacaaaaaaccgtctgactcattctaaacacaggcccag

SEQ ID NO: 848914 - DNA, 609 bp, Homo sapiens
aagaacatggcaaaaattcttccttcatgtcaatcagtagactccatcatattttctcatcatttaaccacccccatgactacattcctcctaattcagtttaggaggatgaatattctacagatccatagtgcaaccactcccattgcccatccttcagatctcttgcccctttcattctaggtcccaccccctggcaaaacactatccattggtaaacctggctgttgcaaaccgacagccatttccacttgtacttgaccatgaaaaattcttggttattttggaagagaaaacagtagtgtggaaagttctatgtgagtgagggttggctactttcctgccacctggttataataaaaccaagtcacagattcaacaccaccacgtatttagacatttttatacgtaatcgtttattagcaggcagatggggagggttctgcaagcttcgtggagactgagctccccgaccttttagagatctgtccacatcttgccagagactctgtgggtcatacacaacatcgmagaaagaggactctgtgaccccaacgcctgtcaccaggcaacaaaaaaccgtctgactcattctaaacacaggcccag

SEQ ID NO: 848915 - DNA, 511 bp, Homo sapiens
tttgggcctagtctttagttcacacaggtatgcaaaatattgagctaagtgacatatcctggaatggggggttaaccattasataggcgtctgtcagtgccccaaagcctgacccagatctctaaaggacagcctctactgtacatgcagcctctccctacctggaccttgccttgagtctgctgggatttataggagggattaccaaccaccccttgcagtccactggtcagaacattttctaccagcatcaccaccccgacacccacccccaccttggaattgcatgggatttcttccctgccttacacatgttctcagataatacacaaagtgctttctctccaaaggttaggaaccattaggaatggtaattcagttgagataatacaacgcctgaaattttattttatctgccaatactgatgatttgtacaaactcagagaggattcttatcccatcggtacctcattttccacttagaaaattgaaattttagcataaactgct

SEQ ID NO: 848916 - DNA, 632 bp, Homo sapiens
agtttgaaactagactttatttgcaccacatcaagcaaagctagggcaggtaggactgtgcattttatccgattgtgttaaataattggaagccagcttaccagtgactcccagctgggagttactaytaatataatttccagccagctctttgggagttcaaagctgaatatatacatatatgcttgaatattttccacatgtaagacttatttctttgaaatgtgataggacatgaacttcactaaatagaacctcctgacttcagagaagattaagaaataaattctttttaattgatgttgagtttcgtgactcaaagatacccttatcctcctgacttgacaatgcactatcattagaagtggaaattcataatagaaaaaagtaaaattaaaaaaattccttttaccatttattaattatattattctctgtttagcaacagagagatatgtacagaagccacaaaagctctagataattacattttccaattacaagagtttcagtttttgagactatgacatcagaatatttcagaataagtcttcagtttagaaccagggttacgattctttttaaagaggattactttatatgtatttctgtgttgctttgaaggatccctg

SEQ ID NO: 848917 - DNA, 536 bp, Homo sapiens
ccctagctgacgatggctatcgggtagacaccaacagtggctggcatagaaacaatagaggaaacaataatgggaaaaagagtagtgataggtcagaatgaaatagcctgttggatgtgtaatatgtagagtctacattatttaggcctattgtattcttatctgtatatacattcactatctgatatttaatattaacatatgtttgaagctaggagaacaatacttctaagtaaaaagtgtgctactcaagagcagtagaaccatatacatttggggatgtaaactatatgaaattgcaagtacaaaattgctaggcccactttaggtccttggaaacttctttagcttcatggcaaatctttttccactgccatccccggccttccccacatttaacattgctactcyggagagaatagaaaacttgggcaacaagttagaagaacagaatttgctttctttttaacattatgttattctaaggaagaaggacattgcactcaagaattactcaaggaacaggtcaaatgaat

SEQ ID NO: 848918 - DNA, 589 bp, Homo sapiens
aggagccttttgttatgcagcattgtggaataaaaacctaactgatacaaaggggaaatgaaagagtttctagtccaacccactgattttgtagctaaaattatttactctgtaatatatatattgcttagacagtttctggtctcagttccatcatctgtgaaatgaaaataccatacctggccaggcacagtggctcacacctgtaatcccagcactttgggaggctgaggcaggtggatcacctgaggttgggagtttgagaccagcctggccaacatggggaaaccgtctgtactaaaaatacaaaaattagctgggcaagatggtacacgcctgtaatcccagttactcgagaggctgaggcaggagaatcgcttgaacccaggaggtggaggttgtatgaaccaagatcatgccactgcactccagcctgggtgacagagtgagactccatctcaaaaacaaaaaacaaaaaatacyatacctgtcttaaccaactctgatagctgtgcaaaagtttgctcagtgtcataatcaaaataatgctgctggaaaccctaaactcttcatggctcaccattgccca

SEQ ID NO: 848919 - DNA, 481 bp, Homo sapiens
accttttttttttttttttttttttttttgagattacattgcctatattgtgcattttccccaggaatacttaaagaaacctggtatgggagacggctctttaatttatwtgatgttcccctgagtggaagggaaaatgtacacattacatagtacactagttaaactagttaacgtgagagtttttaaaaaagtgagatgaggtgaagagagttgactaaaagaatataataggtgaggggaaaaaaaatccaggtttacactggggatgggagggctgcttatttgtgaaaaatgtactggtatctgcgggaggaggcacagaaaagtagccagaggagacagaataaatgcctaagaaagataagaaaagtataatacaagagaacaaagatttgggtttgggggaattgaaattggagattggaagtttccttatggaggggcgtgggagtaccctgggctgggctattaaaaaggg

SEQ ID NO: 848920 - DNA, 567 bp, Homo sapiens
acaggtgggacgtgttatgaaaacccagctctttcccttgagttgggacatacttggaggtgtaatgtacatttcaaagctcctctgcatcatcaagctaaagctaggattttgcctaaaagtacactctcccttgacttctcttccctttctggctgccccactcattcattagcacttccataactcatcacttgcatatgaatccttgactcaaggtctgcttctcatgaatccaagtcaggaaccaccctgtattgaacaaacttagtacagagtttcctccagagaaagcactgtccttaaagattgcccctgtctccctcttgggagttgtatttgttctacccactaggatggttgattttatccatcaacttgactgggccacaggatgcccagatagccgtttaaacattatttctggaagaggttagcatttgagttggtgaactgagaaaggcagatagcatcatctaatccattgagggtctcaatagaacaaaaaggtagargcaagttgaattaattctgcctgactgcttgagctggaacatccattttctc

SEQ ID NO: 848921 - DNA, 549 bp, Homo sapiens
ccaacctcggacatgtgctgcccttgtttggatccttgtagccaaggataattgtttcaaaataacttatgtaatcctcttcattttttttttcttttaaagcccttgtcttcctttaycttcccaaatatgcctactgtattcttattgcatgcttactctgaaataaatatcatttaattttagagagtctctctctctctctctctgttgtttaaattctaacaacacaatatgcagttgtctttgtctgtcttctttcattgaactaaggtttccagggttcatcaatgtgtagcatgtgccagtagttcattcctttttatggctgaatattattccattatgtagctatggcccattttgtttagctagtcatcagctgatgatggacttctggctcttttctactttttggcaattatgaataaccctgccatgaccgttcaagtaaaagttttctgtgaacacgtttcaatccttgcatatacacctagaagtgaaattgctgggttatatggcaattccatctttaactttttttaggaa

SEQ ID NO: 848922 - DNA, 506 bp, Homo sapiens
gagaattctgttaatacatccagcaaactgaccttacaaacagaagcaatacagttattttcagacaaacacaaactgagaaattattaaaaaaataaattatcatcwacagttagaagactaaaaagtcttctaacatgaatttcagaagaatgattcaagaaggatgagctgacattcaaaaatgaacagtaagcaatgacaaacatgtagggtaattcccagaggacgatgatgatttaaaacaataaaaatgaccagtttttaagattttaaaaaaaacgtaatagaagtacgagcgaggaaacaaaaatatatactatgagaagggatggttggtgttaatgtgttctaagttccgcgtattgtccaggagaaggctcgagaacataaatcaactttagattccattaagtaaccagtaaggttactcaatatgtacagaaataaagggcacaacttccaaattagtagaggggacaaaatggaataaagatggaaaacag

SEQ ID NO: 848923 - DNA, 506 bp, Homo sapiens
gagaattctgttaatacatccagcaaactgaccttacaaacagaagcaatacagttattttcagacaaacacaaactgagaaattattaaaaaaataaattatcatcaacagttagaagactaaaaagtcttctaacatgaatttcagaagaatgattcaagaaggatgagctgacattcaaaaatgaacagtaagcaatgacaaacatgtagggtaattcccagaggacgatgatgatttaaaacaataaaaatgaccagtttttaagattttaaaaaaaacgtaatagaagtacgagcgaggaaacaaaaatatatactatgagaagggatggttggtgttaatgtgttctaagttccgcgtattgtccaggagaaggctcgagaacataaatcaactttagattccrttaagtaaccagtaaggttactcaatatgtacagaaataaagggcacaacttccaaattagtagaggggacaaaatggaataaagatggaaaacag

SEQ ID NO: 848924 - DNA, 548 bp, Homo sapiens
agaacgaagacacaacgtaccagaatctccgggacacatgtaaaggagtgtgtagagggaactttatagcactaaatgcccacaagtgaaaggaggaaagatctaaaactgacaccctaacatcaaaattaaaagaactggagaagcaacagcagacaaattcaaaagctagcagaagacgagaaataactaagatcagagcagaactgaaggagatagagacacgaaaaacccttcaaaaaaatcaatgaaccaatgaaaccaggagctggttttttgaaaagatcaacaaaatagatagacctctagccagactaataaagaagaaaagcaagaagaatcaaatagatgcaataaaaaatgataaagggatatcaccccccattccacagaaatacagactaccatcagagaacactataaacacctctaggygaataaactagaaaatctagaagaaatggataaattcctggacacatacaccctcccaaggccaaacctggaagaagttgaatccctgaatagaccaataacaagttctgaaa

SEQ ID NO: 848925 - DNA, 560 bp, Homo sapiens
tcccagctgatttcttctctttctctctcctttttaccccagtttaacactaatgacaatctatgtggtcttctagcttactttctcaacttaatttcttgagctcttaagcagaatgatctcattctgaagtgcttactgctgtgggtgtattagggacacctgagaaagcccaagccccattttgtgattaatttggttagttaaatcctcaaagaaatttgatgttaaatgctgtatgactgaacaacaaagatctatttacatgatgcttatctaactttgaacaaagaaatatcccaagtaataaaaactcaagggaccatgagttcaacattttattcaagtaatacattttataatattgcaagaagtgacttggaaaatttttgcataccaaagaacttctttttaccaaaggccaactgaataaactgtgtatgtccaatggtactgatctcataccatcaagaaaagtatttcacattaggaaatcgctccacatgtgggtaattaraaaattctgtgacaatcagtctcaaatatattctttatttgtg

SEQ ID NO: 848926 - DNA, 511 bp, Homo sapiens
ttggagacgtaaagaattttttgttgatgtggagaaagcccacacatttgatgtcagaagtgaagtgttgggagagtatagaaaaatattgatttttcctcttttaataacagatttccaaartgtgttcaccattttacgcacttaccagaaatgagagttccacttatgccacaactttaccaatactaggtattgtcaaactttttaattgtagtcattctggtggtggtataatggtaccgcattatggttttaatttacttttaattgactactaatgatgttgagacctttttcatgtgcttactggctatttctatatctttgtttgagaagtggctgtgcaagtcttttggccattattcatatttgattgtcttcttaatgagttgtaaaatttcttaatatattttgaattctcagaatgtatatgcaaatgttttctttcaatgtgtgggctgcttactgattttttaaaaaatatcttcaaagagcaaaagtttttatt

SEQ ID NO: 848927 - DNA, 631 bp, Homo sapiens
atcctatttgcattaaaaggcatacattagatacatgtttgcaaacatatgtctgtaagaaacagtgattatctctaggagatgaaaccggaggwtgagaataggaaagaaatcttttatttcctcctagacttttattacaccagatctttatgctgcaaatgacagaaaactgaagccgccctaagaaatgaatgaatttattggctcaatttcaatgaattctgtgagtagtttcaggttcctcttgaatcagagctgcccaatgtcactaggatgcttcttctgggtgttgagttcatcctttgcacatgtgaatgattctctctgggggtgtctgacagccttggttaccttgatggctccactcaagttagctatatggcgactattaccaagctttaccaccttgcaaagctcaaaggcaagaatgaatgcctctcttttccagaagtctttatttattggctctcaggcattcatcagttcttactggattatacgaccattcttgaatcaatcttcatcaatggtagtgattgatttgtggtcaatttcacctaaaccaaataacagaatggagtctggatggtttcccaaaagaaggtgggatgctatgcaacaaacaaca

SEQ ID NO: 848928 - DNA, 516 bp, Homo sapiens
cgtttattatcagaaatgtcctagccgctctgggctagacactggtataaatatgagtaaaacatcgttgctgcccttgagacagaaaagcaaacagacaattacaacaaatgttatacgtgtcagaaggatagcacagggtgctgtgagagcccatggggagagcaaactaacacaggaacagaaaaccaaacaccgcatgttctcactgtgggagttgaacaatgagaacacatggatacagggaggggaacatcacacactggggatgttggtgggtggtgggggtggaggacaaggggagggagagcattaggacaaatacctaatgcatgcagggcttaaaacctagatgacaggttgatagatgcagcaaaccaccatggcacgtgtatacctgygtaacaaacctgcaaattctgcacatgtatcccagaacttaaagtaaaaaaaaaaaaaaaaatacacatacacaaaaattaacattgggcttgagtgcctacaagacagagatat

SEQ ID NO: 848929 - DNA, 600 bp, Homo sapiens
cctcaaaatgattttcatatatttgttgtatctttcatatcattcttttttttccccttatcgttcttgagatacttttttttttttacttggcttctaggactctgaaatcttcctattgtcytatcaagtcattggctggatcttcccaaagtcctcatcattttctgatctataaatattggcaggtctagagatcctttcccagaactcatccttctctacacatttatctctaggtgacatcacgtagccttctgactgtaaatgccagatacatactgataactctgaaatgtatacttccacagccccaacctccaatcttactatagattcacatcccattgtattgacatgacatctccttaaagttaacttgtgcagagttgaactccagattccctccattccaaactcgtgtgtttcctaaggacttcacaatagctcaggcaaaaagctttggaaacagccttgtctttcttgtctctcaaatccacatccaattaacagattatgctgagtttagccttcaaaatataacctgaatttcattccttctcgcccccttcaccataccttagtgtacgccacccttct

SEQ ID NO: 848930 - DNA, 607 bp, Homo sapiens
caaaatttcgatgtgaaaactactgtttgcacttcaaatagtgaaactggttaaaaagaaaagttaaatgaccagtctcagcawcatgaaatacccaccaatgccccattctgttttctgtcttcaaccaggactgcagatgctctgactattgtatgcatattgcagccacaggtggcagcccaaatctgtacattttgctgcattctgtattatttgctcagtaattgaaggagaattgcattcttcttctttcctttgttgtctttacagacaaagtatctaattgttagggaaagcaatgaaatgccaataaatatattggcataaccttgcaggtcattataaaggattttttgttgttatttctgagaaagaagctgcatagttcaggagccagttagaccaacccgtgtttgcttggcacctgggtcctagtgaaacaattcaactgacttgtaaacaggcatgatgccatccagccatatgggtgcacatagatgctgccaagtgaccatgtagaaaaatcggaagcgtttgttgagggcagcagtcccagtatgagacatccaaacagctgtctaccctgagattcatacgcctgtgg

SEQ ID NO: 848931 - DNA, 498 bp, Homo sapiens
tttcttatagtcagatttcaccatgactgtcattttgcttatgatgttttacatattcactagtacattgtatttattatattatggtaaactgattctagttgagctgctcrtgggatagagacttgtgcatctaatctagcaaggagtgaggaattctcaaatgagctctgcacagcatacagacactaataccaagaaatacaaacaaacagaaaaagacgcattttcctgaatcaaataaagtgtcagtgtgcaaaacagaaaaatagaatcgatagaataagattaaaaacagaacctatcaacagagataatgaaagcagaatctgactaaaatgccaaatgtgaaaatgtcctatctttagaacttttgtcagctctgcctattcaaaaataaaagcttggaacaatgtatgatacatgcatatatagcataataggttaacatataaatacacatacctacattatatatatattccatcctggctatta

SEQ ID NO: 848932 - DNA, 641 bp, Homo sapiens; identical to SEQ ID NO: 844692

SEQ ID NO: 848933 - DNA, 641 bp, Homo sapiens; identical to SEQ ID NO: 844693

SEQ ID NO: 848934 - DNA, 499 bp, Homo sapiens
gtttctaagctggaagacaagatagcaacttttgatggaaatatgtctggcctgtgtgatgcagtgatttaattaattatgttcaaagtactaaactaccatcagctgtaataattacaggaactgaggctccatgaagaacattgaagtaatggaaatccaataaaaagtaacactgagttggcttagataaggggaaaaagggagatatcaaagaggaggctggacttcttgtctgtgtagttgactcattataaacttcaagaaaaatctgctgggccccaacaccatctttcatcgtgaagtgaaaatggttgtataggaaagattatcactgtggcttctagagactatgatctgtttctgctgttactgagtttataaaaagaaaaaaaatgcttttcccaaagtgatcatttatggggcctcygcattgggatgattctgttagttcttgaagcacttgaatctaaaatgtcctaccaggataagtgtcact

SEQ ID NO: 848935 - DNA, 613 bp, Homo sapiens
acaaaaacttggattttatttccaactcttgcaccatcttgagtagagggtcacctaaggccagagtcgtagcccctaaggtaagctaggacatggtttctgttttgtttttgttggcaatattttccctggtgaacatttacatccataaatttaaatttctaattatgtaagtggggtcacttcagttctttatcaggagtatttccaagcatttcagctggaatgtgattgcagaacacttgctcgttgggagaagtgagtgtgtgggagaacctctccaacctctcagccaggctgcaggactggtatgtagtgtgccaggtgctggtgaaaaccgtgctttattttcctacatagatttccaaatctgaagtctgtccgagaactcattttgaaacgtggacaagccaaggtcaagaataagaccatccctctgacagacaatacagtgattgaggagcacctgggtgagtgctacagcttagggrtcagctggggcagaaagccagggtctttgaagctttgatgtgagattcaggttgtattcttcttggggccccaagagtctgccagagtggccagcttagtatatgctggatacatgttaaat

SEQ ID NO: 848936 - DNA, 456 bp, Homo sapiens
ccagctacttgggaggctgaggcaggagaatctcttgaacccgggaggcggaggttgtggtgagccaagatcgtgccattgcactctagcytgggcaacaagagcgaaactccgtctcaaaaaaaaaaaaaaaaaaaaaagaaagaaagaaggaaagtctcaaagagatatctgtgttcataatggatatcattatgaactcctggcctcaagcagtcctccctcctcggcctcccaaagtgctgggattacaggcatcatcaagtaaactctttaaatgatatttggtgcttcagcctcttcctttgaggtcaataccactttagctatcattaagtcatgttcgtgatagctaaaatgtggaagcagcccagtgtccacccacagattaatggataagcagaatgtgctctatacatacaatgagatattattcagctttaaaaaggaagaaaa

SEQ ID NO: 848937 - DNA, 593 bp, Homo sapiens
aatggtaaactattggcaataatgtaagtggccatcaacaggggaatggctaaataaattgtagtatgtccataacttaaaatatagcyatacagccttttctcttttctccttacatttcctgtgacaggcatttttaaaaaatgtatgtatttattattattattattatttttagacacaagttcccactctgttgcccatgctggagtgcagtggtgtggtcatggctcactgcaacctcaaacccctaggctcaagcaatcctcccgtcttagcctcgtgagtagctgggactgtaggcatgcacaaccatacctggtaaattttttttattttttgtaaagatagggtctctctatgttgaccaggctggtctcaaactcctggcgtcaatcctccagccccagcctcccaaggcactgagccactgtacctggctgccatgcagccttaaaaagaatgtagtctatttattgatttgaaatcatctctgaaaaatattgtttattaataaaaggaagttttattaacagtacttgtaattttttttaaatccaaaacatatttctgcatgtaaatgtgtaggtata

SEQ ID NO: 848938 - DNA, 613 bp, Homo sapiens
gttgcccaggctggagtgtagtggtacaaccacagctcactgcagcctcgaactcctgggctcaagctgtcctcccacctcagcctcctgagtagctgggactacaggcatgtactaccacatctggctagttttcaaatttttttgtagagatggggcctcgctttgttgcccaggctggtctcgaattcctgggctcaagtgattctcccaccacagcctcccaaattgctgggattacaggcctacgccactgctccggcccatggcttcttttcttgctaaaaagacagagccgaagatgccccagatatttgttatctggccctttacagaaaatatttgctgactcctgccctaattcatccattagcgtctttcagtggagtgagtgaaacatcttcctaactgatgtctatgcctccagtcttgttctcctcccatctattttcctcactctggcctttgtaaagggaaaatctggttatggcacttggcygcttgctccgctgcctccttctgctctcttgatggattctaaacaccttctcatggtctgcaggattcttccactcagcccccgccctcctttcgccactgtgccacgttcagc

SEQ ID NO: 848939 - DNA, 554 bp, Homo sapiens
gcagacctgcagaagaggggcctgactgttagaagaaaagctaacaaacagaaggcaataacatcaacaccaacaaaaaggacccccgcacaaaaaccwcatccaaggggagggagagcattaggacaaatacttaatgcatgcggaacctaaagccgagatgatgggttgataggtgcagcaaactaccatggcatatgtatacctatgtaacaaatctgcacattttgcacatgtatgccagaacttaaagtaaaataaaaaagaaaaacaaaaaagaacagtgcccagtacatcacattacaagaaatgttaagagacatccttcttatagaaggaaaataaaaacaggtggaaattttgatctaaacaaaggaattaagagcaccagaaatggtaataatgttaaatatgtaagattattttcttctaattaatggttgtactcatgcatgtatgtttctgcacttgtgtttgtttgtttttttcaaagtgaaagcaagtttattaacaaagtaaaggaataaaagaatggctactccatagacagcgca

SEQ ID NO: 848940 - DNA, 575 bp, Homo sapiens
gtggtggccacaggggtgtttgtgtcactccagccccagtttcacatggctcagaacagagagagagagagagagactgttttaaagaaagtaagtgaagagaatgaaagtctctgcctggtaattcaaagatttatcttggatcttgtccaagtccatcaggatgatacctccataagtctacagtgttattggactttgagtgtcccctaaagcagttacatcttaggtcacagtacccaagtcctcttgaatatctggaaagctttcccaagaagaaatagttcaaacaagcccagactgtgaggatgataataaataattaactctacaatgccaggcacaaataaacatatacaggtatcaatacaacccaagaaagcaggacctcaccgaatgaactaaataagtcaccagggaacaaataaatatatttgatcttttaaacagagagttcaaaatatctattttgaagaaactccaattcaaaataacacagaaaaaaattcagaattttatmagataaatttaacaaagacattaaaataattaaaaataatcgagcagaagttttg

SEQ ID NO: 848941 - DNA, 505 bp, Homo sapiens
tcaccttgcaattctcacagaaactaagcccaactgaggtacctgtcagggtccacacatttgtgctccccgcagagaaagagctgaccttctgccctgccccctgtggcctgcacaactacagtgctatgccatcttataactagaactactgttagagtttgtcctgttttgggagtgagtgaccacgacatacttctttctttgaggcttagcaaccactgaaccacacacgcccagtggcctgctatcaccaagctgagctgctgctataccttaccctatggggtcaactgtccatggagctaaatttacccatcccagtcatttttgtgccttccgccttcagagcctgagctgaagatgcacgttatctattgagaaaatgataccttgggggagscaacccatctaacccacgaagacattgctgtgccctgtccctcaaaccttgagcttaagttgtgcactggccttcagggaaactgctttgctggagtcactc

SEQ ID NO: 848942 - DNA, 505 bp, Homo sapiens
tcaccttgcaattctcacagaaactaagcccaactgaggtacctgtcagggtccacacatttgtgctccccgcagagaaagagctgaccttctgccctgccccctgtggcctgcacaactacagtgctatgccatcttataactagaactactgttagagtttgtcctgttttgggagtgagtgaccacgacatacttctttctttgaggcttagcaaccactgaaccacacacgcccagtggcctgctatcaccaagctgagctgctgctataccttaccctatggggtcaactgtccatggagctaaatttacccatcccagtcatttttgtgccttccgccttcagagcctgagctgaagatgcacgttatctattgagaaaatgataccttgggggaggcaacccatctaacccacraagacattgctgtgccctgtccctcaaaccttgagcttaagttgtgcactggccttcagggaaactgctttgctggagtcactc

SEQ ID NO: 848943 - DNA, 456 bp, Homo sapiens
attttacaaaaattttctcccaatattgagattgcttatttatattcttaatggagcctcttaatttttaaattctgtgagtacattgtaggtgtacatattatggggtacatgtactattttgatacaggcatgcaatgtgaaataaacacatcatgaagaatggggtatccatcctattgagcatgtatctattaagtttaaacattccaattactctctttattttaaaatacatagttattattaactatagtcactccattgtgctatcaatagtaggttgtcttcattctttctaactttttgtacccattagccattcacacctcctgcccagccccctactattcttcctagcttctggtagccattctcctactttctatgtccatkagtttaattgtttttatttgtagattcaaaaaataagtaagaaagtgtgatgtttgcctt

SEQ ID NO: 848944 - DNA, 538 bp, Homo sapiens
gccattaaattttttgtatagatggggacttgctatgttgcctgggctggtctcgaacttctggcctcaagcgatcttcctgcttcagcctctaaaagtgctgggattacaggcatgagccgctgcacctggcagagcatctcactgacggtcgtgtatgccatctccacctcctccctttttccttccggagtcgtgcctggaatcctgtctttatccttccactgggcctggatgtagaagatgttggctgcagggatttggggtaacttttcttcaatttttttttttttttactttcagtattctttgaagtaaaatacatactaaacatgtacatttttataataaattggcattaatgtcttttaaataaggatctgaagctgccacaggtgtccttgttggaagcaggtcaccgtatgctggcccgtcagagagacccatgggggatctggggccarggccacccaggctggagaagacgcagcccctggtgccttctacaggctccttgcatgctggggaggcggatccc

SEQ ID NO: 848945 - DNA, 517 bp, Homo sapiens
cggattaggcaggaatctgggcttggtatcatcagatgatgtcttgtttaaaccaacaaatgcttattgctctctttgaagataagaaggtccagaattttctccatgcttcaaattaggcraacgtgattccagattcagataagatgcacattcattcaatcaccaggaaagtcctttttgaaatgaactatgccccaatgcaaaaacaggaggatatgaaagaatcatcaaactgggttttctaaggtcagagaaaaactaaggtgcaaaggggctgtgggagctttttagatcggcccagttcaccctccaggtagagccctaataccacgacacagaaacctgcccttcccactaaattctagaatagttaacagctggttaggatgcctaccatttactttcacatacttgatcggggcaatttaatacagctgtgtgcttctggaattagtttaaattacattccagggtctgacaaccatcctaaatgggaatataaactcaagggatg

SEQ ID NO: 848946 - DNA, 584 bp, Homo sapiens
cacacatatgagttagcatcagtatgtttctacctataaatcaagttaatataaagttagaaaccacttgaaggtggtcactttagctctttcgagatttgcagaaatgtattttttcaagaataacaaaaagcacaagtataaagcaaaaatactgataacctagataacattaaaattaacaattttatttaacaaaagacatcattaggagaataaacagacaagtcatggaataagaagatatctgcgatatgtaaaaccaacaaagggtttatatccagcacgtactaagaaaaagaaaaaaggaaaaacaaaacactagaaatcagtaagaaaaacccaagataacagaaaaatgacaagagactttaacagccatctcacaaagtggtggactatgtcactgttccagagtatttgtaccctctccttttcctgaacaagaattattcatccccatccatggccatgtgacttgcaatgcctccagtgggargagtataactccctccccccattgacaacacagttttgtaatatcctttggcaaatggaacatgaatggacatgacctatactta

SEQ ID NO: 848947 - DNA, 569 bp, Homo sapiens
ctccaaactgctctccacagtggctaatttaccttcccaccaacagtgtataagtgttcccttttctctgaagcctcamcagcgtctgttattttttgactttttaatagccattctgactcgtgtgagatggaatctcattgtggttttgatttgcattcctctgatgattagtgatgttgagcattttttcaagtgtttgttggatacttctatgtcttttaagaagtgtctgttcatgcccttcacccactttttaatggggttttttgcttgttgaatttttaaatttcctaatagatactagatattacatatttgtcagatggatagtttgcaaatattttccctcattctgtaagttgtctgttcactcttgatagtttcttttgctgtgcagaagctcttttaattaggttcccacttgtcaatttttgtttttgttgcaattgcttttcagcttgatatccaaaagggtgtttcctaggttttcttctagaattttctttgctttaggtcttacatttaagcttttaatccatctggagttaatttttgtatacggtaat

SEQ ID NO: 848948 - DNA, 441 bp, Homo sapiens
cttttaagaagtgtctgttcatgcccttcacccactttttaatggggttttttgcttgttgaatttttaaatttcctaatagatactagatattacatatttgtcagatggatagtttgcaaatattttccctcattctgtaagttgtctgttcactcttgatagtttcttttgctgtgcagaagctcttttaattaggttcccacttgtcaatttttgtttttgttgcaattgcttttcagcttgatatccaaaagggtgtttcctaggttttcttctagaattttctttgctttaggtcttacatttaagcttttaatccatctggagttaatttttgtatayggtaatatatagggatccagtatcattctactgcatatggatcaacagttatcctagcaccatctattgaatagggaaccctttcccctgtttatt

SEQ ID NO: 848949 - DNA, 441 bp, Homo sapiens
cttttaagaagtgtctgttcatgcccttcacccactttttaatggggttttttgcttgttgaatttttaaatttcctaatagatactagatattacatatttgtcagatggatagtttgcaaatattttccctcattctgtaagttgtctgttcactcttgatagtttcttttgctgtgcagaagctcttttaattaggttcccacttgtcaatttttgtttttgttgcaattgcttttcagcttgatatccaaaagggtgtttcctaggttttcttctagaattttctttgctttaggtcttacatttaagcttttaatccatctggagttaatttttgtatacggtaatatatarggatccagtatcattctactgcatatggatcaacagttatcctagcaccatctattgaatagggaaccctttcccctgtttatt

SEQ ID NO: 848950 - DNA, 644 bp, Homo sapiens
aggccaaaagaaaaaagaagtgaatagtgaaactgtgtcaaatactagtgataggcaaagtagagaaactttcacacaatatataaagtgcattkttctctctctgatgaatcactttttcaggatgtagacattattttgcagtgactaaggatttactaataacattaatgagaaaggatatgaacattctgatattttatattcagaaatcaaaattcttaacatatttttaaaatgtcctcctctcataatacagaacattaattgcaccaagagtatataatcaattattagaataagtgaattcttaaatttgatagctgagttttggcaaactttaatttgccccagtatttttttttttgcaccaaatatttctatcatttgttattaaaatggtaatgacaaaagacctttgtcactgccaaatcagataagtaagttaggggctggtaacaaatacaaaacacaaaaatttggtcaaagaacccaaaacagacattttatcaatattagaaagatgcattgaatcattcccttggctttttaaattaaaaataataaaaaagcttttactttaaaataatgaactatttttcagaagggtttggacaatcatttggttgtcttaattttataat

SEQ ID NO: 848951 - DNA, 514 bp, Homo sapiens
tctacatgtggcttgccaatttttccagtaccagttattgaatagggtatcccttcctcaatttatgtttttgtatgcttcgtcaacgatcaggtaggtgtaagtatttcgttttatttctgtgctctctattctgttgcattggtctatgtgcctgtttttatactggtctcatgctattttggtagctatagccttatagtacagtcaaagtggggtaatgtgatgccttcagatttgttctttttgcttagtattgctttggctgcacaggctcactttggcttccatataaattataggagttttttctcattctgtgaagaatgatgatgatatttttatgggaattgcattgaatctgtagaatgctttaggcagtgtartcattttcacaatattgattctacccatccatgatcatggaatgtgtttccatttgtgtcatctattatttctttcagcagtgttttgtagtcttccttataaagatctttcacctccttggttaagt

SEQ ID NO: 848952 - DNA, 575 bp, Homo sapiens
atacttcccgggtcattctttcacccacgggaaaacaggtttggagagatctgggacagtgctctggtcccaggcaggaagggctgagtggggcctgggactcargtctgactgcaaacacctgcctcctccctgtgctgccagcgccttccgggttcttccctgtccctcctttgtggtctttgttttcccttttttgtcttaatatgtttcaacggatgtatacaataaaccgcacataaaaggtacagctggatacatcttgacccagtcaagatgatgaacacagctgccaccccaggagtctgtcctgccccacgggttatgctgtcttagttggtctcatgtcagggagccttggaggaccagggactgggcagttggtctctatactcctggggttctggcactggctctggcccatgaccgcacccaagacaaacgtcttgaagactaagaggttaggtctttgagaaacctggcaaatgagtgcccattctcaggttacccacattctgcatgttgatttagtcatccaaccaatgttggttgaacactgatgagaacaagcaggc

SEQ ID NO: 848953 - DNA, 409 bp, Homo sapiens
taaatatgcacatttaacgaatttaacacttaacacaaaagtactgcattctcgttatttggagaaaaagttgccaaataattacaaagggtccccccacccccgcagccctccagccctgccctgcccggcccyactgagcagctggctctgcctctgtggagcagtcaccccctgccaacgtggcctcagtgctttgggccctttttgcccatctgcttggtccttgtgcccctgtgcccagcacccaacctgccatcaccctgcactcagagacctaaaaaggcagcgtgtttgttgcttctcctctttgggtttccctttcttctcctgggaggggtgtctgagtcacagaagtgtggggaccatcaggtcgttgctccctctgcttctcttgtgtcctccctcc

SEQ ID NO: 848954 - DNA, 643 bp, Homo sapiens
atcagcagagaggctctctcctgatgagacccgtcaaccttggatttctcagcctctataactaagaaataaattctttttcttcaaaaattatccagtttcagttatcttgttataagcaacagaaaatggactgagaccatatacatagcctggataagcagaatcagagtcatgatttcatagcatttttgttttttactcctttaatgctagaactagaggaacatgcaagatttaggttagatacaaagaagtttctaaacatgggacttgaagttccttttctgcaggcctaaccaaattagattattttgtatgaattatttagggctctcctaatccaatgtctgagtccacatctctccgttgaagtgatcagatacttggaagcacatgttgaccacgcaacacaaatgtcaacagacattgattgagctcccacatttcagtttgggtcctgaaattcaaggatgagaaaaacacattgtctgccctcaaggaacgaaagtcccttctccatctccttccaaaagttggytggtaaccttatttgtgacctctgtttccataaaacatttgagagtatggttggtgaagaactgaagttttagttggatccctgaataggcattaagctgtg

SEQ ID NO: 848955 - DNA, 551 bp, Homo sapiens
gaaacttgaatttgcaggcagactcatgaaacaaaartaaacctggtacctattgtgaaatcatctttggtgcagtgtggctcaggaatgtgccactcctgatactttttttcatctgcacgtgagtgtctggactctggattcagaaaaacagatggaactttaggtcagatgggttcctgagtcaccccgacacagggggcaggctgtattttaaaaatttgttgagtatttatttgtacaaagcattctgtaaggcactaaaccgtagtttctgctctagtcttctttcaatgacgggttctgggaggggtgatggaagcagaagtgatagttatttatgtcacagactttgagagcaaaaacgtacttcagaggaatgcttctcaaagatttctcaaatgcaggttcatggactagtgataattatgaaattaacaatttggacaaaatgagagacaaagaaacaaggtgagctttgtataaagctaaatgtgttcagttgaaaaaattttttttctttagaacatgtgtcctacttttcttatttt

SEQ ID NO: 848956 - DNA, 587 bp, Homo sapiens
atacatgtgcaggacgtgcaggcttgttacataggtaaacgtgtgtcatggtggtttgctgcacctatcaaccgatcacctaggtattaagccccacatgcattagttatttatcctgatgktctccctccctgtggccccattcctagttttagtaatatgagtattctctctctcttttggtcagtctagatataagtttgtcaattttgaattttcactcttgtttttattaatatattctctacttcatttattttcattctaatctttattatttccttccattttgctttgggtttagtttgctctccttttttctggtttctgaaaatggaagtttaggttagtgattagagctatttcttcttttaaaatataggtatttatatagctattaatctctctctaagcacttcttcagctgcatccataagtttggcatgtttaatctttattttcatttatttcaaactataattttccttgtggtatcccttttgacttactggttattaagagtatgttgtttaatttttacctatttgtgaatttttcaaatttacttctaattaatttctaatgtc

SEQ ID NO: 848957 - DNA, 597 bp, Homo sapiens
cctttttctcagcccacatctaatctgttacaagtcacactgattctacctccagaatgtaccaccatgccttttgattcttctgtctctcttctgtttcaagctaatatkctctgtcacttgaaccatgcaataaactcccatcacttgtactttgtaatcctgccccttgcaatgtgttcttcctattgggcttagaagacacagcaaactccttaacaaggctacagaatcctacctaatctggcccctgccttcttctccatcttcagtttgttctgccctcccaccccaacctcacttattatggtccagccactcgggcatttgttccggtccacaaacacaccaaactctgtcctaccaccaggctggtacatttgccagtccctccacctggaacacccctccggatctcagatctcagcttgaatgttcaagtcatcagagagacctttcccactttaaatgtcctcccctggtccctctttgtcacattgtcctgtctacctcttcctaggcagcatcatagtctgagattatcttgcatccttgtttattgggatgaaggcttgagtgagagtagggacttgcctg

SEQ ID NO: 848958 - DNA, 558 bp, Homo sapiens
agaatgggtaaagaaagtttttgtgggataataaatttttgaattttgggccatgagaatatattaccttcttgaaagtaaagaaaaaatgaaatagataaatcaatggaaatacataaaaagttacatagataaatcaatgaaaaaaagagaaatctgggatctatcccttttctatcactaagtcttatgaccatagacaagcctatacatttttggtgaaccttggcatgttttgctgtaaatgatgaagttgatctctaagatctagtaagctgtcgaagacctcgtgttggttttcttgagggctgaattgggaagtgaacatggattctctcttcatgatcaatgcacacaactgtacatattgcggactatcaaactctggggcaccatttatataacttgctatgtgatagacactccttggagttgtgcaatgcacagcttgaacttctgtatggggcrgacctgcctctctctttgcctttggattttttcacaaaggactttgtgaccataggagacttttagtggtggaaaccgatggttacttca

SEQ ID NO: 848959 - DNA, 532 bp, Homo sapiens
taatggaatcttccatttggatccaggaactaatcaatgagaaaagatgactcttatcctaatttctgccaaaagaaragcaagtccatctttgacaatgatctctacactcacatgctcctttcttctgtagggatactccccaaactttacatttagaacatggtaaaaagcctctgaaacagcatgagtgagaatggtaatcccagggactaataacaacaattgccatttattgaatattgttcattcagaaaggcacggtgtgaaatactttttgtttttcacctaacgttatttatagtctaatggaagaaatagaaaagcacataagcagttactatccaggagtactatgaaaatgagcatccaggaggaacatgtaaaccaatctcagagttgtgaaacaattccccaaaaagaagacattagagtaagtcctgaaaattgggtaaaataaaatataaaataacatcataaccttcccaattaccaggaggcatttgtttattcgttatttgattattattta

SEQ ID NO: 848960 - DNA, 639 bp, Homo sapiens
ccagtgattcttcactggttggaggtgggatccatttgagagtcactttgggggacttcttccaagggtctacaccctcccctggagatttttatattgctgactactccccctctccatccatgtttgactctaaactttagagttcaaaggaataggtcccatttagatgtataaagtaattcatccttgttatctgtctatgggtaaagagtgaatatttttagaaaagaaaatgggggccggacaccgtgactcaacatctgtaattccagcacattgggaggctgaggcgggcagatcacttgaggtcaggagtttgagaccagcctgcccaacatggtgaaaccccatctctactaaaaatgcgaaaattaactgggtgtggtggtgtgtgcctgtaatcccagcaactcgggagtctgaggcaggagaatcactagaacccgggaggcagaggttgcagtgagctgagattgcgccactgcactccagcctgggcaacagagcgagactcagtctgaaaaaaagaaaagaaaaaaraaaacggggtgctcatttcaagcaagtatgattctctctgggtgacttctgcagtagctagatgttaaggggacccgagagataaggcagaaagat

SEQ ID NO: 848961 - DNA, 560 bp, Homo sapiens
ttaaataaacactggtcttgctctgagtcttaaagaaccatgttgatgtttactgtagatgtttactttaattgggctgcacaggagttttattcagagcatcatccagaaagcttctaaacatcttcacacagttctccttgtccctgtagtttcccaggtgttaaaaatctccttttctgtccctttgcacagggttctcaccccatcctgatgctcttctgaatcacctcctccttcatgcttctcctaaacagagactcattctgcagggattctggtgaatacaattctccattgagctacacatccttagaacaaatgtttaatgagcacctactgtaggctctgccatgaataatctttcacatttggttaggcttttttctgtctacagaattactttcatgtccattatttagaataggggtcatcaaatcttttctatagagggccagatatttttrcaggccatgtctctgtcacaacttctctgctctgcccttgtggtacaaaagcagccatacacgatgtataaaggaatggagatggctgtgtgc

SEQ ID NO: 848962 - DNA, 569 bp, Homo sapiens
ttttgtatttttagtagagtcagggtttcaccatgttagccaggatggtctcgatctcctgacctcgtgatccacccaccttggcctcccaaagagctgggattacaggcgtgagccaccacaagcccggccttgcacacttttttacagtgtacattattactttgtgagccagtaaataataaaacttcgaaagtgaatgcatcttgaggatgcttacaatttattttttttttccaggataagatggttggattggtcactggctggaacaggagaaatacatttcacttcagataaagtagagaatacagtttttagccaggcaaaaccctgatctgtttaagactaagtttcacagaatgacagaggaagttgtgaaaagccttggtctctgggcaggcctcatttttagccatgttgcatggtccacccstaagtgaactactttagagtcccctctttcctgagagagcaaaagaggagagaagtctcctttggagaagcaaagactccttctccaacttgcagcttttttacccctgtgttctgcaatgatggtaatatga

SEQ ID NO: 848963 - DNA, 583 bp, Homo sapiens
ccgcccaccttggcatcccaaagtgctaggattacaagcatgaggcaccgcgcccggcctggagttttattattactcaaatcagtctcccggmgcattgggggagcagagtttttaaagataacttggtgggtagggggaagccagtgagccaggagtgctgctgattggtcagagatgaaatcatgggagttggagctgtcttcttgggctgagtcagttcttgggtctgggggccacaagatcagatgagccagtttattgatctgagtggtgccagctgatccatcaagtgcaggttctgcaaaatatctcaagcaccggccgggcacgggggctcacgcctgtaatcccagcactttggaaggctgaggcaggtggatcacctgaggtcgggagtttgagaccagcctgaccaacatagagaaaccccatctctactaaaaatacagaattagccgggtgtggtggtgcatgcctgtaatcccagctactcaggaggctgaggcaggagaaacgcttgaacccgggagttggaggttgtggtgagccgagaacgcaccattgcactccggcctgggca

SEQ ID NO: 848964 - DNA, 583 bp, Homo sapiens
ctgtgtaagatgaagttgctctggttcacatgcctctgacatctgcacagtgccatctaatttcccatattatataactataggatatgtagggctgttgctggtatttaatgaggcataaggcttatttcagatatttataagttaatattcttttattttctttttttatattatagtcacttaaatagattagtcatcattgaaattacatatactaatgttaaatgtctaaaatagactttcttgacctaaatcaagttctatttctgcatctagccagtttagttttgttatcaccctcttagctcctgctttttgattgttctgtaactgacaaaactttgagatttctcataattcttaaaccagtttctttcggattctatagattttaaatttctaactttcccttcagcagtttctaacttactctattttatttaattcattgggccaaaagtaactgatgtgmtctccagtaaagatgtcaaacttaattatatgaccatcatcctgccttagcattgtaacctcttttaatgcctctgacgacaccagtgttttactcaagatagagtca

SEQ ID NO: 848965 - DNA, 571 bp, Homo sapiens
tctgaaagcagagcagaacagctggaaaaactgagctgatgaaaaggattatccgaatccaagcttggcgttccttgctctgtgtccagattaagaaaatgctagtggtttgcctaggaacacatttgcaccaactcctggcttattttccatgtgacccaacagctggtactagagacaccagctgctttctggtgggggcagaatgaaaacagcatgggctgaggccaaggcccagcaaggtcttcaagggcatcctatcctgcggccgccagaggggtatgtgcggagatcacaggcaatgaggttgtaatgagctgttaagctccctgccgtccctttaatgggtgattacagtaaaaagagccacataaagtacgttttcatctctcacttcagcccccgagagcctctgaggtcttgtttatccaattatcasacttgctgtggaggacggtgcttgctgagaacaagcatatcagttggaacatgatttctctgatggataattagctgttttcaggactcctcctattcagctgaatgttctcagaccagaagtctgatctgg

SEQ ID NO: 848966 - DNA, 596 bp, Homo sapiens
tccatttgagtgagcaccaagtatgcatcacgacttgagattataaagttggcttaatgatgagacaggtttctcagtcgggttttccattggctcgaagttcacaaggcagttgttgcttgtctcagagtgtccttaggtggactacatctgaacccttggcgttattataatgcagattctagctgtgctcaaaccaatgaatcagaatctcaggagggtggcgctcagaaatctgcatggttgatcagttctttagcagattcttatttttgtatgctaaagtttgagggtcaccactggagagattccagaacagggcctgcaagggaattgttcaaagtttgctcaagttaactttgttgttacagcattagcttgaatatcaggaggttttgtatttaagttctctaaaaaaagaaaaagaaaaaaagagaacagtctcaatatataaaaggaaaggttttcatatatgtgcccaattataagtatcttgagtattctaggagtctaaacagaatgyctttagatcatccttataacgatcctgagactcttttgactgttttgagttgaagacaggtaataagaaagaa

SEQ ID NO: 848967 - DNA, 429 bp, Homo sapiens; identical to SEQ ID NO: 846834

SEQ ID NO: 848968 - DNA, 639 bp, Homo sapiens
actccacccttttgtggtcatggwtcactcaaagtcaagactgccacactggtatttgcatgcaagtattcccacaacgacttttgctcagcagttcatctttttaaaatgttattctgttgatttttcttaaaacaaacaaaagaaaaggcacaccacagaaatttgaaatccaaatgtatttgctttcaagttccattccaggtaacaaatatttgaccaatgaactgatgtctttagtttggcaattgggcaagcaaactctgcctctttccatagttgagtgcagcactgaggtgagtaccaattgttcctttactgacttgtagaataggataaagttgttaagtccccaaaaaagtattaacattttatcctcattgccaatcaacaaatcacccaaatttcccgctttccaccaccccaaaacccaagtaaaaggggaataaattagcccttgtggaactcaaacttacaagaatcagaggcaatcattggcaaactaaattcttggttttccaccttccttttcaacatttcccctgtatgcctaagaatgcaagagtgtagatttttaaagcaagctcactagcaagtcagctaatgtcaggattaaagataaaaataagttggaatttt

SEQ ID NO: 848969 - DNA, 631 bp, Homo sapiens
tctcttacaaaaaattagccagtcatggtggcatacgcctgcagtcctagctacccaggaggctgaggttgggggatcactgagcctgggaagttgaggctgcagtgagccatgactgtgccactatactccagtctgggtgacagagaaagatcctgtcttaaataaataaataaatagttgtatcgcatatatggaggaaagaaatgataaagaagaaaaattacaaggttactaatgatttcttttcagctaagcttttggtaatgctcatcttttaatgttctttgggcaaacacaaatcaaacaatttttacaactgttattaatatgcctaaagcagtatagcaaaacatttttcataaaaaaagagcattataaaatccttaaatatttaggatagttatacacttcaacttctctatttaaggggtggagaagatggagattgatggaacatgcctattttctgagaagtcttaaagaatttttacagcttagaaagcttaattatcagggtaacctatgacaggtttatactgttaaaacctctatactaacactmtaagtaagtctttattgaaaagttctttattttgattcttaagactataaaagtagagagaaactg

SEQ ID NO: 848970 - DNA, 631 bp, Homo sapiens
tctcttacaaaaaattagccagtcatggtggcatacgcctgcagtcctagctacccaggaggctgaggttgggggatcactgagcctgggaagttgaggctgcagtgagccatgactgtgccactatactccagtctgggtgacagagaaagatcctgtcttaaataaataaataaatagttgtatcgcatatatggaggaaagaaatgataaagaagaaaaattacaaggttactaatgatttcttttcagctaagcttttggtaatgctcatcttttaatgttctttgggcaaacacaaatcaaacaatttttacaactgttattaatatgcctaaagcagtatagcaaaacatttttcataaaaaaagagcattataaaatccttaaatatttaggatagttatacacttcaacttctctatttaaggggtggagaagatggagattgatggaacatgcctattttctgagaagtcttaaagaatttttacagcttagaaagcttaattatcagggtaacctatgacaggtttatactgttaaaacctctatactaacactatawgtaagtctttattgaaaagttctttattttgattcttaagactataaaagtagagagaaactg

SEQ ID NO: 848971 - DNA, 299 bp, Homo sapiens
acacaaatatatatataatggaatattattcagccttaacaaagaaggaaatcctactgtttgtggcaacatggatgaaactaatggacattgtgctaagtgaaataagtgagaagcaaaaagaaaaatactgtatgattttacttaaatgtggaacctatgcagtgagccgagatcrtgccactgcactccagcctgggtgacagactgagactctgtctcaaaaaaaaaaaaaaaaaaaatgtggaacctaaaaatgtaaaactcatagaaacagtaggggccaggagcggtggctc

SEQ ID NO: 848972 - DNA, 522 bp, Homo sapiens
agtagcttcttacataattagtcatcacttatttacacatatggaattttgtatgatattgttgcttttaataagctgtttttaattcagtaaccaaaaaggtctaaaggtagccttaattgktatgtctaagtggtatgatcattatttgcttaaataaaaatttaatgaataaatgaatataatttaatctttgtttaggaatctgcataatataaccttgaatagctctttttagattggtaatgtttattataatttattatagagcaagtagaaatgtcttttttcatgtgttttatttaggttgatccttttcatcttttgacaatggtattttataaaatactgagcgcctacagtaagccaaaatattataccaggcaatgagtccattacaaagacaatattatttagtcctcaaccttaaaagatttacagtccccaaatagtacatgagaatacatcttttgaaggaaaagatgcaaaggcaaattagacatcgtctctactcttaaagag

SEQ ID NO: 848973 - DNA, 533 bp, Homo sapiens; identical to SEQ ID NO: 828210

SEQ ID NO: 848974 - DNA, 505 bp, Homo sapiens
aaaaggatccaagcggcaaatgagtggactatatagcctcaaagatgccttccaaccccaagaccgtaggggrctaaggctgtctactcccctgaatagagacttaggatgttgatagagcgattagcaggtctgtgataacacggttatcaccacctacctaaaaacaagcaagaaataagaggtcaggatgtctttagctcctcttctatatgtagacttagccctgataaaagaaaaattttgactgaattaaatttaaaggagcttaattgagcaatgaacgatttgcgaatcaggcagcccccagaatcatagcagattcacagagactccagcacagctacatagtggaagaagatttacagaccataaaaggggaaatgacatacggaaattgaagtgaggtacagaactgctggattggttacagctgggcgtatgccttatttgcacacagtttgaacactcagcagtgtatgaatggttgaagtgtggccgctgg

SEQ ID NO: 848975 - DNA, 505 bp, Homo sapiens
aaaaggatccaagcggcaaatgagtggactatatagcctcaaagatgccttccaaccccaagaccgtagggggctaaggctgtctactcccctgaatagagrcttaggatgttgatagagcgattagcaggtctgtgataacacggttatcaccacctacctaaaaacaagcaagaaataagaggtcaggatgtctttagctcctcttctatatgtagacttagccctgataaaagaaaaattttgactgaattaaatttaaaggagcttaattgagcaatgaacgatttgcgaatcaggcagcccccagaatcatagcagattcacagagactccagcacagctacatagtggaagaagatttacagaccataaaaggggaaatgacatacggaaattgaagtgaggtacagaactgctggattggttacagctgggcgtatgccttatttgcacacagtttgaacactcagcagtgtatgaatggttgaagtgtggccgctgg

SEQ ID NO: 848976 - DNA, 582 bp, Homo sapiens
caatttgcagcaactgggaagaaaaatttagcatgactgtttacatacattgtagagasaatattaacatcaccttgagatatctgttgtttgcttgtatgtgtgaagagagaaaagaaaagccaatgcttaatacaacacttgcaactcacatttactattgtatgttcataaatattaatctggagagataattagctctataaattttacaattagcctttcagaagagaagtggatgctaataaaataaggcatgctttcaagctgcaccactgcaaatgcttttactctcacaactctgaggcagggcctgtctttgtttaatcttttcctgaaataggcttgctttacacttattccctttctcccttgagacaataacttgcaacagggaaaataggtttctattctcaaaatctggttaccatctattttttaatttttttcttttttctctggaatatcctggaataacaaaaaggccatgtttgaccctctaggagactgctccaattcaggccaaatgaaacttacatgtttcagagattgcttgggtgaaatcaagatgtttgcatttgc

SEQ ID NO: 848977 - DNA, 696 bp, Homo sapiens
gctaaactgctataaaagtggactaaaaagctataatgactcaaatrcaatagaagtttctttctcacacagttgagaaagactcaggggcccactcttctgttcatctccaactatttacattagtgggacttctatcttcaagggcctggaaactgtctgaaaccagccagcagagaggaaggagagcagagcaaaggtgcaaatgcttcctcagacttgatcccgaagtgaccaccctgattgtgcccacatgccgttggcccattggcaagcactagtcacaaggccacacattgtgcagggaaggcaaggaaatgcaaacttgtgaccttattatatgtgctcaggaagaaaaaaaacagctattggcttctgccacagttgcctcttcctaagttccacataccctctccattttacagatgaggaaactgaggctcagaagcagaaactcattggaggtagcattgctagtaggtgatggaatgaagattagactcaattctgtctgattctgaagatgttgctctttctacttgaaaacattttctcttgattccgtgtatgaacaggatgatggaatggaggacatgtgggagtggagacagagttaaggttttttgttttaaatttgtaaaatttgtatatggcagttgttacttataatacaggcatctcaggtataacaatata

SEQ ID NO: 848978 - DNA, 509 bp, Homo sapiens
gaaaagtgattatttggtttcattgagaactatatatttttggtgtggttgaaagragatatagatgcaagattgataagtttaagtaggaacctgtagacctgtatttcatttggcatgaaatcatgacatttttcatcttaaaaacatattttctagttctgcctgctgaagaaatccagacagaatttctgactgtagtcaggcatccccaagaccaaacttaggttcagtgattctctagaaaaactggcagaactcagcaaatatgctgtactcatggttacagtccattacaatgaaaagatacagattaaaataagcaatggaaaaaggcacatagggcagattgcaagaaagacaagatacaagcttccatttttcctgtcccagtggagtcatatggacagccttaatttttcccagcaatgatgtgtagcagcgcatacaaggtagtgccaaccacagaagcctttttttttttttttttttttaaatctggggttagt

SEQ ID NO: 848979 - DNA, 607 bp, Homo sapiens
atatcttcagatttttattcttatcttttttacattacagctctaatatataaataaactgtttgctctaaagtcagtagccaatatggttgtgttgaagcaataaggtttaatttaaaaatatacttcttgttttgaagtaagtgttcattttcaccctcattattttggagaaatatcaaaatatcttcttgctatttgcttttctctctcctttaactagattgggcagatttatttctttttttttttgacatgaaataaccacactagtcagcatattcaaatccttttaaagtctcatcaatttaggttcgattgctttaaacatctgacaactgtgcatgtagttatatggaaactaacagaaacttgaaaatcagtagtcagtagttaaataaaagttttgctctaaaaaaaaagtaatgctaacttttgatgatcgttttgaaaatctggcaaatactcaagagcaaccagtggaagcaaaaaagcatacagtagcttcttagatttttccccatctstaatgttaaatacaaccaaagtattttaatagtaagctgtttttcatgtaagattttgatctcacatactaatggtgaaa

SEQ ID NO: 848980 - DNA, 605 bp, Homo sapiens
ctagcaaaagaactttgtttttcaacaaaacaagttcaagccagggcaacaaagtgagaacctgtctctacataaaatgaaaaaattagccgggcatggtggcatgtgtctacagtcccagccaccctgaaggctgagacaggaggatcacttgagctcaggagttctcaagactgcagtgacccatgattgcatcattgcactccaccctggggaacacagcgacaccatgtctcaaaaataaaataaaggccaggcacggtggctcatgcctgtaatcccagcactttgtgaggtcaaggcgggtggatcacctgaggtcgggggttcgagatcggcctgaccaacatggaaaaatcccatctctactaaaaatacaaaattagccctataatcccagctactccggaggctgaggcaggagagtcgcttgaacctgggaggcagagattgtggtgagccaagattgcaccattgcactccagcctaggcaataagagtgaaattctrtctcaaaataaataaataaataaaataaaataaaaacaagttctagcaatatccctaggcccatacattcagatcaaatgtttacactgacagat

SEQ ID NO: 848981 - DNA, 372 bp, Homo sapiens
attattttttttctctgtctctgtctctrttattttctctctctctctcgtatgcataaaacagttttgcaggattggattaggtattctatacatttgcaaatattttaattcttgtagcccctctaatataagcctaatttaatgtgaaagctcaaaaaactttctgcttaactagaaaatccttcctctggacatactcagggctacttgcaatgtgattagtgacatccttctttagtagcagaaaagaaacattccctggagctctcagaggtcattaaacagatgtccaattattgtctagatgacgtttggcaatatcactaccagatggctttattctggttatcttccaatttttatgtctct

SEQ ID NO: 848982 - DNA, 465 bp, Homo sapiens
aatgctcctgggataaagccctcaatccttacatgccctgccagggcatgcatggtctgcccscctctgcaaattcatcttctacctctgccttctcattccctgcccttttgccactctggccttctctgagttcttccaaaatgccaaattatttcctggctcagtatctttgcacactctgttccctctgcatggaatgcccttccatcccctcttggcctggcaactgatgcttatcctcagtcttagtttaaatggcatatcctccaagaagctttccttgaaccgtgggacaagcctgggccatctgttttattctcccattgtgcactgtacttttccttctcaacatttatcaaaaacataaataggaaagcataaatagggccaggcacagtgactgatgcctgcaatcctagcacttggggaggccttggcaggaggattacttgaagccaggag

SEQ ID NO: 848983 - DNA, 527 bp, Homo sapiens
cgggtacttctttatagcaatgcaagaatgcataatacatgtgtattgttgacttactctgttcagccactgtgctagcacttcaagtatataagtgcatttaatcttcacaactctgcaagggtaaatgctattgtccctactttaaaagttgagaaaactggccaggtgtgatggctcatgcctgtaatcccaacactttgggaggccgaggtgggcagatcacaggagctcaggagttcgagaccagcctggccaacatggtgaaaccccacctctactaaaattacaaaaattagccgggtgtggtggtggggacctgtaatcccagctactcaggaggctgaggccggagaagtgaacctgggaggtggaagctgcagtgagctgagattgcrtcactacactccagcctcagcaacagaccgagactccgtctcaaaaaaaacaaaaaaaaatttgagaaaactgaggctctgagaggctgtggggccacctgcccaccacttattgaaatatgtgtgtta

SEQ ID NO: 848984 - DNA, 527 bp, Homo sapiens
cgggtacttctttatagcaatgcaagaatgcataatacatgtgtattgttgacttactctgttcagccactgtgctagcacttcaagtatataagtgcatttaatcttcacaactctgcaagggtaaatgctattgtccctactttaaaagttgagaaaactggccaggtgtgatggctcatgcctgtaatcccaacactttgggaggccgaggtgggcagatcacaggagctcaggagttcgagaccagcctggccaacatggtgaaaccccacctctactaaaattacaaaaattagccgggtgtggtggtggggacctgtaatcccagctactcaggaggctgaggccggagaagtgaacctgggaggtggaagctgcagtgagctgagattgcgtcactacactccagcctcagcaacagaccgagactccgtctcaaaaaaaacaaaaaaaawtttgagaaaactgaggctctgagaggctgtggggccacctgcccaccacttattgaaatatgtgtgtta

SEQ ID NO: 848985 - DNA, 637 bp, Homo sapiens
aaataggaatggatgtgaagaagaatttgtgcccagttaaggttggaaaccatacacttgcgatatatatctaaaatgatatttgtgattatataattagtctactcacttaagccaaaagcttggagttatctttgactcctatctttgtctcacgttttatatttaatcaatcaacaagttctattggttataactttcaaatgtgtctgcacattgaccacattttataatctacacagccaccagcgtaatctaagtttctaatgccttccctctatattatcataacagcctttccctctcagtctcctaccgtgttcttcacacagatggaagccatagtatatcactccttcactccagggcctccaatggctcccatttctttcagaagaaaataaaaattccctgctatggcctgcaaatctctccacaaactctcattcttattttagcttttattgttgtagatcaacttcatttgctctgcaatttagtcttcttccaacataccaagcatacttcataccacagagcctacctactgccagtgatgcgttcctttagacatcctatggctccattcactrctgcattcagctgtgtgttcagatatcacttagctttccttctt

SEQ ID NO: 848986 - DNA, 596 bp, Homo sapiens
tattgagtgctagctaaaaatagtagccctgcattcttaccataayatatgaacagtttttgagcagacaaatatgagagggagtttcccaggcattttaaatttttctggtaaagagtgggaaagatctagagataaaggacactgatttacattaaactatgttgataacttaatagtcatgtgtttaaaatttgaatattatttattaagctgaaaattgacatccatcaaattttttagcgaagtatatgtgagatactatgtcaaccagtaatataaatatattaattattattattatattcattaaagattctatcaagaatacagttataaaataatagtaagattccctattgggttttgtttttattatttcattaatcaaattttgtctttgttacctattaatatttcactctaataaataagtttagtttacacaatttatgaagctgttgacctgataagactattatgaacttagcatacacactgcatataaacctaggaaatctttcaatcacaaaacatatttgaaatttgtacattaagacaataacttggtacagagttcagcacactctttctct

SEQ ID NO: 848987 - DNA, 626 bp, Homo sapiens
tttcttttaatatatttatttgagcttttagttacaaaagcagtacttattattttttwaaaaatccaaaattaactttgggagaccaaggcagatcacttgagcccaagagtctgagaccagtctgggcaacatagtgagaccccccatctctacaaaaaaaatttaaaaattatccaggtcagccaggcacggtgtctcaggcctgtaatcccagcactttgggaggcggaggtgggtggatcacttgaggtcaggagttcgagaccagcctgtccaacatggtgaaaccccgtctctactaaaaatacaaaaatgagccaggtatggttgtgggcacctgtagtcccagctactcgggaggctgaggcaggagaatcgcccctctacctttactgcctccctctgtagcccagattaggataacttccccaaccacctgctggctgtagagcaagagttcagggagaaaaccacaggcagaggtgaggggtgccatggagttgctgcagagaccagccaggtcagagctcaggagcatgaaagaggtagtcaatgacagaccacaacaaacaaaataacagccttttttttttaagttaatgactcaataattttttatgaga

SEQ ID NO: 848988 - DNA, 609 bp, Homo sapiens
aatcccccttgcccatcagaacaaatctgagctccgtggcaggaattcaagaagccccatggccaagctgcggcctccctctctgaccctgtcctccaccactccagccaggacagtctccttcttcctccttccttcccccaaggctttgcctatgccatgccctctgcctgagataccctcactccttcattctactgttttaagtcctggcttgcaactcccacctcttctgggttgcctaccagctgtccaatgtttgataactcatttaagaaaaacaaacaactaagcccttcagcacttaagaatcaccaggcttgcttatgcaaaacccaggccatcccagacttttctgaggatggttctaggacactagaattttaaagtttctcaggagagtctgatgccaccagcccagctgggtccattgacaggcacttggaagcactgacgatacaaagctcgaattatacatgtgcttggatgacacagtgcttgtaggcttgaacgacccaggtgcacatgggcacctgatgtctayacattgtaacatcatctctgcaggcaacactaacaatgataactgactttactgggggctcacca

SEQ ID NO: 848989 - DNA, 609 bp, Homo sapiens
gtaaccactttattgaaatgggatcataacatgctgtttaaaagttattgatgttggacatctttccatgtcaatatataaacctccatttatttctttttaccagctgccaaatatcccaccatatgaacrgactaaaatctgtccctccattgatgaatgtttggattgctgaacccctggaagaaattcaataagagcaaacagaagtgtaatatatgacaccctggcagatcaaagtgagagttttattagaggagacagtaaagctggtggagcggggagagctaagtgaatcaacatgttgcagtcggagccaggactcataccaccccaagaggcaggaggcagcgcagccagaagggcactgaggagccatggccacagctccctgtggctcccagcagcgggaccagatgcaaacttcccaccccaccacatgtctgggcttcctataccctgttcagtctttactgagtcagaagctgttttaagagctgagcacacccattttacagcagagcttcttacggaaaagcgtgctgctgtcctggaccctttgtccatcctgggccattgggccagctccagcctcatccttgaatggtg

SEQ ID NO: 848990 - DNA, 366 bp, Homo sapiens
ttccagaaccccctagggaatcatggacatgggtatggagcatcagtggctgctgatatagaaaaggaggcagccagacctcatgcagtccttggtgggaaaacacaccacctgcgaaaaacaagccaaattgaacctgagtctgactaggactgttgatctaccaccaatatgtaggaaaccgagaggatagaggaacatgtaaaacatgtaaaacacagagctgaagtatattaaatwcagagtgggaaactatgtgacaaacagcctgattccctcaacaaataaattgcaagaaataaaacttgcaatggaggggggcctatgaattagcatagtttttaaaaacatatcaccctatttgga

SEQ ID NO: 848991 - DNA, 491 bp, Homo sapiens
tagaaagatatgttgatgtcctgacccccagtaccagtgaacatgaccttatttggaaataaagcctttgtcgatgtaagcaagtaaagagaaagtcatcctggatcaaggtgggccctaaatccaatggctggtgtccttaaatagagagatttgatggcatacagggacacgcaatgaagaaaacctcacgacagtggaggcagaggttggtgtgatggcagctgcaagtcatggaatggcaggaattgctagcaaccgccaggaagtaggaagaggcagggaagccttcttccctagagcctctggagggagcatgttcctgacaatacttggattctccagaactgtgagagaataaatttctcttgtcttgagctacccagtttgyggtacttcattacagcagccctaggaaacgaaagcagatgatgtcacagtgtatgtacctactaaaactatgatgttgataaccagaatcatacattata

SEQ ID NO: 848992 - DNA, 619 bp, Homo sapiens
tatatttatgctctgagaggacacagataatggactttcacctacaggatatgtaactgctayctataaagaaagtaaggatgtagtcacaagctgtccataacaataagattattaggaataaatacatgtgatggggaagaaaaggaaacttttagaaatgaaagtttatacttgccaaaataaaaaaaaaggtagtcagcagattaaacagttgaagatagaattagtgaactagaaaaaaatgcatagaaataatggaatattgcactgagaaagaaggagatggaaaatcaggtgcaagaaggtgagatccatgttgggtaggtgtgggagtggtccaggcttaaagtcttacacctcacagaagccagtctctcttataacaattccatgaacttctggggtcctgcaagtgacatgccaattataagagtcactgaactcaagaaagccaaaccatggtatccccatcaggcatttatagttcatttatggttctccccagtcgagatataatttaccaggcaaggatcatttgtatcataagcagtgttgcctagcaatatagttgacattctatccttatcaggcttccagaggaaaagagctagagagt

SEQ ID NO: 848993 - DNA, 634 bp, Homo sapiens
tcaaaaataatgatccttggcaaggtacatcctcgttccatgctttcatatcatgatctgttccttctcaaagcaaggatcaggcttggattaacaaacgctcacacttcatatgttagcaaagataaatgagactgtaatgaaggcatgtgtcaatagacattctttccctagagtcagtgtgatgaaggataagtttaagttttcatttgttgaatacattagcctcaatcactgggaacttgcagtaattaaaactgggcatatctgaaatttacctttgcaccatctgtgaagaaagcatctaggaagggaaataatagtgtcaataaaattacagagaggactttggcctagataaggataataactggttaaaggcccacaattcattaatgatatcaatagagagaagaattgaccgttaattaaagcagattgggaatggccctattgaatcatttatgtaacacccattatgtgcctactattttccagacaagcttggatagcactattttattcttaaatattggaaagaccctattaagaggatgaaaagacaaggtcagatgcagtggcatgcacctgtaatataarctacttgggaggctgcagtgagagcatcccttga

SEQ ID NO: 848994 - DNA, 642 bp, Homo sapiens
ggccggtgcagtacaggacagggggcagtctagaagctaagcccaccacccatcagaacaaaggattgtttgtcttgtrccaatctgcactcacctttgttctagaaaggtgcgaggctgtttgttgggacttcctcaagtccaaggtgtccctttggggccctagagggaagggccatcagccacgtggtaagaggtccaagaccctgtccgtgatgcccctgtggcctttacccctctagggtgtctttcccagacagacttttagtaaacattcatcagtctcccatgcactgtgctggatgctaagggagactcaaagatggaccaaaccctgccccagcatgcagggtctccccgtgtgttgccttcgtgtgaagagatgctgtttgcatagtcaggaatggaaaggtggcagaaagggcaggggctggggccaggggagaggtttaattgcaaagaaacaagcatgagccttaagcattacttatgattttacaaatctggggttttaacagtaaaacagtatttgggcctctgcgtctagcgtcgtgttgggccctggctgccaaagcgaataagccctagttcctgcagtagcagctaacccagcaaggggactagataccaaagccttgtaag

SEQ ID NO: 848995 - DNA, 642 bp, Homo sapiens
ggccggtgcagtacaggacagggggcagtctagaagctaagcccaccacccatcagaacaaaggattgtttgtcttgtaccaatctgcactcacctttgttctagaaaggtgygaggctgtttgttgggacttcctcaagtccaaggtgtccctttggggccctagagggaagggccatcagccacgtggtaagaggtccaagaccctgtccgtgatgcccctgtggcctttacccctctagggtgtctttcccagacagacttttagtaaacattcatcagtctcccatgcactgtgctggatgctaagggagactcaaagatggaccaaaccctgccccagcatgcagggtctccccgtgtgttgccttcgtgtgaagagatgctgtttgcatagtcaggaatggaaaggtggcagaaagggcaggggctggggccaggggagaggtttaattgcaaagaaacaagcatgagccttaagcattacttatgattttacaaatctggggttttaacagtaaaacagtatttgggcctctgcgtctagcgtcgtgttgggccctggctgccaaagcgaataagccctagttcctgcagtagcagctaacccagcaaggggactagataccaaagccttgtaag

SEQ ID NO: 848996 - DNA, 583 bp, Homo sapiens
ttggagatccccacaaggtataactaaacaagcatcgaaggtaatggtctggggtgagtctgatctagttacgttaataatgaggtggctagcaagagcacaaggaaagaagaaggagtaacagaatagatgaaagagaattaaactttccttagctttagtttggtaggattttcccctgggactatggcccatgacgctggagggggcggtgctttcttgactcgggtgtgatgggtccatcctttctcggcaggtcagactgcagtttcagttgttaggagcactagatatggtccctcccaggacggttcaagtttctcttctttccagctcttattgaggccgtagtctccgggccggtgctgatggactggaaactcaagaggcagcgtttgcgctaagagacctttagtcctaagggaagataaggtagaagacagaccaagtatataattcctaaggaactgatctttggtctcaaaagtgggactgtcactagtggaacttaartatggtaacctatagagcatttcataaggggataggccaacatctgtttgaggggcagttcggatcctga

SEQ ID NO: 848997 - DNA, 625 bp, Homo sapiens
caacgttgccgagagtccaggtttattcgtcacagtgggtggggtcccaatctctagcccttgaggccacgtcagcaaggcagtgggtcrcgtctccccctgggagatgaccagagaccccttccccagaggagaatgggaatcctgggcaaggccccagattgttagaaacaaattgtcagtgctgtgaagtgaaacccagcattcaggcaaaagttttctcagcaaggcaatttacttctatagaagggcgcttcctgcatgcaaagcagaggcaagggagagcttgcaaaacaaaggagaccaggagtttttatccctgaagcagaccctgttcctgtgtcctccccctgtgggctggggtcggaccacacaatctaggctaattccgattggctactgttgacatcatcaaaggaggcgagggtgggcgtttgacagggagaacaggtacagtatatcttgggtgtgtttaggcacagtggagatagggagggctaatagatgaatgggtaagattaccttttagaatagaacaaagaaccaggaaccaaaaccctttgaagaggaactatttgttcttaacaacggcagcacaagtgggatccatgcaatgccatcccac

SEQ ID NO: 848998 - DNA, 613 bp, Homo sapiens
catatgaatttggagggtcacagtcaacccataatagtcccctttaggcttcaggaagggcatggatctgaggccttatgaaaaggtttagaaatgtaaggtccttgcagaaggaattgctttccaaggaatggcactgatagaacagttaggagaaagaatacaggcttctggtgacctgctcttataaaataaatgtgttgttgtcccctgcaggccttggggacatggcagtctccaacaccataggaagcaacgtgtttgacatcctggtaggacttggtgtaccgtggggcctgcagaccatggttgttaattatggatcaacagtaagttcctctcacctttaacagatgtgttttacccagaaggctagtggtgttggcccagttccagccagaggctctaggagacgacctcctcctctccttggcactcagacacccattttccatggcggcttctagagcaccttagggatgtctacacttccactcctcacctcagcccgctrgcgtgcctctccccatcccaggctgtctcctcagatgagcagggtcgtgacttgaatccgtattttcctgaccctccacgaccatgtggtcacctgtaa

SEQ ID NO: 848999 - DNA, 544 bp, Homo sapiens
aaggtccaactgatttttttaaatagatattccctggattgctgcaaaccttaggttaattctggagctctgaaaacgttgattctgacaattttttgctgttgttctcaatgcttctacaaaaaataaaaattgcagaagtccttcctccaccatttcattgatgagcaggccagtttttaacctgcttgtgcacacctatcttcagtggcttattaaggaaactatgcttacactcaatggcttatgaggcctcttttcctccattgaattgtttctggattcccttggtaggggccagtgagatctggactgcagccagggcacacatttagtcttgcaccagtcttgactacatgaccttgggacaaaggagctgagatttccaaagcacctgctgtgtgccaggccccgtgtgctgggtgttttatgtacactctgtcayatcattcttgcaacaaccaagaaggagatacctttctcatttaacagatgaggaaaccaataagatgcaaagcacttagcactgtgcctgcagcacatg

SEQ ID NO: 849000 - DNA, 445 bp, Homo sapiens
gccacacagccctcaagtctccgggacagctgttaggctttgcctgggactgatccccagggcaggccccaggctmcacgggcgcagcgctcagcgcaggcgttaggagatgctaatgaggcttcccaggccagaggactggcctgcatcgcaccacccaggggccctctttgccagtcaactgctctaccatcgtccagtttgtgccttcatagggccctcaggtacctgcaactcctcctcagcatgaagatgaggccagggcttctgcccttttctcaatccacctctgcgtcagcattcgctagggggaagccctgctgctctcagagacaggaggggagaaaactttgtacccagtcttttcttcaccctttgtcttttgctttcagttattttctttatttcaaaagacagggtaaaacttcctaggactgtaagtttg

SEQ ID NO: 849001 - DNA, 547 bp, Homo sapiens
cttcctgatagttttaaccctcctctccctatcttttctgtctgctctaaggggaattcctttcttcccattgcttttaattatctctgaccctttaagcatcacataaatctttccttaggtaaaatattatattcccccaaaaggttctctctgcttaattctctctgctattgtctcattatcttaggcttagcatcacctcttgacacacctctcgccttgatagcacatctcctcttatattttcttatctttttcttattttttcattactttcttccttcagtgaccacgatagtgcctcatgcaaaggagacattctacaaatgtgttgggaatggaaagcagataaagatgtgatcgagatgaaagagaaaaatggcatttggaattctcccttcagagatcaaagttaacagtatggtgatacggcatccaaggaagacagaaataactgatttcaagacagcgaaatttytacaatttaccagttatttaaaagctagcaaacaaacaacggcatactcaccttcatctgttgggg

SEQ ID NO: 849002 - DNA, 587 bp, Homo sapiens
ttgacacacctctcgccttgatagcacatctcctcttatattttcttatctttttcttattttttcattactttcttccttcagtgaccacgatagtgcctcatgcaaaggagacattctacaaatgtgttgggaatggaaagcagataaagatgtgatcgagatgaaagagaaaaatggcatttggaattctcccttcagagatcaaagttaacagtatggtgatacggcatccaaggaagacagaaataactgatttcaagacagcgaaatttctacaatttaccagttatttaaaagctagcaaacaaacaacggcatactcaccttcatctgttgggggaaaattattttttgtcattgctcacttcaacatgggcgcaatgagagataagagacactaagaaatgagtgtagaaatgaatatttttgctcattctgctagaaaatataatacttagtagaaacagattcctgaattgctacactttaaacatgcaatcacattttactawtatatgctatacacatactctaaatgttgtaagcttaatatttcagattgtataagagattttgaggcatgt

SEQ ID NO: 849003 - DNA, 627 bp, Homo sapiens
tcctgcattgtatagggagtaatggtaaggaaaaaaagtctatctatgttcagtacagacagaatatttttccaaatattttcagtatatggttggttgaatccatggatgcttaacccatggatacaaaaggccaactgctactgatttatgcactcatatttctatgtataatcaaaagaacaggaagtttgtcacttatttttctaaagtcacattagacttctatctggtctcctagacctgtggtgaggccaactcattctaaagtcctttcattgagagcatatcagaaaagccagacagaaagttgtatattgattattgtagattatccattcacttggagctaaaagtagttattgcttatatttgttttaggctcctcagaaacagcttttaggtagacatcattaacagtcacatcatttttaaatatgaaggtttgcaagctaaatacaaggtccagaattaaatgtaggcaagaatgaattcaacacaagatatggagatgcgtagggatgaataacattgtaagccttttaaagcccttctttatttcagttaatgaccaatgcttgggtttctaagtgtattgaaaaataaaraaaggttgagtggggctta

SEQ ID NO: 849004 - DNA, 574 bp, Homo sapiens
cattatttatttcctttttacgtactaagtccaagtttrtaataagaattgctgagtttattctcttaatacaaccttttgagacatgtgtcacaataacgctttttctctattattcttcaacaaaattgaatatgtagctatatgtagctatacatatggtattcttatgtagctatacaaattggtacatagcattgctctgcatttggaaaatgcaaattactctcaaacaaaattcttttaaagacttgaggaaaaatagaaatctaatataaaatattaagacataaaaaatgtgagtaatgattatttgattagtctgattttattatataataaatttaaagagaaaactatgaacaagataaagataataactaatgaaaagtaatagaagtttaggaaaataacttcaatttattttacgtgagtaaaagattggtctataaagagaaagcccaaatgtaatgttcacttggaacccattagcatgttaaaccaggggtccccaagccatggccgccaagtggaactgatccgtggcccatggcctgttaggaacttgtctgca

SEQ ID NO: 849005 - DNA, 612 bp, Homo sapiens
atatttaaataacttcaatatgaactaatgtatcattttaatccatataattgaccatcatcaaaaagattaatatctgttgtgaatgataatacataaaatataaacaagcagaagctgtataagtaaagcacttctgaaggaaaatttagcactattttcagacttcacatgtgcatcccctttgacctaggattttgtttcaaagaatctatcctagagcaacagtcacacattacgaccaagatgtatgcacaagatgttcactgaagaattgtatattctgtactatctacactatgaaatggaaaacctaatttcccatcagtaaggacatatttgaataaattatgatacatttatggtccagcttttaaaataaatgccacagagctttaaatactgccacagagcaactgtcaagatacgactttaaggagaaggaaaagacaagaaagaatccacaaagtacactcctttttatgtaaaaataaggtgtgtatgtgtgtgtatgcacacgcatgcctgtgcaagyatgaagagtggttttcccagttatcttgatatatttcatattatttgatatatcgcaatgattcatgtattacttga

SEQ ID NO: 849006 - DNA, 545 bp, Homo sapiens
tgtagagtgaggtcccgcttcctggttcatagatgactatcttctgtgtagtagaaagaggactaagggctctctaaggtttcctctataagtacactaatctatttataaggggtgtgcttcatgatctaatcatctcccaaaggccctacctccaaatgccatcacgctgaagattaggtttcaacacatgaatttgttgggggcataaacattcagtccattgcaacacttacgaaaacatataattcagaataagaaaatatttttaaaatttcttgagtagtaggtatgcacagcaaacagtttttgagtgttttaactgtttctcctaatttatttaatttcttatttttccatcagataacattatttgcttattttgctaatagtgaaatgggaaaaataaccattccacaactgtgtagtgtattaatttgttaatctcattaagcaattrgaagaatgaaatcactaactgttattgttgtttggagagtgaagatgtctccaccaaagcatagaaaaggatctgtagatgtaca

SEQ ID NO: 849007 - DNA, 152 bp, Homo sapiens
tgcctggccagggacagtggaggaagcttggtctcagagtaagaacgtgagggaagtgcacagctgagmacacaggatggttctttcacggtctcgcccctgctgccttgctgggaggaaacagccgtccccagggagctggttttctggga

SEQ ID NO: 849008 - DNA, 565 bp, Homo sapiens
aatgatggctgtggcgctgtgagagcagaggaaaaactcgggtttagagttttttcctgaaacacattcccgaggtatctagtggatctgccttctccttgccaccttccagagtcttatgtttgcttttaagataaaatccaaggttttgggctgtaattagagggaagagtaggggaaaatacatcttttccaacttcccagaaacacagtcctggtatgttagtctttttaatagatttgcaatgatattgaactcaaaagaaatcaagagctactaaagaagttttttaggataccatataattaatgtcccagacccacagttccctaccacgcacacaatggcctattgtatcacagcactcaggacaatgatatttccacactaattttatcattcagggtcaatacatcgctaagaaaatgaaactgctaatgtcagtctgtgaattttccccactgctttcaaaagtttccttcagcaaaaacttagtttcaaaaatatcacagagcaaaacrttacattctatggaaaactccaagtgagtaaaacccaaggagt

SEQ ID NO: 849009 - DNA, 490 bp, Homo sapiens
tgcaccaatctctcaaggcttttaaaaaatgtgcagtcctcacacaagtcaaaagtgccgamtgtcagccagccatggggtccctgccaaagagagctgctctccaggcccacccacagcatcatcacaattccaacctgaagcagcaacacatatgacacagcctccaccccattccgttaggagcagctgtcatgtggctgggggctgaggtttgtgtgtggactggaaggagagaggtgggggctcgcggtcctctgagctgaactctccctctcattcggcaccttcacccacaagccacctttgtccttcacaaaagccacctgggctctgcctcagacagacagcagttcacagcatgcaggccaatctcttagctaacttcacgggaacgagcacttacattctccctcctccaggcccaagatttcataaccagaaactccagcatcctctcctgggctgcactgcagttgttcaggtaaag

SEQ ID NO: 849010 - DNA, 449 bp, Homo sapiens
gctgaaagaaaaagagttttctgccttttatctccattcctctcaatgtgtcagctttattctatcagagcagcttcattcacragagtgggaaaaatggctgctggaaactgctatgtcttatatctcacagctttaccagtagagataaactcaagacttgttctctagacccaaatttagggattccagctttgcttgattcatcttaggtcagttgagttggccaccctgagccaactaaaagtagtcttgggtgtcagatatctaataacatggcaacactcattcaaaccacatggataaaatagggagggggttaaagaaagaagcgagtactagttttggcaggcaaaagaatacctttccatcatggctttcaaataaacattaaagtaaattcagtggaaacaaagattatatcagtcaatgtttgactcaggaaagag

SEQ ID NO: 849011 - DNA, 522 bp, Homo sapiens
tgaactgttgacttcagggacaaatacgacaattaattatataaatgctaggcaatctacactaaaaatttagactatgattgcatgataactctctaggtaatgcacaaattaataaagtattatcagaaactctctattttctttcaaaaaattaagaagaaacaaatgcagatagggagttactcagataacaattatattgagtaatgtctggaatattatcaatgacctcttgaatattcagagttatgttttgcatgttcatttgatttgtgcgatgtataatcctgttccctcaaaataagatcaaccatttccattttttaatttgcatcttgtgtttttggtgaattacttgaattttgcctctttatctttgtatttaaaattaatttattacaggakacttgcaagaatatagaacaataaaattatgtataaaatcaacaaagactcagttggatcaatgagtaagcttcaaatttgagcttttagaaagcaagggaaaaacaaaaacat

SEQ ID NO: 849012 - DNA, 603 bp, Homo sapiens
gtttgagtcagtgcataggaatgcctatagctgtatgattttcatatttttccataaaaacacacagaaaatacagttttcttaatataaaatgatagaatgcttctaatgstaactaatttttctttttagcaagtattcaagtgtatgatagaacacattgatttatttaattttatgtaagttctctcaattgtcagtctttaatattctgtctagccttgaaggcatcacagtaaatgcaactgtacttcaaaaaattgagaaatcaataaatatgttctgcaaggtgctactgtcagattcaattaatgaatcattgtcctggaacttataaagtttatttccaggttttataggaagtcagtgtaaaaaaattaaaaacttatccattttattattttcctaaattagaaatccacctctaagcttcatccaagggctcacttctgcatgaagccatccttatgcaggctctgaagtattgtagaaattatcctttttttatttttatttgaccccacttgtcattttagaatctgtagttctacttccacagtctccccaactatttctacaaattacaatggggtgtctcacatg

SEQ ID NO: 849013 - DNA, 616 bp, Homo sapiens
gttattgctataacctattccactatgtgactataacaaaatgtatttatccattcttctcttaatgaccatttggatagcctcttgttttgtgctattgcagttagcattattaagaatgtattattaggtggttggtgcaaaagtgttgcagtttttgccattaaaagtaatgacattaaaagtaatggcaaaaaccacaattacttttgcactaacctaatagttgcacatttcttttggaggacatatgagcatgttacttctgagtatgtatgtaggtatggaataaccaaatgatgggcatacctatgttctactttagctgatactgacaaacagttttccaaagtaggtttttcaatttccactcccactcactgtatgaatgctctaattggtattttctcaatattctctgtctttttatgtccatactcacacacaatcatttaaactattttgtggggttgtataatctcaatgccctttgaatgctgagtagttcttttgagtatattttcaaatgttcattgaccrtttagatatcctcttttgtggagtgctggttcaaaccttttgcccatttttctattgggttgtctatattttctgt

SEQ ID NO: 849014 - DNA, 564 bp, Homo sapiens
tcagaatttccttcctttttcaaggctgaatagtattccatggtatagatggatcacattttatttatccattcatttgttggtggacacytgagttgctgccacattttagctattgtaaatcatgctgctatgaacatgagtgtacaaatccctgagtgtacaaatactgttttccaaagcagctacactattttgcacacctaccaacagttcacatgggttcagttccaatttttccatattcttatcaacatttttctgtctttcttcttttgggtaacagtcatcgtaatgggtgtgaagtggtatcttattagggttttgatttgcatttctgcaatgataactggtatgaagcacctttccaactgcttattggccatctgaatatcttctttgaagaaagagaaatatctactcaagtcctctgcccattaaaaaatttttttgctgagttacagaaattctttatctattttgaatattaacctcttattagaaatgatttggaaacattttcttccattccttgggttgtctttttactctgttgctactgtt

SEQ ID NO: 849015 - DNA, 673 bp, Homo sapiens
ttcctaccatgaagttcaaaaacaatcacaaatatggtggtttgatgaatgctttcctactgcytcattcattgtcctgcatttgtatggttatcataaacttgactgatttttatcttacaacaatttgtatccattcattcatttcccaacctgcttattccagttcagaattgctggtgactggagcctatgttggcagctcagggtgcagggcacgaacctgtgctggacaggataccatcccattacagggcgcactgacacataaacacacacacacacactcactcatatgaggacaattaagacacacctaatgtgcacatctttgggatgtgggaggaaatcagaggacctggaggaaacccacacaggcatgggggagagcatgcaaactccacacaaacagtggcccccacatctgattccttttttcatgaatattataactaaacaaaattatttgggtagctgctgtaaatgatttttttttgaaaatatgtattttgcgtgtttctctactttcaaatttgcctatagtgattgtgcatgatttgagaaacagagaaataatatcactacaatgtggtttgtactttttcctctgtaatttgtagttttgttctaattctatttggtagaaaaatttcaaattctagcaatatagtgt

SEQ ID NO: 849016 - DNA, 633 bp, Homo sapiens
ggttgattccatgctactgtgaatagtgctgcaatgaacatacaaatgcatgtttcttttygtaagctaaggtacatatacattagcctaggcctacacagggtcaggatcatgaatatcattgtcttccacctccacattttatcccactagaaagtcttcagggaggccaggcatggtggcttatgcctgtaatcacaacagttttgggaggccgaggtggacagatagatcactggaggccaggagttcgagaccagcctggccaacatggcgaaaccttgtctctaccaaaaaaatacaaaaattagctgggtgtggtggtgcatgcctgtggaggctaagacatgagaattgcttgaatctgggagatggaggttgcagtgagccaagatcatgccacttcacttcagcctgggcaatatgagactgtctcaaaaaaaaaaaaaattctttggggcaataactcacatagagctgcctctcctaggataacagtacctttcagactacctcctgaaggacctgcctgaggatattttacagttaacttaaaaaaaaaataagtcgaaggggtacactctacaatagtgataaaaagtgtaatgtaatgaaaacatagccagtattaga

SEQ ID NO: 849017 - DNA, 542 bp, Homo sapiens
ataaagaatgaaataggctaagtgaartaagcctggcatgaaaggatacatattgtatggttccacttacatgaaatatctagattaggaagattcttagggacagatagtagagtagaggttaccagagccttggggaaaaaggcggtgggattattgtgtaacgcaggggtccctgcgtcagcaccggtacgttaggaattgggccgtacagcaggaggtgagccacaggcaagcgagcattaccacctgagctctgcctcctgtcagattagcagtggcattagattctcataggagcttgaacactattgtgaactgcgcatgtgaaggatctaggttgcatgctccttatgagaatctaatgcctaatgaatgatctgaggtgaaacggtttcatcttgaaaccatccaccatctgccccttcccccagcccccgccctgcacctccaccccattatccgtggaaaatttgtcttcctcaaaaatggtttctgatgccaaaaaggttgggaaccgctggtttaatggattcagagtt

SEQ ID NO: 849018 - DNA, 512 bp, Homo sapiens
catcaggattgtaacaaagttaatagcaacttctgatcacaagatttaatataaattggaagtaacagctgatttgtatcacttcaccaacaaagaaacacatgtgtgttcttaatcctaatattcttccttataaatccccccagatctcactttccacttctaattagactcttaaaatactctgtttttgataaaactttgcaaatgtttagttatgaggaaatttgatgtgccttaacatactccaagtttggctttccttgagaagcagaacctgtcggcactcaccctagtgccttccaaaatgcctgttaagtctttacatgtgcttttaaaggagtctctccagtccatttttgcggcatcaaattcaaatgtaagttcaaagcatgcaaaatagaaaagagccagccaaacwgtaattacaaaagtgttctttactgtataatttagggaaaatttatgtaatacactaaaacaatctagtttggaattatagttctatgtaa

SEQ ID NO: 849019 - DNA, 541 bp, Homo sapiens
tttaaacatgcaaagccatccatcatccctttttgtgatcctacttagctgcctatgtggccattgattatcaaaggttaratttatagggtatacccatataaaaagaataatcacaaaataattaattttcccatatacctttcgatgacaaaaacaaaataggttggcctatgtttcttgatgagacttttccatatgatggtattggctaggcttggttctctgatatgtaaatacgatgtcattttttaaaatcacttgctgcagtcagtgtgaatctttaagtaaataggtgattaacttgttactttgaaatgtaaatatgtgaaattttagattaaattaaatatctctattccagttttggaatttaggaattctcattttaggttttttcttatttcctgtttaagtgacagttattaacatatctgaacaatcagctttgataaaatagtaattttgatttgttccctttggttatttatatttgtcacaggtattggttaagtcagtcaaaaaccatgtgttgagggtc

SEQ ID NO: 849020 - DNA, 616 bp, Homo sapiens
taatatatttatgttgctttaatcaaccatttacctcgaattattgtgataacatcataagcatgtaatcttgatcacagaaatttaacttttgaaaattttttatttatactgcctttccttgcagagaagtttgatgaggtgattaacaacagaaacacacttaggtgtatggcccacagaacctataaagcaagtactcaatggaaactacaaagcaactagttaacaatttcatcatgggaacaaaacttcacatatcaatactatccttgaggcggggcacaggccggagtcctgacctcccaaatcaatactaactttgggaggccaaggtgggcaaatcacctgaggtcgggagttcaagaccagcctggccaacatagtgaaaccccgtttctactaaaaatacacaaattagctgggcatggtggcgtgcacctgtaatcccagctactcgggagtctgaggcaggagaattgcttgaacccggtaggcaraggttgcagtgagccgagatcacaccacagcctgggctacagagagagactccatctcaaaaagaaaaaaaaaaaatactaaccttggatgtaaatggccaaaaaatcccacttag

SEQ ID NO: 849021 - DNA, 616 bp, Homo sapiens
taatatatttatgttgctttaatcaaccatttacctcgaattattgtgataacatcataagcatgtaatcttgatcacagaaatttaacttttgaaaattttttatttatactgcctttccttgcagagaagtttgatgaggtgattaacaacagaaacacacttaggtgtatggcccacagaacctataaagcaagtactcaatggaaactacaaagcaactagttaacaatttcatcatgggaacaaaacttcacatatcaatactatccttgaggcggggcacaggccggagtcctgacctcccaaatcaatactaactttgggaggccaaggtgggcaaatcacctgaggtcgggagttcaagaccagcctggccaacatagtgaaaccccgtttctactaaaaatacacaaattagctgggcatggtggcgtgcacctgtaatcccagctactcgggagtctgaggcaggagaattgcttgaacccggtaggcaaaggttgcagtgagccgagatcacaccacagcctgggctayagagagagactccatctcaaaaagaaaaaaaaaaaatactaaccttggatgtaaatggccaaaaaatcccacttag

SEQ ID NO: 849022 - DNA, 575 bp, Homo sapiens
actcatccctgttcccttccctacggcaagcaagaagtcagccctccaactgaagagattctttggcaatagttatcagaagaaaatttttcatagccaatacatctgagtagtctctcattttctctcagtcacattctaggttttatttcctccttagtcatttgtttacatggctgctgtctgccttctcaccctcactaaaatgccagccccacaaaggcagggcttttcacccctgtccccagtaccaacatatagtagatgctcaatacatatttaatgaataaataaaaccaacatgacaaccaagacaggtgatttttcatcagtccataagtcttctaatagggaaatgaagatacgtacataaaattgttaagtacattaaaccaattttgtctccagtcttgatgaatactgatatttatatattgtccactccccatrccaggaaactatttttctcaagggaagccactagatattattactacatatactataggtaacataaaacatgttatgttttatatgtaatttctagtatgaaccacagtatataagaagagttc

SEQ ID NO: 849023 - DNA, 587 bp, Homo sapiens
aaaaagagttaataatgatctagaagactagaaactatgctaaaatcccttgaaactagtccccttttcctaacatgagaagaaagtaatgtagcatctttctactagcccagagataaattcttttatccttcctttcttccttctggattttccatagttagctctagaaattctcattctggtctacttacctattgatacaatcctgtcctcactagtcctttaggtgaagctcttgccgcaatcatctttccagagcattgcacgtactgcttcccatttttgtgtgcactgcagcagacactaactgccttcccagtagcctttccccatctgtccaggggcagagatctgcttctgcaggagtatccatcacttccctgtgggattcagacaaggctggctctattcccagttcaagcggtcagtcctgattggcttaaatgcatcgtggtggcctcattgtcctgccagtgattggtttaggcacgggcatatwtcttaattctagccaatgaaagatgaagaatagtatgccaggggactataggaaatagatttttattcttaaaaataaattcatg

SEQ ID NO: 849024 - DNA, 634 bp, Homo sapiens
caaaacatctttttctagttttcatttcagttggttattccatcagaagatatgagctttactttaaatctttctataacctcataattaaaatattgcaattaagacaaaatattaaattcttcccaacttgtgaaaatataaaattaaaaaatgtaagttttaagtttacttgttttccccagaattactggattataataaatttttatataagtacaaagtatgtatacagtttcaaaggttgcttaaattatgcaacccttcagacaagaccattggaaataataaataagcaatacaactttaaacccaagcacatatactatagaactatgcggagcttgtgtccaaaatcctcaagtatttacaagctttaaaacatcttcaaagtaaaaaactaattcagttagcaattcttttaaatagaatagttatatctaagccaattacacaattccaatcatttcagctatttcaagtaaataattagttatatgaaaytaatattacctttaacatatcttgaagatgtgttactaactggtaatgctatgtgtctgttttctcaactctgatatagaaattataaaagtacattgtcatgggcattaaatgataaaccataaatatg

SEQ ID NO: 849025 - DNA, 616 bp, Homo sapiens
gtccattaataattttttaatacaatcaaatatattaaatactcagtgcattcacattctctggcatctcactgtggggaaattaaaatttattctctttttgaacacaaatgatctgtgtaaatagactaacaagacatatgatctggattgacaaaatcttttaaaagcattccaaaatacttagatttgaattaaagaaaaaggaattaatagaggcatctcaaaagaaaatatactgacagattaagtagtcaaggcagcaggattacactttttctctctttcctcttgagacattattattaaaaagaaatacaggaaagcttctggaaatgaaagagcaaatgcatatgaatccatctctacttagacaacaattgcaatagagtaattattttggaactctggggtctattgaaggcttgcatctcacaggggatgtctcgaatgataaattatggttacatttggtcaattttacctcttggcgtagtaacagttgcctgctctccacccccagccctctatcaggcagctgggcagttgttcctttcgcaacctgcaggtagcttaatgggcaaagagaatacygtcctccaatgacaagggatct

SEQ ID NO: 849026 - DNA, 626 bp, Homo sapiens
cgttaaattttaaaaatcactaaaggggttcaaaggcagatttaagcaggcagaaaaaagaatccacatatttaaggatcrgaaaatggaaattagtcattctgaggaacagaaagaaaaaggattgaagaaaaattgaacagagtctaaggtacctgtggaacacccttaagtgaatcaacatatgcattataggagtcacagaatggggaaagagagaaagggatagagagagaatatttaaagaaataatggctgaaaatttccaaaatttgacttaaaagacatgaatattagcatccaagaaattcaacaaactacaagtatgatgaactcagagactcacactaagacacattataatcaaactgttgaacaacaaaggcaaagagaattttgaaagcagcaaaagagaagtgactcatcacatacagagggatcctcaaaaaatattagcagatttctcatcaaaaactttggtggccagaaggcagcgagttaatatattcaaagtgctaaaaaattaaattaaaaacccatcaaccaagaattctatattcagcaaaactgtactttaaaactgaagaagaaattaagacattcccagataaacaaatgcaggggga

SEQ ID NO: 849027 - DNA, 626 bp, Homo sapiens
cgttaaattttaaaaatcactaaaggggttcaaaggcagatttaagcaggcagaaaaaagaatccacatatttaaggatcggaaaatggaaattagtcattctgaggaacagaaagaaaaaggattgaagaaaaattgaacagagtctaaggtacctgtggaacacccttaagtgaatcaacatatgcattataggagtcacagaatggggaaagagagaaagggatagagagagaatatttaaagaaataatggctgaaaatttccaaaatttgacttaaaagacatgaatattagcatccaagaaattcaacaaactacaagtatgatgaactcagagactcacactaagacacattataatcaaactgttgaacaacaaaggcaaagagaattttgaaagcagcaaaagagaagtgactcatcacatacagagggatcctcaaaaaatattagcagatttctcatcaaaaactttggtggccagaaggcagcgagttaatatattcaaagtgctaaaaaattaaattaaaaacccatcaaccaagaattctatattcagcaaaactgtactttaaawctgaagaagaaattaagacattcccagataaacaaatgcaggggga

SEQ ID NO: 849028 - DNA, 492 bp, Homo sapiens
acccctcttccaccacacctggtcagtggaaaaactgtcatccacaaaatttgtccctggtgccaaaaaggttggggaccactgctttcaaggtagcaaagttttaccctagcayttgaaaaatggtattctgtggtacaacaaagaaaacgagagatactctaagggaagttctgtgtcttctaaatgaccgattaaagaaactaatgaaaagtcactttttgtggccatgaaacatgaatttaagaactattctgaagttggcatccacatagtctagaaaatttttcatctctttcatttcccacattctttacaaagttgtataacagcaaggccttcgagggtcactgaggcacagggcactactagacctctgatccctgtgcggatgctgcctgccacatgcttcactggatgtgaggtgaggaaagaatgaatatttttttcatcaaactgctgagctttttagcccactgtgatttatagtca

SEQ ID NO: 849029 - DNA, 328 bp, Homo sapiens
gcataaatgagattaaatgtgtgtgcctttcagagtaaatggtgaaaaggmatagagaaaatatatatttctttgtaatgttctctaatacaagtcagaaatcagacctgaaggccaaaaagtgacattatttcttcccctgctgctccccccttagcaccatgattaaagctctaaatttgaaaatgttaccaggggacagtgatattccccagcctcaaaactcaagactcatcatggtggcttagtctggcaattatgtgtattatgcatagatcaccactgtaaggttagatggggaacacagatccatataactcaacaaaga

SEQ ID NO: 849030 - DNA, 637 bp, Homo sapiens
gtgaggcaggcactattatcatcactaccatttaacagaggaagaaacccaggttccagggcctcacaaattgctccaagtcacaaaactctaagcagaggtgctgcaagtcacaaatactctaatcaaatagtatttgatttcagaggccaagctctaaacctctatgaacaattcttttcttatacttttgtactgttcctactagacagatagctaaatcacatatatgaagttgcataaaacatttttaaaagtgagagttcatgaagtatctcaatttagtaacaatatttgctttagataaatatcaaaagtcagatgtatctatttccccaacttgcatatcaatatcgtattttcctttcaaatctatctttttaaagaaacaatcaagaggatacactaaaattagagggcatttcataggattgcccttatttgggacaacattaattaggtttagttccatagtaatctacagaacctttattccattgcccaagctagaagaaacacaagatgaagaactataaaagaagactactatatttttttaaaatcctcttgaagtccmctcctcatattttcttgaacaatttaacaatgtagttttcctacaaattctaaaagttag

SEQ ID NO: 849031 - DNA, 590 bp, Homo sapiens
ctgcagcatttatggagaaaactgggatccgcaaggaacaaagagacggggacagaaatgacaaacctgtgcccttccccttctgtgaggctggggaacgccagaggacagctgaccgggggtcaccggcagagctaaacaggaaacaaatcccgaactggggctagcattcccaaaaggcatgtccaggggctgagcactcctccgtcgggggcctgcggggcgtctttcactgagagtgaaacttataagcatgccggtgtagcccataacctggggagatcaggccaacggggctctcaggtggacgccagttgtgactggcttcattgactgaactcatctcacctgataccgttctaaaggctaactggatgtttaaaaacacgaagtaacttcaaaagcactactgagggcttcatgtacactttggggggtgattacatcttgccttgcttaaatccctaawataccccaaatctcagctcttcctctccaattcctttttccacagcgtctgcgcctgcctacagttccacttcccccacttctgcagcctcccctcctaccctttagccatggctgcctct

SEQ ID NO: 849032 - DNA, 742 bp, Homo sapiens
ataaataacacaaccatatccatatactcatttgtgcataggaaaaatattagaaaaatgttgactcaattactgaggaggaacatgcgcttttgtatacatttgtactctttgaaattccataatgytcatgtatcgcatttgtaaataaaaacaaaaagtaagatgaaaggtgcgtggcacctccctgtaccttttttttttctttgcaacttcctttgaatctacaaatgatttcaaaatacaaagttgaaaaaaaaaaagtaaatcaatacacttttccatctcaatgtttgaatatctgaacactaaagccggtgataggcagactctagaggactgcctagtgctacaagcagtcccagtccatgagatctgagcagtattctcccttcatgctttcagaaggcagagaataagataaaaaatgaaagcactagtgaaggcggagtaataatatactgccatgttgcccctttctaacaaggcaaatcttgccaagcgataggcgggtttcacaaataagcctcctaaagccactcagggaggctggtgcaagttcaacacatgagtaacacagataaacatgaaacccccaagccttgatggaaagcagtgataggtggcctggaatgccctccagtgtgaaagttcttatgaacaaacaaaggccgctgcagatttcttaatgactgacaaagtctcttactgctgggctccttaagggcagggttatctcttt

SEQ ID NO: 849033 - DNA, 594 bp, Homo sapiens
acaagaatgggagcaagaaggaaggatcccctgagtctgggggttgagacaaggccagttccttcccsacggagccaacttcattggaagagagctgctcatgggttcagcctcaaacagaaacattctgggaagctctcagatggttctatgtaattgtttagccaattagaagtgattcagaaggcaaattttgctctaataaacagagcaatttgtgaagggtttttggttctggagaaaaaactctaaaacatcaatattgttactaatgctacagagaaacaatgacccatactctgaatcaacacactaatttgtaaacctcacagactcagccttgaaattcctgttttattgaattgccctctgaaacaaaggttatttttaagcaacgtttagtaaaccaatttaagtgggaatagaactcctgaaatgtcagaggtgggtcactcctgcagtacaaagatagcctagcttaatagttaacgctgttcaccagaatccaactacctgggttctggtcctagctctgcctcacaccagctgtgtgatcttgggcaagttacttaacctctccgagcctctgtttgt

SEQ ID NO: 849034 - DNA, 531 bp, Homo sapiens
ttgttagtattgaaggctccgagcacacagatctgggatcctctgatttggtggataacccttgtgaacaataattctytgaaaaggtatttggaggaaagagactttattcctgtaaacagttttcaaactaggggaatgcagctttcagtgtaaaatgaaggtgctttccagacaacaaaggaggggctgggcttttatagagaaagttcctgccctgttcccactcaggtccacttatgcaaataaaggattcaaacttgcttaatctgattggttgatgcttgctgagttctgatttgttgacacaggtcatagtctattggttggttccggcaacataaacaagaacaggaagctatgaaagtcccaaagttaagcagatgtgggttttctgggaactcaaaaacatgtgtgacttctagtcagcaagttgccgcttggctctaaattgaatttaggccctgttagccagagtgtgaaccttgagagagccggcctttcaaggttcacactcttcacatgggctgg

SEQ ID NO: 849035 - DNA, 437 bp, Homo sapiens
gtggcaggcacctgtgatcccagctattcaggaggctgaggcaggagaatcgctgaacccgggaggcagaggttgcagtgagctgagatcgtgccactgtactccagcctgggtgacagagcaagactaggtctcaaaaaatattagcccggcgtggtggtgggcacctgtaatcctggccacttgagaggctgaggcagaagaatcacttgaacctgggaggtggaggctgcagtgagctgagatcccaccactgcattccagcctgggccacaagagggaaactccatctcaataaataaataaataaataaaagctcctgagggcctcatcctgggattccttcccctcctcagagcctgcggtgaaagcaactgacaaaaccactccctgtggggcttggcamtctgcttccttttcttcctcataaatatct

SEQ ID NO: 849036 - DNA, 499 bp, Homo sapiens
tataataactgttacaatgtctatctctgctaattctgacatctgcattagttctgggttggtttaaactggtaatttttctcctcattttggatcacattttttagcttctttattttacctggtaatttttaattggatgccagacattctgagttacatcttgtttttttgtttaataagatattttatattcctatagttactatattcctcttactgtctgggtctttccagactcttagctgtgtctcctcgattgaggggtctgctggattctgcttgaattactcctccatgtgctgtggcctggaaactctttcaagtccgtaagctggggcggtcataggcttcccgtcatttgttccttatcacgcagggatcactgtcctttgttgcctgttaccaagtgtcctggaaackaccgtttcatatattttgtccattctttttggttgtttcaggcatggaggtaaatctggtttccattactctttct

SEQ ID NO: 849037 - DNA, 542 bp, Homo sapiens
attattaaaaacatgtcttttgcaagtttaactgccttgaaatttccattaaaaagaaaattatgtgttaaacatgatgttagttattataaacaaagtgtaataaaattgggagacatataggtatattagcagatacactgacatatttttagaatgaattcagttcttgcattcttaaaattaacagacatatttatccaacttcatagctaactaaaatctacatgtgacgctgatgagttacagcagggtgatggtgcataaggctaattacatgattcattctacttttgtataagacagctttatgcatgtatgcaacttaaaacatggtcaaaaatagaaatacatacattaattacctgaaggagattcagacaaagacataatgtaataatccattaacaaaggaaactgtctagctcactgaaagcaaggtttctatcttytaaagaacctgaacaagtcactcctgggtagcatccaaaccaaacactttgggttaagaggtggagctacactaaaacatttacaatcca

SEQ ID NO: 849038 - DNA, 618 bp, Homo sapiens
gatgttgatagtgggggaggctgtggagggagcaggcagtgggtgaatgggaaccctcagtactttctgttcaattttactgggaactcaaaactgctctaaataataaagtctattaagaaaaaaaaaaaaagatgcagctcaggtcctaccctcttctgatatgccaatccatagaaatctctgctttttcttaactctaaaagaatttgctgacatttgatccttaatcgtataatgctttaaactgtaagagaaatccccgtcttatctccccaactagaagctcccagggatgacattttatagcttttgacagaccccacaatgcctagtaaattacaaaaaagaaaaagagaaatgaaaaatttcaattaagcaaggattgttttacttcaggaaaatattgttactgtgcttgtttcattcccagagtcttgaaagcaacgcgcacacagctaatgctctgtcttcagggcccgtcttccttgttgtcccctgggttcacgtgttatttgaatactgtggttagagtcacgtcttctctctgttttacgatacaaycacactagtccaggacaccgccgtgtctcttagattatccccacagcctccatc

SEQ ID NO: 849039 - DNA, 502 bp, Homo sapiens
gcaaaaacataccaaattgcaaagaccatcaatgctatgaagaaactgcatcaactaacaggcaaaataaccagctagcatcataatgacaagatcaaattcacaygtaacaatattaaccttaactgtaaatgggctaaatgccccaattaaaagacacagactggcaaattggatagagtcaagacccatcagtgtgctgtattcaggagacccatctcatgtgcaaagacacacacaggctcaaaataaagggatggaaaaatatttaccaagcaaatggaaagcaaaaaaggggcagaggttgcaaccctagtctctgataaaacagactttaaaccaacaaagatcaaaagagacaaagaaggccattacataatggtaaagggatcagttcaacaagaagagctgactatcctaaatatatatgcacccaatacaggagcacccagattcataaagcaagtccttagaggcccacaaagagacttagactcccaca

SEQ ID NO: 849040 - DNA, 622 bp, Homo sapiens
aggctcataatcaccagatgcattagctcctaacaagaaagtcatcctgtcttttgaattttgatgtcragcatttacatgtcttctttgctataaaattcctaggtggtatcttcttttagaaagctgtttcatatacattgagaatctgttatttagtgtagctactgcatcaattaagttagacatgtatcttctatatcagcacttactgcttcacctcgcacttttgttatgaagatggcttccttacttaaacctcataaaccaccttcttctggcttccaaattttcttctgcatcttcctcacctctctcagactttgtagaattgaagaaagttaggctctactctaaattaagcttaggtttacgggaatgttatagtggttttgatcttatattcggacaactaaaactttctccatatcattaaaaaggctatttcattttcttatgatttgtgtgttcactaaagtagcattcatttccttcaagaatttttcctttgcattcacaattcagctaattcttcggacaagaggcctagatttcggccgtattggcattcaacatgccctcctcactaagcttaatcacatgtagcatttgatttaaagtg

SEQ ID NO: 849041 - DNA, 564 bp, Homo sapiens
tcctgcacatgaacaatgagtaaacatgtaacatatatctcatgttcactttggggtgggattttaacattaaagcaaagtggaatttggctctctgtctaaaggtgaactataggccacaaaacasagtctttgtaagctggtcaaaactggcttgaggtctgcagttgcttatcaggaaagaatgtatgtaagtcccattctctgtccaattggagttgtagtggtctgggttgtaaatcagatttaggaagacaatttgtctgacagctcctatttttagggagtttggcaagagtgtggtttttcttgtagctgtaggaatttaggaattcggggctgtgcccgccaagccctgaaccctctaccctctgcccatgggtaacttttgtttccttaaccttagtgttcgtcttagtcgataaagggacatctattttagtctctcagatcacactgccatgagctgctggcttgtttgtgaggtaccaattatgtgtgtacacacactctggttgccaggggcttttaatgctccagagtggtctaatggtctaccccatc

SEQ ID NO: 849042 - DNA, 641 bp, Homo sapiens
gtccagagatttcccgtattgctcccgcccctaaacatgtttaacctatcccattatcaacatccgccaccagagtgatacatttgttacaactggtgagcctatactgacgcatcattatcacccaaagtccatagtttacattacggcttattcttgtacattctatggatttggaaaaatgtataatgacatacatccaccagtatagtatcatatagattatttttactgctctaaagatcctctgtgcttcacctatttatccccttccctcctcccaccccaatccctggcaaccactggatcttcttactgtctccatagttttacctttttcagaatgtcatgttgttggaatcatacaatatgtagcctttttatattggcttctttcacttagttatatgcgtttaaggttcttccatgtcttttcatggcttgatagttcatttccttttaggactgaaaaatcttccgttgtatggatatactacagttttggaagcattcacctactgaaggacatcttggttgcttcccaattttggtaattatgagtaaagctgctataaacattyatgtgcagttttttgtgtggacatacactttcagcttttttcactagataccaaggagtg

SEQ ID NO: 849043 - DNA, 641 bp, Homo sapiens
ttgaggttgcaatgagcagagatcacgccactgcaccccagcctgggagacggagtgagactccaactcaaaaaaaagtccgaagatccacatttttccaaattctcacttgaaccawaaaaatcaaactgtatacgttttctttgagtacaaaaatgatatatggtcactgtagagagcttagaaaatatatacaggttcaaagaagaaaatttaaattacccattatgatgcattctctcccagtcttttttttctatgcagatataacttctctatatactgttactcttcccaaccaccaggcaacagacaacacatctcccactgtggcagtaacctaggcatccttagtggaatcatgttccagggatactttttcaatgtctaaattttatagatgtatacttacataaaacaagaccaaatctgctattgagtaatcctttaaagtttcccttaactcctgaattctacgaagacaaagaatgcagattcaagtaaaaatgcttccaatgactagaaatggacctaaatttaacaaggggagaaaccgctcccattggttttatgtactctaagtctgatattatcatatgttctgctccaagtaggccaggtcctttggggtctataacctt

SEQ ID NO: 849044 - DNA, 629 bp, Homo sapiens
tcaaagttcaaaagagttgcagtcatggaaaggttctgtcaggtgggagactgtacatgtttgtaggttatgggggaggactagaggagtgagaaaaagtgaaaatattgagagatacttttgataatcttgaaaagaaagaggtatctttcacctgcttgggagggaagaaaaggttggaaaaccacacagcattttagaggtggaaataagggaagttgagggagcttaattcagcatttcattttctcactaaatgtaatgatgtaaggctagtatattagttttttgccactgcctgaccaaaagtgatggtcccctttgttgtataatgtaaactatcaagcaatcggctatctcatatccataaggcctgcccacatgaaacgggagagcctatacaggacatgtatgccagggacaggaatcttggtagaactgcctactacagccaggtaaggatgagaatcttgaatgtatgatcccacattgctggaaatggttcactccatgaactargagataaggccttggatagggaactagggaccatattgaaaacttaccaagaaatacggagaaccaaatggggaaggtgctgaaagtcataatccctcttgaaacagagg

SEQ ID NO: 849045 - DNA, 599 bp, Homo sapiens
gtgtcacatcccccggtcacagttattgataattggctcaaggagagtcacaggatccagtacaggccaatgaatatcaagagcaacagtttytctggaacttttaggaacaatgctcttttactgtatttgttaaactgatggggtataaggtgtgctatcttgcctctcagtggctaaagccaacagagacaaaagcagagtgaaacaatagtgagaaatatcatccagatgccttgttatagcctgcactgtctggtatagtagccactaggcacatgtggctattgagtacttgagaggtggctagtctaaattgagatgtgctgtaagcataaaattacactgggtttcaaagatttagtatgaataaaagaatgtaaaatttatcattaataattttttatattgattacatgttggaatattttggatatattgggctaaataaaacatagtaaaattaattttatctacttttttcttttttgtatgccaaataaaatatttaaaattatgcatgtgtttcacatttgtggcttgcattgtatttatattgaatagcattggtttgagcacttagatccagccatgcctaa

SEQ ID NO: 849046 - DNA, 599 bp, Homo sapiens
gtgtcacatcccccggtcacagttattgataattggctcaaggagagtcacaggatccagtacaggccaatgaatatcaagagcaacagtttctctggaacttttaggaacaatgctcttttactgtatttgttaaactgatggggtataaggtgtgctatcttgcctctcagtggctaaagccaacagagacaaaagcagagtgaaacaatagtgagaaatatcatccagatgccttgttatagcctgcactgtctggtatagtagccactaggcacatgtggctattgagtacttgagaggtggctagtctaaattgagatgtgctgtaagcataaaattacactgggtttcaaagatttagtatgaataaaagaatgtaaaatttatcattaataattttttatattgattacatgttggaatattttggatatattgggctaaataaaacatagtaaaattaattttatctacttttttcttttttstatgccaaataaaatatttaaaattatgcatgtgtttcacatttgtggcttgcattgtatttatattgaatagcattggtttgagcacttagatccagccatgcctaa

SEQ ID NO: 849047 - DNA, 556 bp, Homo sapiens
aaaattaaataaacagaatatttattataacataatgaaataaattatattaaaaacagacaatactcaaaacttatcacttcctaattattgtagtgaatcctactattatctatcttcttgaggttctttacatctatcgtgtctgtatcacagaaatattatataatggtgttccatatatttatttataaataaataaattaaataaaacaaaaccaggtattattccggctgtcaaaaaacatttgcctctaaactttctttttttttttttgagacagagtctcgctctgtcacctaggctggagtgcagtggcacgatctcggctcactgcaacctctgcctcccaggttcaagcgattctcctgcctcagcctccccagtagctgggatcacaggcgcatgccatcacgcccagctaattttttgtatttttagtagaaatggggtttcaccgtrttagccaggatggcctccatctcctaaccttgtgatctgcccgccttgggctcccaaagtgctgggattacaggtgtaagccactgcgcccag

SEQ ID NO: 849048 - DNA, 629 bp, Homo sapiens
agtctgttatgggtcagattaggtagtaaggagttctccattggagctattcttttttttttttctttttttttgagacagagtctcgctctgtcacccaggctggggtgcartggcacgaccttggctcactacagcctctcccctcccgggttcaagtgattcttctgccccagcctcccaagtagctgggattacaggtgagcgccaccatgcctggctaatttttatatttttagtagagatagggtttcaccgtattggctaggctggtctcgatctcctgaccttgtgatccgcttgcctcggcctcccaaagtgctgaagcaatttcttttttttttttttttttgagacagagtctagctctgtcgcccaggctggggtgcagtggagtgatctcggctcactgcaacttccgcctcccaggtttaagcgattctcctgcctcagcctcctgagtagctgggattacaggcgtatgccaccacgcccagctaatttttgtatttttagtagagacagggtttcaccatgttggtcaggctggtctcgaactcctgacctcgtgatccgcccgccttggcctccgaaagtgctgggattacaggcgtgagccactgcgcctg

SEQ ID NO: 849049 - DNA, 605 bp, Homo sapiens
ccgtgggctacctgcagtggcgatggggtatccagtcagccatgaacactagcatcgtccgagacactaaaascagccacttcactgtggccctgcaggtgagccgagcagccatcatctcctgcagacagagctctgggaggacccctcctccaagcactcagtgctccccttaaatcctgcgtcctgatcaccactaagtctaagcccatacagggccctgaggggcaggctctcggtgctcacactcgagtgacctggtggaaccttcgagtatgaaatgcatttgccttcaggcgcctggggcagctttgttggatcatcttaaagcagaacaacatcttaatgtctggtgggagccacccacggaattgggggcgggcagatgaagccccatagcagaatcatgccctcggatgcccctgtggccacaccagggctggtacatgagaagccccacacgggccactgctccttggctctcaccagccgctgccacctaggagcataggctcagtgtcaccagagttttttatttcttgtgagaagctagaaaactgggttttcagtgaagtctcccactttttaactactggctgctaata

SEQ ID NO: 849050 - DNA, 608 bp, Homo sapiens
gttcaagaccagcctggccaacatggtgaaatgtcatctctactaaagataaaaaaactggctgggtatggtggcacaagcctgtaatcccagctactcgggaggctgaggcaggagaattgcttgaaccctggaagcggaagttgcagtgagctgagatcgcatcgctgcactccagtctaggtgacaaagcaagactctgtctcaaaaaaataaaatattaaaataaaataaaatatcgctgggcgcagtggctcacgccactttgggaggccaagacaggcagatcacgaggtcaggagaacaagaccatcctggctaatactgtgaaacccagtctgtactaaaaatacaaaaaaattagccgggcgtggtggcggatgcctgtagtcccagctactcgggagactgaggcagaagaatggcatgaacccatgaggcggagcttgcagtgagctgagattgcaccattgcactccagcctggatgacagagtgagactccatctcaaaaaaaaaaaaatggccaggcgcagtggctcacgcytctaattccagcactttgggaggccaaggcaggcggatcatgaggtcaggagatcaagacca

SEQ ID NO: 849051 - DNA, 591 bp, Homo sapiens
tgcaatataacaagacccccatctctacaaaatatttacaaattagctgagcacagtggcacatacctgtagtccaggctacttgggaggcagacgaaggagggttscccgagcccaggagttcaaggttgcagtgagccgtgattgcaccactgcactccagctgggcaacagagcaaggtcctgtcttaaacaaaaacagaaggacacttttgatgacttagaggtcaacctgtcagctggaccccccacagaggacctcagctcagaggggtttgcaggctgtatcccgtgcgtgatattgccgcctgaaacgcgggtgcatatttctctctgttttcgtcaataagagcagattaggtagggatttccagtagattgatgtatctaccaagcaaaaaggcctagtgaggaaaagcccaggttagaaggtacagctgccagcaggaggcaggacacagagtgagccgtttgacagtgctcccttttctcttctgtaaaatgaggacgtctgtcctgactactgtgccaagttgtgaaaagactgaaaacacatgaaatagatgttaatttattagggaaagataatct

SEQ ID NO: 849052 - DNA, 562 bp, Homo sapiens
ttagggtggggaaaagatcccaccctggtaaatttgtggtcagaccggttctctgctcttgaacactgttttctgttgttttaagatgtttatcaagacaatatgtgcacagctgaacatagagcctcatcagtaattctaattttgccctttgccttgtgatctttgcttcgccctttgccttgtgatcttcattgccttttaaagcatatgatctttgtgacctactccctgttcatacaccccctccccttttaaagtccttaataaaaacctgctggttttgcggctcaggcggacatcacagacctaccgataggtgacgtcacccccggaggcccagctgtaaaattcctctctttgtacactttctctttatttctcagacctgccgacacttagggaaaatagaaagaatgtacgttgaaatattgggggctggttcccccaatatcagtcccgctgttgaacccatttctccacagttgagaatatccacatgtccaaagcctatstccccctgcccagaatgaggctggaccagctctgtgaatttttactt

SEQ ID NO: 849053 - DNA, 637 bp, Homo sapiens
taagtttttagaaatagcctacataatgaagattatgtattatatagtcacaaatttttattttagatttcacaatgtacacttgtctcaagtaagtctatttaactagaatttttaaagacttgygattttgctaaatgtatcatcattagaaaaagttttctggatgtgtatatgagcagggtttgattattctgacatcagaaagccaacactagattccacagcaaggacactggaatttaaaaatctggaatactttaacagtagactttactcaaatatctaaaagacgtatcagactcactcagtaaaaaatatactatacttactacaaatacattatcttctaagcccattcttatttttaaaaatatgtacaactagactaatgatgccaaatacttacacaagttcatgcattttaggtgtgctttattcaaaatatattattaaaaaatgtcaatacctagttacttcaaaaaataccttcaaaatgtttaccattcaaaacatataaaaagcactgactttattgtactgcaatataaattcttcacataaagattttatgtaaaacactctgcagttagaaacaatcttatttacattttctataaaagtattttgaagtttt

SEQ ID NO: 849054 - DNA, 556 bp, Homo sapiens
acagtgtccccactatacctcattgtctcagactgttcagactgctaaaacaaaataccttagactggataatttataaataacaaaattactgttcacagttctggagactgagaagtccaagatcaaggcacccgcagatgcaacatgtagtaagtgcacggtctctgcttaatagatggcttcttgttgctgtgttttcacatagtggaagcgggaaggcaactcccttcaacctcttttattaggacactaatcccattcacaagtggagagtcctcatgatttaatcacttcccaaaaggccccaccttttaatattatcatattgggtattaggttccaaactatgaatttgtaagagatatcaacattcagaccatagcactaatggattatgagcagttagcccagtggattccwatgttctgaacaaacacgcaaagactcaaatagaagagcatcttcctcctaggctctaaggtacacatctgaagctggaccagaagcatgattaagagtcagcttgtttagtggcaaagctaaccctgagcag

SEQ ID NO: 849055 - DNA, 598 bp, Homo sapiens
agatatgtataaaataaattttctgttttaaattgagaaaataagtcattgaagaatgaccggaagttagcccactggggcctcccctgtgcctggggtaatatggaattactaccttgggargtagagcaggtctcagcacaatcgcggaagtgcatttgtccttggagctgggtaatggcttccatggcatgtttaggatgtgactgataccattccagctgccaccacccttcacatctgtcttatgagagtttctttagtatcagtcctgggttggggtttcttctctcgtcttccttggtttcagctagctttttgttcagagatgactggaactaatttcagccacacccacattttcttgttgatgatggatgaagagtaaacatctggcagaattcaatgtggtgctcacatctttgaggcctctggctccctccctctagggcaccttgttgttcaaggatgtccagtttccatagcaagtgtcctgagttgtgactctcaaagatcctatgccagtgtggcactcccaaggcgtcctgagaaacccaaaaggacatctcccaaaaatctctgaattcgctgaattcaa

SEQ ID NO: 849056 - DNA, 577 bp, Homo sapiens
gcctcaatttacccaaaaaggtgctatgttatgtttcaaagctaaggtgatttttatttccttgaatttttataaatacatatatgcaataaagcaatttaggaaatgtggggcctaatagataaacaaataacacttttcaaaggggcctggaatcaatgccataggctttctttcctttgtactgacttccttcattccttagccccattttcctagcaaatgaaggaagagactggaaataagtcttgggggatgagaacacaaatgcctaggaggggatcacatgtgattttttcaggaataaggagtctagatcaactagagccagtcagtgacacagcaggtgtcttgcaatcagatgcagcaaccctgagatgtgccagtttacacctgttctctagggttatctctcaagtttcccagaggaaaaacgagctatctttctagcctatgaacactccatacagccgtgctactcaacctgcagtgtggtaccaggagcaagggtatcascagggagtgtgttaaaaatgaacaatctcagtcgccacgcccggccggctgaatcagaaac

SEQ ID NO: 849057 - DNA, 631 bp, Homo sapiens
tagaatcatttccccaagagtggctgaccaaagtattaagttgtaggaaaagggcacaaggcatttgatgtcatggaaggcagtctatttgattagtaagaagtgggctctggtgctctatgtggacagagaggaggggtggctactttcctgaccacatactccccaactctacaggtcagtgtgtcgtctggcctcatcccatgctcaaagcccccaaagggccctgactctggtagttaagtggagaaacaggttaggtaaggaagcaagtcccagtaaacagggtttggtgctccttctgccctgtttttctggaggaaatagccacttatggctgagggtcttctcttccaaccaccttgtccatagcaggaccaaaatgtagacagtgattagaacattgtatatgtatatggtggaagacccagaaggttctttccctggctccaaaagcagtggcaatcccatcaaagccttggagaagatgatcacttcacaagcagggtgttttttaacttgtattttaggttcggggtacatgtgcaggtatgttatttgggtaaacttgtgtcacacgggtttgttgtacagattatttcatcacccagstattaagcctagtacccac

SEQ ID NO: 849058 - DNA, 631 bp, Homo sapiens; identical to SEQ ID NO: 820929

SEQ ID NO: 849059 - DNA, 631 bp, Homo sapiens; identical to SEQ ID NO: 820930

SEQ ID NO: 849060 - DNA, 539 bp, Homo sapiens
aacataacttttggcttcacagtttttyttcttttccgatcacagtttgtttaaaatgtaccactgaatatgagcacaggagcccagctataggtatgtcaaccttagaaataaagtttctatggcctatctcattaattcattgtacaagtttgttgttttttttttcttgccaacagcactaaaagtgacatcatttaaactgtaggggtttcactgctttgtttcatctgagtgatatttgctctagtgctgctaatacctgacttttgctgtataaacagtttcaatgtttctgtgaggccacacaacatgctttataatgacacggctgactaaagctgccttttattctgctaacacccttcaaatactgttgacaatatcgcctctcaagtgtttcctcccacaaaatctgctgcttatagcacaggcaccaaaggcctgcttttccaattgcactgtactggcatcaggttaactagaaagcacaaaacaaacggtgattaaaaaaaataagaacagtatacattctatgt

SEQ ID NO: 849061 - DNA, 539 bp, Homo sapiens
aacataacttttggcttcacagtttttcttcttttccgatcacagtttgtttaaaatgtaccactgaatatgagcacaggagcccagctataggtatgtcaaccttagaaataaagtttctatggcctatctcattaattcattgtacaagtttgttgttttttttttcttgccaacagcactaaaagtgacatcatttaaactgtaggggtttcactgctttgtttcatctgagtgatatttgctctagtgctgctaatacctgacttttgctgtataaacagtttcaatgtttctgtgaggccacacaacatgctttataatgacacggctgactaaagctgccttttattctgctaacacccttcaaatactgttgacaatatcgcctctcaagtgtttcctcccacaaaatctgctgcttatagcacaggcaccaaagkcctgcttttccaattgcactgtactggcatcaggttaactagaaagcacaaaacaaacggtgattaaaaaaaataagaacagtatacattctatgt

SEQ ID NO: 849062 - DNA, 479 bp, Homo sapiens
accttattttaagagttatagtttttacagtcagtttctacttattggaagtartactggttttcaatttccaatagtcatatgaaatttattttaacataaatgtatttaggtaaataaatttaaattgatggaagtgaagacagtattgaggtatgtaaaaagttgtgaagatggtacttgagtgcccaagtatggaaaatattcctctggaaacactagactatggttgacaaagagctaagggaggctaggctatgctgttttgacaaacagcccctgaatccaggggcttaggaaacatgattgatttatggctcacattatatatccaaatgaccagaaggaccagtggtggaggtgggggtgtctctgttccatgtagtcattcagcaaccaggctgacagaggtgccactattttatgtcactcaatcaaagcctggaggattaagcagggaccagatccatgaaaggtta

SEQ ID NO: 849063 - DNA, 647 bp, Homo sapiens
ggtgttctttttgcaattaaaataattatattttataatttaataaaaacaaattttagaggatacaattcatcctaacaacttaggatgttttggaaagttttgttttcttgccattgaaaagtactataaaagtaatagagcgggaaaaagattcatgtttgattcaggtagggcaacagagatatatacatagaatttaaaggaaatggttccctttcaactgtctattccattcccctgcccatctataattacattattgttaacagtttatcatgtgttattttagattgttacacaattctgtgtctatttatctgtacacaaacttaaaactatttatgagcccatagtatacacattaccctgtggttatttacttaatcttgaatatctttgagttgtctttttatggcaatttcatttgatctaccactatatctagtcataaaaaggttttcaaaatattcttcacacaattaactacactggtaatatttaaaattttttttaaagctgaggggcaaaacatayctcactattgcttctatttgcatttactcaattacaagtgaggttgaaatcttctgttgattggttcttttgccatgtctgtgtactacctgtattattgttcttaaaac

SEQ ID NO: 849064 - DNA, 438 bp, Homo sapiens
gaggggcaaaacatacctcactattgcttctatttgcatttactcaattacaagtgaggttgaaatcttctgttgattggttcttttgccatgtctgtgtactacctgtwttattgttcttaaaacatgtttttcaaaatcaattttcaaaactctttagcttcatgctaattaaacatagtgatgaaattgatgtttataaagtcttaaaaaatgtataattattaaaatgttaccaaaattatctttatagttataattaatgtttattgaatacttctgactgtgtacaatctctgttctaagtgaattatttaattcttaacactgaagagtggatatggttattctcatttgtagaaaaagaaaacaaggcccagaaaggttaagtaacttgatcatgttcatgtgagagtagctgccaaagtttgagccagg

SEQ ID NO: 849065 - DNA, 620 bp, Homo sapiens
gatcacatatttctttagaagccgtgatgagaggaaaaaagatgatcgttctcgcaaaagagattatgatcgaaaccctcctcgaagagattcatacagagaccggtacaatagaagacgagggcggagtcgcagttatagcaggagtcgaagtcgaagttggagtaaagagaggcttcgtgagagggacagagatagaagcaggactagaagcagaagcagaacacgaagcaggggtaaataatatattttggttatctttttatgaaaaactccatgtttaaatgtttttaaaaattgcttaacattttgtcagtgttgtcttcatttttttctattatgatgtattctgtggtccaagagaatgctttttaaaaattcctttaaaagttttattccttgcaaattaaaatcacagttaccactacacattcaacaggatagccacgatgatacagactgattctattccatgttggtgagaaagtagataagctgaaactctttggaaaacattttggcagtatgtaaaaatattaaaactacacttagcatatgggtcygctattctacttcttactgtttacctggaagaaatgaaagtgtatgtccacacaggt

SEQ ID NO: 849066 - DNA, 632 bp, Homo sapiens
ctcattaatctgagaatataaaagattttacaagatcaaagaatattctttcctttttaaatcaatatgcttttattttaaactttttcttaagtaattttacaattgctgaaaagtaaaagagcctcartgaattcctgaataccctttacctgttttcctgaatgttcctaaaaatacctagcaatgatattaccaaagtgataaagtattgctgttaatataccattaattaaactatagactttatttggatttcgccagattccccactacagtttttttttttttttttctaatccagtatccaactcaggatattatattgtgcttagttgcttgaatacaccgaaaaggtggtggactctagtcttcaccagtctgtgacagtttcttagtctttcactggtttttattaccttgacacttttgaatagcattggttattttgtataactctctttatttagatttgtgctatatttttctcattagactggagtttttgattttgtttttttgaaattcacacagaagaaatatctttctcattaaatgatataagaaggagcatgatgtcattaattttaatagtggtgctaacttgatcacatagctaagaggatgttatg

SEQ ID NO: 849067 - DNA, 594 bp, Homo sapiens
attaaggctgagttccagaaaagacatcccaattatttgctcccatacatagtctagagagattgagaaggagatagagattttggcaaaacctgaaagcaacataaattctgtctctgagyctaggcaaacattttcctccttttgttaaacaatactgaaaccaaacttaaataatttagcttctcactccaggaaattcttgctcagaaagacaagactaatacagagcttacttctcagaactaacattctgctcaatgattctttcaagaccctcaccttgctgtgccaagctcttcaacattattatattataatctctgtcaaattaaaaccagtgcctttcttcacgaagtccactccaaaatcactctggccagtccagaaaagcctttcctaatttccctgttttgatatactgccaagattctgtgaagggggtgctgtccctctctctagtaggtttaaataccatagctttgcttgactatctttttttttttcttctggtgagcatttgaggaaagacactggtaaatttacaggaccctaagctttgcaatgagattgtgctctttcccaaatgaggac

SEQ ID NO: 849068 - DNA, 415 bp, Homo sapiens
aagtgctgttttttattctctttctattccaaattatctgcatctcctgagtcaagttcttgctggaccaggaagggaggcgcgtgagaatgagggatggggtctgtagggatctgagcacatgcacgctatttcagtttctgccctgaggcccagcagcccacagactagtgtcagagagctcacggaggaagatcagaaagcagcagaatattctcaagtacacagaaataattttgctggatccatctggaatcagcagaaagcaaggcattatttaaattagtaagcacatactgcctgcttctgatagaaagaattcaagtaaagcaggrttcagatataattatttctcaatctccaggggtataattgtggccactgtgccaagacataagtgggaaaaactacttca

SEQ ID NO: 849069 - DNA, 591 bp, Homo sapiens
tggttttttcatttttttttgcataattattgcataattattgttttcacatgcactaattaaatctttaattttgtgcattccaatttttcttttgctagatgtttttataatacttataatattttacactattgttttactcatttatttaactaaaacataattatttcactttacttttttatgttttttcaatcaaggtgtttaataccatattttaaccatattctcctgtcagttttataatcaattttgttttttgctttatattttatgtatttttatctccattttattttctatttttatctaaagattttctgagtacatttctttatttccaggtagtatttatattatttttaaaattttgatttcatggtgttataatatgacatacaaaacctctgctttaaaaagttaatgttttgttattattaattttttcttttctcagattcatctaatgatcttgctttttgtttcacttaaaattctgaagttttcccaagagaattttyatacactctctctaccaagcaatttttgtgacaatattactcaaatgtaataactaaaaatgcatgc

SEQ ID NO: 849070 - DNA, 591 bp, Homo sapiens
tggttttttcatttttttttgcataattattgcataattattgttttcacatgcactaattaaatctttaattttgtgcattccaatttttcttttgctagatgtttttataatacttataatattttacactattgttttactcatttatttaactaaaacataattatttcactttacttttttatgttttttcaatcaaggtgtttaataccatattttaaccatattctcctgtcagttttataatcaattttgttttttgctttatattttatgtatttttatctccattttattttctatttttatctaaagattttctgagtacatttctttatttccaggtagtatttatattatttttaaaattttgatttcatggtgttataatatgacatacaaaacctctgctttaaaaagttaatgttttgttattattaattttttcttttctcagattcatctaatgatcttgctttttgtttcacttaaaattctgaagttttcccaagagaatttttatacactctctctaccaagcaatttttgtgacaatattacwcaaatgtaataactaaaaatgcatgc

SEQ ID NO: 849071 - DNA, 556 bp, Homo sapiens
aaactgaacggtcagtggagactaatgcaagatcttagactcatcaatgaggcagtaattcctctatatccagttgtacccaacccctatacaytgctctctcaaataccagaggaagcagaatggttcactgttttggacctcaaggatgccttcttctgtattcccctgcactctgactcccagtttctctttgcctttgaggatcccacagaccacacgtccaacttacgtggatggtcttgccccaacggtttagggatagccctcacctgtttggtcaggccctggcccaagatcttggtcacttctcaagtccaggcactctggtccttcagtatgtggatgacttacttttggctaccagttcggaagccttgtgccagcaggctactgtagatctcttgaactttttagctgatcaagggtacaaggtgtctaggtcaaaggccaagctttgcctacatcagatcaaatatctaggcctaatctttgccaaagggaccagggccctcagcaaggaacgaatacagcctatactggcttatcctcaccc

SEQ ID NO: 849072 - DNA, 658 bp, Homo sapiens
ccagaggatggggaaccaatcgagcatgactgccaacaaattayagtcgagacttatgccacccgagatgatctctgagacatccccttagctaatcctgaccttaacctatataccgatggaagttcatttgtggagaatgggatatgaagggaaggttatgccatagttagtgatgtaactgtacttgaaagtaagcctcttcccccagggaccagcaccgagttagcagaactagtggcacttacccgagccttagaactgggaaagggaaaaagaaaaaatgtgtatacagatagcaagtatgcttatctaatcctacatgcccatgctgcaatatggaaagaaagggagttcctaacctctgggggaacccctgttaaataccacaaggaaattatggagttattgcacacagtgcaaaaacccaaggaggtggcagtcttacactgctgaagccatcaaaaaggggaaggagaggggagaacagtagcataagcagctagcagagacagggaaagaccagcagaaaggaaagagagaaagagataggaagtcagagaaaaagaaagagaggaagaaacagacaaaaagaaggagacagagaggaagagacagagagacagaaacagagagacaaaagtcaaagaaggagaaa

SEQ ID NO: 849073 - DNA, 561 bp, Homo sapiens
aaagaaaaaacagtgtaccctattcctttaaaagccaggataaatttaaaacctataattgataattgaaggtcttctccatgaccctataacactccaataccacyttgttgtcagcgcaaacaagggcatagccaaaaagcactgaggccactgacaacccgtagccttcctatcaaatatccttaacccagcaggtttcctaacaggggatctaaatttgaaggtctgaccagacctagtaggaactcccttcaggagaggatgatagatggttcctcctgagcgattatggaaaaagacacaatgggcattcagtaagtgataaggaaattcttatagaagcagagttaggaaaattgcctaataattggtctgctcaaatgtgcgagttgtttgcactcagccaaatcttaaagtacttacagaatcaggagggagacatctataccaattctaagttaatatggactgaacaaggttttattaatagcaaagaaaaattaaaatcccaaacttacaaggttttcaactaaagtaaagtttgctaaaagttaacag

SEQ ID NO: 849074 - DNA, 563 bp, Homo sapiens
atcgaattaaactctgaccagcaagtctcggggcgataatccaggctcaagcatcagagagcttgcctcwtgacctgttgaatcataacatctgctgtgagtatctgctgttaactctggggtaagtcagcatcacatcaggttctacaccaatcccatccatgccaggagagaagcagctgctatggtgcgtaacagggcaccggatgattattatttcagatgaaatagacatctaatatactgcttaaacaattgcattccggcctggaaaatctacctgctgatttcactgccaggcaaggcgtcctcagaggcagctgccgctttccacaatagcactggtgatttcatgaaattgcatctcctgattttattcccacttaaacttcacttgctcatgccagtgacggtggagagacaattgtcgcctcctaccccaccttcagcttagtcatctcaagtgatttacttgtatatgcgtaatcaccctcttctcaaaatgaaataaaataggaaatctggattctattgttgaagtgtctccttactacctcgccctt

SEQ ID NO: 849075 - DNA, 532 bp, Homo sapiens
actctgttgcccaggctggagtggtaccatcatggctcattgcagcctccacctcccaggctcaggtgatcctcccgcctcaggctcttgagtagctgggaccacagatgtgtgccactatgcctggctaatttttgtattttttgtagacatgggttttcaccatgttgcccaggctggtcttgaactcctgggctcaagcaatctaccagcctcagcctcccaaagtgctggaattacaggcatgagctactgcacccagctgacagtatattttaaaaatcatttctatgtcttctctattcaattggcaggtcaacaatgtagcgtcattaacatcaacaggtggaatccagcccctgtactagtgtaggacaggtgcgctggatatcctgtctttaagcccaggaggactagattggattgcatctttaagcatctttcttgctgcagaaagggaagtggataggggaaagttaggggaggyggggagataaattaggtggcccttaaaggagcccagatgtcctaa

SEQ ID NO: 849076 - DNA, 668 bp, Homo sapiens
ttgttgctgtgtacctgagctattgtgtgttgtaacagtgcaaacaaggtcaagagaagcttccctttctatgtatgtgtgcgtgtgtctggggctgtgcagtgtcaagctggcctggagctccagcagaattgttcagctgcaaagccgttccttacactaacactccactcactagaaataaaataaactgaaattaatacaacctcatgtttttgtatataaaatagataatatttgttgataataccccatggcaaaaataccatatggtataaaatagtaccatcaatttgaacttcagctgacagtaagtttcaagtgccataagccttccattcaatcatctcatatctgggaacttatgcaaaagaaaaaagtcaaaaagaagaaacagctacatcctaaagacattcattcctagattatttcaaacagcacaaaatggaagcaacaagaagttccaagaagagaaggatttgtaataaaactaaagcacattggaaatgatattgtaaccatccaataagttcatttttgcccacggcccggatagagccaatttgtcaagacaggggaactgcaatagagaaagagtttaattcrtgcagagccatctgaatgggaaaccagggttttattattattcaaatcagtctccccaaaaa

SEQ ID NO: 849077 - DNA, 531 bp, Homo sapiens
aggagctcccttgtggccccgccggctcttctgcgtgagacaggtgtcaaatgaagaaggccagctctgggttctaaacaggcccgaggcgaggatgccgccggctgccggcaaatcgccccaccgcacatcacagagtttttccttgacctgtgagttttagagtcagatgtaaagccgtcaggccacacctccttacagacaaggagagactgcgaaggactgggggaggagcagggctaggattccctctcctgtgtctgggcttagtaatcgctaagcgactgcgcgtccttttctttctgtgaatttgggggagacacacaggcgtggtctgggcaaaggctctctctcctgttggtcagggcctactcgcaagtggtgcccccttctgagcagggctcagggtgtcatctycctagcacgtctagggtggtcgctggagctgctgaggagcagggagggcccactcagccccacctcaaaaagacatcaactgtctcccaccgaaggggtgccggaggggaaaag

SEQ ID NO: 849078 - DNA, 643 bp, Homo sapiens
ttatatcacacacacggatctgggaaaataaaaacaaaaccacaatacaataggcatgartggtacagaagatagtatatgctcaggaccatgtgacacgtgaagaaatccatcatccacccagagcacagactttctggcttaagcagagcagttggaaacattagattttaggaacagacatgacctcatttgccatagaaagaccgaggcttacaatgaattcagccataaataagcttccatttagaatagtttctaaacaggtactttcttttttagaaagaagctatctaaagcaaaggggaaatgttttggatgtctacagaaacattttaagagtatgaaaatcatgcaaagactaccagaaaagggcctgttttttatccctttgaattatattcaagcatgacaaaggttggcagatgaagtgagtgcatcaagatcatttgatcactcaataacttaatcaaatgtttcttgcagtgtgacactatcatctacataccagcctttgcttaggagaatttggttattaggaatcgtaaaacagtgctggaacagtaccattattctcctgagtcctctccacctgcacacacacacacacacacacacacacacacacacacacacacacgga

SEQ ID NO: 849079 - DNA, 643 bp, Homo sapiens
ttatatcacacacacggatctgggaaaataaaaacaaaaccacaatacaataggcatgagtggtacagaagatagtatatgctcaggaccatgtgacacgtgaagaaatccatcatccacccagagcacagactttctggcttaagcagagcagttggaaacattagattttaggaacagacatgacctcatttgccatagaaagaccgaggcttacaatgaattcagccataaataagcttccatttagaatagtttctaaacaggtactttcttttttagaaagaagctatctaaagcaaaggggaaatgttttggatgtctacagaaacattttaagagtatgaaaatcatgcaaagactaccagaaaagggcctgttttttatccctttgaattatattcaagcatgacaaaggttggcagatgaagtgagtgcatcaagatcatttgatcactcaataacttaatcaaatgtttcttgcagtgtgacactatcatctacataccagcctttgcttaggagaatttggttattaggaatcgtaaaacagtgctggaacagtaccattattctcctgagtcctcyccacctgcacacacacacacacacacacacacacacacacacacacacacacgga

SEQ ID NO: 849080 - DNA, 643 bp, Homo sapiens
ttatatcacacacacggatctgggaaaataaaaacaaaaccacaatacaataggcatgagtggtacagaagatagtatatgctcaggaccatgtgacacgtgaagaaatccatcatccacccagagcacagactttctggcttaagcagagcagttggaaacattagattttaggaacagacatgacctcatttgccatagaaagaccgaggcttacaatgaattcagccataaataagcttccatttagaatagtttctaaacaggtactttcttttttagaaagaagctatctaaagcaaaggggaaatgttttggatgtctacagaaacattttaagagtatgaaaatcatgcaaagactaccagaaaagggcctgttttttatccctttgaattatattcaagcatgacaaaggttggcagatgaagtgagtgcatcaagatcatttgatcactcaataacttaatcaaatgtttcttgcagtgtgacactatcatctacataccagcctttgcttaggagaatttggttattaggaatcgtaaaacagtgctggaacagtaccattattctcctgagtcctctccacctgcrcacacacacacacacacacacacacacacacacacacacacacgga

SEQ ID NO: 849081 - DNA, 643 bp, Homo sapiens
ttatatcacacacacggatctgggaaaataaaaacaaaaccacaatacaataggcatgagtggtacagaagatagtatatgctcaggaccatgtgacacgtgaagaaatccatcatccacccagagcacagactttctggcttaagcagagcagttggaaacattagattttaggaacagacatgacctcatttgccatagaaagaccgaggcttacaatgaattcagccataaataagcttccatttagaatagtttctaaacaggtactttcttttttagaaagaagctatctaaagcaaaggggaaatgttttggatgtctacagaaacattttaagagtatgaaaatcatgcaaagactaccagaaaagggcctgttttttatccctttgaattatattcaagcatgacaaaggttggcagatgaagtgagtgcatcaagatcatttgatcactcaataacttaatcaaatgtttcttgcagtgtgacactatcatctacataccagcctttgcttaggagaatttggttattaggaatcgtaaaacagtgctggaacagtaccattattctcctgagtcctctccacctgcacrcacacacacacacacacacacacacacacacacacacacacgga

SEQ ID NO: 849082 - DNA, 603 bp, Homo sapiens
taagtctcatgacatctgatggtcttataaagaggagtttcgctgcacaagctctctcttccctgctgccacgtaagaagttcttttgctcctccttcaccttctgccatgattgtgaggcctccccagccatgtggaactgcgagtccattaaacctcttttctttatttttaaattttatttatttatttatttgtttgagatggagtcttgctctgtcgcccaggctggagtgcagtggcgtgatctcagcttactgcaatctgcaaactctatctcccgggttcaagcaattttcttgcctcagcctcctgattagctggaaccgcaagcacatgcaaccatgcctggctaatttttgtatttttttttttttttagtagagatggggtttcaccatgttgcccaggctggtctcaaactcctgacctcgggtgatctgcccacctcggcaaccaaagtgctgggattacaggcatgagccaccgcacccaaccatgttaaacttcttttcattataaattacccagtcttgggtatgwtcttatcagcagtgtgaaaatggattaatacaggaggaatctaaaaattttgcccagaca

SEQ ID NO: 849083 - DNA, 589 bp, Homo sapiens
ccaaactaccctttagataaagagcattaggactgtagctgaagctgacagttcaagaaggcaatgtggttttcctgggatcacacagtgagccaggaactactggttatgaaattaatggtggaattcttcaatttcaattgttctttagcattttgatctatccttgctggccaaagtacatataaaaaaataaagggcaagagaaatcttattggttgctgtactgtattagccatgagattatattggccaagtgtattcaaatttgatacagggcaactgtggggaagataatattttgttatctatggcacatggtggtgagtgttgaattctaggaaccaaactgttgcccagggagaggcgtaggtctggagcccctctgcagctgtcttggcctgtttctaaaattaagtgcttctgcagtgtaagagttgttgggatggccgttcctcagaaggctgtgtcttacatgctcattttacaaacattttgggcatctcctctgggcgatgaactgggctaggtgctgggaatgcarcaacgaacaggtcctggtctcagtgcttacagtgctgacggagct

SEQ ID NO: 849084 - DNA, 599 bp, Homo sapiens
  misc_feature 234, 235, 236, 237, 238, 239, 240, 241, 242, 243, 244, 245,246, 247, 248, 249, 250, 251, 252, 253, 254, 255, 256, 257,258, 259, 260, 261, 262, 263, 264, 265, 266, 267, 268, 269,270, 271, 272, 273, 274, 275, 276, 277, 278, 279, 280: n = A,T,C or G
  misc_feature 281, 282, 283, 284, 285, 286, 287, 288, 289, 290, 291, 292,293, 294, 295, 296, 297, 298, 299, 300, 301, 302, 303, 304,305, 306, 307, 308, 309, 310, 311, 312, 313, 314, 315, 316,317, 318, 319, 320, 321, 322, 323, 324, 325, 326, 327: n = A,T,C or G
  misc_feature 328, 329, 330, 331, 332, 333: n = A,T,C or G
accccctgcagtcgtcaaagggtggctcattgctttctgtggcttttactcctgagtgaagctgcctttcttattaccctcgttgtcagttcacagtcacctgtgctgtgatgtggtttggaagtttgaagttaccccaagctatgttccccttttttgcaaacctccaaccccctcattgttctcctaaagaggattgtcccccaccccacccttttggagagtttctaggannnnnnnnnnnnnnnnnnnnnnnnnnnnnnnnnnnnnnnnnnnnnnnnnnnnnnnnnnnnnnnnnnnnnnnnnnnnnnnnnnnnnnnnnnnnnnnnnnnntgtcatgcttgttcggtggcatttgcaccactggagatgattttagcacagggtgtcagcccagcagtaaacatcattgaaatagaagtcaggtcatgactcccttttcagttcttttctttttgttttttttttttcttgggggatatgacctttaytgagcttatccaccacagtggaaataatgtctgtacaaagccaaatgtttgttactataacttctgcattacaattaaaatccaaacagttttttaaaaacagtcagc

SEQ ID NO: 849085 - DNA, 598 bp, Homo sapiens
tgtagtcccagctactcaggaggctgaggcaggagaatggcgtgaacccgcgaggcggagcttacagtgagccgagatcgcaccactgcagtccggcctgggctacagagcaagactccrtctcaaaaaaaaaaaaaaaaaaaaaagaaaatataacatatcaaaacttgtaggacaaagcaattctaagagggaaatatataagtactgtactaagtgcatatatttttatagagaaaaaaaccctaaaatcagtaatttaaaattccaccttaagagctagaaataaaaaagagaaaaatataggctgggtgcagcatacctgtaatctgagcactttgggaggccataggtcgcttgaactcaggagttcaagaccagctgagtaacatgacaaaactctgtctctacaaaaactacaaaaattagccaggcatggtggcacacgcctgtggtcccagctactcaggaggctgaggtgggaggatcacttgagcccatgcagtcaaggttgccacgagccaatatcaggccactgtacttcagcctgagtgacagagccagaccctgtctaaaaaaaaaaaaaaagaaaaaaaaa

SEQ ID NO: 849086 - DNA, 492 bp, Homo sapiens
cttttactcagcataatgcctctgagtttcacacaagttattgcaagaatgaatgcttcatttctattatttctgagttacagttcattgcgtggacgtaccacagytggtttatccattcatcccttgaagggcatttggattatttccaggttttgcctattatgaatacagctacagtaaaatgtacatatatcggttttatgagccaaaatatttacttttctagagtaaatgcctaagagtgggactgctgggtcagatggtaattgcgtgtttaattttataaaaatctgctagactattttctggagtgactataccattttgcattcccaccagcaacatatgagggttctaattgatccacatatttgccagcacaggagtgacagtatttttaaatttatccatcccaataggtgtgtagtggtatctcattgtgcctttcccttgcatttccttaatggctaatgctgttgaacatctttt

SEQ ID NO: 849087 - DNA, 565 bp, Homo sapiens
taacaaattaccccaggatttgtggcttaaaacaacaccactttatttatgctcagatactgggggccaggaattcagacagtgagagtaacttgtctctgctccacaacatctggaaccttgactgggaagactcaaatgcggggcgacctgaaggcagggctggaatcacctgaaggctccttcacgcccatgtgtcacccaggcctggcaggactcgagggcctggactgctgaccccaggcaaccaggtggcctctctcactggctgaactccatgtgtggccgctcgagtctctgagtgagaaggtggcagtgggcaaggacaaagaggcatcacctttttgacctgccctcgggagtcacccagtgccacttttgctcattctacgggttgaagcagtctcaggttgttaagggatgaattatgtcccctacaaagacatgttgaagtcctaacccctggtccctgtgaatgtgatttctttggaaatagcctttgyaggtgcaatcaagtgaagatgaatgcactcagatgaatccaccccctaacccggtatgactg

SEQ ID NO: 849088 - DNA, 609 bp, Homo sapiens
tagaatttgtggttgagagcctaaaacactcattatgacaacattctgtgttttatcaaattagatagagatatgtaaggtgtaaaaawgatctaaatcaacttctagaaataaaaacaacactgattctgatgagaaatttacaggatgggagtaatagaaaattagccactgcagaaaaaaaaaaaaaaaaaaagaagtgaacttgaagacaaagcaatagaaacaattcaaaataaaactaagagaaaaataatttaaaaagtgaaaaaatcaatgaattgtaaataatcttcaagtggtcttatttgtataccactggagctcctaaagaaggtgaaaaatgggggcgcaggaaaataacttgaaagaaataatggtcaaacattttccaaactggacaaaagctataaacctgcagactcaagaagtcaagaacctcaaacataaaaaacgatacactataatcaatttgctaaaaacataatgaagagaaaatcttaaatgaaaccagagaagagagacatattacataaaaaaggagtgaaaaataagaatgatagacagtagatttatcattagaatcaatgcaagtgaaaagagacctct

SEQ ID NO: 849089 - DNA, 609 bp, Homo sapiens
tagaatttgtggttgagagcctaaaacactcattatgacaacattctgtgttttatcaaattagatagagatatgtaaggtgtaaaaaagatctaaatcaacttctagaaataaaaacaacactgattctgatgagaaatttacaggatgggagtaatagaaaattagccactgcagaaaaaaaaaaaaaaaaaaagaagtgaacttgaagacaaagcaatagaaacaattcaaaataaaactaagagaaaaataatttaaaaagtgaaaaaatcaatgaattgtaaataatcttcaagtggtcttatttgtataccactggagctcctaaagaaggtgaaaaatgggggcgcaggaaaataacttgaaagaaataatggtcaaacattttccaaactggacaaaagctataaacctgcagactcaagaagtcaagaacctcaaacataaaaaacgatacactataatcaatttgctaaaaayataatgaagagaaaatcttaaatgaaaccagagaagagagacatattacataaaaaaggagtgaaaaataagaatgatagacagtagatttatcattagaatcaatgcaagtgaaaagagacctct

SEQ ID NO: 849090 - DNA, 533 bp, Homo sapiens
tataaacacacatacacatatatcatatgtgtatatatgatatgcatacacacatacacatatatcatatatgtgtatatatgatatgtacacacacatatatgtgtatakatgatatgcacacatatgtgtatagatgatatgcacacacatatgtgtatagatgatatgcacacacatgtgtatagatgatatgcacacacatatgtgtatagatgatatgcacacacatatgtgtatgtatgctatgcacacacatatgtgtatgtatgctatgcacacacatatgtgtatgtatgctatgtacacacatatgtgtatgtatggtatgtacacatatatgtgtatgtatggtatgtacacatatatgtgtatgtatggtatatatacatatataaaatatatacatatatgtatgtgtgcttgtttatatatatatataaaatttagaaataattcatatgtattaccagacttttctatatcatgaacactctgactcttgtttttaaaagtgggcctcaattcagaca

SEQ ID NO: 849091 - DNA, 574 bp, Homo sapiens
cacttattgcaaaactagagtttgtttgctgtaaacgcgagatactaatgtcaggctttggtaaggctgtggtgcattccaccccacatttcccatgaacaatgkgaattaatttatttttgctgttacgcaactatgaaaagaaagccaaaaattcaaaagactcactgccaaagagcaactaagtcctgttttgtacagatacccgctaggtgtcacacagcttcagaaaaacaatccttgccttccaggagttaacattttaatgaatcgttaacttcccaatgcctaggcaaaaattatttccatttcattacgttcatttgttacagatgcttacctttgatttctcaagagaatagaaataaaagactgcagaaaatgccttgacctatattttccaaatccctgtctctagcaaatcccatacttccgccttcatagcagaaaacttcattggttctgttttttttttccttaagaaatatgtaataaatcacagggcatcaggagtgtttaatatttagccaaacactttcataaaatgatctaaggttagaccagttgtatgatc

SEQ ID NO: 849092 - DNA, 554 bp, Homo sapiens
agatcaataggcatgtgtgtgcacgcacatgtatgtacacataaatgcttgaacagtttttcaytaaactattgatgggagctaattctgattggtggtatttctagtaatctattttgatttactgtagtatattttgacttcctttttaaaaggaaatacacatatttctagaataagaataaaatagaattttcttagaggatacaaaagacattcatgtactggtcttcatgaaagcatactaaatacatgatagaaaatatattaaggaataaaagtttattggcaatgataacaagaagcagctaaaaccagaggtcctaagctatgaaaaatagctgcaatacagtgacttttctcttcaataaggcggatggcaaaagtgtattcagacctcttcagatttcaaacaagatgcatacagctctgaaagtaaaactttcctgggaggtcaaaagggtaagtatcttctggaaataatgtagggtgcaagcagcccgtgaattttcaagagtatgccagacactgttctagtgttttttgcatattag

SEQ ID NO: 849093 - DNA, 554 bp, Homo sapiens
agatcaataggcatgtgtgtgcacgcacatgtatgtacacataaatgcttgaacagtttttcattaaactattgatgggagctaattctgattggtggtatttctagtaatctattttgatttactgtagtatattttgacttcctttttaaaaggaaatacacatatttctagaataagaataaaatagaattttcttagaggatacaaaagacattcatgtactggtcttcatgaaagcatactaaatacatgatagaaaatatattaaggaataaaagtttattggcaatgataacaagaagcagctaaaaccagaggtcctaagctatgaaaaatagctgcaatacagtgacttttctcttcaataaggcggatggcaaaagtgtattcagacctcttcagatttcaaacaagatgcatacagctctgaaagtaaaactttcctgggaggtcaaawgggtaagtatcttctggaaataatgtagggtgcaagcagcccgtgaattttcaagagtatgccagacactgttctagtgttttttgcatattag

SEQ ID NO: 849094 - DNA, 609 bp, Homo sapiens
acatgggacaggaccagggacagacgacagtgtcctctaatgaaccagtgtcccagcaacagagtcaagtacttgaatagaagtgacttgagaaaagtgtagggctgagtaaacccaagagacatcctctataacaaaacttctctgcttttggcatatgagaaatgtaaggtgggagaagattgataaaattttcaactataaaaagtagtagaactggaagagatgaccaaaatatctgctcaagtatctcattttataggtagggaagtttgctctctagtttattatctctccaccttcatcccaaatcccagtgcctattcccacctttctaatatatcattcatgacacataatcactttcctttataaatttatttacagaatagaaatagttatatatctcttatgcaaatttctttgtaaacagagctagtttggggcaaaattatgaggttattttgggtggaggggagaggggcctttaggaaaacacacacaaaargtaggagatgatattctcttgtgagagtttctactaatttatcttacctgacatcgtagatattggaacaacatgtcccaactctatgttacgtattgaat

SEQ ID NO: 849095 - DNA, 583 bp, Homo sapiens
ataacaatgaaattgccctaccgtaattgtgataatgataaagaattgatttctggatctctagaattatcttctctagctattattgtcttcatggctttgtaaacttaaatcctctcttatgccccccagtttgtaaacttgtattacaattttgaatttttttcagaaactatagtatgctttattagtataaaataaagtgattttaccttgtaagaatttaattaattagaaagagcagaattctgtaacataaaattttaatttaaaagaaatgtcaaacttgacttgtgataatagatcatgagagatactatgagatataagacattggagagaagattaattcataatgatttagcttgatacatagtataatatagtcagactccatcacttggaatttttttttgcttgtactggacagaagcagatcattttaaaaagtgatctcwaagaaagcagttattttgagtttaaaaactcaaattgttttgagtttttaagagcaatttatcctccacaacaagttaaagaatttagtatattgcaatgtatttgaggaaattatgctaattac

SEQ ID NO: 849096 - DNA, 596 bp, Homo sapiens
acgaaactaataatctataggaaacccagaagcaaaamcttttattcctttgtaggatagtatcaatatatgaaccattgtgtttataatgataataatattaccatggtacatatttacagtgtttgttatttgcctgacatcatgctaagtactttcctttccttatttcattttatcctcaaaattattctatatggtggtttcttctattatctccaccttacagatgaggaaacaatattagagtgctgagtacttacttgaccccaggctgtattagaagtcagtgggggaggggctatcccagatgtgattcctctccaaagtcctcatcttgaccacggtaggaggtgggggctgcctcaccatcactacacctgtattctacttgtaattctcactagcaagggagactctttttaacttcgagaccgggaatgaatataaccaatgcatacagcaaagattcccagagacataaatttcaaagggatatgatatatcacagtgactcttacaggggaagtggtcattgggtatagcataaaaggagaaataggaattcactgtggaggaaactttagtatagaggg

SEQ ID NO: 849097 - DNA, 445 bp, Homo sapiens
ccataatgttctcatgatagtgaataagtctcatgagatctgatgattttaaaaatgggaggttccctgcacaagccctcttctcttgtctgccaccatgtgagatgtgcctttcaccttytgccatgattgtgaggcctcccagccacatggaactgtgagtgcattaaacttccttcttttgtaaatggcccagtcttggttatgtctctatcagcagtgtgaaaacagactaattcagcagtcattcaaagtatttgtgaaaaacttttaaagacatggctaatgatccactcttgagtgaataaagcagaatataaagcagtatctacagtatattccagtatatatctggatatatatttacatgtatgtgtgtgtatgcatatgtgcatacaaaaagacttgtagaaatgcaccaaaatgtttataatagttttttctg

SEQ ID NO: 849098 - DNA, 548 bp, Homo sapiens
gtattaacaatataaaaattataaaactcagtaatcctaaattctcatcatactgtaaatgtgtcctgtgcttctgcatttatcaacttaataaaaggaaattaagcatattataaagtatccrtttatgaggcaatttttattccagatcataaagatgaaaagcacatgcttaatagctagcactatggcaaacatctagatcaaatttttaaagcacaagaattctagactacttatttgaaatacttatatatgaaaatgtctactccactcttagcattttagattatagatgattgttctcaattaaactggcattatatcttgagattagtacatcaattattcaacagggctaccttgcttctctattaaaataaactaaataagcaaacatgagagagcttgagaagaataatacacaaaaatcgtaagaaagaaaatgtcttcatggtgtaaataccaagggcatgaagagacataataaacaaataaaataaacatgtctatccctgtaagtttgggaatgtttgtgtatgcttaag

SEQ ID NO: 849099 - DNA, 558 bp, Homo sapiens
actatactgcagaaacacctaacccaaagactaactttgggtaagtggtggggtctagtaacatctttttgacaaacctygaagggacaatactgaagaaacaacccgaccaaaaggaaataaactgcagcactgattgtcccattttgggtaagtggtggggtacccaggtaaaggacgcgattgggttagaggcccaatttagaggagttaaagtctctcataagacagagtgggttagaggcccctcttaataaaaggcaaggacacttgaccaaccttgggttagaggcccaacttaggaaaattaggttcccttctaagacttagggggttagaggctcctctcagtaaattcccttttggctaagaatgagtttggcactacaggatgttaactgctattatctttggaataatctgccttgcaccctttgctgtgggtgacaggattaggcatgtacaggatagtgggatatggggggcttttttctccccaaaaacgagaaagttgagagctgatgggactgctggaaaatatgccttcacaactgaaaa

SEQ ID NO: 849100 - DNA, 610 bp, Homo sapiens
aagaggaatgcatcaaatgcatagaggaagctgacactacaagtgtgtgccaccaagcccagctaatttttgaatttttttgtagagtttcaggggaggggttctgcctgtgttgtccaggctggtgttgaactactgggcttaagtgatcctcccacctcagcctcccaaagtgctgggattacaggtgtgagccactgtacttggccagaagtgatgtttgaattgagttgttaatcaatttatgaatcacttagcaaacatttattgtatgaatactaaatgctagtcagtaggcattgaggtgatataaatagatataggccgggcatggtggctcacacctgaggcatgagaatcacgtgaatctggggtagagattgcagtgagccgagatggcaccactgcactccagcctgggtgacagagtgagactgtgtctcaaaaaaattaaataaaataatacataaatagatagatatagtagatatagatacttatatctatacatatatgaatattctctctctctctctctctctmtatatatatatatatatatatatatgaatttagatcttatcttccccctcagacagctcactatata

SEQ ID NO: 849101 - DNA, 558 bp, Homo sapiens
accaatttcttggaagttgaaaaaktattaaacttactcaagaataatagataactagaacagtcctatatcaaatcgaaaaattgaattaatagtttaaagtatcccttaaaataaaacctacagcccaaatgattttaccggtaaattgtcgtaacatttaaggaataaataataccaattctacacaatttcttccagaatatagaaaaagagaaaatactccccaactcattttttgaggccagcattattctaatgtcaaagtaagacaaagacattacaagaaaaaaaaaaactacagaccaatatttgtaatacacagagacgcaaaaattctcaaaaatattgacaattttaatccagcaatatgttaaaaagttaacatgctgtgattcagtggggctcagcaaggatggtttaatatttgaaaagccaatcaatatgatttaccatgttcacacattaaagaagaaaaaacatagaatcattgcaatagttgcagaaaaagtattttgtaaacttcattattgattcatgataagatctttcagtaaa

SEQ ID NO: 849102 - DNA, 585 bp, Homo sapiens
tctccatccagtctctaagagaggatccttggctcatgtgcaggaggaaacgcaagcctagtcgcagagtgtagtgagaagagagtttattgaaagctgctcctttacagagtgggggcgtctgtccacagaaagcaagccaaggaatacaccgcctgtgttttcagtttttcttatataggggtcttatctttgtaaacactagggccaggcacggtggctcatgcctataatcccaacacttttggaggctgaggtgggcggatcacctgaggtcaggagtttgagaccaggctggccaacatggcaaaaccccgtctctactaaaaatacaaaaattagacaggcatggtggtgcatgcctgtaaccccagctactcagaggctgagacaggagaatcgcttgaattgggaggcagaggttgcagtgagccaagatcatgccactgcactccagcctgggcaacagagctagactccatctcaaaaaaaagaaagactaaattaagctgtgcctatgtgcggrtgggctgataacatgataacgtttattactttattgatttaaagaaagctatccccgac

SEQ ID NO: 849103 - DNA, 615 bp, Homo sapiens
tctagttacatatcagcattttaagcagcatgttgcccgtcaggcagcacaaggcttctgatggttatggcatttgggtcaccactagttctctggaaggrcaagtgctcctgtgaacagcacagcaaactccctcgtatgattggaacacggcagcgcaggttcagggcgcatgctagaaatccaaccaaatgccttttgcaaacagcagctcaatgaggattcctgccacgaggcaaaatgcttggaaagttactatgcgctggcatcactgggtttggggtcagcatgctgaaaccgggactcattatgttcctaccatgccaacttggtgcaattagcctaacacgataatttcctgaagccatatgttgatctttaggggaggtaggggagggaaagcttcatacgcctgatggctctaagctctgactggcatgtcccagcttccagcaaatttctgtaaatcaagataacacacagcaatcaaagatgaggtcggatggccagcctggacagagagaaaacttagagcagggttatgtacttgttgcagagagtggggctttttcttttctttccaaggagggtttcagagaaaggtcataggggtag

SEQ ID NO: 849104 - DNA, 487 bp, Homo sapiens
acagtgggtccagtgggtcctcaaacttatcctgtggctcttcctccagttctgaaatgcataattggaataaaaatactcaggagctggtagaattcacatattaaatccccaatgtgtggagtgaaggtttctttgctgggaaaggccaagcataagtcactatgactgcctgtacccaggaacatagtaaaccaaaagaaatactgctatctttttaggattgtgccacaatcaaggattagtttgaaagatgaaggggagatgactacactacatctcctttcagcttccctatttggcctgggcagatgacagacagatcgtggaaaatgacagtgatttatcgtagacttaaccaggtggtgactccagttgtagctgctgtgccagatgtggttctattgcttgagaaaattaccacatctactrgtacctggtgcagctgtcgatctggtaaatacactttctccatccttatcaagga

SEQ ID NO: 849105 - DNA, 630 bp, Homo sapiens; identical to SEQ ID NO: 836321

SEQ ID NO: 849106 - DNA, 622 bp, Homo sapiens
gcacttgggctccaaagctgtgtttttctttgggttttgccttttaataggggttgaagaaagtggttatagacatttgaggggaaataaagcctgtggtttattwacagggctggttttaatcagcagtgatttgactagggtaacattagagctgcaacaatgatagctgatactatgattttctatgcttttaaccccagactgaagtcttgtgggttcatggacagaattcatttgttcccctggccaggctgtggggaggagtgttctgtgacagcctcaggtaaggggaggagagggctggggactggggtagatgcctcaggggttcttccctgctggaattccagctgctgggaagcaagcttcacagatggagggttttgaaggaccaaaatggaaggtgggtttgggaccccatttggccactctgtgtctagatccagatggataaatattcatgagcttatctttccagacctgaggcaaaatctcagatcatgacaccttacactcttattaggaaagtcaagaaagaataggccacttcccaggtggaaggctgctctcaagtgaaacctagtcttgtcctacccaggatgaaatctttcggaacttt

SEQ ID NO: 849107 - DNA, 618 bp, Homo sapiens
gaaacacactgtcccatgggaaaactcattcttcttacactttctttcctcccttcacttccatgtcatcattctcatttgggtgttttcctctggctcctccctccagtcactcactggctcaggttcttccacgtacacctcaaccttggcatttcccaggtctctgccctctgccatttctctccagcctgtctttggggttctcatctacctgtggtttccaccttaggttccacagtcagatctgtcagatgctctcttcttcacttctgccagggggtgcagagaaacctcaaacataagaggtcctcggttagacgtgatctctgtgttctgtcctgttctccatctcagacagtgactctgccattcatccagtcatccatgctgaagccatcggagtcacccaagagcctctttccatagctcccctgtggtatcctcctagttcctgtcccttccgctcctagagtctctgctcctatccatccctctcagtgtctcccctctcactccctcagtgggagcccttctctttcatacagcctgcttttcagactcctaagtggctcctgctyttgtccattctccaaatggccaccactatgtctttca

SEQ ID NO: 849108 - DNA, 609 bp, Homo sapiens
tgtatctctagcaacatttcatttacttgtcaggtttaaacatgatcaaaatctgtgatattaaatatatttgtcttgttttgctcaactgtacaaataagtgttaacaggctattcaattgataagagatcacgttttaacactcagatgcttatggtcacaggaaaagcaatttttaaaaatccaaacctacattttgagataactatagatttacaggaagttgcaaggaaagtactgagaggttgcatgcacccttcacatgggttccccaaatagtgataaaaatcaactttttaggccgaggtgggatgactttagcccaggagtttgagaccagcctggacaacatggtaagaccctttctctactaaaagtacaaaaattaggtacatgcgcctatagtctcagctactcaggaggctgaggtgggagaacggcttaaatccaggaggcggaggctgcagtgagctgtgattgtgccactgcactcccgccaggggaaaacaactttttaaactttcaagttatacagaaatttttgtgagagaggtgtagatcagtgagattaayttaaaggcttttaattctaaaaagagattacccca

SEQ ID NO: 849109 - DNA, 589 bp, Homo sapiens
aggggttcagattagatacagtgagtgacgattagaaatagccaacatctagatcatagagagttgtgaatgtgttgaatagttctatgcaaacctaacccaaaaagcccaaggaagctgagaggccaaagaaagaggctgacaaattcaatttctcagaaagaaacattgaataggaacttagcaacagaagtcatgtctgtgttgctggcagtggcaagacaagatagaagatccccatgccattaccatccagatctagggcttatataccatagggaaggaatctgtaggacaatcatagggaaagggaaggatgctgtgtgaatctgcctaaaggcaggatttgtagtcaagtgtatttggacctaagggcagaatttacagtaaatacatgcccttacacaaggaatcaaggaacagtagacagaatagaaatcttagaggcattttctgaactggggttcatcagaagccaacatggcagatgagcatccaacgtggrgttgctttagtctccacagactgccaggctggggattttagaattaatgtagatgaatttggaagatattgagatgtttaaata

SEQ ID NO: 849110 - DNA, 574 bp, Homo sapiens
aggctgtgaagtccaagatcaggatgtcagcatgttcaggttctggtgagggccttcttcctagtttgcagaaggctgtcttcttgctgtatcttcacatggtctttccttggagtgtgtgcatggagagagagagagaaagttccagtgtctgtttctctttttgtaagagcatatccatcgtgggggcctcaccctcatgacctcatgtaaatgtaattaactttttttttttttttgagacagagtcttgctctgtcacccaggctagagtgcagtgtgtgatctcagctcactgcaacttctgcctcccaggttcaagcaattctcctgcctcagccttctgagtagctgggattacaggtggtgccaccatgcccagctaatttttgtattttcagtagagatgggtttcaccatgttggccaggctgatcttgaactcctgacctcgtgatcctcccgccttggcctcccaaagtgctgggattataggcrtgagccaccgcacctggccataattaactttcaaaggcactaccttcaaataccatcatgttagtgattcggacttc

SEQ ID NO: 849111 - DNA, 539 bp, Homo sapiens
aacgaagttgaatgtgctcccattctacctcttttttctcatgaaacttgcaagactttggacaaacacacacacacatacacatacaaagttttttttaaaaaaaacttcaaaaataatctgtctcattgatctttcataaacgtttttactacctctgccttttatttcttatttcacacattgttactttatattctatttcagaatcaaaatttcttgagtgttttgttttagtttctgctggcattccctaacactagcttgtttgtctggatgttgataactgtagattgtgagctgatattttactagtgatcccatggtcaaaatcactctctcagaatctaattcagaaaatactactgcatgcccaggaaattaaaaattaataacactttttggtgtaaagcaggaataagttcaactgttattttttgttcaacatcaactctytgaatgatgatgtttaactctgaatcttgctgtgcatagtatgcagaaacagcagtctagtctccttttgattaatgaaaaag

SEQ ID NO: 849112 - DNA, 610 bp, Homo sapiens
gtgacaaacaaataaacaagaaccgcatacaacaatgcagtaaaatctcagaaatacgcaatgagggccaggcatggtggctcacacccgtgatcccagcatttgmgaggcagaggcggacggatcaagagtcctggtcaggagtttgagatcagccttgccagcatggtgaaacctcgtctctactaaaaatataaaaattagccaagtatggtggtgggtgcctatagtcccagctactcgggatgctgaggcaggagaatcacttgaacccgggaagcagagatcgcagtgagccgagatcgcgtcactgcactccagcctgggtgacacagcgagactctgtctgggaaaaaaaaaaaaatgcaatagggaataaaagcaagtggtaacacacagcatgattcaaaaacaatacaaagctcaaaaccaagcaaaactacaaatattcaataattgtggtaaaggaaaagcaagaaaataaacacaaaattcaggatgatggctacctttttggagaggtggctacttgtatgagactgggaaattggcatcaagagcatgaaaatatacattttaaaaagctaagtggttaagcgttttcataaaa

SEQ ID NO: 849113 - DNA, 527 bp, Homo sapiens
actagagggagcagagaaagtaggaggcatggaagatcctgtttccttgactctgtttgatggtgctctaacagtactgcccagcaacggcccttcacatcaacagcaacatgtggttccagtgttgagctttattcataaccagcttcatcacaccgttagaggttcctacaccagcctggtggcactccttccctagaggtttaagcctcagctccaaggaggctctactcagcatttcagaggcagctgcagcagccagccattaccccaccttagaggtgcaggtttcagctctgtgggggtcccttttatccaaacttttactttctgataactcaatcctctttcctgtaatccctcagtcccagagtgatagatggttcctgcttacttaacacaggaattacttcagtatcctgttctcactttaaaatttcaaatactttttaaaccatttcttttaatamattctctctgttgaaatacctagaaatggtttcagttttctgcctgaagcccaactg

SEQ ID NO: 849114 - DNA, 561 bp, Homo sapiens
cattttaacagtgatgggtaaaacattattcctgtgggtaatccagagtctcttgggttcaatgggctcaatcacactgaaaagagagctgggcagaaatgcaggggttcacattcacagcactgtcatggactgtgttcagaagaattgtctctgatattaaaaggcaatggtaaaaacctacattctgaacacgttctgtatgtattttttccctgtgaacatggtattataacctgatattattactgtaattgtctctaaatagagctttttgctgatattcaagatgacgggttgttcctgcagaatacaactgaatgatcccttacaccaacatgagcaatcctgatcattttatggccaccctgacttctctttcattagttgctgattgtactaaattgatgctaaattggctcagctggctcttaaagcctttaaacagacggcactgattatgtctgtgatcttgtcctggaaatgatatggtcaaagccctyatgtttctgggaaccctaacatttttcttaagaacagttggggccttgtaaataagaa

SEQ ID NO: 849115 - DNA, 634 bp, Homo sapiens
ttaacatagaataccagccctatgtgggtgggtctaagagaaggaacaaagatttcagagtgagaaaaatctcctatgttcccaaaggtgtgtttggacratgttaaatttatatatcaaatctaatttcaacccattccattcttttctttacttagtagctagaataatctttttaaaaacaaatctgttcctttcatgtctctgcttaaaaccatatgatggatcacatatcttctccagatgatgattccgattttcctccctgacaacataaaatgtcttagcttgggattcatgaaaccacataatctagtccctggatgctgtttaacatcttcccttactcccaacacatgtgcatgctcacacacacacacacacacacacacacacgcaagttctggaacacagtgtgttagctcaatcacgtttacccaagattcctatcctggaaagctccactgatcctttagtgcttaactacatgtcacttttctgggaagacttactccccatgttgggcttcactaacaaataacatgtacattcctcttattgagctctgattaccttctatcgtaattgttgggcctctcattcggatgtgaactccatgtccacatgtccacag

SEQ ID NO: 849116 - DNA, 607 bp, Homo sapiens
tcaaaaaatgggacaaaggttcagctatctagaaagatttgctatttataggaagataatggacatgccctgctgtgatktgagggttatttatttctgaccctgtacacagcctaggggaagaatttagtccagcaaagaggggaccttgcttagagagacccattctgactctcctccagctttctcccagatatcaggaacctagagtttcctactcagataaccgccccccacacgcacacttttaggccaaatgtaggccccctctgggggtttaaactcctggaggcaagcaacatcctgagtgcatatacctgggcacagggagtggcaaagggtgcatctgtgtggatggattaggccctggggcctggagtgttcactgtggaatttacacacaagcaaggagaagccacttgccatgaaaacaagagtccagggctgaaaaataaagggatgaggggtaggaaggagatagacaagggctaccacgaggctgggggccagtacagaacactgaacagtctaagaattctaaatctatacctgggcttccaagggttatgaaagcatcatgtgtcaaagtggcaggatggaagataat

SEQ ID NO: 849117 - DNA, 519 bp, Homo sapiens
aaaaaaaaaaaaaggtggggggtgtccaaatatagtatgacaatgttttcaagaatctttcagtcagttgatgcttaattataaagaccccagctaaatattctgtttattaaattaatagcgtgacaagtattggagagctttacaaccacttaaactcatgtttacatcctgtgtaattacaattcataattgggaaagcagtcaaatctaaatgcattctgatcaatggctctcaggctgccaagtagaccccacacaagacattagagtaagtgacttcaaaacaggacttctacacctagaattcaaactaggttaggggagggcactgtggggagtctatcagtgaagtgtttaaagttatatgtaagatttcctatatatatgacattgtttttctgaatagagaaagaaattmtttttttaaatttataaaaggcctgaaagtataagaatgactgctctgaatcctaagattacgatttaccccaactgtggaaagtctcattacataat

SEQ ID NO: 849118 - DNA, 624 bp, Homo sapiens
aatacacaggaaaagcgctcagttctgaagaagaggatttcacgtatccaagctcagaagtagcaatgccaataacaaaggttagttaggaaactagagccactgtgactttgsataagatatttattatagaattatacctatctagttgtggcaaatactagcgaagtaatatgcagaggggagagttggaggaaaggagacagagtcaccatccagtccttctaaagcactggtgcagggtggacaagcataggcttgcagggaaatctaagagagtttactgagacagcaaagggaatgtccttaatagggctggggaaactatggcctctgattagttccacctctggggaaccgccaaacttctgattttgaaactggttttgaagccaggtctagtagtcataaagaagaactagacaaggaatgcaggagagaagtggcaagtttgaatctcttgggcacttctgaatctgtctattctccacatatttgactgcaagaccttccaagattatgactagtgatttacttccactttctaaaccttgtacaaattccccccaactccaattgtgttcaggagacataaagggaatgggattctgagaaatgtagttc

SEQ ID NO: 849119 - DNA, 660 bp, Homo sapiens
ttaccatgaaacgtggggctacattgaattatgacactatactgataatcattttcatgattttgtactatttttaggttcacttgctcctgtcctttgtggtaagtcttcttaaatacttgaagaaagctcttataatattttttaaaaatatgtaatgctagaggtcctatatcctatctgatgatatatttaactcatagggaatgttctctttttggtgttttaaagatacttcaatgtacatgtcacattacaaaatgtcactttggcatagagttggataaattatttgaacagccagctctttcttctttttaaattgatattttagtttttattaactgttggtgtttggcttgatttggtctattgaaataggcaggcttcttctgctgtagcaaaatacatttcacagctgagagttaaatgttatgcaaaattataagaacctggtgtccggtgcgcctaatttctattcttgagatttctctcttgtcacctcagtgacaagattgttactaataaaactaaaaggaacagaaaaactcaatgaaaagttgactggaaccttgtggtcmtgtgcttggtgctttagattaaaggtggactggatcaaatcagaaaaaccttaagctcaactatgattattcaggaatt

SEQ ID NO: 849120 - DNA, 586 bp, Homo sapiens
aacctgggataaacctgctcctaaatgtgaatatttcaataaatattcttcttgccctgagcccatagtaccaggaggatacaaaattagaggctctacaccctacagacatggtgattctgtgacatttgcctgtaaaaccaacttctccatgaacggaaacaagtctgtttggtgtcaagcaaataatatgtgggggccgacacgactaccaacctgtgtaagtggtgagtatgaaaagaaagctgggttgggaggttggggtcttgcctttctgtgcagaccacgttttgtaccctcctgaaggacaaacagtgtgaacatgtaatgatgagggtggaagaaggaaacaagggaaaaggtgaaagttatggcttcttcgtggaggcatataactgctcgttcaaaaaacatcaattgagcaaaggagtttaaagtacatggaaaaatgtaattaaacayacctaataattgagtagggtaagttttgcaaggatggggtcagagtttgttggggatgtgggaatggggtggttttcaactgtatatctgtgttactgttaaaatgagaagaacggtgggatct

SEQ ID NO: 849121 - DNA, 598 bp, Homo sapiens
agtatctagagtaagttttgatttcatgactgaatgctgatgagcaaagccaaggctctggagtgaggtggacttgcaatccagttttgtctgcaagttactgtctcagaatgttatctgatgtgtctaaggcacatattctctgtaaaacatagaggccgggcacagtggctcatgcctataatcccagcactttgggagcccaaggtgggtgggtgcttgagctgaggagtttgagaccagcctgggcagcatggtgagactctgtccctacaaaaaaaatataaaaaacttagccaggcatggtggcatgcacctacattcccagctacttgggaggctcaggcaggagacttgcttgagtcagggaggtggagggtgaagtatgccatgatggcaccactgcagtccaacctgagtgacagatcaagacagtatctcaagcaaaacaaaacagacaaacatagaacaactgggaactacctaataactttgttttmaggattaaaattcacatgtagcctgtattatagtgcctgggcagaggaatcactcattttgtatcaaccattattatactcaaaggtaattgatagat

SEQ ID NO: 849122 - DNA, 482 bp, Homo sapiens
gggtggaagatgggagtcaatgaggaggctgctgcaatcatccaggcaagaaattgtcagtggctaccaccaggttgtaagaagaggccagattctgcatgcaattttaagacagtgacagtaggattygtggatagtttgtatcagaatatgagaggaagagagctgtcaataatgacacgagggcttttgcctaagcaactggaaggatagaactgccattaattacatgattgagattgcaaagagcaggactggggagaaaaatcaggagttccactgtggagatgttaaatgtggatgtctaatagacttggcaagaagacagctgatgtacaagtctgtattttgggcaattggtccaggctggagataaaaatttgggctttgtcatcatgtggatgtacataacaaggagactgaataagatctccgggaagtgaaagaggctagcaaaaagaaaaggtccaagtactgagccc

SEQ ID NO: 849123 - DNA, 482 bp, Homo sapiens
gggtggaagatgggagtcaatgaggaggctgctgcaatcatccaggcaagaaattgtcagtggctaccaccaggttgtaagaagaggccagattctgcatgcaattttaagacagtgacagtaggatttgtggatagtttgtatcagaatatgagaggaagagagctgtcaataatgacacgagggcttttgcctaagcaactggaaggatagaactgccattaattacatgattgagattgcaaagagcaggactggggagaaaaatcaggagttccactgtggagatgttaaatgtggatgtctaatagacttggcaagaagacagctgatgtacaagtctgtattttgggcaattggtccaggctggagataaaaatttgggctttgtcatcatgtggwtgtacataacaaggagactgaataagatctccgggaagtgaaagaggctagcaaaaagaaaaggtccaagtactgagccc

SEQ ID NO: 849124 - DNA, 482 bp, Homo sapiens
gggtggaagatgggagtcaatgaggaggctgctgcaatcatccaggcaagaaattgtcagtggctaccaccaggttgtaagaagaggccagattctgcatgcaattttaagacagtgacagtaggatttgtggatagtttgtatcagaatatgagaggaagagagctgtcaataatgacacgagggcttttgcctaagcaactggaaggatagaactgccattaattacatgattgagattgcaaagagcaggactggggagaaaaatcaggagttccactgtggagatgttaaatgtggatgtctaatagacttggcaagaagacagctgatgtacaagtctgtattttgggcaattggtccaggctggagataaaaatttgggctttgtcatcatgtggatgtacataacaaggagactgaataagatctccgrgaagtgaaagaggctagcaaaaagaaaaggtccaagtactgagccc

SEQ ID NO: 849125 - DNA, 573 bp, Homo sapiens
tcctgctgaagactctaaatgtcaggtccacgactacgccaaatgtcacgcgggggactgtaggcaggtgaatatggtttkattcagcaatagctctcattaacaggtttctcacactagctctttacactatccagcctgcctcggatgcttgagctcgtggctcccacatacagctgtgcttctggctgtcccctgcctttagggtcagcagcttaactctttctgtctctgggcactagtgggccaagctgtgtcctggctccctcctgtccatctcaagacagacagctctgactctctctttgtctgggtgcaagtgtgcctatcatgtcaagccatgttgcactgagccaaaccccaagagcccctgtagagcgttaacagggcaattataccttttacagacaatagtggctcagagccaagtatgaacttacacaaacaggttatataacaagtggaggtgtgcgcttgagcaccaaactcaccgagtcatgcaggcttggatattcacctcggcctattcgttgaccaaagcacattcatgtacctacaaccttcttcacaggg

SEQ ID NO: 849126 - DNA, 596 bp, Homo sapiens
acagttctgtgagtgttttcatgctggggctgtaccatttgccaagggagatgagcctattatctttacattaggggaactaatagcccatttcccaggaaatccrtgagcgataaaaataagtgggccgttttattccttttactgagagaagctggcatgaaggacaggggaagcctttgttttctctctagttagtgggagtatcagggctggctgagagcaggccaggggaggcagccacctccactgtctgtccccagcactgcaggggaggatgtctccaatcccaaacggggaagaaggaaagttggtctgctcttccatgcacctcccactaccgacttcccccatcccaagggccctcctgcccctgttcctcccttcaaaagcaggagagaatgcactgtcacttggaacttagcaggaacttgcacctatttgtcaccactcccaggaatggtcttactcagtgctgtgtttctcaatgtggggtgacaggcattgtcccctaaaggatgttgttatagtcatcagagaacagaagttaggagtgtatttgaggggctggggcaggatcaacccctaatactcca

SEQ ID NO: 849127 - DNA, 405 bp, Homo sapiens
attgccctcttctgttatatttacattttttactctcaatagagcacaaytgatacaaacctttggaaatactttaggaaaataaagaaaaaaactttattttttattcaaatgaatatagtgttgactttgtgccgggcactgttttaagggctttatatgtagtgattcatttaatccttacaatagtcctgtgagctaggtgctattattatctcattttatatataagaaaactaaggcacagaaaggttaagcaacctgtgtcgggtcacacagctcataaatggcacagcaaaggttaaaagtaggctgtctggctttccttctaggaatttcttctaagtgaatgattcaagacatagacaagggcttatatactaggatgaccagcactgtgtgtta

SEQ ID NO: 849128 - DNA, 556 bp, Homo sapiens
atcagaacaccatggccctgggcaggatcaaccaggagtgagcagggagcactgcagagaaggggccctccggacatgccccaactggggagtgctggcacccctctccagttcgcatctactgcctttcaaaactggctcctgtatggcagttaatgcaagcccccaccctcgtagaaagatcactgacaaggcggcctcatcagaagcaccagactccagtcccagccctgccatgcccagaatgcgccctcaggcaaggcatttaactccttcaagtcacagatccctcctcataattgggagcaatggttaaatttattggagcatttgaggataaagaagagcacacatacggaagttctctgtaaagaatgtagctttataaatgttggctatttgtgcattaagcactattccatgttgaatccaatgttgaaattgttaaattgaattttctggamtcatagaaataaagctttagtttctcattcaagaaacttgaagcatcaggcaggcaaactgagttttgcaaggagtgtgagaagctttccct

SEQ ID NO: 849129 - DNA, 627 bp, Homo sapiens
ggagggacctgcagacccaggaccaaaatgtcaagtagtcatgtgggccagagcaagagctcacccactgccactttgagcttaggggagaccagatccagagcagcaaaggattggagggagggagggtaaayatgtacagcagctaaaagagccagtcaatggggtgtgggcaggacagcaatgatttcaaacaggcctattgaagctgccatttcccctccctgctctaaggaataaagtgcccagccaaaacagaagctgctttcacacaccccaacactgatcgcactgtattgcgtctaggtgtgtaggcttcctgcctctgtgcgtgtttcctcatccacaaaatgggcataagagtaacatctcattttgttgtgaaagagttaatatacataaacatgcttagaacagcacctggcatgcagtacaccccattaaatgtgagctatcattacaactactatgagtattacatgtgtctattttcctccatagactgagttctctagaagcaggaactgtgtcttattatatttggtaccccaaagcccagcactgtgccagacacaatttggctgcataataaatacctaataaatcaataactcgatgaataagtat

SEQ ID NO: 849130 - DNA, 473 bp, Homo sapiens
ctttgttctcttgctggcgaggagctgtgatcctctggaagagaagaggtgctctggtttttagaattttccatttttctgctctggtttctccccatctttgtggttttatctacctttggtctttgatgttggtgacctacagatggggttttggtgtggatgtccttttttttttttttttttttttttttttttggttgatgttgacgctattcctttctgtttgatagttttccttctaacagtcaggtccctcagctgcaggtctgttgaagtttgctggaggtccactccagacactgtttgcctgggtgtcaccagtggaggctgcagaacagcaaatattgcagaacactaaatactgctgcctgatccttcctctggaagcttcttcccagaggggcacctggctgtatgaggtgtcagtcagcccctactgggaggtgtctcccakttagggtacacggggg

SEQ ID NO: 849131 - DNA, 603 bp, Homo sapiens
gtcacataatattcaataatttttgcaatatttaaatttgttcatcattattatatctggtatagtgctttgtgatcaatgatctttgatgttactatggtaattgttttggggtgctgatatggtttggctgtgtccccacccaaatctcaacttgaactgtatctcccagaattcccacgtgttgagggagagacctagggggagataattgaatcatgggggccagtctttcctgtgctattctcatgatagtgaataagtctcatgaaatccgatgggtttatctggggtttctgattttgcttcttcctcatttttctcttgctgcagccatgtaagcaagtacctttcacctcccgccatgattctgaggcctcccccgccatgtggaactgtaggtccaattaaacttctttttcttcccagtctcgggtatgtctttatcagcaccatgaaaatggactaatacaggtgccatgtactgcactcatatagaaaggcaaacttaattaataaatgttatgtgtgttctgactactccaccaactgcccatttccccacmcttctcccccttgggcctccctatttcccaataaaca

SEQ ID NO: 849132 - DNA, 553 bp, Homo sapiens
gcacaatttattttccttttttgtacttttctgtaccctatgtattttccacaataagattattttactgttgtaatcatggggaaattttatttaatgaggtgggaccrtacaatattttaaaatgacaaaaataggcatatgattctcacatattttgtgatattaaaattatatgaagatttcagtcccatttttattcgtttgttgacacctaactataactatccaaatgagaacctataattatttggaatcaataaatatttcaatttctataccaccatgatagaaaattatatcaattgcccattcttgattttgtggtaatttgttgaggactgaggtgtgtcatctttaggctgtattttgacccacctccccttcatatttccctacattgtccaatttaatacatatcacagcacagcagctttatttctttatgcctctcctattagattttgagttatttgaagactgaactctcatttatgtactcaatacatacttattgacaccttaatataccataaaccctattctaggtcct

SEQ ID NO: 849133 - DNA, 628 bp, Homo sapiens
ttagaaaatgctacgtgatacagaaaaacagaagttatatcagactaaagagagccggaagtgacagcggaaggtcatcgttttaaacagggttgcctggatatacttcagtgagaagacttggacaatgacctgaaggctgtctggggaaagagtgttctggcagaggagccaggtagtgcaaaggccctgaggccagcacattcttcatttgtttaaagaacagggaggaagcgagggtggctgaagcagagtgggtgagagagggagagtgttgccaccaacaaggtcagaccagatagggccttgtagtccttttaaaaactctggcagttattccagttgaaaaggtgagcctctgcggggttctgattaaagggttcactctagttatcgtgtcaaaatagaaaagaagcaaggaagagtaaaagaaggcagaccaatgaggaggtgattggagcagtccaggcaagagtgtttgagggcttggagcagaggggccacagtggaggagtgaaaagtgtttggttttaaatgcagagtatttggagggcaaaaccaaaaggattttcyaatagatggtttggtggcctgagcaataggaaaacttgctgcctcgcttagagag

SEQ ID NO: 849134 - DNA, 634 bp, Homo sapiens
caattactcttcatgcattaagttgggctcgcttcttgtctgccctggtgtgtctagcatattcttttgaacagagaatgttttcaggccaaaaaacaaagaaagcttcaagcatgtctgcaagttctattgagggtgggttgggcgaaggtgggcagggtacagatagtgtctgctacagcttcttttccattgcttaatttacatgttaacagcagcaacgcatgtgatcctttgtgaattcaagggtgagtacaaagagtatcaaccaagaaaaacttttatacatttcaaaggatttttctaaaaagagaaagttacataagcaagactgagaatattcagaagtgacagtatcggtattggcaaaataatattttagtacaggatagaaatgctttcaatgatcctttcagaagtgcaatcaatctttattattcacagatcctgtatctgcaaacttgcctcctcattaaaatgtatttgtagcccccaagtcaatactcatcgtgctttcaaggtcattcacggacatgkgcagagtggccaaaattcgagtcagcagctgaggctgaacaaggcgacattttgccttcttgtttcagctctcataatgtaaacaagtgtccttctt

SEQ ID NO: 849135 - DNA, 521 bp, Homo sapiens
tgcgcgtttccctcaccagctactgcttcctcctgggcctcccggcattcaccagccaggaggcagaacttggcctcccttaatcctgaataggcatgcagggttacatgctagacacaaaggaagccacagccagcagaaggcgagccgacaagaacaaggaaatggttctgccgtcacatcccctggaatctctgtgccttggtgtctccgttggtaaagacaggatgtcctagatctccaaggtttcttgaaaaactaaaacccattattgtttaatgccttctagaagttgcctaggaaacacttcttagaaaagattcacaaacagacctggaatgaatccttctcgctcttcatacactgagacaggttgaaatctaagaccatggcagggagaagccgcacgcggagtcgcactgtcaggatccaggatcggtaggaaacaggctctgtgccctgctctggcaccagccgggctggcccttatctkaatccattccaaatgcttgacgctacct

SEQ ID NO: 849136 - DNA, 662 bp, Homo sapiens
caaactttggtggaattcctgtgccaataacctccaccttccaaatttcccgagcattttgattgaaattgcactaagcctacagtattggctaagtttgaaaggaaataagatccttgtaataatcgatttgctgtattttcagctttcctttatttaagttttcttgatgtccttttgggaaaaacggtagttttgtgacactaaaatttttgacaactggtatgataataaactatattaatatattttcatacaaattaattaaatatatgcctcgaaagtaaaatataccctcctttatccattaactgactgaattaaactatatatatatatttaagtgcttaccatgtgatacatttagcaccattttctctaaaatcatcaattccaaattatttgtttataaatgaaaaactgtttttgtcatttgtttgtcactactctcaccagctaaatgcagtgagtgtaatgatttgactgagggaactgcatcaaagtcttcccaagacgactcattgaatgggtggacatgagataacttgtagtttaagcagaaaaggtgtgtcatygatgtcatccatcatgctgctgattgctctctcacgttcttttgcacaaagatattatactcaaaatatttgctagcctcagtatac

SEQ ID NO: 849137 - DNA, 230 bp, Homo sapiens
ttaggaagagagcacagccagcggctacaagtacaatggcattgtctgcttccgtttccagctgcctttgaaaatggtgttattaatggaaaggacaccaatccactgctaaactgtgcaaagggcatggaagtcgtmtgtccaggattgttctcaaacgcgatccatgagcttctccaagcctggctgcctttctagagaaatgggaaaatcatattttgtcctaaatc

SEQ ID NO: 849138 - DNA, 473 bp, Homo sapiens
taaaaagaaccaaaaatatcagaggatacacttatttttcttatatcaaagcaatcaaaatattcactaaaggatcagtatttttcaatactgatataacttaaatggaaatgtaataaaaggtagaaaagtaagtcagaaaaacaagaaaatgtaatgagataaagaaataagtaaaaaacatcaatgaggaaataataagaaaatataatacaggcaggcaaagaagaaataacatctgtataattggtgtaattgaagaaaacaacagcagcattaactatggaatagaatgaatatttgaagttataattaagataactttatagaaaaataataggtgagtctaattttgaaaggatccattttgtatctgggaaaaytaataccaagatgtatcccagtaaaaccattagatttcaaagataaaacaaccaaaaaagcaaggcaacaatgaagcagcgttctctatc

SEQ ID NO: 849139 - DNA, 473 bp, Homo sapiens
taaaaagaaccaaaaatatcagaggatacacttatttttcttatatcaaagcaatcaaaatattcactaaaggatcagtatttttcaatactgatataacttaaatggaaatgtaataaaaggtagaaaagtaagtcagaaaaacaagaaaatgtaatgagataaagaaataagtaaaaaacatcaatgaggaaataataagaaaatataatacaggcaggcaaagaagaaataacatctgtataattggtgtaattgaagaaaacaacagcagcattaactatggaatagaatgaatatttgaagttataattaagataactttatagaaaaataataggtgagtctaattttgaaaggatccattttgtatctgggaaaactaataccaagatgtatcccagtaaaamcattagatttcaaagataaaacaaccaaaaaagcaaggcaacaatgaagcagcgttctctatc

SEQ ID NO: 849140 - DNA, 604 bp, Homo sapiens
tcaaaacccatttgaaatgtcgctgtgaaaaccaaaagaaaagcaagggacagagccccacggcgccgcgctggcccctgccacagacccagccctgtcctcatcaattctcgctaccacgaaagtgtcctgacctcatgaggtctcactttcctcgctgcaaaatgggaacagtcccaccctttcctggtgtgatcaggattaaactagaggagggggttgggcagtggtcctaagccccagaccctaagaaggagaccgtgtctggggaaggcttctctgcagatgtagctaaggacctggaaaggagattgtcctagattagggcgggccccgcatccaacgccaggtgtccttctaagagacacgggaagtgaaagcacagcacagtgtggccgcgagaaaaacgaggcagagaccagcgcgatgcagagcaagccaaggagctcccgcgccacaggaggctggaaggggcaggaaggaccctccctggccccccggagggagtggggccytgagacgcctggatttctgacttctgaccccagaactttgagggaaggaatttcagttttaagccaagcaccggggcaatctccaacag

SEQ ID NO: 849141 - DNA, 584 bp, Homo sapiens
cttccttctcaggtgagtgggctctgcatgattgctcttcagattttttgagaatggatgggaagatgaatttttgtgtgaaatcttgtcttttttgagtagcagacaagccaaacaaaacaagccaatgggcctgctcagatcccggggccacctttaagagccggagctcagcagtgtttaatgatcctcttccacaagcccacagctctgctgggaggtgtgctccagggcaaagaggactagaaggtgactccatttcctacatttcctacattcctctccagtgcaaagaggaatagaaggtgactgttgtcctcaaggagcttagagtctagtgagggtgtttgcaaatttctgtttgtggtgggaaaataacaaagaagaggccgtgaaccctgaggtcctcacaagcccgccagcttgttagtgatgcgggttcccgggctgtagccccgaagactcgagcccagtagcgcagtggtgagacaggcaccccccttggtacgagcacctgtagactcccrcagatgtggtcagcacccttctctgaagccccgcaggtgtttgtctccctcacacat

SEQ ID NO: 849142 - DNA, 595 bp, Homo sapiens
gactctgtctcaaagaaaagaaaaaaaaaatgaaagtttagaaaagcacacttccacagcacatggctttagtagggctcttctactgaaggagcacccaggggccagggctggaaattttaaactaagawcaataatagtaataataataaattctattccatagaatagaataaatatccatgagcttaagctgataaaaataggtaatcaaataagtacatagggtggggagagacagccctttctcacaggagactcccagttactcagtgtggaaggaaagaagaaacgggaaaagcaggagcaccaccatttggcaagcagcacgggaagaagcgtagaaggcagtgttctcaagggagctgagatcggcaggcaaaagtatgagaaactggctatttccgtagtccccagataccttttcataagacaccaaatcatggcaaaggggaaaatcccaagctgacaggggagatgcccggcagatgccacctacctgtgtggtcaaagttgcaccaccaggagtgaggctgggggacgtcacgtgcctgccgggaggccccagaaggacatttggcattctggccaaaaa

SEQ ID NO: 849143 - DNA, 405 bp, Homo sapiens
agcagcccctcctgggaccagctcagaggtgcctgggagaggcagtgcggcttctaracacccttctttgtaatccagccacacgggttgtattggccacggaagccccatccaccgctgaggactgggcttcctgggctcgctgcggagcctcccccatctgccccagacacacctgcctcctgcatggtggccactcttgtcggactctgtgcctgtccccacatttattctgttaaacttttctttgcagtactcagcctgttgtgctgggtcactgttcagctgattaaaaatggcagcttccctcaaaagcaaatgttattgtagcccttgggtgtcagaaaagagcaggcaaacccaacctaaaggctcctgggctttctgcaattgtccccgtcggcg

SEQ ID NO: 849144 - DNA, 599 bp, Homo sapiens
agtgcctctggtgtggcagacaccaattgggtcctggagtacagcagtgaacaaacaaatragtttccatctttcagaggcctcacacactaatgaccctgaagaacctagacaggtcagatctcaaaacatagtaagcaccaaagacagttcactccatattcagattgatttggaaaacagagtgagctgacctccaggctggggagacaacttggtccagctattggggactgcagagagcagaagagaagcgtgtgtgtgtgtgtgtgtgtgtgtgtgtgtgtgtgtgtgtgtgtgcgtgcgtaggaatttcccttcttgagagaccctatcaagtcactagactggtagaacagatcaaagacagacataatatttctggttttcaggaagaccatttcataatatttcagggagaatgttatcgtcaagatgaagtaatttggattgtgtatgattcaggtaagtgtattaatagctgcatctgtcatatccaaagactgttgattaaaggattaatgtctattaagaaataaaattatttttccatttggtcattgagttctgtctttgacactgttctgatacacacaatt

SEQ ID NO: 849145 - DNA, 626 bp, Homo sapiens
aaaaggtgctgagagcttccattaggactgacctctggaatgsgcccctcaccgggcctgcgtccaccccactgctgtcctctggatgaaaactagcagttaggtctacagggtgatgcttccattgagcgcttttgttccctccggcactgttgtcagagcagatgacacccctcacccctcaccctctggaagctcagggtggtccctccagtgtctctaggccctggagtcacacactggcccctccaggctcaatggcccctggggccctgtaaaaaggaggtaggctctgcagtcaaggtgacctttctcagctgcaattttgatttcccctgaggaaggccccaaggaatccagggctgtgtaaggaatcctggcccttcatgctgggagccaggattaagaattcctatacacagggctgcctagttccatgtctagtcaagggcaggtagaaaggcacaccctatcaaaagtatcaaccaggcccaatggcatgagcctgtagtcccagattcttgggaggctgagttgggaggatcattgagcccatggggtgaggctacagtaagctgtgattatgccactgcactccagcctgagtgacagagtgagacccccca

SEQ ID NO: 849146 - DNA, 626 bp, Homo sapiens
aaaaggtgctgagagcttccattaggactgacctctggaatgggcccctcaccgggcctgcgtccaccccactgctgtcctctggatgaaaactagcagttaggtctacagggtgatgcttccatygagcgcttttgttccctccggcactgttgtcagagcagatgacacccctcacccctcaccctctggaagctcagggtggtccctccagtgtctctaggccctggagtcacacactggcccctccaggctcaatggcccctggggccctgtaaaaaggaggtaggctctgcagtcaaggtgacctttctcagctgcaattttgatttcccctgaggaaggccccaaggaatccagggctgtgtaaggaatcctggcccttcatgctgggagccaggattaagaattcctatacacagggctgcctagttccatgtctagtcaagggcaggtagaaaggcacaccctatcaaaagtatcaaccaggcccaatggcatgagcctgtagtcccagattcttgggaggctgagttgggaggatcattgagcccatggggtgaggctacagtaagctgtgattatgccactgcactccagcctgagtgacagagtgagacccccca

SEQ ID NO: 849147 - DNA, 570 bp, Homo sapiens
acagagtcctaaacatgcccccactctctgggaattttctcagttgaccwttctgaacaagtgtcagaggagttgagctgcttaaaccagaggtcttagaaaatggggaagtaaggaaagccttgagagcagggtgactggacagtcttcaggacagtcttcaggggaatgctaatatgcttcagggcaatgaatgttgctgctggcagaccacagtagaaggaggtgcactatacgcatctgttgcatgaggaataggtgagccagagaaagcatggatgatgctacaggcaggcaagcaaagataaacagtgcatgagctgagggagagaaaacagaggaaatgtacattccatacaagcacacttttacctagtgccttgctttcaagatgataaaaggcaacaaaagcaaaggatcacagaattgactggggaaaaaattccaggtctttcatctcttctgccccagccaaccggtggccaattaaagaaaaagaaagacaaggaccctcaaggcggcctaatgagcaaaccctagaggctgagcagctcccctgcatagaaagcc

SEQ ID NO: 849148 - DNA, 664 bp, Homo sapiens
tttttggggagactgatttgaataataataaaaccctggtttcccattcagatggctctgcaygaattaaactctttctctattgcagttcccctgtcttgacaaattggctctatccgggccgtgggcaaaaatgaacttattggatggttacaatatcatttccaatgtgctttagttttattacaaatccttctcttcttggaacttcttgttgcttccattttgtgctgtttgaaataatctaggaatgaatgtctttaggatgtagctgtttcttctttttgacttttttcttttgcataagttcccagatatgagatgattgaatggaaggcttatggcacttgaaacttactgtcagctgaagttcaaattgatggtactattttataccatatggtatttttgccatggggtattatcaacaaatattatctattttatatacaaaaacatgaggttgtattaatttcagtttattttatttctagtgagtggagtgttagtgtaaggaacggctttgcagctgaacaattctgctggagctccaggccagcttgacactgcacagccccagacacacgcacacatacatagaaagggaagcttctcttgaccttgtttgcactgttacaacacacaatagctcaggtacacagca

SEQ ID NO: 849149 - DNA, 583 bp, Homo sapiens
cccaccctatgcaccagatgtccccattcctattgactgcttgtccctcatgctctacttgctgccatttaccaaaaccatcaagaattttattctgaccacctgcttgaagatgccctcttgaaaggggatttggaccacaattagcccaacagcctgcaaggcccccttggcagacaccagcacttccgcttgtatgagggcttaaccaagaaggacttgcttttgtggagttggggaaataaagggtttttttgggggaaaagaagttcaaatgactgagctagaaagaaccttaagaatgcttaattctttgcagcacttagctgtaaatatgcctgcaaaccttttctggagttttagccccctgagggcaggacagtgtctcatgatcttcatcttggtatcccccctcaataagtgtttgctgaatgacaacctcctccttgatgccgctctyatgagctaggttgtacatgaaaattgttaatcagctggggactagatggcttaaaataaatggccccatgtgttacagaagacactggaccggcaatcagaagacaggttctcatccctactc

SEQ ID NO: 849150 - DNA, 373 bp, Homo sapiens
tgatgcttctcaagccctaaaaacaaaccctgaaaaaacagaagacgctctgcaaaaggtattaaagaatcagtagcttaattacaagaaattcacatttgaattgtggttatgttcctgaacttataaacaatactttgttattttacgaagtttttttaaattttattttattttttcacattgtcttatgttcttatgaccacaactggggtaatgcatgactgggggaggagtaaactaaggaacactaaagcttgccatrcaatttaagtggaataaaaaaacattcttacagcatcaacatgccagagcttaagtatagttaacttcttgattggctgggggagaaatgtgtggaactgagtatcag

SEQ ID NO: 849151 - DNA, 598 bp, Homo sapiens
aaaatagtaactgttaatgtataaatgtttcttttaagtacaattaggtaactctcctttactgaaacccttgatttctaacaatttcagtacggttatttatattaaaacatcaatccaacaactcatagtggctctgtccattagactggcttgagaggagagaccctgacttaaccacttgcacaaacccaacacttggtacaattgccacacagtagtcattaaaccaacctgaatcacaaagagctgcagtagttatttttcctattcctaaatggtgtcttacttcttttttcactgattttacagattaaaagcaagcaaacaaacaaggcttactcaagtgtttaccagatttctgacttagcccctcaggaactgtgtaatattgggtagatgatttaacctctctgtgtctcagtttcctcttctgtaaaacagaaattaattttagcactttagcacttgtmttctagcgttgttagaagactgaatgagttaatagtgtgctgctttgtgctggctactgtgtcatcataaccatcactatcactgccaagaagatgaacaaaatcatagcgggaagggctccatt

SEQ ID NO: 849152 - DNA, 598 bp, Homo sapiens
aaaatagtaactgttaatgtataaatgtttcttttaagtacaattaggtaactctcctttactgaaacccttgatttctaacaatttcagtacggttatttatattaaaacatcaatccaacaactcatagtggctctgtccattagactggcttgagaggagagaccctgacttaaccacttgcacaaacccaacacttggtacaattgccacacagtagtcattaaaccaacctgaatcacaaagagctgcagtagttatttttcctattcctaaatggtgtcttacttcttttttcactgattttacagattaaaagcaagcaaacaaacaaggcttactcaagtgtttaccagatttctgacttagcccctcaggaactgtgtaatattgggtagatgatttaacctctctgtgtctcagtttcctcttctgtaaaacagaaattaattttagcactttagcacttgtcttctagygttgttagaagactgaatgagttaatagtgtgctgctttgtgctggctactgtgtcatcataaccatcactatcactgccaagaagatgaacaaaatcatagcgggaagggctccatt

SEQ ID NO: 849153 - DNA, 592 bp, Homo sapiens
gtaaaatggaggtgatattacctggtctggtgcatctttgggtgattatgaggatcctataacataatgtatgaaagaacttagaaaattaaakcgcactaataaatgtttttgaaataatttttctttaaatatttgccatataaacatcccttggtcaggtatatatagattgcttagttttcaatttcaggttaatatttttacccctttaaaagacaagaaagtaaatcagattatatggaaattggcaaccataagtctgtgcaatttactgtatgtcattgagttatgttgattagaatgggaattattttcttaacagcatagtatttggaaaagttgaaataatttcattttctggggaaggagtcagcaaggtagtattagaaaaagcttgtgtggagagtcagaatgcctggattgaagttctggccctgtaatttaaccacctcggtaagtcactcaacagcacagagccactgttccctcatctgtaaaaggtgacagtgacgccagtcttgcttttgctcacaggactgtagggagatcagatgagataatgtgcatgtgaaggtgattttcacattaa

SEQ ID NO: 849154 - DNA, 541 bp, Homo sapiens
ccatgtcactttttagcaatgtgcctgtaagaaagttatttatgaactctgagccttgggacctttatatctaaaatattgctaaataattcctgtttttcaaggactgtgtaaaaagtaagagattatgtatgccatcacagaaaacagactatgttcctatttgcatatgctttatttagtagagtcagagaatggctgccttttgagtgaggagcctaaccattctgcacaggtgtatctgttacttgctaagtgttagagaaagtcaaagtaactgtgatctccaaggagtgtactcttagatatcaaaaattcataagaacatttccacttatcgaggccagatgtcatgattttgacacttgagcagaggtggactgcctgaattgtagctgacaccattgcaatagaatccaaatattcacctatatactcacaccaccatactctgtcytatctatatgtcaatagactccaaagtctccaaagcagctctaataatcttcattgtaaaactcctaatgatgtcaagagagag

SEQ ID NO: 849155 - DNA, 494 bp, Homo sapiens
tctaaccggccccagtgagttgaaccgggtacctcagttggaaatgcagaagtaacccaccttctgcattggtcttgctgggagctgcagactggagctgttcctattcagacatcttgcccaggaatcctctatttttgttttatatgaattttaggattgttttttctaactctttgaaaaatgacattggtaatttgatagagattgcattggatctatagattgctttgggcaatatggtcattttaatgatattaatccttccaattcatgatcattggatatttttccaattgtttgtgttatctacaatttctttcatcagtgttttgtagttctacttatagatctttccatctttggttaaatatattcctagtgttttttttttatagctattgkgaattggatagctttcttgattttgtcctcaggtagattattatgggtgtatggaaatgctgctgatttgtgtacattaattttgcatc

SEQ ID NO: 849156 - DNA, 494 bp, Homo sapiens
tctaaccggccccagtgagttgaaccgggtacctcagttggaaatgcagaagtaacccaccttctgcattggtcttgctgggagctgcagactggagctgttcctattcagacatcttgcccaggaatcctctatttttgttttatatgaattttaggattgttttttctaactctttgaaaaatgacattggtaatttgatagagattgcattggatctatagattgctttgggcaatatggtcattttaatgatattaatccttccaattcatgatcattggatatttttccaattgtttgtgttatctacaatttctttcatcagtgttttgtagttctacttatagatctttccatctttggttaaatatattcctagtgttttttttttatagctattgtgaattggatagctttcttgattttgtcctcagrtagattattatgggtgtatggaaatgctgctgatttgtgtacattaattttgcatc

SEQ ID NO: 849157 - DNA, 490 bp, Homo sapiens
agaagatacatgaatttataagaattgagagagacttgacataggaaaaaacagatgtaattcaagtttctgattttcacatacttttgagatgcagagatatagtttgtattagtattagctataaacttgccttgaaatgattcaaaggaagataggttaggatatgtcagatattcccaggtaagaagtcatataatgcttatgtagtgttggttaataaattaacttttgtgtacttcacccttttatgcctagcctatagttatgcttctgctttttttcaacttgaacagggtattattaataatttattcattagattaggtgttaagattatactttcccaaacatcatcaccctttcgtagaaggcattttataacaatatatggtttcaacttatggtttttatcttttctaatttttcatccattcattcttcaragcagtcattgattcaagcagtcattcaaacaagtactcactat

SEQ ID NO: 849158 - DNA, 689 bp, Homo sapiens
ctcaggggacctgcccaaggtcaaccatcagcttgagcgtggaccagagtccaggtccactgactcttgggcagcgcccagcactgttgtgatgcaacttgcaacattttccacctcccggcatcatggcagcctcgcctgagtttttggtgtgggagggtgtcatgtacagggaagggactgggggatacaggcaagtaagggctcacatgtcagccctgccacttacatgctctgtgtctagtcaggttactggacccatccgcgcctcagtttcctgtccttgatgaatgtttgtttgaggatatgagggtgcatggcacataggtgaagaagtgattgcctcttttctctcatctcctgctcccgtgcctctccataaagcaatccgctgtcaacctgcctcctgagcacggcccctctccatcaatggtggcagcagatgctatttgccacgaaggctgaatcaccaaaggctgcagtgtggggccggagaaagctcctgatgtgagtctggcacctcaagatggtgtctccctcactggggctgcaccacttcatttcacaggctttrcagagtgatgggttttaaagcacagtttcacaactattccactagaaggctttgggtccatagatgagtaaatctgaacatctcttctcatggccatgctgcctgtcacctcagt

SEQ ID NO: 849159 - DNA, 526 bp, Homo sapiens
tcctcaccactgaatccagccctccctccctatcacctggctgcccctccacgcctcartccagtcttgacccagcactcagagggaccctctggaatgcaaatgacaacatggcagtgctgggcttcatactcttccattgtctccactcccagtgcccctgcctgggaagtctcgcttgatctagtccctggcctccttgcctcctggtcacctgcacactcattccccaccagatccagcggagcgcccatctcccctgcctccagcagttgctggggacgcctttcccccaacctgaggggctcagtggcagttagaaaggcaagtcattggaaaggcccccaggctcgcctggtaaaacccgagcctggagcctcacttgctattctccaaaaccactcctcactctcatattgttcctcagcattcctaccacaatggtggaattacatgctgatgtaaaaaatttttacttcctccattctattaatctaaatgttgcatgctaaatatattctatctt

SEQ ID NO: 849160 - DNA, 647 bp, Homo sapiens
cttccagctccattccatatggaatgtcagtaaggtcctgctaccaccagccaatatgctagacttgttctggagtgccactgagcccaaaaagccaccctaagtagcccattggagaagaaatacmagctgccgactctggcctcagctcagcccctgaacatggagttggcaaatcgtcatctacctgtttctccacctggtcacattcacaaggactttccttgccttgggtttttccctcctaaatccctgattgtcaacccagctctggttaactgacttggcacctgagggttcatctgttaaaactgtctctaacacaagaaattcatgccaccccatctacctctttgcagaagaaaattgtccctattaagcttttaaattccatcttttatcatcaatgggactgattcttactgtcaaccagggtatttttgtggtttcttccagcctaaaacccatgaatctatacccatagcaaaaatatttatgtttctgaggcctcctggcatttgtgcccttatagagtgccctcccccattgaatggggctgacccatgtgaccaataaaatactgtgaaggtgacagtgtgtgcttcccaaggctaggtcataaaatctattactgccttgattgctgc

SEQ ID NO: 849161 - DNA, 674 bp, Homo sapiens
cattccccttagtgatgattcatgtggcagtgagcaggagaagcagctgactgccacgtaggacaactgctgttttactcctagctatctctcttgcccaagcagtagtatacaagtgggcatgtcatatattaaaaaatatatattcaatatatacaaatatgtatcatatattatttatattatatatatctataggtatccatctatctatctaggaaacaacataagaaatgtaagagctggtcccttgcattggagaagtttatacagcagtgaaggatataaacaggagaatcagacttagggaaagtgaataaggaaaaaacatcacgaaatgccaggtgagtgagtgacctgcatcatacttgcacttaaagcttcatctcttcactccctgaacaaccagtgaaacagaaagcaaggataggggaactggctaacagctggttttgatgtcttgtcccaagaactcctttctggcctggcgcaatggctcacgcctgtaatcccagcactttggagactaaggcgggcggatcacttgaggccaggagttygagaccagtctggccaacatggtgaaccctgtctccacaaaaagtacaaaaattagccaggcatgatggcgcacacctgtagtcccaactactcaggaggctaaggcataagaa

SEQ ID NO: 849162 - DNA, 588 bp, Homo sapiens
ataagaatcatctgtatatctagcctagccaacgtggtgaaacatcgtctctactaaaaatacaaaaattagctgggcgtggggcatggtggcacacacctgtaatcctagctacttgggaggctgaggcaggagaatggcttgaacccgggaggtggaggttgcagtgaccaagatcgcgccattgcaccccagcctgggcaaactctgtctcaaaaaaaaaaaaaaaaaaaaagaaacatctgaatttgacttttaaaattatgactatatatcataattcaatcaataaatatgttaaatgatttttttctatgaaggataaagtaatattttccctaaaaccaatcataagaagaaaagtacttcctttagtgcaaagttataacataggccagtggttctcaaagtgtggcatagggaaccctggagaatccccaaatctttttttagragaacggtctatgaggtcaaaagtattctcaaaacaatactggggccgagcgcagtggctcacacctgtaatcccagtactttgggaggccgaggcaggcggatcactggaggtcaggatccctgaccaacttg

SEQ ID NO: 849163 - DNA, 642 bp, Homo sapiens
acagactaaccctgtaaccaggatccattaatagaaattggaatggttggaaggaarggctgtttgtagagtaaggtgcttttcatatgttgaattgaaggtgttgccaggacatctaagtcattattttctagtcggtaaaagtagctgagacgtcatttagagagggatatgtttgtgagcattttttgtttggagatgatagttgaagctgcatcaagacagtccattcatttttaatcttattgggggaggattagtgagctcagcttaggaagatgaaagaatgggctacccagtatgatatgcgtgcctgaggacacatgttgatcccatatatggatgtgcacatgtgactgctttgatttttgtctagtgtagacatgcctgaacatttatgttttgaaatatgtaatactttgttaaatttcttttctttccttctcctttgtgtcacagaccatgaaacaactttttttgatagtggctggaaagcgtcgggtagtactgatacatgcaaggctggttgatgaagagcacagtctctaggaattaggagtacctcaattcaaaggctgcctgtgtaactatgcatagcttattacttcctttcttcacaagtttagacaagtttgatcatgg

SEQ ID NO: 849164 - DNA, 625 bp, Homo sapiens
gagttcaggatacgtttagagaaatattactagagcctgtctttgaaagagttgtgtattataggaggaggatgtgtgctaaatggaaaagaagctatagggatatggcagtgaagtacctgcctctgctcaggcaagtcatgggatatccgcagctgctcagataataaattatatgagtatatttgtgatatacccatataattggtatttgtgaactctgcgttgggttctatttattcaaagtggagttggcgccaggcgcagtggctcacacctgtaatcctagcattttgggaggccgaggcagacggattgcctgagctcaggagtttgagaccagcctaggcaacatactgaaaccccatctctactaaaatacaaaaattagccagctgtggtggcacgcacctgtagtttcagctactgggaaggctgaggcatgaaaatgtcttgaacccaggaggcggaggttgcagtgaggtgagattgcaccattgcactycagcctgggcaacagatggggagactctgtctccaaaaaattaaagtaaaatgaaaacaaagtggggtggggttggcaaactttttttgtaaaggacctggtaataaatgttgtagggtt

SEQ ID NO: 849165 - DNA, 608 bp, Homo sapiens
taagtgtcagttcatgtgtttcatcagtttttaaaaaattgggttgtgtccctttttcttatttgtaggagttctttatatattctaggtacaatttttttcatgtgtacgttygtctctatacgcacacatatacttattattgatatattttccttattcttggattgtctttcttccttttttttttttttctagatggagtcttgctcttgttgcctaggctggagtgtgcagtggtgcgatatcggttcactgcaacgtctgcctcccgggttcaagcagttcccctgcctcaacctcccaagtagtttggaatacaggcgcgtgccaccaagcctggctaatttttgtatttttagtagagatggggtttcaccatgttgggcaggctgatcttgaactcctgacctcaagtgatctgcctgccttgacttcccaaagtgctgggattacagatgtgagccagaatgcccagcctgggattgcctttctgttctctctctctctcttttttttttttcagggtaggtaggaaagtatttttattataaatttcaggatctaaaaaatgatttattacatttgctacgattaaggtgaccttt

SEQ ID NO: 849166 - DNA, 625 bp, Homo sapiens
aatctagatcatggcaaactctagcctaccagttaaattcagcccactgcctatttttgtaaataaatggtattgcaacawgatcaaggccatttgtttagaaattgtctatggctgcttccacactacagtctcagagtcaaatagttgcaaaagagaccatatgacctgcaaagtgtaaaatatttactatcttgccctttacaaaaagtttgcccatccctgctctagatgatcagaataataaaattagggaacacttactaatcactcaccatgtgccaggcactgttttaacatgttacatagctaagtaccttaggaaggtaggtaccattattgtagccatccaacaaaagggctcagaaatttggcaagcttagatgattaatggcataattcaggattttgaaaattagtaaataaaaatacaggacacgcagttaaatttggatttcaataaacaatgagtaatttcttaatataagtatgtcccctgcaatttagtggagcaatacaataattagagagtacttttaatttctctgcaatttgggggcatacttatactaaaaattatttattctttatctaaaattcaaatttaactggacatcctgtattt

SEQ ID NO: 849167 - DNA, 589 bp, Homo sapiens
ggggacatttaaattactgaaatgaaattgggtttgaagatatgatcataattgatcacaggactatctattaaatacaagttaccagagaagccttgggcttggccagagttttcatttagttataagaaaaatagtttccctgccacataagtattaaagaaagtgtgggagaaaaacataaagttgtatttttactatatcccacttagcgtcactgttcaaatacaaattatgttctttaatgcattttctcacaacttccagatacctagaggcaactattgaatatgttggaggtctcccacaactaattacagttaaagttttaatgcacagttatagattatacttttcataagtatgactttcttgagtttatgcacatatcccaatgaaaatggaaagtgttcaaatttcatatgagtgagttttcatacgactttagtcatatgtaaaatagaatgacaataacaatcttgtaaggttgctatsaggttagtggataacttattctaatgaattaacacaccttgatcatttaatatacacagttattgctgtattactataattgctgtcacaatca

SEQ ID NO: 849168 - DNA, 589 bp, Homo sapiens
tgtgacttttgtaagtcacactttctaatattttttgcaggcctcatacattttgatgaaagctggatgttttagatataacattgtttcaacaataactttccatttccctttttttaaggctattttgatctttgattgtttctgtttttgtttttttgttttggctgtttagtaatttccatcaattttatctcagtaaagtaataaaaagtaaatactttggtgagtcacataaattaaaccagattacctctgagttgaaaattcctgaagctcagacatgtgaaattactactcaaactagtgttgtatatgtttgcaattttcataataaaactaacatatattaacatagtaaactttgattagttatttgaaggtatgatttgacattaggattatcatcatacagtaagtatatctatacaaatacaataaaatactactactttgtcagtcatcatagtaagaaagagttattttkccttgtaaaataaagctaacagcaataaactacctcatggaaattctttaaatatgtaaattggttggttccttggatatattacccactcaataacaataa

SEQ ID NO: 849169 - DNA, 284 bp, Homo sapiens
gataaaaaatttagtgttctataccattgtaggatgactgtagttaacgatagtgaagtttcgaatagctagaaggctgtcgaatgttcccaacacaaatatgataaatggagatagtgatatgagataatgataaattgagataatggatatgctaattacactgacctgatcattatccattayatatatagaaacgtcactatgtaccccataaataagtacaattattatgtgtcaattgaaaataaactaaatgttacaaaaagaaaaggctctataaa

SEQ ID NO: 849170 - DNA, 599 bp, Homo sapiens
ccctgaaattaaaaaaaaaaaaaaaaaggctcaggcagttgcgtggaccttggtggattatgagtggtcatggagtggaaaagtactgggtagtggagtgctagaagtgaaaatgtcagagtcgggagaaasatcttttaggttttcccttctacctacaccctcctaccctgtaagaaggcttcagtacagaagcctgaagaagacctctgccaaatctcaaataaagagagctggaaatgaaaactaataggctaggaatacagctatgggaaaatcatgacctgtcagattgtctgagtccttgactataactccttccaaagaatgcagtgcactggctgtgcaacatgtctggtgtggggaagacagctttcccctgtgagtcctgccaggtaacgcctttgtaaattgcctgtggttgggcttgtaaaatcagtcatggatttttaatcaggagccagactacttacaacctaactactttaatgtagttagattaaggaaaaggggattcaaccaggatcagaggcaggagcacacacaaaaagttttaatcctattttatatagagcatatattaaatccactccatgatt

SEQ ID NO: 849171 - DNA, 519 bp, Homo sapiens
gctgaggagactgcccctcctgggtctagccagttcttacacagtaaaggggtcagatggagcctgcctgtgatgtgcaatctagccaatccagaggtgtatctcctttatgtgaccactataccccagaaggcaatatttctttgatttactcacctttaaatgatattttgctatttgtataatgcctccactaaatgtaacaaatccacaagtataggatgaggctttaaggctaagcaaattttaattatattaagttgatatttaatatctttttttggtatgtttcgaattcccaatcataaatggtagaagggaagagctactattccttttaaaataacaataaacttttactaccaccaaatagaggcaaaattactatggccaatgttccttctgaaaatgaaaggaaactttagtyccccgactcttattattcttccaccattatcagtcttggaaactaaatagagtaaggcatccataaattaacatgatgacaatacaaactta

SEQ ID NO: 849172 - DNA, 639 bp, Homo sapiens
ttcgggcatttaggccttgggcccacatttgtttcacagttgaactcgaagtgctgattcttatttcagtttggatttgctgccaggtctcccagcccaagttcagtttcccatgggctggctgaaccaccagtgtaaaacagcaagataacatcccagagctggagctcctccagccatgttatgtcaggagaaccgagtccatgttggcctcacagggtcactgtgttctcacagccaggaagccaccctggaagcacatggatggatggctccagcatttcatttcaacgccatccagtctctcattccagctgtcgagagcaaaccaaagggagaagagaaaaaaaaaagtccaaagaagcactagttcaaggccagtttcagaaatcaagtgtttaaataaaagttatccagactgaaattctggactctgataaattacaaaattaaaaccagaataaaggtaggtagctctgaacactctggtcagtaagtttctgagttaattgaccgaactgtccagttaattgcttccacccgcacttccttttggttatggagacagtttctctacagaaacaattgctttcccacctgaaggttaaaatarcaatgtaaaactatacctggcaaaaa

SEQ ID NO: 849173 - DNA, 608 bp, Homo sapiens
gcacgcctggctaagcatctgcttgtatatgggctgtgtaagacaccaagagcatgaagcccattccctgccctggcagaatgtacaaactagttacaagctctgatgtcttcaaaatatttggagattaattatttctgcacatttttcttagggctgagtttaagtgaatggattcaaagaattcagggatttagaacctgagaacagataatgttctgaatattacccaatggtaacatgggactaggaatatagttcgctgtattttaagagactgccgtctttagaagacaatctatagagattgccctgttcagatagagagagcctatctgaacaagaaatccagagacagtaatggacagaggtcatggattcaagagctgggtgtgcacataattgatgttcaaggactttaggaacgagaggagaactgggggcaccctcattggcatctgcttcaaacactcattgacatctgcctccatggactaactggtacatgatgtaccagtatacggaaytggcttaaagggacagccagccggtcctcgttagcaggatcccctggagcctctcatttgttagagatggcataatatcca

SEQ ID NO: 849174 - DNA, 530 bp, Homo sapiens
gctttgaggtataattcacaaatgcaaattgtatatactcaaggtgtgcagcatgatgttttgatataaaagctgaactcacagaaacaaaatggaaaggtggtaaccaggggctggaggtaggagaaattggaaagacattggtcaaaggatgcaaacttgtagttacgagtaagttctggaaacctaaggtatagcatggtgactatagttgctaacaatgtattatatatttaaaatttgccaagaagtagatcttaagttttctcaaggcacacacacacggttatggcccctacatcagacacacataactatgtgaaaccatggtaggtattttacattttgttattaacctaagcacttgaacaacagatgtagggctgaagatcaagagaatcrctcagggtactttagtaccattccattggaacttaaacgctacgagggcaggaattttgtttcccaccgctctttccccaacacctataccagtccctgacacacagtaagtgctcagaaaacaactg

SEQ ID NO: 849175 - DNA, 530 bp, Homo sapiens
gctttgaggtataattcacaaatgcaaattgtatatactcaaggtgtgcagcatgatgttttgatataaaagctgaactcacagaaacaaaatggaaaggtggtaaccaggggctggaggtaggagaaattggaaagacattggtcaaaggatgcaaacttgtagttacgagtaagttctggaaacctaaggtatagcatggtgactatagttgctaacaatgtattatatatttaaaatttgccaagaagtagatcttaagttttctcaaggcacacacacacggttatggcccctacatcagacacacataactatgtgaaaccatggtaggtattttacattttgttattaacctaagcacttgaacaacagatgtagggctgaagatcaagagaatcgctcagggtactttagtaccattcyattggaacttaaacgctacgagggcaggaattttgtttcccaccgctctttccccaacacctataccagtccctgacacacagtaagtgctcagaaaacaactg

SEQ ID NO: 849176 - DNA, 599 bp, Homo sapiens
ctatgtgaaaccatggtaggtattttacattttgttattaacctaagcacttgaacaacagatgtagggctgaagatcaagagaatcgctcagggtactttagtaccattccattggaacttaaacgctacgagggcaggaattttgtttcccaccgctctttccccaacacctataccagtccctgacacacagtaagtgctcagaaaacaactgttgagaataaatgaatacctggcagtgaactaataaactcaaagggaaacgaaagccaagcacatcccatcttgttgtgaacacgaagattctgacggtctcaggcatccctgagcgagtctgctgtgaccactttggggtttcacatcaggagaaaaaacaaatgtccaaaagaagataaaaataaattaggttagagaaaagaaaatagacatacttaaatgaacacaaaagaaactatgagagcttaatttaaagaggtgtcagaaactttccaaaataaagaatcaggctgggcgcggtggctcaggcctgtaatccyagcacgttgggaagcggaggcgggtggatcacgaggtcaggagatcaagaccatcctggct

SEQ ID NO: 849177 - DNA, 612 bp, Homo sapiens
gacaaaaggctgtcaccagaagggaaattaacaacatcgctaagcctgctgtgtagttcagctgacgttttcttcacagcwtgattttctcaatgaaggaaaccaaacacaatttgcatttgggtgcgagtgtctcatagttgtgtgctgataaacagtttgcagattggctatttcaaacagcactgctatagtttggtgacactttaagcaaacacagaaaatagcagaacattcattcaaaaatgattttctaggtcacttgaaattgttggatattccagttgcagtgaaggagatatgaaaatgactagagcaaggtatctactcatctcttaaagcttctactaaagtaatgctatcgctgcaatcatccttaccagacttacagaagagcttaacaccaaattcacagtgccgtgtctggaaaaaatccttacgaaattgctaaaatcctcttctgggtatgacagccatgatctagggtgcttgccatttgttgtcttttttttttaaatttttaatttctgtgggtacatagcaagtgtacgtatttatggggtatctgagatgttttgatacaggcatgcaatgcgtaataatcatgtcatg

SEQ ID NO: 849178 - DNA, 453 bp, Homo sapiens
gagggattaaagtctcatggaaaagctatcatggatgaattgtaaatatatgtaatttagtcactttcagcaaagtacaaataaaagtactgtgaaggtaagggggaaaagatcactggcaatatattttgcattagtgtaatttattacaagcatagctgctaaataaagtgtcccttgttctttcataaatgtattttaacaaactgaatagctgaatatcaatcaagcattcctttctatcatgattctgaacagactgggctcagggatctcttggagaccatgataagttatggcttctgttagccagcaggtgtgtgtgctcacscattcaattctgaatacacttccgggctgttcacagaaactttacagccatccttgaacgccttacatgtccacaaagcccaagctaagaagctacgtctttccagtatctcacttttaaaa

SEQ ID NO: 849179 - DNA, 586 bp, Homo sapiens
ctcaccctcccatgtagctgggactacaggtgtgtgccaccatgcctggttaattttttgtgtttcttgtagagacagggttttggcatgttgctcaggatggtctcgaactcctggactcaagtgattcaacatacctcggcctcccaaagtgctaagattataggtgcaagccatcacacctgatgaaaaattccttttttaaaaaaagaaatcattcttctttttactttcctattgtgatgtaacataccgaggagaatatgtgttgatataaaggaattcacagatcaatgaatttttacacacatatgtacacctatgtacccactacccagatccagcaatcagatgtctccaaaattccaaatggttctcttgtgcctcttcttggccaaggctatcccctatccttagaggtaaccactcttctgatgtcaaacagcattgattaaaygtgtccataattgtggggttttgtggttgttgttcagctatactcattattttaaaaatgtttttattaaggtataattgacatacatacattaaatttcaccctttttagtacatagttctatgagtt

SEQ ID NO: 849180 - DNA, 563 bp, Homo sapiens
ctactgtttctggtgttaaagcaagttaagatggacaccaggtcagaagaaactctaaacagacaaagccagttaggcctcataagtaacaataaycttgctagatctgcaaacagaagcaaaacttaagctatgttttataaatgtctatagaaagaaaaatgaaacttaaggctagccaatagaagctgctaactaacttaaagttatataactgcagacttttcagcagaataggtcaaagaaggcaactgaataaccataaccaatcaatttttttgtctgtttgttttacttctgtgtttactctataaaagcattcgctttgtgctccctcaatggagccccccaaccacttctgttttggaagaggaccaatactgaatcactgtttcagcaaataaactctttaaaaaatttacctgcctcagtttccttttcatactggtgatgatagttttaaaagagtttgggcaaaagtaaaaggaaggaaatgtacgctgatgatcaaagaccagagaaacgcagacttatccatgtgatatattatgcttactgagatc

SEQ ID NO: 849181 - DNA, 593 bp, Homo sapiens
attaaaattaaccaatcggccagacgcagtggcccatgcctgtaatcccagcacttcgggaggctgaggtaggtggatcacctgaggtcaggaattcaagaccagcctgaccaacatggtgaaaccccatctctactaaaaatataaagaattagctgggcttgctggcacgtgcctgtaatcccagctacttgggaggctgagacagaagaattgcttgaacccaggaggcggaggttgcagtaagccgagatcacaccattgcactccagcctgggcgaccagagcaaaactccgtctcaaaaaaaaataaaaattaaccaatggactccattatattggcatagtaaaaagaaaagttgtatgattatattaatatattcaggaaataatttgacaaaatccaacacccattcattatgtaaattgtaagcaggttaggaataaagggagattacctccatttaataaaatgtgtcaccttcagagaawaccacacaataatgaaagactgaatgtttttcctctaagaatgagaacaaggcaaggatgataatgctcatcatcactctttctcaacttattgcaaaaca

SEQ ID NO: 849182 - DNA, 594 bp, Homo sapiens
tgggaaggagggaaggtgcaaaggcaaaaaactacccattgggtactatttatttgcttttaactatctatgtgtgtcccatcattaagtgtacattgttaaaataaatacaccacctagacgttaaacaccaatttccataaagctaggtgcattcttcacacttcagcatgcctcattgtccctttttggaaaatttttaatgccttatacctgagtccaccataaaggtgttggttaaatagttctgggcttatgttggagaatgagtattttatgtaaggatcctggtgattttgatgcaacttgatcttggatcacattatgataaatatagatgaagaagtagaaaagagtaattagccgtaaatctgcagaaccttgcaattcattatatttgtttttatgtgtaccaactataacgtgaatttggtatcgatatttgtgccaaagatataggtgcttgcatttgaaagtgcatgctgtgttttcttttgttctatcaataagtcagatgaagtaaagaatttgcaaaatgttgatgaaacatatttgctaacacrcaagcattagctctttttgtaagtggctgta

SEQ ID NO: 849183 - DNA, 485 bp, Homo sapiens
tttagctctttgatgatacctctcttgctatttgtttgggataagacttcgccatttttttcccctcagaaattaagtttgctgttattaagtaagaagtgcaatctgtcactactgatgttccgtatagtaaatctgatggaattcatttgtatttagactgtgtgttttgtacctccatgtgcatatgtccattgtatcaagtctctataatactccattccttctgcatgcatatctggtgtgggagggttatttctactgatttgttatagtagctgattgctttgccagtccctcaacaacgctcagaaatgttgttttggtatttcaagtgacaacatttttgttttctaatataagattgctttttaaaacattttgctaccactttacttggaaaaattagagaagacatgacaattctccaccctatgtaaagagcaaaatggaaytgaacatcatttcattacaaatcctgaaga

SEQ ID NO: 849184 - DNA, 613 bp, Homo sapiens
attctcctgcctcagcctctggagttgttggtattacaggctccccacaccatggctggctaatttttgtatttttagtagagacraggtttcgccatgttggccaggctggcgtcaaattcctgggctcaagtgatccacccgcctcagactctcaaagtgctggcattacaggagacagccaccaagctggccaagtttctgtgcaattttcaaatgttatattcaatttttgtgcatacactttcattgaccaaaacaaagatcatggaccagtgatggtcagtggaacacatctggaacatgactgctgtaatacaatacctaaaaaataataagtgcttggtaaaagacttctattattaacacctaacaataggtctgagtcaaccattaaataatcatctttgtgaaaccattattgaaatggcatagaaatttcatgtaaataatattaaaattattctaaaataatagaagcaataaaaaagtatacttgtagaaaaataagcattaaacttacctcatatttcccttcataaataataaatgccacaaaataaagaataaggttcatgacaatgttagtagaaaaattctatagtctaatata

SEQ ID NO: 849185 - DNA, 613 bp, Homo sapiens
attctcctgcctcagcctctggagttgttggtattacaggctccccacaccatggctggctaatttttgtatttttagtagagacaaggtttcgccatgttggccaggctggcgtcaaattcctgggctcaagtgatccacccgcctcagactctcaaagtgctggcattacaggagacagccaccaagctggccaagtttctgtgcaattttcaaatgttatattcaatttttgtgcatacactttcattgaccaaaacaaagatcatggaccagtgatggtcagtggaacacatctggaacatgactgctgtaatacaatacctaaaaaataataagtgcttggtaaaagacttctattattaacacctaacaataggtctgagtcaaccattaaataatcatctttgtgaaaccattattgaaatggcatagaaatttcatgtaaataatattaaaattattctaaaataatagaagcaataaaaaagtatacttgtagaaaaataagcattaaacttrcctcatatttcccttcataaataataaatgccacaaaataaagaataaggttcatgacaatgttagtagaaaaattctatagtctaatata

SEQ ID NO: 849186 - DNA, 465 bp, Homo sapiens
cctaatatgctgtaacctataaattagtgaccaaargtttgagaatttattaatatatcaatcccaagttattaaattttgactcagaagaaataaccacggttgtgttggtggccccttctcttcaactctaaaaaaaaaaaaaaagtaaaatttttagcatatggccttagtaactccaactctatctggaaaaccatgatggcattttttgttgtgtggtgtcagtgtcagaaaagacaacttatcaaacatttcttacaaagtcttgacattttttaaaattatgctggtaaatccatgcatgtcctttggcattacagggctcttcctcaaggggacctgatctctacctgtggaaatgacctatggatttgtgaactagaaactgagggaagaaccatacttttcccttttttccatgtttcccggctttaatgaaaggtacaattggtatgcaaaaaa

SEQ ID NO: 849187 - DNA, 465 bp, Homo sapiens
cctaatatgctgtaacctataaattagtgaccaaaggtttgagaatttattaatatatcaatcccaagttattaaattttgactcagaagaaataaccacggttgtgttggtggccccttctcttcaactctaaaaaaaaaaaaaaagtaaaatttttagcatatggccttagtaactccaactctatctggaaaaccatgatggcattttttgttgtgtggtgtcagtgtcagaaaagacaacttatcaaacatttcttacaaagtcttgacattttttaaaattatgctggtaaatccatgcatgtcctttggcattacagggctcttcctcaaggggacctgawctctacctgtggaaatgacctatggatttgtgaactagaaactgagggaagaaccatacttttcccttttttccatgtttcccggctttaatgaaaggtacaattggtatgcaaaaaa

SEQ ID NO: 849188 - DNA, 465 bp, Homo sapiens
cctaatatgctgtaacctataaattagtgaccaaaggtttgagaatttattaatatatcaatcccaagttattaaattttgactcagaagaaataaccacggttgtgttggtggccccttctcttcaactctaaaaaaaaaaaaaaagtaaaatttttagcatatggccttagtaactccaactctatctggaaaaccatgatggcattttttgttgtgtggtgtcagtgtcagaaaagacaacttatcaaacatttcttacaaagtcttgacattttttaaaattatgctggtaaatccatgcatgtcctttggcattacagggctcttcctcaaggggacctgatctctacctgtggaaatgacctatggatttgtgaactagaaactgagggaagaaccatacttytcccttttttccatgtttcccggctttaatgaaaggtacaattggtatgcaaaaaa

SEQ ID NO: 849189 - DNA, 504 bp, Homo sapiens
tagattttggttaatagaagatgcttgcatgagatttcatgctggagagaacattcaggatattaatatttttaacttttattttagatttaggggtacatgtgcaggcttgttatacaggtaaactcatgtcacagggatctgtcttacagatcatttcatcacccaggtattaagcctagtgcccattcgttatttttcctgattctctccctcttcctaccctccactgtctggtagtctgttgttctggtctctgtgtccgtatgttctcatcatttagctcctatttataagtgagaacatttggtatttggttttctgttcctgcgttagtttgctaaggataacaccctccggctccatccatctccctgtaaaagacatggtctcatttatatttatggctgcatattatttcrtagtatatatgtaccagattttcttaatccaacctatcattgatgagtgtttaggttgaatccatgtctttgctattattaa

SEQ ID NO: 849190 - DNA, 615 bp, Homo sapiens
agagactctagttgccttccagtatattttttccttcataagggaaggttcrttttatttgagccagcaatgcctccagctgagatcacgtatctcttatccttcgcctctcagtctgaccactggtctaagtcctggcgtcctggccattgagctgtaaacacacatatttgtgtgacttctgagaaggctccttaaagtcgccttttgtcctttcttattttttttcttctggctgctttgactacagttaagatgtttggagctttttaaatatgaaggtgaaataaacttctcttgtatttaagccactgttgtttgaagttttctacttagcatagttgacctaatcctcctgatgcatgatttcccaaaaggaaaagcctagagcaggtttctaagacagtatgtgagaaacgaataatctgtgattagtgttattacttctgtctctattccaatttggttttccaagaatcagaaggatatccagcattttaattgggtacctcaaaatcttttaatttagtatcatttctattccctcatatgagatagaaaagctatagaaagttcaatctgaatcacttttgcacttaaagaatagcaagtctc

SEQ ID NO: 849191 - DNA, 615 bp, Homo sapiens
agagactctagttgccttccagtatattttttccttcataagggaaggttcgttttatttgagccagcaatgcctccagctgagatcacrtatctcttatccttcgcctctcagtctgaccactggtctaagtcctggcgtcctggccattgagctgtaaacacacatatttgtgtgacttctgagaaggctccttaaagtcgccttttgtcctttcttattttttttcttctggctgctttgactacagttaagatgtttggagctttttaaatatgaaggtgaaataaacttctcttgtatttaagccactgttgtttgaagttttctacttagcatagttgacctaatcctcctgatgcatgatttcccaaaaggaaaagcctagagcaggtttctaagacagtatgtgagaaacgaataatctgtgattagtgttattacttctgtctctattccaatttggttttccaagaatcagaaggatatccagcattttaattgggtacctcaaaatcttttaatttagtatcatttctattccctcatatgagatagaaaagctatagaaagttcaatctgaatcacttttgcacttaaagaatagcaagtctc

SEQ ID NO: 849192 - DNA, 620 bp, Homo sapiens
ggggcatggcccctgcccctctctggcaccccctgcaccctgctccagcacayattcagcaatctggaagttctctaaaccctgtcctttgggggttttatggaagcttcattatgtagatataattgattatatcactggccattggtgatcaactcaacccctctccctaatcacagaggttgggggtggggctgaaagtctcaaccctctaatcacttattagttcccctggtaaccagcccccatctgaggctatccaggagagcctggacatcagtcatccatgtgaaaagacacttctcactgtgggcgaaggattacctaggtgccgaggtaagaaactgaaggcacaactgtttcagtataaaaaagaaaatagagtaagagtagtcataatacaaattagatatagagatgatcatggacattatcaatcattataaacatcatgaatcattagcttttaatattactctttgttgcattactaatataacctaggaataaccggcgggcatagggtcaggtgctgaagggacattgtgagaagtgacctagaaggcaagaggtgagccctctgtcacgccggcatgagggctccttggtcaagcggtaat

SEQ ID NO: 849193 - DNA, 576 bp, Homo sapiens
aagaaactgctgtttcttttcagtagctaccaaatgctgccacttatgttttatactttttgaaaattttaaaatagttctggtttatagaaaagttgcaaggataaaacaaagaactcccatataccctaaaaccagatgcccccgttattaacattttccgcatttgctgttatcattttctctctacacagtattttttctgaatcatttgaaagcaagttgtagacataatgtccctttgactccaaaataccatgagtatgtattactttattcacatctggcaattgtccaaataatgtcctttatggcaaaaaggaaaatcaaaattctagtccatcgtctggttcagtattacatgttgcatttcattggtacatccccttactgtttaatccggactgttcctcagtctgtcttgggcgaccttggcatttttgaagactgtaagccaggacttacagaaaacgatacatattctaaggctgytggaaaattaaagtttgtgaaggtgaagcagtagatgaaaataatgtgtagttttcgtatttctcttggaataacattttataa

SEQ ID NO: 849194 - DNA, 590 bp, Homo sapiens
ccaaactaccctttagataaagagcattaggactgtagctgaagctgacagttcaagaaggcaatgtggttttcctgggatcacacagtgagccaggaactactggttatgaaattaatggtggaattcttcaatttcaattgttctttagcattttgatctatccttgctggccaaagtacatataaaaaaataaagggcaagagaaatcttattggttgctgtactgtattagccatgagattatattggccaagtgtattcaaatttgatacagggcaactgtggggaagataatattttgttatctatggcacatggtggtgagtgttgaattctaggaaccaaactgttgcccagggagaggcgtaggtctggagcccctctgcagctgtcttggcctgtttctaaaattaagtgcttctgcagtgtaagagttgttgggatggccgttcctcagaaggctgtgtcttacatgctcattttacaaacattttgggcatctcctctgggcgatgaactgggctaggtgctgggaatgcarcaacgaacaggtcctggtctcagtgcttacagtgctgacggagctt

SEQ ID NO: 849195 - DNA, 589 bp, Homo sapiens
accccctgcagtcgtcaaagggtggctcattgctttctgtggcttttactcctgagtgaagctgcctttcttattaccctccttgtccgttccccgtcacctgtgctgtgatctggtttggaagtttgaagttaccccaagctctcttctacttttttgcagacctccaaccccctcattgttctccttaagcagattgtcccccaccccaccctttttggagagtttctaggattttattttgggggaataaataaatttctttccaactgggatggtggtgaaaaggctgtttgtagactgtgggtggggaagggtttgaggccccactgctgtcatgcttgttcggtggcatttgcaccactggagatgattttagacagggtgtcagcccagcagtaaacatcattgaaatagaagtcaggtcatgactcccttttcagttcttttctttttgttttttttttttcttgggggatatgacctttaytgagcttatccaccacagtggaaataatgtctgtacaaagccaaatgtttgttactataacttctgcattacaattaaaatccaaacagttttttaaaa

SEQ ID NO: 849196 - DNA, 558 bp, Homo sapiens
caaatgtattccttactttgttttcataactatcgttaatatgatgttccaagtctgtatttggataaagagtcattattaaagcacctcagtggtgtctaaaatrcaaaagtttctcactaaatatttatttcaaattaaataaaatctaaaacatggataattcagacatgcaaaatatcaaagattactttttatagtgatcataggtttaatacataattagaagctaaaataaacatatccgaaattaaaacaatatgataactgtgaggtaagtgtccaatgtttgaaaatgagaacgtggtatttgcttcgatcaaataagtaatattcaagttttaaaacactttcctaaaatcattgtgacgtgaaggctgataagccaatagaagcaagaattttccaagtcaggaaatctgagcttgtccattactatgtgtgtgattctgggcagtttaaatttctgagcctcattatctttattgggaatagcagtattacctgcagcttttatatcaggatgaaactaactatatgcaaaccatctactactgg

SEQ ID NO: 849197 - DNA, 610 bp, Homo sapiens
attgaaatagatatttgtgttccaaaaatatttacaacataaaaccatcattttaaattaatatttataataataggtcaacaaaatacttaatacatttagacaatttcactgatctattataaatatatataytgaatattttactaatttaatatgatttagtatgcctaaatacatatgacagcatacattttaacctgtgtgtattatgcaaaatatatactgtaatatacatttgtataaaatatagatcaatatacaacatacattgtgctcaacactttgtaacttataacaaaccaagcatacattactcattttatttccccaataatatgtggtcccaatatcctcatttttttaggtgcaaagactaatacacaacaagtctcagtgacgtgttaacatttatcacatgttaaaaatatatatttagaaaagaaaatcccatttactttctttaacttctccccagagaaaataatgagttatttctctcatatttttgttacaagcatattttagaatatatgttttttacccattaaataaaatcagaaattcaaaaaatatttaatttttatacaagccaaactctttagttgtc

SEQ ID NO: 849198 - DNA, 610 bp, Homo sapiens
gcccctttctcatagtttttcctgttcaaaaatgtgtggagcattgtgtctggaatgttractcagtggtgacaggagaggcagatattttgataaatctaatatgccatcctcctcttcactggagaacttgaatgatcttggatgtgagaggagagctggtaggctggtatcaggacaaagaagtcagggtataaaagaaatttgtattactgcagcagcagattcctgcatggtgttccctattaggccaaatagaatctgtatatctcattaaaagccagtctggaaatagaatagatgagataatccgtagcaaagactaatgggaatctgagattccattgactggaaagtttaacatgtggttcttggtgtgcccctctcgacccacacacaaacactcaccaacatagggacacccaaaggggaggaagactcaaggaagaggaattaagttataaattacttattgtttgcctaactgaagtgtaatggtcgaatggttgaattgtaacctgtcacattagaccagaataataaaacatttgacagactatcattcagattattaaaataatttatctaatttatcataaatatcctaaag

SEQ ID NO: 849199 - DNA, 429 bp, Homo sapiens
ggctctgcagtttataaatcaccccagaacacagccrggctgtgaaaggcactcagccagaagttgtgaaagcaaataattttcattccctgccctgggaattacgtgaagcaacagaacaaaagctgcattccccagagattttctgaatgtaaaatgaaagggaaaacatgaaaatcaccggaaaggcagagttaggaaagctaaggaaagaaggcagagcacagccaagacacctttggccggttcgtctcctgcttccagctgtaggtgcagaataccttctgcaaagaagagtgttggaaatgttctcagaggctatcccaactaggagaagcgaggcatgagatggggctatgcatctgcatttcgtgatgataagaaaataagtattttttttgacctagacattaacgaaaatcttaaggg

SEQ ID NO: 849200 - DNA, 429 bp, Homo sapiens
ggctctgcagtttataaatcaccccagaacacagccaggctgtgaaaggcactcagccagaagttgtgaaagcaaataattttcattccctgccctgggaattacgtgaagcaacagaacaaaagctgcattccccagagattttctgaatgtaaaatgaaagggaaaacatgaaaatcaccggaaaggcagagttaggaaagctaaggaaagaaggcagagcacagccaagacacctttggccggttcgtctcctgcttccagctgtaggtgcagaataccttctgcaaagaagagtgttggaaatgttctcagaggcyatcccaactaggagaagcgaggcatgagatggggctatgcatctgcatttcgtgatgataagaaaataagtattttttttgacctagacattaacgaaaatcttaaggg

SEQ ID NO: 849201 - DNA, 550 bp, Homo sapiens
ccagagaatcgcttgaacctgggaggcggaggttgcagtgagccgagatcgctccattgcactccagyctgggtgacagtgtgagactccatctcaaaaaaaaaaaaaaaaaaaaggctgttaacattgtgacatcctgagaagcattccttcgagcccagtatatcgcaaagctaattgagccagaaaaagtcagaattcattcattcccttttctgctatccctcgtccatccaattgactcaccaaatttctcaccctctcttcaagactgaaaacccctggccctccatgttatctacttttcccataaataaagtctagtttaaaagtagctgaaagcagagagtttttatttttaactttgatccaaaaatgttgcttgtctccccacttctgtccctttcctggccacaaacatttttgctggttcatctagctgcctgaaaccacagcccctcagagccagaagggcccttagaaatcaatctggtcagagcatttcacctggaggactcagcctccaaaagatcatatgagaatatctgtg

SEQ ID NO: 849202 - DNA, 479 bp, Homo sapiens
aagagaaaagaataactgattttctaaccttggggataactggtctttcattatcctcttcactatgaggaataaaacattcctccttataaggaattacgttggatctgcaagtccaatgtctcggtttagatatggtgtagttataaagaccttcagccacagcttggacctgagtctttatgaatattaaggagaagaaagactttatttctaataaattgctataatgtttaattcaagtcctatatagaattaaaatttggcaagggataatgtgtaatgaggaaatcagagataagtttggaggaactttgatggtatgtggaagatgagcatttaatgaagaactttgaatgccatggaggattctggaatcagtcatgtaggccaggatttttcaaccttggcactactgactttgagtcggatacttctttacagtgggagggrctgtttggacattaaaggatattttg

SEQ ID NO: 849203 - DNA, 472 bp, Homo sapiens
ttctgggaagtctgatcaacctaaagacagaatttcaaaagttcctccatcctggccgggcacggtggctcaagcctgtattcccagcactctgggaggccgaggcgggtggatcacgaggtcaagagatcaagaccatcctggccaacatggtgaaaccctgtctctactaaaaatacaaaaaattagccaggtgtgttggcgggagcctgtagttccagctactggggaggctgaggcaggtgaatcacttgaacccgggaggcagagcttgcagtgagctgagattgcaccaccgagctccagcctggcgacagagcgagactctgtctcaaaaawaaataaataaataaaaataaaaataaaagtttctccattctaacagttcaggcatgtcatctcacgtgcagctcacaggccgcagccctccttaggtgcccagacttcctgtgcttgttattttgtgcagaca

SEQ ID NO: 849204 - DNA, 496 bp, Homo sapiens
tctgtctgtgtaaccacagtgaatgggtgtgcacgcttgrtgggcctctgagcccctgttgcacaaaccagaaacagagcagagccaagggggcctgacaagagttcctttttagctgaacaaacaagtgctctccataataggtggaatcagacagttaacacatttttatgttgaaaacaaaataaaaggaaaaaattaaaaaaaactatcatgaactgtattgctccagttcccatccccaagtggcccagccctttcttgctggtccagctggacaggagcagctatctagaatcaggatgcggggagtgaggaagtttttcctttgacaatgaaggtgggctttcattgtgatttttgttctgttgcagtaatataggagcacattttggccattgtaattacagggaacaaagggattgcggacacatatctggacttcttttcctcccttattgttgtggaagagacactagaaatgctcaaacacctg

SEQ ID NO: 849205 - DNA, 496 bp, Homo sapiens
tctgtctgtgtaaccacagtgaatgggtgtgcacgcttggtgggcctctgagcccctgttgcacaaaccagaaacagagcrgagccaagggggcctgacaagagttcctttttagctgaacaaacaagtgctctccataataggtggaatcagacagttaacacatttttatgttgaaaacaaaataaaaggaaaaaattaaaaaaaactatcatgaactgtattgctccagttcccatccccaagtggcccagccctttcttgctggtccagctggacaggagcagctatctagaatcaggatgcggggagtgaggaagtttttcctttgacaatgaaggtgggctttcattgtgatttttgttctgttgcagtaatataggagcacattttggccattgtaattacagggaacaaagggattgcggacacatatctggacttcttttcctcccttattgttgtggaagagacactagaaatgctcaaacacctg

SEQ ID NO: 849206 - DNA, 596 bp, Homo sapiens
gcaaagcccaagctactgcaagtcctgtagaccagtccatggcctgagggatcagagggcttttctagatggctgactagagacatgggtgaacaattcccttcagaacaacaacaacaaaaaaaacgaattacaggtgaatgtgaataaccatagcctaaatggaatgttaaggggagattgttggagcccattggaaagttcattggaagaatctacagcatacacaaaaattaaggaatcaagaagcttgcagagatcaaatcaagagagacttagtattctgtggaaagggtaggtgggaatgctcttggcatctctagcccttgcagcagactgctggtatccaaactcaaggagagcttttttgccaccatgagcccaagtactggagcgggctgcgatctggggacttctcgagggcattatattgggctaccatctcgaacagggtcccttcctgttcccscggtcccaacctgtagtagcaggtgccatactgagtgtgcacccattgcgagactttgttctgctcagggacttccaacccttgtgtcttcacatcacaggatcccttgtagacatgcctcagtacc

SEQ ID NO: 849207 - DNA, 560 bp, Homo sapiens
tatacacaaatacaattttctgtaagatagtctgccacaatatttggattagaaaagttatgtttattrcatacaaccataagtataatgaagataatgtaccgttcaggtttgatctccttcgttcagaatcaactctcttattcagccagtgaagcaatttaccaaattcaatttgaaaagtatactgtcatcagtaataacctcaaacaacttcactggttgccagtattggacactacctttccctgcttcttttacacacttcatacatcctcatctcccttgtgctgaaacacatatgttacccacatgcaaaagacaactcaaatttcacttagggtttaaaaaacatcactgtatagtgaacaatcattattaacgacaagtatctacagaagcccatccatgctaaattgactttcataaatgttatctagaccaaatgagatatatattgctcagagaataagagaaagtctgtttttgatggaaaacatttgttattctcctattactccaaactatggcaaccctaggggaggatcttttctttcatt

SEQ ID NO: 849208 - DNA, 560 bp, Homo sapiens
tatacacaaatacaattttctgtaagatagtctgccacaatatttggattagaaaagttatgtttattacatacaaccataagtataatgaagataatgtacygttcaggtttgatctccttcgttcagaatcaactctcttattcagccagtgaagcaatttaccaaattcaatttgaaaagtatactgtcatcagtaataacctcaaacaacttcactggttgccagtattggacactacctttccctgcttcttttacacacttcatacatcctcatctcccttgtgctgaaacacatatgttacccacatgcaaaagacaactcaaatttcacttagggtttaaaaaacatcactgtatagtgaacaatcattattaacgacaagtatctacagaagcccatccatgctaaattgactttcataaatgttatctagaccaaatgagatatatattgctcagagaataagagaaagtctgtttttgatggaaaacatttgttattctcctattactccaaactatggcaaccctaggggaggatcttttctttcatt

SEQ ID NO: 849209 - DNA, 648 bp, Homo sapiens
ggcattgaagtattgttcactttatggaatagtatttgggttggagattggtgcatctcctgttgtacgaaggatagctgtattatgttaggcgtaattatgactttattattgtctttatttgaacattgcctatgatcgcaggagacgtgtatgggttcaagttgacaaggggtggacttgtgatggtttatactgagtgtcaacttgattggattggaggatgcagagtattaatcctgggtgtgtctgtgagggtgctgccaaaggagattaacatttgagttagtaggctggggaaggcagacccacccttaagctggtgggcaccatctaatcagcttccagcaaatataatacaggcagaaaaacgtgaaaaggtgagactggcctagcctcccagcctacatctttctcccatgctggatgcttcctgccctggaacatgggactccaggttcttcagttttgggactcagactggctcttctttctcctcagcttgcagacagcctactgtgggaacttgtgattgtgtaagttaatactttaagtaaaatcctctttatatatgtgtgtgtgtgtgtgtgtgtgtgtgtgtacacacacaccctattagttctgtycctctagagacccctgaaacaa

SEQ ID NO: 849210 - DNA, 594 bp, Homo sapiens
tttgttccaaggatttggtcctttatgtcaatcctgtgtttcttcttcttcttcttcttcttccttttttttttttttagaataagagtctcactctgtcacccagggctggagttcagtggcgcaatctcggctcactgcaacctctgcctcccaggttcaagcgattctggtgcctcagcctcccaagtagctgggactgcagacgcccgccaccatgcctggctaatttttgtattcttagcagagatggggtttcaccatattggccaggctcatcttgaactcctgaccttgtgatccacctgcctcagccttccaaagtgctgggattacaggcgtgagccactgtgcctggccaatcctgtgtttctttactgacagtttcaatcgtatgcagcctgccggagatcctattttgaaggggaaaggggtttttcaattccagaaagaataggtttgactttctaaattttgtatcataagcattataggsaatgctttaaatagtttacgaagcttagtttttttttttgaaagcttaaatttgctaggtgaggattcattgaacataattccttttttttagttcta

SEQ ID NO: 849211 - DNA, 569 bp, Homo sapiens
ctgggaggatcccgaggaccccctagttgcagccatgtcgagactgacgctgaggaggwccccaactgtcacgagcaacacccgtcaaacacagccacccacatggggacagatcaagaagctgtcacagatggcagaagaaaacctgaggaaagcagtacaaccagtcacaatgagtaatttaatggtagctatgatagcagtgatcaccactgccatgagtattccttcagcaagggctgacacagagaacaattatacttattgggcatatttatcaatcttggctggcaataatgcctagatgcaatcactctataacacagttacacatgctttctgatctcagtatttaccataataaatctgctactataattgaggcataccaccctcaaaaacctttttgtaaacaggattggacccagttagaaaaaatgaacatacttgtttagtaagattgcattgcagaacaggcagaggtgctgcacaacgattcctatggaatcattactaattggtcccctaaggggatgtttagcttgaattgcacctctcagtctgcgagc

SEQ ID NO: 849212 - DNA, 575 bp, Homo sapiens
tatgtgttcattgtgcatatctagaattawatatttttaaatttcattaaactgaattatgcaatgttctaatgtctgtgtgtgtgtgtgtgtgtgtgtgtgtgtgtgtacacagagagaaagcgagtgccttaaggctagcgaacatagctaaaaaaattgctgagaatcagaaggattattcaacacaaaattttaaatgtatggggaaagaaaggatttaataagaatcaccaaaagaaaaaacttttggtaaatagattccaggctaaatttgtttttgctaatatgcagataaaataactagtgggcctcttcttaatttatagatgtgtgaaaattaacctaaagaaaaagtaagagagaaaattgatttaaggtataataagtggcttggagtcaagcaaaattgataagataaaccagatctcttttaagcttgcttctgcaggcaaaataagctttaattcaaaacctcattgaatctgtattagtgagtatgtagagtatatagcaactagatcataggaaaggtcagtctcactatcccctgaggcagagttggttgttcttac

SEQ ID NO: 849213 - DNA, 641 bp, Homo sapiens
tttcacgtgtgctttcctcttytttctagtcaaggcactaagattcctgggggcatctcttagtccgaagctcttcgccacatgcccaaggtggagggatcggacgtggaagatgtgcttcagctccctggggtaggtggcgtaggcttggatgaaggactgcatagctgaaagaaaagagagcggggagggaagctgtcaggaccggggtctccaagctccaaagtgcccggtctaatggttatcttctgtactttatcttgccaggcaacgaaacatgagcaggacaattacaacatatacaaacaactaaaatctagacttctgtgtatttcttcaattcctaaacaacaaaaagaaaaaaactacagggggccacaattattacttgaatatgcccgataaaatatcagatttgaccacacagctcctaacaatcccacagggtggggcccagcacagcacctggtaccagcaggcactcggtagatgtctgttgtgtaaatgagtgaaaagagagaataggtgaagaaactaagaaatgatcaacacaggacatcgttttcttatgaaaatgagaaaatcattagacatttatattaacacatttttcctaattaaattttacttacttttgaata

SEQ ID NO: 849214 - DNA, 529 bp, Homo sapiens
aaaggtaaagggaacacgccaatcacacaagcaccttcagagggagcaggtatgagcatctctgtaccygctggcaagaaattagatgcaatggttggagtgcctgcaactatctaagactatgaggtaatcttaaaaatggaatcctcccatagtggcacaaaaagacagaaagagcttggtccccgacactggagcaccaggccagccttggactggctctgtcagatttcttaaatgtgaaagaaaaataaaacttgtatattgtttgtgccactgttatttgttattattgttgttattcacagctgagtctaatcctaaccaatgctttgaggtttcaggtttcatatttactcctcagttatagactacatgcatcattattgagtactgattattaagctataatacaataaaaatgttttcaaaagaatgaagacaatttgagatttacttgttgcaacgattttcaactgacacccattacaaatcctaataaaggaacaaacatattcggttgtaaaaa

SEQ ID NO: 849215 - DNA, 541 bp, Homo sapiens
aaatgtgtatttcttagatcaggcataagacagttccctgaatttatttatttatccatctcgtttcrtactaaggtgaggtgattcagatctgttgatggacccataaataatcatagtagatttgctttgttcctcagaagcagcagtttcttaggaagaggaagaaggcccttttaaactgtaaatcactcccgttccctctcagctcctgtttgcttagggtgtgtggttccccgacgtcgccatgtggacacagcatatgagccacactctggctggaatatcagcacacgcatttgagaacactgccttactgttctgtggcatatttagctttttctgttcctgactgcaaacggcattactcttttctttctgcttcaagatttgactccaaattcttgcatttcttttatttttgtgtttttcctctttttttctcaagaaaaaagtgatgaatagaagcaaatcagaccaagaaaaagatgggactgggctctgttttcaccttccctcggggtgccaggcacaaatgaga

SEQ ID NO: 849216 - DNA, 557 bp, Homo sapiens
ggctggaatatcagcacacgcatttgagaacactgccttactgttctgtggcatatttagctttttctgttcctgactgcaaacggcattactcttttctttctgcttcaagatttgactccaaattcttgcatttcttttatttttgtgtttttcctctttttttctcaagaaaaaagtgatgaatagaagcaaatcagaccaagaaaaagatgggactgggctctgttttcaccttccctcggggtgccaggcacaaatgagaggcgagttcaatacccatgcattgctctctcctatgaaaaatagatttcccatgaagtcagggcactctccctctgactcctgccctttcagagcatgctctgcctcctctggttgactctttgctgctgtaaaaaggcttcactcatccatagggctgtgagttggcagcagagagaggatgctgaggggtgagggctgggggtgtgcagggagatgacacatktcaggtaaatcgctgtcagagacgtggcattttcattcatagccttgtcagagtaacctttgggtga

SEQ ID NO: 849217 - DNA, 513 bp, Homo sapiens
attggttctgtttatctggagaatcttgactaatataaagggtaaaacttatatgtaatttctgaggacttagaaactaacactgtttggctcakaaccagaagattatggtcaccaaactccttgctaatgatttgatgactctttgattagatgtgacaaaagtagagatgatgctttgtcaggagacattgaaatgctagtctgcaagacagccaatgtgcaagagttagggatcctttacccctctcattcactcatccctccattcatttgttgaacattcaatgaatatttactggtaacttccaaggtgtcaggcactgcactgggcaaagaatattcttggattgtagtgatcaggagatagaaaccacactctgtaggttttacagaggaagtttaatataagaattaagctataaaactaaaactctgtaggttttacagaggaagcttaatataaggattattaactataatagataaggaaactttatatagtaccctagg

SEQ ID NO: 849218 - DNA, 593 bp, Homo sapiens
ctgggtggctaaagcctatagttcttggggagaaagaagaggatayagcaaatttataagactgggaagggaaactgagttcacgtggtagagagtcttgaatgctatattaaagagctttaattatttagttactggagaatcacagaagatttttgagctaaaaaaataacatgctcagaccatgtgtaagtaggataaacatgtgttctggcggccaccactggatgtgctatgcaagctaggtttcctgacccatgatttctatagcttcaattccttcaacagccagaactttgagattagccatgctgggtggatgtcgagtaggatgttatgggcacagaagcagaagggagggtgcgaagctccaggcttagtccatgggaatacaaaagggcggaaggacagagaactgtacagtttgtttactgaaggattctggcctttttcatgtaaacaggtaaagtatatggtgtcaaggaaaattgcagcactaaacttttttataagtactgctgtctccacaatagatgttaccctgcaaaaaacgtttttgaggacatgactgtcatgtatcttcaaattcccag

SEQ ID NO: 849219 - DNA, 515 bp, Homo sapiens
aaagggaatgctagtatattgctgatggaaatataaattagtataaccactatgggaaatagtatgacggttactcaaaaaactacaaacagaaataccatgtgatccagcaatcccactgctgggtacatatccaaagtaaagaaaatcagtaggtcaaagagatatctgtacattcatatttattgcagcgttattcatgatagccaagatatgaaatcagccaagtgcccatcaattgatgaatggataaagaaaatgtggtatatatacacaatggaatactattcagccataataaataataaaatcctgcgattttttagcaacggatggaactggaggtccttattttaagtgaaataagccagacacagaaatacaaatatcccatgttcttactcacatgyggaaagtaaaaacgttggtcatggaggtaagcatagtatcatggttaccagaggctgggaagggtgagggagaatgaagagaggttgctgaatagatacaaaaat

SEQ ID NO: 849220 - DNA, 624 bp, Homo sapiens
ggcgcttttgaggcaggatgaatggagtgactgcataagaactttataaggagagaacttccaaagcgaggagattaaagtatatgagagactttctggaactraaagtcaatgaagaactgaaattagtagtttggaaggtcaaaggaaaaatatttcgtgacagagtaataatgacaagaaatgggaataatgaaaatgtgaggtacttagaggcagcaagaacagatttatttattatttttttttttccaaaggaaagagaattaggctgtctttgggcttcccctgtgcaactctggaggctggaagacagtgggctggtatctccagactattaaagggagagggccccaagtcctctatatacccagccaagatgtcagtgaggtgccattgcaaaagaaagccattttcaaacacgtgaggacacaaaacatttattaaatgtacctgaggaaaatatccagtgaagttctctaacccaaggacaagggaagtggagtagagatatggagacaggtaaggaaggagtgcagggaacaggaacggcaccttttttttttttttttgagacatagtctcgctctgttgtccaggctggagtacagtggcatgatactg

SEQ ID NO: 849221 - DNA, 592 bp, Homo sapiens
ttcacctttgttttgaaatcctttcctttttttttttggagacagagtctcactctatcacccaggctggagtgcaatggcatggtctcagctcactgcaaccttcccctcccgggtccaagcgattctcccacctcagcctcccaagtagctgggactacaggcacgtgccaccacactccgctaatttttgtatttttagcggagacggggtttcactatgttggccaggctggtctcgaactcctgacctcgtgatccgcccaccttggcctctgaaagtgctgggattacaggtgtgagccgccatgcctagcgtgtccttcccttttaagcagaaaatgtgacacttgtgaaaaagcttgtaagacagcacttccctttttttccctttaaacctttaaatggcaaatctaggtaattaaagttgtgaatttttatttttgctttgtttttaatgaacacttgtctttcagaataggattgtgtgataatgtctaaatggcaaaaacaaaacrtgattttgcacaattaacaaaactactgcaagaaaaataaaacatttcttggtaacaaaaaaaattaatacatt

SEQ ID NO: 849222 - DNA, 212 bp, Homo sapiens
gggaggcgaaggttgcagtgagctgagatggagccacctcactccagcctgggcracagagtaagactgtctttagaaaaagaaaaaagagaaaaaaaagtacataaaaggaaaaaaacataccccaggactggagagaggaaacctgaattcctacccagttctgctcttgccttgtgtgcctgatgccaagtggcttaacctttctgggc

SEQ ID NO: 849223 - DNA, 490 bp, Homo sapiens
attcttttaaaatatttgcctcataactgtatttttccagcstgcttttcagctcaaaggaagtatatgcactgagttgacttatcagtgtgcatagcagaaagggacccagtaagagaaagccccctgagaggccctgggacagctgagtgatccaccctggctgcctcctctccacctcattctcacacactaacctttcccaacccttttcattccaaggctcctagccagcgccccccacctgccttaggagataaccccagttccttcctcggattctttcatctgcaaggcctcagtgttcttgtccggccagtgataaggacattcaacgtcattttcctgtccctgacctttgaaagaaccctacccatctggggcctgtgatgtagactcagactgagatgttccatcttggggatataatcagtgggaaagagagagattcctgagaggtcatcattcattcattcattcattcaagaaa

SEQ ID NO: 849224 - DNA, 602 bp, Homo sapiens
atttacatcccataaaattcactcatttaaggtatacagttaaatggtttttagtatatttacagagttggacaaccatcaccacaatcaattttagaccattttcatyatgcaaaaaagaaaccctgtacccattagcaatctcttccatctcctatctcccccactccttgcagcctatggcaagaatgaatatattttgtcgttgatgtacaaaatattgcacctgcttaatgtatacaacttgatacaacttcacatatgtacccacccatgaaaccatcaccacaatcaagataataaacattcatcacttccaaacatttctaaatgcccttgttttttgttgtttttgtttggagggtttttgtgctaaaaataacatgagatcaaccctcttaaaaattttaagtgaacaatattgttaactataggcactgtgatatacagcacatctctagaacttattcatctggtataactaaaaatttatatctattgaacaactcccgatttcctcctttccccagccattgctaaacaccattctattctgtttctatgtgattatttagttaactccataaatgggaaaatactaa

SEQ ID NO: 849225 - DNA, 602 bp, Homo sapiens
atttacatcccataaaattcactcatttaaggtatacagttaaatggtttttagtatatttacagagttggacaaccatcaccacaatcaattttagaccattttcatcatgcaaaaaagaaamcctgtacccattagcaatctcttccatctcctatctcccccactccttgcagcctatggcaagaatgaatatattttgtcgttgatgtacaaaatattgcacctgcttaatgtatacaacttgatacaacttcacatatgtacccacccatgaaaccatcaccacaatcaagataataaacattcatcacttccaaacatttctaaatgcccttgttttttgttgtttttgtttggagggtttttgtgctaaaaataacatgagatcaaccctcttaaaaattttaagtgaacaatattgttaactataggcactgtgatatacagcacatctctagaacttattcatctggtataactaaaaatttatatctattgaacaactcccgatttcctcctttccccagccattgctaaacaccattctattctgtttctatgtgattatttagttaactccataaatgggaaaatactaa

SEQ ID NO: 849226 - DNA, 526 bp, Homo sapiens
gactcccggatcccttctggctgtgcaggggacacaggggaccctgaagttcccaaagccctagkagataatgccttagagatatggggagagagtcagttggtcaataaaagcctggagttgaaaatggcaaaaataataaataaataaataaataaatagaaagaaagaaaagaaaatctggggtcagagagtttagcaaggcaaagacatatcagcagataccagaccggggacagacctgggggtctctctgcagcagggagtaggacaggctgcacagttaccccaccttgacgtgctcacacacaggctgacccctcaaccccatgaagtatagaagggagaagccaggatttcaaaattatgagcatttcccacaaagatcctgagtcatcccaccgaggaagaattctgtggggacaagcttatgttttcctcctcactgcccagcagggaagactctcaccatagaaaaagaaaggtgtcgggcacatgtttcccatctctcagcctcatacaggca

SEQ ID NO: 849227 - DNA, 509 bp, Homo sapiens
ggaaatctacactagtaaaggtatctgtattaggaagagggctgctccagacaaattttattaccagagagactttttatttttattttttgagacagggtcttgctctgtcacccaggttggagygcagtggcttgatctcggctcactgcaacctccacctcccaggctcaagtgatcctcccacctcagtacaccccctcaacagtatctgggaccacagacacacgccaccaccaattctttccctcaccctgccataacttgggttgctgccactcaagcccctaacagaagtcccaagccccatattcttttctgtagctcaggatgctatataagcttcaattatctgacccttctttgagcctcatattttgtaggattcctgtgtacaactatgtaattaattatttttcctccagttaatctgtctatgtcaatttaattctcagcccagccaaaggacctagaagggtagaggaaagccatttttttctcccttacac

SEQ ID NO: 849228 - DNA, 509 bp, Homo sapiens
ggaattcagaacccatcaacaggtgccaagctggggcaggagatggagggaggagcttgggaaggggggttttgaatccaggactgggcaggttcctcagtgggagttctgtgccccagccttgtttgcatggtgcacgggggacccagaaatcagaggaatctctggctagggttgggctgggtccagggcctgtatgaagcccttcctggagagaccaggaaaatgtgaagccaccagggatggctgctggggatgcacctaaacagtcagggcaaggatgatgggggccaccaaggcccacccaaagggctggaagcctcccacagaggccctccaaggtcgtggcagctcatctctaggggccatcaagtggccccagagactcagtgggacaagcatttgcaagttgttgcctgggtgggaacctgggcccagagctggtctctgcccagcctgggtgagagggarggaaaggagggtggatcctgatgggtgtctcacctcct

SEQ ID NO: 849229 - DNA, 539 bp, Homo sapiens
agggaggatcctttgggcccaggagttcgagtctagcctgagcaacaggctagattctttaaaaaacagagatgaaaaagaaagaaaaaaaggatgtgaagggttaaatttgaacactttccaggtagttttcagcatcatgctttggtggaatcatggttttgaggctaagtggggttgctgcatgttacattcctgcctcttccttcccccagctttagtcgtcttcattacattcatgcctgggaagccttcccagtgacctgagttaggcattaagatcatgggaatccaagattttcccatgtcttctagcatatttgttcacaagaaaaggaaaatttcctccttgcagcaaggggtttttaaccactgtcagtaccatggaatctttcactaaaaatcctttgaatagaaatgtggtcaaggagaggaaaggtatcagcagtgataataccttacaatagtgtatttcatagcacttgaagtagsttcttatttgattatggtaagaaggtaggcagagaattagtgacttg

SEQ ID NO: 849230 - DNA, 621 bp, Homo sapiens
tgggagtacaacaaggggaatgtgcctaacacccctgaactgtacgtatcatggctaagatggccaattttctttttttttttttttaagayggagtcttgctctgtcgcccaggctggagtgcagtgacgtgatctcggctcactgcaagcttcgcctcctgggttcacaccattctcctgcctcggcctcctgagtagctaggactacaggcacctaccaccacgcctggctaattttttttttttttttttttttttttttttttagtagagacggggtttcactgtattagccaggatggtctccatctcctgacctcgtgatctgcctgcctcggcctcccaaagtgctgggattacaggcttgagccaccgcgcccggtaagacggccaattttatgtgtatcttcctaccacttacaaaaaggataccatcaagagcagtggaagtctgtttgccagcgtgctgggtcctaacaaaagaccccactgacttcagtcctgcccagcttgctcactgcagcctgctctgggctctgatgttcatcacggcttggagttgcttccccagacagagtacagcgtagctgaaagtccactgttagcgggttatcggagg

SEQ ID NO: 849231 - DNA, 710 bp, Homo sapiens
tttcctgttggactcatccttttaccattatctaatgtccctctttgwcttttgtttccccactgttgttgtttttaagtctgttttgtctgacgtaagaatagctattcctgcttacttttggcttccatttgcatggaatatctttttccacccctctaccttaagttctatgtgttaggtgagtctcttgaagacagcagatacttggttggtagatttttagccagtctgccattctgtatcttttaagtggagtatttaggccatttacattcaagaagagcctgcatagccaaagcaatactaagcaaaaagaacaactctggaggcacatattacatagtcttcaaactatactacaaggccatccttatcaaaacagcatgattctggtataaaaacaggtatgtagaccaatgtaatataacagagaataaagaaataaagtccagtacttaaagccaactgacctttgacaaatcaaacaaaaacataaagtggggaaaggacaccctattcaacaaatggtgccaggataattggcaagccacatgtagaagaatgaaactggaccctcatctcccaccttatacaaaaatcaactcaagatggatcaaagacttaaatctaaggcctgaaaccgtaacaattctagaagataatattggaaaaactcttctagacattgggttgggcaaagagttcat

SEQ ID NO: 849232 - DNA, 644 bp, Homo sapiens
aagctcatgttgaattgtaatccccagtgttggaggtggggcctggtaggaggtgactggatcacgggggcggtttcttaggaatgatttagcaccatccgcttggtgctgtcctcatgacagtggcggttctcaaggaatctggtcgttcagaggagtgtggcgcctccccctctctcgctcctgctttcaccatgtgacgcgcctactccctcttcgccttctgccttgattgtaagtttcctgaggcctccccagaagccaggcagataccaacatcatccttcctgtacagcctgcggaactatgagtcaattaaaactcttttctttataaattacccagtttcaggtatttctttatagcaatgtgagaaaggactaacacaacataaaatttaccattttagctatttttaaatgtatggttcagtggaatgattaggtagattcacactgttgtgtggccatcaccatgactgatctccagaactctttcttcatcccaaataaactgtgtccactaaacactaactckccattctccctcacccctcagtgcttggcaaacatcactttaccgtctgtctctatgactctgactgttctagatacctcctataagtaagatcatataatacttgt

SEQ ID NO: 849233 - DNA, 654 bp, Homo sapiens
cctcactgcaaggaaaatgtagtctttattctgggtggccatgcaaccccctgaaaactgggggtcttacaactagggcaagagagggcaagagtggatactgctgtagtctactcaatcagatctgttccggccacggggaggagctgaatggaacagcatcattccatttaaggcaattggctatgcgttcttggacaagtcacctgatccttctgggcctctttttgctcatctgactaactaaaatcagattaaaaggtttttagagtctccttcagtagaatccttctatgggtctaagaattgtctcatttttagccatagaccatatcaagatgtagagacactggtgggtactgcctgagtgtggtatcttctgtgtcagactgaccaggcttcaggtcctgtggggcctgggaaacgtccttcctcctctgagccgggtccctcctgctggccagactcggatgaagtgactgtaaagttcccagcttgccactcagcaactctagcaacaccagcaaattactaacattctattaataaaaacgacagaggaaatgcacctgtttcctattgctgctgtaacaaatgcccacaaaggtagtgactcaaacacyacacatttattcccctccagttctggaggcc

SEQ ID NO: 849234 - DNA, 545 bp, Homo sapiens; identical to SEQ ID NO: 815510

SEQ ID NO: 849235 - DNA, 660 bp, Homo sapiens
tgcatggccccagatccaccccagtgcctcgtcctcaagaggtgatttattccgagacactgatgagagcactgtccttcctgtgtctgagggaaggcatgtaactcttgcttatcttcacctgtgctctagatcctgaccttctctggcaacctcagggaccttgcaccatccattcttctcgcctaatggcgagactcagtctctccctctccctttccactctcccttgccattcttagtatctttctacaagcaggtcttccaaagtactgcttgaggtctgagttggagggaacatgcctctaccctactaaaaagagaaattcctctgcagaagacccaagctgactgacaaatccctttactgtaactgcagctctagctcccaccattttcctgtacttactctcctgctcaggttccctggcattgctgatgtctttcagcctttgtgccctggcccctttcctcctctcccctcatctagcactacctgtcaaaatcagggacttactttaaaatttatcccaaattatcattgccatcatctccactgtcaccttatcatatgtttgaatagcgtttccatttcccamatgttttcgcatgcactttctcaattgagccttacgaatcctagagctgagaagggtaata

SEQ ID NO: 849236 - DNA, 608 bp, Homo sapiens
agtaccagccaggaacagtccacagccaaggccaccgatcctcaccgctgagctccatctttcctttcaagctgtccttcccctcccctccccaccatcaccatagcaacacagtggtataaaaaaatgaaagcgctaaggcatctaaatatagtctgagtatcaactcttccagcatggagccgaaaacctagggaatgacagctagaggcatccagacgataactggcagccaggagggtggataagtcaaaggaaggggtcaaggaaagaggggaaggaaagggaaccatcacttgctgagcctgctgcctgtgctttctcatgtcacccgcacgacaacccaatgtgaatgttatcatctccaggtaactgctgaagaaacggaagctcaaagaggtaagagatttggccaaggtcacacagctataagcagtagaactaagattttaactcaagtttctatggccccagartttatgtgtttctctctccataccacagggacaggtgcaagtgagagattttgctggaagcactgggctttttgagcaggccatataaaaattctgagcccagagctcaactaaattattggaagagactgg

SEQ ID NO: 849237 - DNA, 606 bp, Homo sapiens
tctttagtcgggagattcatcttcaatttgcccagtttgccatctcctgcagcttcgctcaaggacactacacttcctttaaagaggtagcctaccataatggctaaagacagggctgtggagccagatggattcaaatctaagctctgctacttattggttctataacaataaacaaattacttaacctttctgtgtatagatttcttcatttttacaactaaactacaaataatatcttcttcttggggtttttaaaggatctattgtaataattcaagtaaaacccttggaacattccttgccatttatatatgtttcctattataattcctacctgtcatagtgtagtcatttcactttggatcccttgctgtaaaggaaactccgtccctccaccctcaaaggtatcacctcagccagacaattagatcagatcataatagtccagcaactgtgcctttgggggtgttctgtcctaagtcattccacacatggacatcaatcatccagcccatgttgwgctgaaccatgggcagtgcaattactttttatagtttctattcatcagggaagatcctgcttcatgtcccttctgcagttttt

SEQ ID NO: 849238 - DNA, 540 bp, Homo sapiens
ttatgtatctgggcaactagaacactgccatatacagacatactttgttttatcacacttcattttatcacgttttgtaggtttatgttttttacaaattaaagctttctggcaaccatgcattaagcaagtctattggcatcattttttttttgacacagggtctcactcggtcacccagttctggagcacagtgacactatcatagctcactgcagcctcaacctcctgggcttaagtgatcctcccacctcagcctcctgagcagctgagactacagttgtgcaccaccacacctggctaacttttttatttttattttttgtagagacaagttctcactgtgttgcctaagctagtctcaagctccagggctcaagcaatcctcctgcctcagcctcccaaaatgctgggattataggcatgagccactgtgcatggccrttgcatcattttttcagcagcctgtgctcatgtttgtgtctttgtgtcacattttggtaatgcttgcaatattccaaactttttcattattatttt

SEQ ID NO: 849239 - DNA, 624 bp, Homo sapiens
tctgtttttgtaatttcttcgtggattgcctgtgacacgcatcacattgtggtttaatgcctattccttaataaaactgktttctttctctgctacctttgtggagataatttctgggttgggacaagattttgtttattgcatttcccccaacagaccttacagagagtaacattttgtttgtcctctcccagagtcttttaggagaaccttgtactatgaaaatggaaactgtcaccctctgcttctcagttgctaagcctggtatgagttctgtttggcagatggaaggccagccctttcaaattttcccaggtggactaagcactgtttgctttcagaagttctcagcgaggctttcattttaaattcataaaagttatcatccaactcccaacaattgtttaataaaaggcaattagccagccaaaaatataatggcttttatgtcaaaatatgctggagacagctgctaagcaggccactggcgtcctctgggccatatggtgtgagtcccaggcatatgtacagccaggcacaacagcacagagcatattgggagtaataaacccagccccccactctcttccctctcccccaactcaaatctctccactccagaga

SEQ ID NO: 849240 - DNA, 565 bp, Homo sapiens
aattaatctcagtgtccgccaatgaatgaatggataaagataatgtggcacatgtgatataggaagtagaaagaaattttttaggtggatagtgagggtaaaagagtcctcagcagagcttcccttttaacaraaagcagccccagaaattatcttttcctaaaaaagactagcctgaaaaattgagctgtaaatataattaaacaatctggaagcttgcacaggggaacaccagcaactgtgccaacagaaaagggatatctggggagccatacatatccaacatggaggctccaacttcctttttttgttgttgttaccacttgtacagtaaaggaataggcaacatggcacagggcaggcagacaacctacctacataataagagattagggtggggactaccagaaatttgtgccctagccaaatggcacacctagtcctaaccagttttcatggcctatgcaaatgacacacctggtacaaccagtcttccatgccctatgtaaatcagacaccacctcctcaacaggcatctataaaaccccttgcatttcactgtgga

SEQ ID NO: 849241 - DNA, 565 bp, Homo sapiens
aattaatctcagtgtccgccaatgaatgaatggataaagataatgtggcacatgtgatataggaagtagaaagaaattttttaggtggatagtgagggtaaaagagtcctcagcagagcttcccttttaacagaaagcagccccagaaattatcttttcctaaaaaagactagcctgaaaaattgagctgtaaatataattaaacaatctggaagcttgcacaggggaacaccagcaactgtgccaacagaaaagggatatctggggagccatacatatccaacatggaggctccaacttcctttttttgttgttgttaccacttgtacagtaaaggaataggcaacatggcacagggcaggcagacaacctacctacataataagagattagggtggggactaccagaaatttgtgccctagccaaatggcacacctagtcctaaccagttttcatggcctatgcaaatgacacacctggtacaaccrgtcttccatgccctatgtaaatcagacaccacctcctcaacaggcatctataaaaccccttgcatttcactgtgga

SEQ ID NO: 849242 - DNA, 639 bp, Homo sapiens
atatgctgttgatggggatgtaaattagtctagccactgtggagagcaatctggggatttttcaaagaactgaaatcagagatatgatttcatcaaaaaaatagattactaggtataatgcaaaagaaaataaatcattctaccaaaaaaagacacatgaacttatatgttcatagctgtactattcacaatagcaaaaacatggaattaacctagctgcccatcagtggtagattggataaagaaaataaggtacatatataccatggaatattacacagccataaaaaagaatgaaataatgtattttgcagcaaaattaatgatgcaggagtccatagtcctaagaaaattaacacagggaccgaaactcaaataccgcatgtttttatttgtaagtgggagctaagaattgagcacacatggatacaaatataggaacaatagacactgtggactactagagagtgaagggatgtaggttaaaaaactacctattatgtactactcttactaccagtgtagtcagatccatacttcaaacctccctatcacacagtagtctcrtgtaacaaatctgcacacgtactccccatatctaaaagttgacatttaaaaaatgttttttaaacttaatga

SEQ ID NO: 849243 - DNA, 639 bp, Homo sapiens
atatgctgttgatggggatgtaaattagtctagccactgtggagagcaatctggggatttttcaaagaactgaaatcagagatatgatttcatcaaaaaaatagattactaggtataatgcaaaagaaaataaatcattctaccaaaaaaagacacatgaacttatatgttcatagctgtactattcacaatagcaaaaacatggaattaacctagctgcccatcagtggtagattggataaagaaaataaggtacatatataccatggaatattacacagccataaaaaagaatgaaataatgtattttgcagcaaaattaatgatgcaggagtccatagtcctaagaaaattaacacagggaccgaaactcaaataccgcatgtttttatttgtaagtgggagctaagaattgagcacacatggatacaaatataggaacaatagacactgtggactactagagagtgaagggatgtaggttaaaaaactacctattatgtactactcttactaccagtgtagtcagatccatacttcaaacctccctatcacacagtagtctcgtgtaacaaatctgcacacgtacyccccatatctaaaagttgacatttaaaaaatgttttttaaacttaatga

SEQ ID NO: 849244 - DNA, 543 bp, Homo sapiens
ttattgtgatcaagcactttcaatcttttatatatttgacaaacttccccaaattgaattctaaattaagtatttttgacctagaattgactttgggattttccagtacggcccgtggagagcctcaaaggatatatccctcataatgcagagatgttaagttaatcaagcttgtttgatgtgttgaattgtatgggaagtattgtcaaataacaaagtgatgttaaatcttttaaaattatattttatggatatttcagaaattgtatgaaattcatagaaatctaatagtcctggcataactttgtcattatttttccttactagttctgttggcccagctcactttgttgaaagaacttcttagaaaaatataatgctgccaattcctttcctcaaaaagaggaaataattcttgaaatggaccgtcacccattgtccatttttttaacacccttgcctattcttgcccttaacccaaatcacaaamatgctaagaggtaaactttttaaaaacacgttcctgaggaaatttcaactaaa

SEQ ID NO: 849245 - DNA, 583 bp, Homo sapiens
tcatctatccaaagatatttagattgtttccacatcttgtttattgtgaatagtcctgcaatgaacatgggaatactggtatgtttttgagatgctaatttcaattgctttgtatatatacccagaagtggaattactaggtaatatgttagttttatttgtaattttctaagaaatcttcaaactgttttccatagcaactgtacatttttgcattcccaccaaaagtgtgcaagagttctgatttctccacatccttaccaacacttcttatctcttatcttttttataacagccaacctgacaaatgtgaggtaatatctcattgtggttttgttttgcatttccctaaggattagtgacattgaacattttttacattacctcttggccatttatatggcttttttggtgaaataccaatttatttaggtgctttaggaatcaagtcctcagttccacttcaaattgtggtactagattttttgctattatgttgtagttgtttcttatattttttggaaatsaatgccttatcaggtatatggtttaagaacattttctcccattccatagattgtca

SEQ ID NO: 849246 - DNA, 607 bp, Homo sapiens
acagtgttgtgatctcaactcactgcaacctctgcctcccagttcaagcgattctcatgtctcagcctcctgagtagctgggatcacaggcatgcaccaycatccccagctaattttttgtatttttagtagagatggggttttgccatgttggccaggttggtctcaaactcctggcctcaggcaatccacccacctcagcctcccaaagtgctgggattacaggtgtgagccaccacacccagccctcttgtatttcttttaatgtctgttggatctgtagtgctgtcttctcattcatgccagatattggtgattttggtcttctattttttaaaatcagtctcaccagaggtagatccattttattaattctgtcaaagcttttagttttatctctttttcgtccattttgtttcatttatttatgctctcatttttattatttctttcgtttttattttttaggggtttagtttgcttttctttgtctagtttcataaggagaaaactgaggtcattgatgtgagatcttccttcttttctaatttaagcattaaatattacaaatttctctcgaatcattgtactggttgatttcacaaga

SEQ ID NO: 849247 - DNA, 618 bp, Homo sapiens
aaaacagtttaagggtattgtagaacataygtaagaaagggctcaaatatagcttagtggatgaggcaagggaatctgggattaatgggggtagtagcgagccattatctgggattaatgggggtagcagtgagccattatctgggattaatgggggtagtagtgagccattataggttcttgagcaagagagtaatactatgaaagcaggattccaaggagaccagagaacagtaacaggcaaaatgggctggaagacatacatctgctagcaggtagatatggcaatccagtagttgtgcattggagtcatctgggaagctctaagaagtttatcgatgcctgggtcgtaaccctcagagatttggatttaactggttggggtggaacctgcatgtggtaatttttgcaaagttgcccaagtgatgccaaagaacagcctgaagtgataatcactgcaatacttcaggcacaaagagatgaaggctgagatttagataggagtctggcaggaggctgggtcagcataaaagcaaatctaggaggcatttcaaagaagaactgacattgtgacagattagaggtaaagagtagaaggacacagtctgttagattcct

SEQ ID NO: 849248 - DNA, 642 bp, Homo sapiens
ctttccttcatttaaacagccaattaaaacccactttggcacttaacgcatgtcactgcttctcggcactcagctggcttcccagcaggcctttaatttgataaagagcttctaataacgactaacagagggccyggtaagttaattaaaccttgccctttattttgctttcaaggtgtgcctcctcgtaaaagcccaagttttgtgcttgcaaatgactttagacaatgttccatgcttcaatgagaaaagtatgtctgtcatgtcctggcaagttactcttaaagtctcaatttcagcatcatgtcaggctttcacggaggccagaagcagatggaaaaaaacctctgcacccaattgtagggaggccagatttagcaatggaagatgagtttcctctgagagtacaacgctgaaagatgagctggctgtcatatcgaactccatttatcccatttctttaaagtaatctgagagtccagatgggttgtataaacagaagaggaggttcctgggagttcactagcttaatgaagcccgtatgtttgactcatgtaataagtatttaatcatgctgatgaaattcatttaaactccagccacacacgctgttgctgaagccctgataataccctacatcac

SEQ ID NO: 849249 - DNA, 642 bp, Homo sapiens
ctttccttcatttaaacagccaattaaaacccactttggcacttaacgcatgtcactgcttctcggcactcagctggcttcccagcaggcctttaatttgataaagagcttctaataacgactaacagagggcctggtaagttaattaaaccttgccctttattttgctttcaaggtgtgcctcctcgtaaaagcccaagttttgtgcttgcaaatgactttagacaatgttccatgcttcaatgagaaaagtatgtctgtcatgtcctggcaagttactcttaaagtctcaatttcagcatcatgtcaggctttcacggaggccagaagcagatggaaaaaaacctctgcacccaattgtagggaggccagatttagcaatggaagatgagtttcctctgagagtacaacgctgaaagatgagctggctgtcatatcgaactccatttatcccatttctttaaagtaatctgagagtccagatgggttgtataaacagaagaggaggttcctgggagttcactarcttaatgaagcccgtatgtttgactcatgtaataagtatttaatcatgctgatgaaattcatttaaactccagccacacacgctgttgctgaagccctgataataccctacatcac

SEQ ID NO: 849250 - DNA, 522 bp, Homo sapiens
gctgaccaataaccatcatcccctgacagcaggtgcagggggcagagggacaagtggaacctctttgtcttgtcattgcagaccagagtgcccacagcgatgtgaaacctatttrtcctggaggaggagggaggagggaaagggaaaaaaaacaactggctcactctggctccataaatcactggaagggagagcccttgcctggtgaagttggagattctacctggaagctccctgatggtgcactgagccggggtgtcgtaaatcaccagggctccgccaatggcagccctgcccactggcccattgaaaaggggctggttgttttgctggcagctgatgcagtgcactgtcccagaaagccggggacaggtgtctgccaggccatggacccaggcctactttgtgtgcttcccttgggtgtgatggggggagagaggcggtggattgctgtccctgggaacttggcccggtggcctggcatagccggaatgtccttggccagctctttgtgaacagcca

SEQ ID NO: 849251 - DNA, 527 bp, Homo sapiens
ataccaattctaagttaatttggactaaacaagggcttattaacagcaaaggataattgaaatcccaaacttacaaggttttcaacaaaagtaaagtttgytaaaagttaacagtgtaacatgtattatcctaacttctaatcttacggccttaggcagtctagtccacagacatgaagaaagttcactttggaaaagaatggttatcatctttaggggaaaaaaaggcggggggaggggggaggagaatttatgtaaaagaatgttatatggtaaattattttcctaaaataactggttatttaaagaaagggatgtttgcaagaagtcagaaagttgaggcatgtcgaagaattgtctgtgaaagtcgtgaaagaaaaaaatgtgttataaaaaggaatttatgcaagaaatgttgtataatttaaaagtaattaggcctcctgaatgtaaaactattgaagaaagtttatgtgcaaggtgtataaggaaagtaaaatatacttttagtaaaaggattataagga

SEQ ID NO: 849252 - DNA, 549 bp, Homo sapiens
aggtacggttgaatatgatggaaagagactttgctttaatcctcatcttccacctgatacaaaactttccccaagttagtgtctctttattcaggagagagcataggttagtaggatttgatatatctacttkaggctgctattcagtgtggggacctaaaactcagaaagcacagtgctcatttccctgtggggcaggattatcttactcgagccactgtttcctaattacacaaggaagccactctttcacttctgcacaatgtgttgctgaaagacatccaagcaggatctacactgagaatgtcttcagaccacgtatcactatgtgctgctcgattcagcctgtgttatgtagggtggtgttgtctttaaatgtcacagaagaaaatccctatgaactgaaaagtgcctcagggcagagtggtgatgaaaataatgccagttccgaatgattatgataagtgcatggttcaaggtgaatgataagtgcatggttcaacctgaatctttcaagtgaaggagttgttaggagccaaaataagtcca

SEQ ID NO: 849253 - DNA, 616 bp, Homo sapiens
gctttgtgtgtgagagaatttctttcccttcactgtagcttcaccaagtctaggtaccatgaatgttaaagtcttttcatatcagatatttaaaacgttataattttataattagtattttttacaattaatacatttgaacattctgtaagtttttgctattttgaaaatttgaaatgtctttttcttacttcttataaatgcttttatatattagagtttagttctaattaatataatctgcaatttttaagatcagtttgtcctttgccttttaattttattttatatattttatgatgtgtttttggcagatttaaaaattttaactcattaaatcctatcaattttcttttaagttctttctttgctttcatgtgtaggccttttcaagcataaaggtcaattgccctgtcttttattggcccacagtttgtggacttgcccatttctatgctgtactaaatttgaaacttatatataattgtagcagaagtaagaatggatgggagaggacttgacctttgtatctgtgtccattcctgctacttacagtcaawacaaggtgtggaagaagggaggaagttcaggaaatcatgcaatagaaatgggagaa

SEQ ID NO: 849254 - DNA, 529 bp, Homo sapiens
ggaaagcaggtaaaaatgctaattacctcctcccatcctgtgcttggatattcccccacagtattgggtctgtatatcctggtttttcaaattctccattccgatcaccctatctaataaaaatgtatgctcactggatattagatttgagacatccagttctatatgtagatacaaactcaagagactcctttattaaatgaagcagcataacatttttactcacctgtctgaatacacatactaagcagaagatggactgagtaagaagccaggagagcaactgtcagcagcaagaagctaaaacataaaagaacacctggtcaaaacctcccaaaagtttgtcttttgtatggtgtctcattacaaaaacaaattgcttaacagtcaaatattcacaggaactatctctgagtagyagaattatgttcattaaggaaattaagaagatacttttctacttttttgtatttaccaattttatttaaatgaaaatatactgattttaaaataaaaaaaaataaaaacc

SEQ ID NO: 849255 - DNA, 605 bp, Homo sapiens
ttacattccagataggaacataaaggaaggatataagaaaagattactttcaatactaacttgtggtgayaaatgtctattaataaaaaatatatttttaacccagacatttatacatctttttaaatatggtaatggatcactactatgtggagaattaaataagaacacagatatattaaaataatgttgtccaaagatcatttattagttaactcaaatttatattatctcaagtactagaagtttaactaagggtctagaaaatacaatttaagttaatatgttgagtcttttgtagaattataaaaattaacctatttttataaagactacatgttatcaagttatttagttgaacacataattttacaattttataaatttaaaatgattttagttcattcaacctcaaaactagtagaggaaatttagaaaattcaaattaattaaacttttcatgaaaaagtaaacccaaggctttcataaaccaaaatgttgtgctaatgttatttttatatggtagaaggtggggaaagatatagagctatttttaaatcaaaattattaaacctgtataatttttccaaagggacaccataatt

SEQ ID NO: 849256 - DNA, 482 bp, Homo sapiens
tggccatgtaagatgtgcctgcttccccttcatcttccactataattgtaagtttcctgaggcctccccagaaggaagccagcatcatgcttcctgtacagccttgaaaccatgagccaattaaatctcttttctttgtcaattacctagtctcaggtacttctttatagcaatgtgagaacagaacagactaatacatgtggctaccacactggacagcaaaactatagataactatagataacacaactgtatcaagtggccttattaaaaattcttcagttaaagaataaattaaaacataaattataaatacttagaaatgaacaataagaacaggccacacttttaaagtgtatttaatatagccaaagcaatactcggaaaaaatagatagatatttagttttagatatattyattggaaatcactttaaaaagatggaaaattgtaaaagcattattttaaaccacgcagcttcc

SEQ ID NO: 849257 - DNA, 628 bp, Homo sapiens
cttagcctataatataagttgcaaatactttcccctagtttgttatttgtattttaactttatttacaaataaagtcctcttggtggatccttcccaatataattatgtactgtccccttttgttcccattaattcttttttgtcttaaagtttatgtaatctgatattaatagttaccccagctttcttttggttaacaatttccctgtatatcttttttcattcttttatttacaatctttgcaatcaattttttttactccatgtcttgtaaccagcatataattgagttttgtattcctttatttaatccaatctgatagtcatttaacagatgaatcatcttactctttagtatggttgctaataaatttggatttatttctttggtgtttttattgtgctttctgttaccatctacattagcttaccagggctgctataacaaattaccacaaacttggggggcttcaaacaacttaaatttattcttttgaagttttggaaggcrgaagtctgaaattaagctgctggcaggtctgtgctctctccagaggctctgggggagatcccattcctcccatcatgcagtttctggtggctgtcggcattcctgcactcatagct

SEQ ID NO: 849258 - DNA, 614 bp, Homo sapiens
caactgaaagaagatctagcatcactcatcatttgacagtgttccctataaaatttaccaaataagcctaatcatttaatatctctacaagatgagaagtrtatcctttgagactctccaggggctcaactggaaaattccaaagtgaaatctaggtcaaaatgatttaatttagaattttgatcctggggaagcaagccaaagacggaaaacagttttgaaacagttgatcaaaacaggatcatgggtcactgtaaattaatagccatgcatttaaccagagtgataaacaacttcaaaagcaatacagaaagttatatggatttttaaaaaccttaacactttcaaagctcagttttcctaagtaatcagaaacctagtaaagacaacacagaaagttatcttgataaaacataagttctctctccctctcttttttttctttaggtcagtgcccaaaaaggtaaagaaaacctcatgcagtgtgcttgcttctcctcatgggcagcccatttggataccctggaaattgaacctaatttaaaaggtatctgaatctaatcagtcacaggaagaatgtgtgtataccatattatagaggaaggtaaataaga

SEQ ID NO: 849259 - DNA, 349 bp, Homo sapiens
gtacgtactgccggtatctagtcatattttgccgaacggagagaagttggaggatgtattgtattcctaggccctctgtaacagattaccataaacttggtggcttaaaccaatagaaatgtattctgtcacaattctggaagctggaagtgtgaaaccaaggtactgacagagactgttattctgaagactctgagaggagaattcttgcttgccttttccagcttctgttgacygcaagcattgcttggcatcactccaatctctgcatatgtcttcacacagccttctcctccaagtcttctcttctgtctcttactaggacacttgtcattggatccaaggccca

SEQ ID NO: 849260 - DNA, 644 bp, Homo sapiens
tccaaccccactgggtcacattggagggaaaggaagaatctaagagtttgaagtatgtccatttaaataagtacttaaaataaaacaaatagacactttgtatcagcccttggcaattctgtattagacaatgtttactacctagaagggagatcataaatgaattttaaaattaattgagataatctgttccttcatctttcagatgaaggtctgacataatcctgtgtaatatgtgaaagtagcagaaacagccgttgacttaaagtcttaaaatatttttcttccaatagtattccctcctatatttttattgtggtaaaacatacataacacaaaacttgagattttaattatttttaagcgtacacttcagtggcattaagtacattcacaacattatgcaaccatcaccactatccatttcctgaacttgttcatcatcccaaacagaaactatgtactcattaaaccatcactctcagctcctccctcccccagacccttgtaacttccattctactttttttctctatgaacttgactactctaagtacctcataatagtggaatcatacaatacttgttctttagtgtctggcttgttttacttagcatartgttttcaaggtgcatccctgttg

SEQ ID NO: 849261 - DNA, 518 bp, Homo sapiens
gtattttttaattttttcaaaaaaaactcctggatttgtttattttttgaagagttttttgtgtctctatctcctccagttcagctctgattttggttatatcttgtcttttgctagatttcgagtttgtttgttcttggttctctagttcttttaattgagatgttaggttgttaagatctttctagctttttgatgtgggcattcaatgctataaatttctctcttaactctgctttagctgcatcccagagattctggtatgttgtctctgttctcattagtttccaataacttcttgatttctactttaatttcattattcaccccagagtcatttaggagcagattattccatttccatgtagttgtgtggtttatgagtgaatttcttaatcttgagttctaatttsattgcactgtggtctgagagactgttgtaatttcagttcctctgcatttgcttaggagtgttttatttccgattatgtgatcaattttagagtaaatgtcatgtg

SEQ ID NO: 849262 - DNA, 453 bp, Homo sapiens
tattcaataaatggtgctgggrtagctggctagtcatatacagaagaatgaaactagaactttacctttatttcttttgttttgttttgttttgttttgttttgtttttttgagaaggagtctcactctgtcacctgggctagcgtgcaatggcatgatctaggctcactgcaacctccgcttcccgggttcaagcaattctccctgcctcagcctcccaagtagctgggattacaggcagctgccaccatacctggctaatttttgtattttcagtaaagacagggttttgccatgttggccagcctggtctcagactcctgacctcaggtgatccacctgcctcagcctcccaaagtgctgggattacaggcatgagccaccatgcctggccctggaactttatctttcaccgtatacaaaaagtaactgaagatggactaaagatttaaa

SEQ ID NO: 849263 - DNA, 609 bp, Homo sapiens
atggtgagtatttcccatgctttattctgtatcatttttacagccaccctgtgctctatgcattattactcccattttatccaggaggaaatggaagttctggaaagtgaggtaattttccccacacgctcacatcttggaagtggagggctaagcttcaactctaggatttcttcaaccacgaacacctggctttgtttgtttcctgtttttgttttttaatctgctatgtcacttcacaaataaatgataactattcttttttctcacctgtcatacctaatcactctctaagacctgagtattgttttcactttgtttttttaaatgactcttttattaatcccctcatttccattctcactgccagcaccataattctgacaattatcaccatataatagaaatacggtggcattttaaatcagctttttagctttcatttcctccaccttccccaaattagtttccttaaatcactctcagagcaataatcactgatttagacccaagtagggcatcaaattaacaaagacctwgttcatctactccatcctttcctaggtgatgtgaactggatatttccctccacaattcctcattactagg

SEQ ID NO: 849264 - DNA, 570 bp, Homo sapiens
  misc_feature 444, 480: n = A,T,C or G
caggatccaaaagatatttaatgtggtcatattaatgtcagacaaaatagactttaaggcaacaattatcrttagagatgagagataaaataataaaaggctgctctttcaagaatatataacaattatgaacattaatgcacttaacaactaagccccaaaatacatgaagcaaaaattgtcataattgaaggaggaaatacaatccaacaataggagttgaagatttcagtattccactttcaataataaagcacctagaatgaaggcaaacgaggaggtggaaaactttagcaatactataaatcaactagacttaatagacatatatagaacattccactaaacagaaacagaatgcacattattctcaagtgcacatggaatattcttcaggacagacgaaaatgttagattataaagtcagcctcaatgagggattanaatttgcgaaagtatgttagtcaatgactggaatanaattaggaatcaataagtgaaagaaatttgggaaatttacaaatatatagaaatttaacacatttctaaataaccattgggtcaaagaag

SEQ ID NO: 849265 - DNA, 535 bp, Homo sapiens; identical to SEQ ID NO: 846257

SEQ ID NO: 849266 - DNA, 617 bp, Homo sapiens; identical to SEQ ID NO: 846258

SEQ ID NO: 849267 - DNA, 518 bp, Homo sapiens
atgtttcttaaaatagaaaacaattctggatagacattcatataaaagtgtgacttttagtatgaagtctttaaactgggagttattttctctggcacatacagctcttatcccctgggtgctcaggggtccctctctagtatcctctgaagcagaggtgagaagaaatgtcctaagcgcacctgcaattattctgtccagacctgtcagctctctgtcagcaaaagctgctgtcatgtggacatggctcatcttgccttgaggttaattttttttaagacatcaaaatcttaactcctttgttggaaagatatatatcatatgataagtttttccttcatactactttctctaaaaaagaaacacgtcatcaggaattttattaataaaaatgatgataaatagttgctcctgtattttcaaatcatcagactgctaatakgcacatgcatatctcaaaacatgaattacacatttgcaaacagttctttattacattcatgtttcagattttgaga

SEQ ID NO: 849268 - DNA, 519 bp, Homo sapiens
cagcctgaccaacatggtgaatacctgtcccaaaaaaaaaaaaaaraaaaaaattaggcaggcgcctgtaatcccaactactccagagactgaggcaggagaatagcttgaacccgggaggtggagattgcagtgagccgagatcgctccattgcactccagactgggtgacagagcaagactcttatctcaaaaaaaaaaaaaaaaagccttagtaaaagatgtgttcagacggtgagagagaaatcctaccaagatctgaacctgccaacttagtggtttttaggatctagtgttctagggcatgcagggaaatcccctgcaaagtaaagaattaattattgtatcttgcacttaccaccactgtaaaggaaaaatgatgcctcttagaccacttcaggttctggccttggaaaaattaacccatttacagaatgacagctttagtgtggccagaacagggctctgcatcagggctgcacatactgcaggctggacctgctggtgcccctgtggggt

SEQ ID NO: 849269 - DNA, 461 bp, Homo sapiens
tctgttgccaggctggactgcagtrgcgtgatctcagctcactgcaaccttcgcctccagggtttcaagtgagtctcctgcctcggtctcccaagcagctgggattacaggcacatgccaccacacccagctaatttttgtatttttagtagagacggggtttcaccatgttggccaggctggtcttgaactcctgacctcaggtaatccactcgcttcggcctcccaaagtgctgggattacaggcatgcaccaccacgcccggccaacccagacattttttatttaagcgtacaacaagcaataaaataggttgagtgttacttcagaatttcctcaactttttataatgagttaatttgaagcctgtgcataaacagagtacgtttagtgtgattagttgtttaggactcagaagaagactcagcaagatctccttcagtctggtgaggcttgcccaa

SEQ ID NO: 849270 - DNA, 569 bp, Homo sapiens
atctaacttttgtttaggtcaggcatgtatgtgtcatgctggtatctaataggacattttagtggtttccattttctatgtatgtgactggaacagtaggaagcctgcacgatggtaacagatcctgctgtttctgagtcagtctatacagattgaagtagcttcaatcaggtaattttcaattgtatttgattttgttgtaattacaaaacccgaaaaccccaatattttctgaggttttactccaacatatgtgttagttgaagagccactctaataaggtgaaactacaggctcctcccattccacactgttctctacattatagtatacacatctactacagttcttattattctttctttctcctgccgaagtatgaatgcctccagatggggatctagtctaatacagtagaattcaacaagcatttatkatgttccaggcacagcgctagacacgcataatacagagaggagggggcaagtgctggtggaatgggcccccagcacagagcacaatatgtgaaatgtttggaaaaattagatctcatttatctttacttctag

SEQ ID NO: 849271 - DNA, 623 bp, Homo sapiens
atatttgcaaaaataatgaaagagtagtggcaagtgcatwggcattagaatcagacttttaacctgacaagttacttatcttaagtttcatgttcttgtctgctaaatggggatattaacacctgcctcacagaattggatctgttaaatgaagtaatgtatgtgaaatgcatattgtgctagtctcttcaaagaagttgctcaataaatgttagccctttctccaacttaaaagctataagttcttcaatattaatagctggataaaatgtgtcctattgtttggattaaaaatattaatttgtagacacctcatggtaccaaataagatcaacttcatagctcttgtggagtaaggtacaagaaatattggaattttttattatgtgaataatgatcattataatttgataaattataataaaaacagtaagaatccataatcaacttttcttatcaattctttatagagtacagaatgtttttaaatggtgatctttaatgggcttgataggaaaatggaaaaataaaaattaaaaactagaccacaatacaatgttttgagaataatctttaggaatgaattaactgccttaggaaaccaaggaaacagaaaactctag

SEQ ID NO: 849272 - DNA, 644 bp, Homo sapiens
gatgggtcattatttccgtgatcatgttacattccatggcaaagggattttgcagatgtaattaaggttaccaatcagttgatytggaggttactaatcagttgatctgagtaggacagtcctaagtaatgcaccttttaaaagcaaaagtttttcactgactgacagcaaaaaatgaattcacagatatttgaaacatcagaatggctttgtgaagcattgctggtttaaagatgtagaaagcaaattggataaagagtcaagacccatcagtgtgctgtattcaggaaacccatctcatgtgcagagacacatataggctcaaaataaagggatggaggaagatctactaagaaaatggaaaacaaaaaaaggcagggtttgcaatcctagtctctgaaaaaactgactttagaccaacaaagatcaaaaaagacaaagaaggccattacataatggtaaagagatcaattcaacaagaagaactcattatcctaaatatatatgcaccccatataggagcactcagattcataaagcaagtccgtagagacctacaaagagacttagactcccacacaataataatgggagactttaacaccccactatcaacatcagatagatcaatgagacagaaagtt

SEQ ID NO: 849273 - DNA, 644 bp, Homo sapiens
gatgggtcattatttccgtgatcatgttacattccatggcaaagggattttgcagatgtaattaaggttaccaatcagttgatttkgaggttactaatcagttgatctgagtaggacagtcctaagtaatgcaccttttaaaagcaaaagtttttcactgactgacagcaaaaaatgaattcacagatatttgaaacatcagaatggctttgtgaagcattgctggtttaaagatgtagaaagcaaattggataaagagtcaagacccatcagtgtgctgtattcaggaaacccatctcatgtgcagagacacatataggctcaaaataaagggatggaggaagatctactaagaaaatggaaaacaaaaaaaggcagggtttgcaatcctagtctctgaaaaaactgactttagaccaacaaagatcaaaaaagacaaagaaggccattacataatggtaaagagatcaattcaacaagaagaactcattatcctaaatatatatgcaccccatataggagcactcagattcataaagcaagtccgtagagacctacaaagagacttagactcccacacaataataatgggagactttaacaccccactatcaacatcagatagatcaatgagacagaaagtt

SEQ ID NO: 849274 - DNA, 644 bp, Homo sapiens
gatgggtcattatttccgtgatcatgttacattccatggcaaagggattttgcagatgtaattaaggttaccaatcagttgatttggaggttactaatcagttgatctgagtaggacagtcctaagtaatgcaccttttaaaagcaaaagtttttcactgactgacagcaaaaaatgaattcacagatatttgaaacatcagaatggctttgtgaagcattgctggtttaaagatgtagaaagcaaattggataaagagtcaagacccatcagtgtgctgtattcaggaaacccatctcatgtgcagagacacatataggctcaaaataaagggatggaggaagatctactaagaaaatggaaaacaaaaaaaggcagggtttgcaatcctagtctctgaaaaaactgactttagaccaacaaagatcaaaaaagacaaagaaggccattacataatggtaaagagatcaattcaacaagaagaactcattatcctaaatatatatgcaccccatataggagcactcagattcataaagcaagtccgtagagacctacaaagagacttagactcccacacaataataatgggagactttaacaccccactatcaacatcagayagatcaatgagacagaaagtt

SEQ ID NO: 849275 - DNA, 580 bp, Homo sapiens
gcacaaaggcacattttcataaacttatgagcactgaagcccacagtgcaaagaaatatatttttgtgtttcaaatggctctcatatggtgatattataaagatagaaaaatctttattttgcgtagaggctacatgacagtatttaaaagtggcctgataattgacattatcttattttctccttccaaaggaccccaccagggacatgtatcttaaaaattatgatttaaaagaccacggtatagtcttgaaaaacactgtgcaaaagagaaggaatctgaatctaagtgtaggttttgtaacaatggtggtgcaaaaacttgggaaagttatttcatttctttaaacttgatttactatatttagaactgtatagatttgtattaaggtagtatttattgaggaaagatatacatttatttcgtattttaatcatgctaaaagggccttttytatgtgtcatatctgggatcatgatttgatctttgctatttttgaatctacatagaataaaatctatagtgggatttggttaatataacactatcttgtttcactagagggcagtatgacaaatt

SEQ ID NO: 849276 - DNA, 573 bp, Homo sapiens
agtagaataaaatcatggttaagaaaagaaaaatgttacatctgtatcagtatgtggatttcataggatttttttccttcttctgtgggacctgagaytcatttgaagtaaccttggcagaaagaccttagttagtcagactctaaaggatattttgagctggaatataaaaagcacatgtaataattaatgtaacagcagctaaaagtgcctgaggtcagtagttgctacatctatattgcatgtaaacaaagtgttagccaaaactactttcagagagccctaattacgtctgttttaatttaatttagtttgatttaatgatactttttatatgaatttgcttcatggttactctgttgaatttcctttccctgagaagaacccataagagatttttttcccccaaatgatttagtttggtgactttggatacagccaaagcattgtatcttacggcatagcatcttcaagtggaagaatgtaccagatataaagtcagtaatttaagatgaattaaaattttgtttagtttttaaaatatgagatttacatacaatgaagtacaaatat

SEQ ID NO: 849277 - DNA, 542 bp, Homo sapiens
actggagttgtgtacctaggaggatcatggctccctctgctgagtcatgcaggttgtcaggaatgtgggggaaagccggcagtcacaggtcttacccagctcccacacaaagtgaagggccagcctcactcccatcatgccccctgccctgatatctggaaacagccccgagtctgtttccaggcgcagggcaggatgggcttgaaaacttgccctgggctacctacctcccagctgcaaaagaaaaagcttggttcttcccccgcctgtggtgtctacacactagttttgcaccctcccccaagttctgaccaggcttctggtcctgttcaaattgttacaaagttcagctcggagagttccttctccctgtggagttttacctgctgctcctctggtcaccctcccaatggatctctgtgatgccaggcaggaatggcctgctaagggatacagtgagctcccagggcctttctgctgcttcctctacccctgtatttcactcakttctctaaagtgactcagctgcaggtaaagtcaga

SEQ ID NO: 849278 - DNA, 590 bp, Homo sapiens
tgcccctttcagttttgcttttcacatgttaagtcttctgacatgcaaatgtctccttatattgctgctgccctttaaaccgttccatggcttctcatcgccctcaggaaaacttacgctgaacctcttacttgtgcacaaggccctacttgttctggctcctgccgaggtcgcctggctcacctgctacctacctccacccccactgcagacttcttccacgtgcctctggacatgtgacctctgcacctcggctgcctctgtgcagtgggctgggacccgtccactgtgtccacagtgtagctggggcctagcaccctggctgcagtcaaggagggacccagtcagtatttgaggtgaatgaatattctttcctgatcaatttgtgttgttttcttcttgacttttacttaattaaaaaaaatacgattaagggaagcatgacatgagaaaggattgtaggtgtcttctcttaggagagtaaacaygaaacaatggaggctgaatgtgtttagaggataaatatgctcaccagtatctcagctggaattgccttagtgacgacatcatcactttccctcagatgtgga

SEQ ID NO: 849279 - DNA, 410 bp, Homo sapiens
atctcctgaaaatagagatagttttaactactcaaaccaaaagttatatawtagtgataaagtaggcgtctttatattgttctgattgtagtggaactaattcttgtgtttcccattaagcataatgctagcttttgggttgagatagatatatttttcgtgtttaggaagtggccattggttcttattttattgaatgttttatcaagaatgcatgttcaattttgtcaaatgtcattccagtatctatgaatataataatttgattttccccccttagatctattaatagatgaacttgatttttgccttgctacatactcactacaatctagtttatggcaatttcatgaccttttggtttctgaattttagatttgctgaaagtttaaagatgcggaagtttattt

SEQ ID NO: 849280 - DNA, 668 bp, Homo sapiens
taggaaacagtaggctgtgatttagttgtgccttttcataaaggtgtgctgttacagtagaacatrgcaggaggagaaaatgtaatgctccctatgaacagtatgtatgatcaattatttcccattattgttgagaattagatagcagtttttagatagcaggggttatcattttcactttgactaggtcatacaatgtacacattattatctgaacaacattggcaatgtaatcaccacacaggtatttatttgctttttatgtaagacctgatcataaatgtgaaactagtggaaaaaagaatatatgttaaaaatattttgaagtatatagtagaaatacacccaccagcaggaaaccttcacatatttatatttgaaaattgtgttaaagatattcagtacaatcctagaccctagagagaacagtggctttgacatgtgacataataaccatagttgatctatattgaaatttaaaatgtttccaggatttctttgatataggtgactttcatttaacgtatgtgaacagcaggaaaaaaatgtatatacttagggtcatttgaaaccaccctcccaaatccattacttaaacatttctggagtaaaataatatttatttcctgaggtatatttgatagtttaactcaggtcccactattaca

SEQ ID NO: 849281 - DNA, 565 bp, Homo sapiens
ggcaagttgacttagatgaatatcaatttcttttgcataaagcgaaattggaaaagcacatttgctgagctttatttggatgtatctagtaaaagcattgcttcatcgccttcttcagtttaaagtatttgtttgaaagagccagctttttctagataaatgatgcatatgaaaaagaagcaggattaaattgctttataaacattcatatcttgaacactagcattcccttgctgcctcgtgttcttttatcttctcattcttattctgaacagcagcagtacattggagctattctgccacaaattttaccagaggaatttaacaaatttttagtttaacaaaaagtgaattaatttggtctctttttaaaacatttatcttagatgattcttttaaatgcttttagtggtctgctttcagctaaaaaaaaatctaacttgtatttgcttttatgctaaggaaacacatggtttacttttaacttcttyaatatttagattttttaacttccttcatacttaagtaagttgtaactttctttggtcaagtttttttttttttt

SEQ ID NO: 849282 - DNA, 565 bp, Homo sapiens
ggcaagttgacttagatgaatatcaatttcttttgcataaagcgaaattggaaaagcacatttgctgagctttatttggatgtatctagtaaaagcattgcttcatcgccttcttcagtttaaagtatttgtttgaaagagccagctttttctagataaatgatgcatatgaaaaagaagcaggattaaattgctttataaacattcatatcttgaacactagcattcccttgctgcctcgtgttcttttatcttctcattcttattctgaacagcagcagtacattggagctattctgccacaaattttaccagaggaatttaacaaatttttagtttaacaaaaagtgaattaatttggtctctttttaaaacatttatcttagatgattcttttaaatgcttttagtggtctgctttcagctaaaaaaaaatctaacttgtatttgcttttatgctaaggaaacacatggtttacttttaacttcttcaatatttagattttttaacttccttsatacttaagtaagttgtaactttctttggtcaagtttttttttttttt

SEQ ID NO: 849283 - DNA, 503 bp, Homo sapiens
aggctggttcaacttatgtaaatcaataaatataatccatccatcaaataagcagaacaaatgacaaaaaccacatgatgatctcaayagatgcagaaaaggacttcgatagaattcacacccttcatgctaaaaactctctataaactaggtattgacagaatgtatctcaaaataataagagctatttatgacaaacccacagccgacatcacactgaatggttaaaagctgtaagtattccctttgaaaactggcacaaaacaaagatgccttctctcaccactcctatttaaccatagtattagaagttctggccagggcagtcaggcaagggaaagaaataaaaggtattcaaatagggagagaggagttcaaattgtctctgtttgaagatgacatgattgtatatttagaaaaccccatcttctcagccccaaatctccttaagctgataagcaacttcagcaacgtctcaggatacaaaatcaatgtgcaaatat

SEQ ID NO: 849284 - DNA, 518 bp, Homo sapiens
tacctcatgactatcatatgagagagaaacaacttctattgtctctgagccatttgatccatctctctatataccatttctataaatagtttaatgaaatataagaggaaaaaggaatacagagcaaaaatagaggacctctgtgaattcacattgataaatctaatcattactctaggaaaagtttggatttctcttttctgaagtttaacaaaatattgataataactttaaataaaagcatactatgttctaggcactaagcttttggcatacattgccccatttaaactcaaaatatttctgagggagatcctagtcaggcatgagttggagatactgtaggtgtggttcaagactaccacaataaagtgaatattgcaagatagtgagacacacaaattttktgttgccctgtgcacataaaacttatgtttatactacattgtagactattaagtgcacattcctaaaaacatgatgcatatatcttaattaaaaatactttattataaaaa

SEQ ID NO: 849285 - DNA, 620 bp, Homo sapiens
caggtgttttttttttttttttttttttgtttgtttgtttttttgttgagacggagtcttgctctgtggcccaggctggagtgcagtggcrtgatctcagctcactgcaagttccgcctcccaggttcacgccattctcctgtctcagcctcccgagtagctgggaccacaggtgcccgccacaacgcccggctaattttctgtatttttagtagagacggggtttcactctcgatctcctgacctcatgaaccgccacctcgacctcccaaagtgctgggattacaggtgtgagccaccatgcctggctttttttttttttttttttttgagacaaattctcactctgttgcccaggctggagtgcagtggcatctcagctcatggcaacctctacctctcaggttcaagcaattctcctcagcctcccgaatagctgagattacaggcacccgccaccaaacctggctaagttttgtatttttagtacagacagagtctcaccatattgaccaggctggtctcaaactcttgacctcatgatctacccacctcagtctcccaaagtgctggggtacaggcgtgagccactgtgcccagccaataccgtatcttacagg

SEQ ID NO: 849286 - DNA, 622 bp, Homo sapiens
gcactggcttacgcctgtaatcccagcactttgcaaggcccaggtgggtggatcacctgaggtcaggagttcgagacyggcctggccatcttggtgaaacctcatctctactaaaaatacaaaagttagctgactgtggtggtgggcacctgtaatccagctactcaggaggctgaggcacaagaatcacttgaacccaggaggtggcggttgcagtgagctgagattgtgccactgcactccagcctgggtgacagagcgagacactctctcgaaagaaagaaagaaagagagagagagagagagagaaagaaaaaagaaagaaagagaaagaaagaagaaagaaagaaaaacaagataattatttacccaattattccagttcagggtcgtgggtggctggagcccatcctggcagctcaggatgccaggtgggaacctaccctggacaggacatggtgctcacacacccacactcactcgtgctgggaccatgcagactcaccaatgagcctagcgtgcacagctttgggacatgggagaaaacccacgcagacgtggggagaatgcaaacaccacgcagacagtggcccctgcaggaatcgaatttttctcttaccaa

SEQ ID NO: 849287 - DNA, 482 bp, Homo sapiens
ttcagcagttgaaattgcaggacattacatgacacttgtgaaaaatctctattttgtgaaaagttaggtgtaaaatataatcttccagaactgtttgatagatatctctgtayatatatgcgcataagactttgaaattcctcattcaaatattcagttcattatgagaaaaaaaagttaatcatttttctacatgagagcatgatgagatgtatgtagatacaattctgtatttatcaaaacaaaatatcatatcggtctaaactctaagttgcatttaaagagagtaaattcaaaccttctcaaagggaaaacggaaaataacagctcacatgattcaaaagtccaggggtatgtatctggctcagctcactaaaggtgctcattggatatctctctctcatgctttctttttgaaatgtcttccaggacttacagagttttctttgttcggtgttttatagtaagttataattgtttac

SEQ ID NO: 849288 - DNA, 628 bp, Homo sapiens
catttaaagatataataccgtcttcatgaatttggtagattatagaatcaataaccactttgagtgattcaattgcttttctaaacaataatgaagttaaaaggaagaagaaaatttccacacataattgctttcttaggacaattgaaaaaatcatacaaaagcatataagtaaattctttgtgactgtgcatgaaggacataaaccaaacataactagaattaatcaatgacagtcaaattacagctgttttacacaatagtaaacacatgtttatgcatttaaaaaatgccagacaggctgtggtactagcttatgtttccttttagtcaaaaaaataaaatggcatgtttatgctttgggaataaatttatagaagttaatatttttaaggcaaacctctgtgtgatattgtgaggttagataatgactctagttatcatttcccaactcacactgtagcttaaaacataaaaacataagtacctggaccattggaccaaagraggtgaaggagggatgctaaataaagaggaaccactgagatagggctttttattctgctagaaaatgttagctatcattgattgagaatttactctctgttagacacaaggctaagaattt

SEQ ID NO: 849289 - DNA, 602 bp, Homo sapiens
tgtttgacttttctgttaatatttaagtatatatgctaattcaatatatagtagacctttaaacaatacaagtatgaactgtgtgggtccacttatatgtgaattttttcaataagtataattgaaattttgttacagatttgcaacaatttgcaaaaccttacagacaatccacatagcctagaaataccaaaaaaagttaagcattttatgaacacataatatatacaaatctattataaaatgttaagctttatcaaaacttagacacacaaacacttacagaccatacatggccccatttacagctctgagaaatgtaaacaaacatgaagatgcagtattacattataactgcattaaactaaccacagtacatactgtactacagtactaattttgtagccaactcctgttgctattgtggtgagctcaagagtggctcatgtgacactaatcatctccatgtgagcagcttctctctacagtaaattgcagattcagcaaaaagtgatctctcatggttctcccatrttttcgtcatgtttagtgcaataccataaacctcgaataacaccatgggacccatacaatttgccact

SEQ ID NO: 849290 - DNA, 589 bp, Homo sapiens
catgaagccaagggaacccccaccccagctaaggaaagcagtgagtgattgtgcagccctggcaagccatgcttcccccacggatctttgcaaccctgggtcaggagataccctcatgagcccacatcactagggccttggtccaacacagagttgtgtagaatcttggcagagcagctgctcaggcatgcacagagacccaggagttttacatactccagccccaatatccctggcaaggtgggaggttcctactctcctctatgaagggggataagtccagggggcccaagcaacacagttctgcaggccccactttcatggcacctcacaagataagacccactggcttggaattccagccagccactgacaacagggtggagcctgcctgagacagagcccctggggacaggggcaggccaccctctctgctgtatggtcaactcagccatttctacctgtggkctttggacagtgcaaacagtccagaggaggaagggttctaccactgcagcacagctgctttgccagaatgtggccagattgtttcttaaagcaggatcccaatccattcctcttcaatggg

SEQ ID NO: 849291 - DNA, 582 bp, Homo sapiens
tcagccttaaaaagaaaagaaattmcggcatatgctgcaacataaatgaacctccagggacttttgcttagtgaaataagtcaattacaaaaatacaaatactatatgattttgcttatataaagtacctagagtactcagatttttggagatggagatgagaatggtggttggcagggactacaggaaaggggaagtggagaattattgtttaatgggtacacagtttaagtttgggaaaagaaaaaaatttccctagatgtttggtggtggttgggttttcctctagtttggtcttgaagtctgtctagagagagtggctataaactctagccctgccctgatgggactccaggtgtgtggttgtctttcatgggatagttttttttttttttaatcatggtgaatggcccaatgcctacatgtccaacctgtcatcatgtgtccctctcacaggaaacctgtttaaactgacagatacccttgtggctcttgtgtgacctatgcccagtttattcctaccaagacagccactgtataggagaacgctgatcagaacagaagttaggtttgggtatcatc

SEQ ID NO: 849292 - DNA, 582 bp, Homo sapiens
tcagccttaaaaagaaaagaaattccggcatatgctgcaacataaatgaacctccagggacttttgcttagtgaaataagtcaattacaaaaatacaaatactatatgattttgcttatataaagtacctagagtactcagatttttggagatggagatgagaatggtggttggcagggactacaggaaaggggaagtggagaattattgtttaatgggtacacagtttaagtttgggaaaagaaaaaaatttccctagatgtttggtggtggttgggttttcctctagtttggtcttgaagtctgtctagagagagtggctataaactctagccctgccctgatgggactccaggtgtgtggttgtctttcatgggatagttttttttttttttaatcatggtgaatggcccaatgcctacatgtccaacctgtcatcatgtgtccctctcacaggaaacctgtttaaactgacagayacccttgtggctcttgtgtgacctatgcccagtttattcctaccaagacagccactgtataggagaacgctgatcagaacagaagttaggtttgggtatcatc

SEQ ID NO: 849293 - DNA, 562 bp, Homo sapiens
acctgtcatcttttggtagtgagagagattaactaaaggatataggagaaatctgaaaaaaggtraaccaaaagaatggaagagagtacactagaaaatcacatcgaaagtttgctcagacctaaccctgatcataagtataatcctcacaaagctattacatttatattttaatagaaaatggtttttaaaatttttttgtattgtattcccctttaagtattacaaacatcacaaagcccatttagttggactcattgtaagtttatgtcctctaacattgtctcaggtcctgcaaacagatctttaaccttaggtgtgttaaaatggtagaataattacacaggtataaaagctaagttaaaagaaattcatcataacgttcagttcatgaaaaattgttttgtctctacctacaaagcttagatgcttatcaggggaagcttgaagtgaaaatttccctgggctgttaattcatcatgagttacactaattcatatcatactcctatgtccaatatacagtagaaatattattttagagttatactcttacaaagaaa

SEQ ID NO: 849294 - DNA, 579 bp, Homo sapiens
ccaaggaaggaggacagaggatcccagaaagaaagggaatggttacagctggaagagaggaaaaagctttaccatttatccagtctyggtgaaataactatttcatggaagcgactgtggatcttgctgtttatagggttggaagcatatatttaatcagagctatcagagctgcatatggttaagctgacatacatatgtgggctgtgtgtgtgtgtgtgtgtgtgtgtgtgtgtgtgtttatatgtaaacctgtgatttatttcaaaatgaaatgattcctagttaaaaacaacttgattgtgtagtgcaatacttcctattagaagacttgttaaattagtatttgctaagaagtacttcttagcaattccgagaaacataatcttgggtaaaattttcaggcgcctccatcctgttcacatgtcttttcgtaacagtacctgaaaggttttttcaacttaagattttataatagcaacaaaaaaattagctaagaattactgaacccactctatggaatgaaatctggtgcttagtaaacattgaacttagcatcaagcaacaactagaatttat

SEQ ID NO: 849295 - DNA, 579 bp, Homo sapiens
ccaaggaaggaggacagaggatcccagaaagaaagggaatggttacagctggaagagaggaaaaagctttaccatttatccagtctcggtgaaataactatttcatggaagcgactgtggatcttgctgtttatagggttggaagcatatatttaatcagagctatcagagctgcatatggttaagctgacatacatatgtgggctgtgtgtgtgtgtgtgtgtgtgtgtgtgtgtgtgtttatatgtaaacctgtgatttatttcaaaatgaaatgattcctagttaaaaacaacttgattgtgtagtgcaatacttcctattagaagacttgttaaattagtatttgctaagaagtacttcttagcaattccgagaaacataatcttgggtaaaattttcaggcgcctccatcctgttcacatgtcttttcgtaacagtacctgaaaggttttttcaacttaagattttataatagcaacaaaaaaattagctragaattactgaacccactctatggaatgaaatctggtgcttagtaaacattgaacttagcatcaagcaacaactagaatttat

SEQ ID NO: 849296 - DNA, 616 bp, Homo sapiens
tattttgggttggcatgtgggatagattgggcatgttgcaatactgaaacatttacatacaaaaagccaaactatttacctaggaagggtttcttatttttcttttytcaaaggctgggacacactagataaagcattatttctgtccacaataagccataaaattaaaagagataaatggattttccaggtttaataagacttaattcaagtttactgaaattgaatcatattctctccatattcagatagtttaaagccattctataaggtttttcatattttctcttttaaaaggtctgtcttcaaaagttttacactccagatttaaaaactttagtcatttggttttggccaatttatgagaggaataataaaatatttttcttcatgttcagccatgctttctttggtcaatgccattttagttttcctggtttatttcctatgaatttctaggtcatgattcttcactacttaattgggaaaaaattacctaaacattcctttttcaaattaggcttttggtaaagagtactgctgaaaggtcaaggcagatgaatcaatcaataaataatcaataatacaatcaatagatacatattcctaataatta

SEQ ID NO: 849297 - DNA, 644 bp, Homo sapiens
tcatgaaaagctggtgttttttgaagaaatgggtgaaactgtyatgcgcattttctggaattatagcaaagtataagaaaaaaattatgtctatatatctcagggagaaatgatgacttggtataactagcttaagagaagaagcaagtttttcttcattctttatatttacatcctcatataaaggaaactaaatatgtgataaattgtgaccttaaaaataaagcctccaacactttgaagacgtcagatatcaagccatcccttataattaccttcaatgaaagccaattagatcagcttttaattataattttgaaaatccaacactaggaaggatcagaggaatattgcccaggcatacacaattttgggactcatactaataacagaaacagtgtataatcctaatcccactgtgaaccagtgtgatgcattaatgcatttttttaatttaggggcctagcattacaaagtttaaaggctgcataactaaaatttaaagaaaaactttctaacttatccataattagagaattcaggcacaagcaatatagcacacaaagaagcactctttcaaaaaatttatttctattgatggaaatatttgaaatcagcaacaaaaaattaacatggcaaatagc

SEQ ID NO: 849298 - DNA, 644 bp, Homo sapiens
tcatgaaaagctggtgttttttgaagaaatgggtgaaactgttatgygcattttctggaattatagcaaagtataagaaaaaaattatgtctatatatctcagggagaaatgatgacttggtataactagcttaagagaagaagcaagtttttcttcattctttatatttacatcctcatataaaggaaactaaatatgtgataaattgtgaccttaaaaataaagcctccaacactttgaagacgtcagatatcaagccatcccttataattaccttcaatgaaagccaattagatcagcttttaattataattttgaaaatccaacactaggaaggatcagaggaatattgcccaggcatacacaattttgggactcatactaataacagaaacagtgtataatcctaatcccactgtgaaccagtgtgatgcattaatgcatttttttaatttaggggcctagcattacaaagtttaaaggctgcataactaaaatttaaagaaaaactttctaacttatccataattagagaattcaggcacaagcaatatagcacacaaagaagcactctttcaaaaaatttatttctattgatggaaatatttgaaatcagcaacaaaaaattaacatggcaaatagc

SEQ ID NO: 849299 - DNA, 378 bp, Homo sapiens
tcctaaaggcatccctttatacttcaatcatgcacccaatgggaattgctcaaagtcagtgacataacaagaaggccttgatggacaagtcaaatgaaataagaatsttaacccaaccacccattgcccacaccatgatcagactaactagtttaactcaccattgctatttttcagtgggaaagtagaggggagagttttgctgaaaagagggagaaaataaaggggaaaaacctacctatggagaggtgcatgacatgcagcagcatttccccaaatccagttgcccacataccacctgcacaattttctgctacatctgcataccatgaggattattatttatatttttaaaaagacacttgatattgtggcttt

SEQ ID NO: 849300 - DNA, 462 bp, Homo sapiens
gggtggcagaaacagtttggggaatttcagatgtttttgtmgttgaataaaaccgtacagcttataaactcacaaaacctcagaaatgtactatttaacaagtatggcatagctatcagtcagtttaaaaaaaaaagatcagccaatccaaatggatattagccataaactgaatgtcagccagctcataacacacattgttcctgaatagttgaactcttactgcctcactctgcctctgtggcagctttgagatcttcagtgctcatttccctcatctggtctatttcagcaatagaattggttctgatcccttctcccttaatccttatttaaatactccactcttcaagacacttgtaagttcaaaaattttcccacctatttccattctctggatacctgaagagttacttcaccccagaggttttaagtgtgatacactctttcatggctctgtgc

SEQ ID NO: 849301 - DNA, 627 bp, Homo sapiens
tgcccggcctaacagctgacttctcatcagaagcagtggagtccagaaggcagtggaataacattcaaagtactgaaaagaaagtccatgaaaaagaatagagtgttttataggcatgacattaagtctgacttcattatgcatatttagtgatatggtttggctgtgtccccacccaaatctcatcttgaattatagctcccataattcccacatgccacgggagggacctggtgggaagtaattgaatcatgggggtgggtctttctcttgctgttctcatgataatgagtaagtctcacaagatgtgatggttttataaagcagagatccccctgcacacactctcttgcctgctgccatgtaagatgtgactttgctcctccttcgccttctgccacgattgtgaggcctccccagccatgtggaactctgagtcaattaaacttctttcctttataaatcacccagtctagggtatgtctttattagcagcatgagaacagaatactacacttaggaatactgctgtgtctggcatgccctcataargaagagtagacagagttacataaggaacacagtcatattcatctcctccctccaccccaggatctgagaaaaccc

SEQ ID NO: 849302 - DNA, 593 bp, Homo sapiens
gtattatgctgtcaggagtgaacttgcttgaacttgctcagcagcttgacctgagtgttctggatttaaataccccactccacacagattcagatgcccacgtgtgggtggacgtagcactctgcacagctgctgtcgtttgtgtagggaaagcccttctaaaaacctacattctaaaagaagttcaaatggggacagagactaagagcatttggtgactcaaaggaaaaacatgatcttaacctgtttttatgagtcaagatggatagagttacctctagcaggagtaaaatatgtttgggcagaggcagatatcagggagataatatatttcaagtaggggacaaaaaagaaacgcaagaactagaggctaaatttttaattcctcagatagagtaccctgagctctgtgctggatttcctaattcttttcttagtgtatattcatagactcagggccccaaagtcagacagcctgggttcaaatccttgtgtcatcatttttagcagygtgaccttaatcaagttacgaactttttccccttggcttcctcatttataaactaaggataatgatggtccctgcattttag

SEQ ID NO: 849303 - DNA, 578 bp, Homo sapiens
accatgccagttgatgtacttggcatccccacatctgctctcagagcatggggcaccagctctcctggggagcccggttacaaagcagagggcgggatagaaggtgtcagctttagtgcacactggctctgtgggctgggggaagcaggaactaactgaggcacaaataggtctgctctctcctttgggtgggttccttcattgctacatcagccctgctcaaccttgagcgggctttccaatttttgtgcaatgatacactgttttctgaataagaaagagagtcaattctcaactaactatactatttcatggatcaatcacagcaatgtttgtttgctaaactaattcctgaattaactaattgctgaattttaaaaataattacatttttacatatgaaagtgtacagcatatccttgagccagcaggctgcctggttgcttctgccactcccttcaaaagcaagatcggtgtttgggacttcccttccccatgtctgtgctctgctgttggcaggaggatgarggacaatgcttactggtgtttgtcagattttataaacagttttgatccag

SEQ ID NO: 849304 - DNA, 532 bp, Homo sapiens
tgccttaaccacctgggaatgcagccaagtaagtctcagcctcattttactcagctcctacttaagatggagtagctctggttcaaacgcctctgacatttttcccctccctttcataagagaacccttaatcctaaaggttgcagagggatgaaaatccatcttctgtaacttcttcatgctgaataagggcaatgatattcctgcttaactaagaggagatcttgtatacagagaagagaggaactcagagagaaggcatcaatatagggagggtacatccataactccaagttccaacaaaaggtggtatctggaagattatttattgtccaatttaagaaaacggtgggcaatcttgtatgcattcctacacaaagagtacaactgcaatatgttccacaacagcaaagcaaaataagtcaaattatcccaagtaaactaaattagaaggctttccatgaagtgagaaactgttggaaccaagctgatayggggttgctagctgattccaatgttcccagaattagag

SEQ ID NO: 849305 - DNA, 519 bp, Homo sapiens
aactggggtctgggctatctgacctgacaggctgtgagtgcatgcacacgtgtgtgtatgtgtctgggcatgtgcggtgggtccaagcggggcagraagcccctccagttcctgctcagcctgtggccctgatacggtggtaaaggtcagggtcatggtgagacaccttttgggcccagaccctgggctcagtaaatcctaatctcagccctggaagatcggagggtcccaaagaccctcttctcctggagccagggtcccagttccacctctggcaccccagtccctttctgctcggcaaagataccctctggctgagtagccacggctccttcggctctgtctccctcctgccaggattagaccgcagatctccacgtcagtctctccccacagggagggagccacggggaacagatcaaattgccacctcattgtgggcttatggtgggcaccatacctccaggaatgtggcccccaggaggtcagtgctctcctcggggccacatatcctagacc

SEQ ID NO: 849306 - DNA, 519 bp, Homo sapiens
aactggggtctgggctatctgacctgacaggctgtgagtgcatgcacacgtgtgtgtatgtgtctgggcatgtgcggtgggtccaagcggggcaggaagcccctccagttcctsctcagcctgtggccctgatacggtggtaaaggtcagggtcatggtgagacaccttttgggcccagaccctgggctcagtaaatcctaatctcagccctggaagatcggagggtcccaaagaccctcttctcctggagccagggtcccagttccacctctggcaccccagtccctttctgctcggcaaagataccctctggctgagtagccacggctccttcggctctgtctccctcctgccaggattagaccgcagatctccacgtcagtctctccccacagggagggagccacggggaacagatcaaattgccacctcattgtgggcttatggtgggcaccatacctccaggaatgtggcccccaggaggtcagtgctctcctcggggccacatatcctagacc

SEQ ID NO: 849307 - DNA, 633 bp, Homo sapiens
gaggtataatgcatgcctttgggcttgacagttccttcaataagggacccagaagcctaaaagaggtgaagaaaacaaggtctcaaaaggaagagggccttgcacaaattcagagcagggctggttgagaggaacagggtcctgagtgttttcattgagcctcaatccaggcagacttaccctcctcactcaccagctcagggaatcataaagtgagagctgctctgattcatttagccatggaagagacctgtaggtagaggaggaactttcaaccagaaaatttaatccctagtatatgattatgattcttctgacctttcagactcctcacacatgacttggggaagtgggaggaagtccctctatagtgtgaatttaactcttctctgcttgtgggctctgggggccatgtgcatgactagggttggggtggcaggttgcaagctccagactcgctagttttatttctgcttccatttgctacaacacccacctcawgtcaatgtccttccctctgcaaaaaaaggcatatttaaattaagtatattcctattggtaggccgaaagtccagtgatggctcatgaaaggatcctgcttcaggccttgaaacctgctcagtgtctctcctt

SEQ ID NO: 849308 - DNA, 419 bp, Homo sapiens
tatgaaacaatatagttttctgaaaataaatgccccctttgcctaaactagttcaagttaggaaatcaggtatcaggaccaaagtattctaaatgatagaacttaaagtgaggaactaagtcgaggtgtgtagaggggcagtaagaatctcctaatcccagcctgggaacccggaagtcctttttatgtcatagcaaagcaattagttgaactagcacctgttgtctcttatgtcttagctcatatgctgactgaagctgaagcacttgaaaatatggtaataggccgggtgcagtggctcacrcctgtaatcccagcacttttggaggccaagacaggtggatgacttgaggtcaggagttccagaccagcctggccaatatgttgaaaccctgcctctactaaaaatttaaaaatta

SEQ ID NO: 849309 - DNA, 611 bp, Homo sapiens
tgcctttgttcaacagcctgttagtggtggagccatttcactatcaatgtcttgtttccacagcctttcacctataactcaatggggttgatagcttaatccttttcagaaatgagggaacatgggaaatattataaatacatggatacatcatgacttgacgaatgagtctcccgttttgatatagcatcatcaggtttagaacgctaaaaccacatgttaaggatgctggaaaatctggatgatgaagttacacctctaatcatagaatagaattcctggaatggacatttactccaattgccacaatttataggtaaggaaacagccctggagatgtgaacatgctagaatgtcagagagctggcctgaccctcagcagccgtttggttcattcctttctgactgccaatctttcttgtgacaccttcaaaatttttccaaatctgcataccttttatataattcatttcatcccgtttttttcctaagttggcccacattktaaacttaaatatattttaaagagataattgattcttagctagtcacaaaatttattataaataaaagtaaccatgaaaataaacatataaccactaaaggtaata

SEQ ID NO: 849310 - DNA, 574 bp, Homo sapiens
atgcttttagtaaagatctaggatacaaaatcaatatatgaaaattagtagcatttctatacaccaataacattcaagctgaaagccaaatcaagaatgcaaccccatttacaatagccacaaagaaaataaaatgactaggaatacatttaaccaaggaggtaaaagatctctacaagaagaataacaaaactctgatgaaataaattatagatagcacaaaaaaaatggaaagacacactatgctcatggattgaaagaatcaatatcattaaaatggccatactgcccaaagaaatctacagattcaatgttatccctatcaaattaccaatgtcatttttcacataattagaaaaaaaattaaaattcatatggatccaaaagagaagcacaaatagagaaaaacaactctaagcaaaaaaacaaagctggaggcatcacactacttgacttccaaccatactayaaggctacagcatggtgctgttacaaaaacagacacctagaccaatgcaacaggttagagaacccagaaataaagctgcacacctacagtcatttgatcttcaac

SEQ ID NO: 849311 - DNA, 606 bp, Homo sapiens
atacttacccaaacctggatggtatagcctaggctatgctgtgtaacccagaggtccccaacctttttggtaccagggatgggtttagtgggagacaatttttccatagaccaggggtaggggggcagggatggttttgggatgattcaagagcattacatttattgtgcactttatattatcattacattgtaatatatattgaaataattatacaactcatcataatgtagaatcagtaggagccctgagcttgttttcctgcaactagaaggtcccatctgggggttttgggagacaaaaaccgatcacaaggcattagattctcataaggagtacacaatctagatccctcgcatgcacagttcacagcagggttcatgctcctgtgagaatttaatgccaatgctaatgtgacaggaggtggagctcaggtggtaatgcaagtgatgggaggtggctgtaaatacagatgaagcttcgctctcttgcatgccacttaccttgtgctgtgtgtcccagttctaacaggccacaaactggtactsgtccatggcccaggggttggggatccttggtctatcccattcttcctagactacaaaa

SEQ ID NO: 849312 - DNA, 551 bp, Homo sapiens
atagttttcaattgactttcctgatctacccttaatctgtttgcatagccacattctgcacataatttgtcttttgcatataaataacatttacctacatactctcgccttccaaggctgcatttctcagtctcttcttatgtagaatcaatgttgagagtcctgtttccaaccgttggtgaatataaagagcatgtattgcagactggaggcctgagggtcacatttgacctggagatgtgttttatttggaatacatactgcctgtaaacaaaattattttttagtcaacatatgaagattggatgatttcacacacaaaaacaaggagcaacagatgattcactttacaacatggcaagaatcagctggaacttagcaatgatgactttatttatacaggtaaccactccctagtagaccacagttctcaccactccctattatctccctgatgcsaatgcctgatacaacctgcccttcatctgtgctcttacattgcttgctttattggaaatgcttttttatatccatggctttgttaattatga

SEQ ID NO: 849313 - DNA, 531 bp, Homo sapiens
aaaaagttaaccagtattcaattctataactatatcataatttatcattcctcttttgatgaacatttaggttctttccatttctttatattacagacaactttaataaacatccttgcacaccttcctgtgggcacaagtgcaagtctgtctatacaatacacttctggaaggagacgtcctaaataacacttttgcttatgtttaattcttatggtaaatgtcaaattgctttcctgaaagactgcaccaatttatacttctggcagtgctgtgttagagtgcatgctcccccacatccttgataacactggataccatcaagcatcttcatattttccaatgtgagtaggaaaaggaaaatttttatattaaaaatatcaaattggcctaataacagtgcccatttttagagttgccatccataggcagaccacktgcctgtagaggtttatatcactagaatcactgtgtacaagcaattttatatttccccttcttgtttaatctgtggataatattttgatgcta

SEQ ID NO: 849314 - DNA, 551 bp, Homo sapiens
cccaaaggagcttcacccgtatttacagccwctccccatggctcacattactgcctaagctccgcctcctgtcagatcagctgcagcattaggttctcatagaagcaggaacccttttgtgaactatacatgtgagggatctaggttgcgcactctttatgagtatctaatgcctgatgatctgtcactgtctcccatcacccccggatggggctgcctagttgcaggaaaacaagctcagggctctcactgattctacattctggtgagttgtataattatttcattatatattacaatgttataataaaaataaagtacaccataaatgtaatgcacttgaatcatccttaaaccctccctgacccactccctggtctgtgggaaaactatctttcacaaaaccggtccctggtgcccaaaaggtcaaggatcactgccctggagcatttctcagtcctatactgactccttctggtacccttccttacttccaagaggccccagagttttgacccatttaaagttcctttgtaagaagttctctttcc

SEQ ID NO: 849315 - DNA, 551 bp, Homo sapiens
cccaaaggagcttcacccgtatttacagccactccccatggctcacattactgcctaagctccgcctcctgtcagatcagctgcagcattaggttctcatagaagcaggaacccttttgtgaacyatacatgtgagggatctaggttgcgcactctttatgagtatctaatgcctgatgatctgtcactgtctcccatcacccccggatggggctgcctagttgcaggaaaacaagctcagggctctcactgattctacattctggtgagttgtataattatttcattatatattacaatgttataataaaaataaagtacaccataaatgtaatgcacttgaatcatccttaaaccctccctgacccactccctggtctgtgggaaaactatctttcacaaaaccggtccctggtgcccaaaaggtcaaggatcactgccctggagcatttctcagtcctatactgactccttctggtacccttccttacttccaagaggccccagagttttgacccatttaaagttcctttgtaagaagttctctttcc

SEQ ID NO: 849316 - DNA, 555 bp, Homo sapiens
gggatgtagctgtgggtagactgaaccagaaacacatgatgaaatggtggcgagaaagcaaattagttrctgccctttctgcagggccatggatactggccttttctgtgatgactctctgctacatcatttagctgttcttcttagcatacatttttttttaagagatggtgtcttgcttgttgcccaggctggtgttgaactcctgggctcaagcaatcctcccccttaagcctcccaaaatgctgggattacaggtgtaagccaccatgcctagtcattttaccattccttacatggaaatatctagtggttatgctccagatatctcagaaatgaagtctggagagatgaaaaataaattttcttgtgtattcaagactttaagccatatggttagctaaaatctactgatagctgtaatgttttagattgttatttgactaccataggataaattgtgatcatttggaatctgtgtgagaaattccagtattcttaatgcgaactgactctgtattagttcgttctcatgctgctataaggaaataccca

SEQ ID NO: 849317 - DNA, 553 bp, Homo sapiens
ttttatattacagatgtagaacaatggttatgtttcccgacatgaacrttgtcctggaatgaagtgtgatcagccacttgtggaattctttgaagagctcagaggcttccaagtgatctgctcctgaacaagtttgaagacctattgtttcatagacccaagaccaaacgcatctaaaggatccccagcccccaggacctagcctttgtctgcgattttggcttcatctcccacaaaacccctttatgagttcacgctctttcctggactgacatacctattcctttccatttgttggactcctattcatgcttcaaagtccagctttcttaagcccttctttaggaagccttcccacacagccaaccctgctgctctctgcctcctttaaattcttgatacagctgctgcttgttctgatgttttatggtattgattctgttttcctgtgtatatgccagtttttctagctagactgtaaactccttaaggacagagactacaccttgtactttttgtgcatgacctggacctgctaaggaaaaaaaaatct

SEQ ID NO: 849318 - DNA, 372 bp, Homo sapiens
tcccgcccccaccacaaaaacttgaattctggaggcacatggaaggagagggaagcatggagatgctgaagaaatagcacaaaacytgtgggaaaactctggggtactgcaggggaaggaatcttaactcagaaggaaatgtgagccagagacagatggggatggatggggagcctcaccaggggacaggcatgactcctactctttcctctatcccatgcattgcttcagggcatcagtgcctgcctggcataactgtgacatggaaaagtatgtgagcactttggattatcactacagttgaaaccaagaacaagcaatgtgagattgttatgggtgcattgtatccccagttcgcatgttgacatccta

SEQ ID NO: 849319 - DNA, 307 bp, Homo sapiens
aggccagcgagtcagcatgagacaaagaggagtggtggggacctgggcaactggacaccacagccggacggatgtgagctgcacagacgagagtcatggtgtctctagctttcttttaattttccagcaacagaagccagaaacgtaggtttttatgtgaaatctctcttttctgtttttgttttgttttaaggcagagtctccctcttttgcccaggctggagttcagtggcgccatctcagctyactgaaacctctgcctcccgagttcaagcgattctcttgcctcagcctcccgagtaactgg

SEQ ID NO: 849320 - DNA, 579 bp, Homo sapiens
tttccaagtgtacctggttattacwattgcttttgtatatttattttgtatccaaccactttactgagttatcttactagttccatgtttttaattgactcttggatagtctagctaggtaataattttttgtctcttctagttttcatactacaaatttcacttttttattttttgcattagctggaacttcacaacaatgtcaaataatagagacaccagggggcatccatgtcatgatcctggttttaatgccttttagtagttttgataatttcccactttgctattggtttgagtaccagcttcagcatcactgggaagcttattagaaatgcagaacctcaggccctgcttactgaacaaaaatccacagagtctccaggctgctcatgacttacttcctcatgcctgcctctccagctttctggaggagggactgggctgggctgggccattctcctgtttcagcccctggtgccagggttgtaagcagcacaccgaggctgctctgaaaccaactgatttagcttgagctatcaatattgtgtggctcagctgggggtccccttcctcctc

SEQ ID NO: 849321 - DNA, 641 bp, Homo sapiens
cttaatactcatgacaaccctccataataggcataaatggctgccccttgcccctttcacaggtgtggagactcaggctcaggtggagcagtagtcagtggcaaggctgtatttcccacccccaacctgctgccccctccccggctcctgtgcaccatgacaccctgagctgctgcctcccatgggaggacaggattctctgcactcccacctccaagctagctggcttccagcctctctcaccgtccctttcaggcctgggacaccttaaaagcccatgccctggtggcgtgagagagcctcccccagctgggagggactggagctgtgcagaagggaaatgcactcatgaggatgttgtcagcccacttggaggaggggcgttggacgttcttacactgactcaccgttgtttacgtaacccattcagttgttcaagggagtctttcctctttttttttttttcaaatgattgaacatgggttgtaaaacaggattactttggttttgtccctgaatgcrtggtagcatttatcatttaaacctccacataaatgccacttgttcaagctgtataaccttgggcaagttacttccctgagtttcaagtaggttttaaaatatttaccctgaagatttga

SEQ ID NO: 849322 - DNA, 639 bp, Homo sapiens
cagctagaaaatttgttcagcttggtgtttaaaaaaagcaaatggccagtccttagtttctgcttcctcaacagtttatgactttgcaggagttatttcaatgacttctcttggtaactgccaagccatctcctgcatttgatttagtttctaggagacattttctagaaaaagaagagaatgcttgcaacaaagatggcaaatagaattactgaatgtaaccctttccctgtaggaatcttgatgggagtaagcaaatgtttgattggtttcaccaacctgggtcaagttgctatgtgggtgactctcacctggagatctggtgtgagagactgaatactgaagtcttgagagcatggtgggaatgaagggctgagacaagggcaccaaactcagaagaacttaaagcaatgtcaggagctgagatgtggaacctggaagctaaggagagcatgacagtttgggctgaagtccaggtggtcagacagaaattcagtgtgcatgtagttatgggcattctaaggttaggttggattcatttataggacttttgggtgagcytaagacacaagattcacattggctaaacccacttactatatcttaggataacaaattttatcctttacataaagatag

SEQ ID NO: 849323 - DNA, 586 bp, Homo sapiens
agaaacagaaaaaataaagtatagatttaaaagtttcaatttctatttaacagagattcaataaagacagaattaataaggaataagtttggaataatgaaagaataataataaaaaattccctgagctggaaaaaacagatgcaaacctttaatctgacaggaacatcaactcccaagcagaaatgttcataacctggtgaaaatgtagaacttcaaaaataaagaaaaaatcacaaaaccttcacaaaattatgaaaagagttattttcagcttcaaaagcatgaaattagaatgagaatacaaaagtatcaactgcaatctggatcctagaagacaatgaaaaaatgtcttcttgggttctgagattacattattttgaaccaagaattctatgtccagcaaaattatcaatcatgtgtaagagtaaaggaaaacactcatgggcataaaaagactctgacagcttaaaatccacaaactttttatgcmagaattactcaattcagtactcaaatgaagcaatatatatacatatatatatatatatatatacatatacgtacacatgcaataaagaaaaaag

SEQ ID NO: 849324 - DNA, 597 bp, Homo sapiens
tatttagaactagagttatccatgtagaaatgaagttgttccataaaaaaaatgggaatacatttgtttgaatggctagttgctcaattactgttatagtctttaccatgggcagtcacaaactgttgyaatttattttatggtcctggaaacttcttgtctaagatctgatcttattttacgttgtaggtattccattacttgatcaataatgtttagaattgtatatatttgtttttgtagaccaattcattagttgtaatttgagttagaaaacatttagagatatagaaacacatttattgttgagattgtagtaaaaattattttattgttatgcatttgaaactctttggcccctagccccctttcctctggaaataattgtttttataataccaatttgataatatgaatgttcttaggaatgtaattataacagtatagtaggagagactatattgtttttaattaaacaagaacaggtgaaaataagaatagatcatgaccaaatgaaaaaatgtactagagagatgtaacttctgttttgcagaaatagaaatcaaagatatagaggaaaaacttcataacttcata

SEQ ID NO: 849325 - DNA, 617 bp, Homo sapiens
tactgtatgaacctagagcagtggtccccaacctttttggcaccagggactggttttgtggaagacattttttccacagactggggggatggtttcaggatgaaactgttccacctcagatcatcaggcattactgagattctcctaaagagcacaaaacctagatccctccaatgcacagttcacaatagggttcatgctcctatgagaatctaatgctgcagctgctctgacaggagatggagctaaggcggtcatgcttgcttgtctgccactcacctcctgctgcatggcccagttcctaacagaccatggaacagtacaggtccacagcccaggggttggggacgtttgacctagaggacaatgtcgtcaaggaattaattgtcaatgacttggtggagttggaggaagaaagaagtgtcttccaccatcacctgtaaaatggggcataaaagagccctcatctcctagggcagtggttctcaaaggtggttctctgaccagtagcacctgtactatttgggaacttgttagaaaagcagattatgsaaccctgtctcagacctactgagtgaaaaactcacagaatgggccctgcaatctgagtcttcagg

SEQ ID NO: 849326 - DNA, 580 bp, Homo sapiens
gagggtcccacatgtattcttgcccaaggctcactaagtaatagagcctggacagccccagtccaagcaccgtcacatctcccctggttgccaagatcatctcctatcaggtccctctgctccacctcctgaccccgaggctccagtctgagcagctgggggaattcctaaacctaaggcagatctcgcaccagccagcttaacacacttggcccaaacccagtctcctcaccccccaggtaaggtctataaagccgtgccacctctcgggtcacgtcgtcggggtcacgtcgtcggggtcacatcgctcgcgcatcgttctctgcctgcacctccaggcccatcctctggccctagcccagttaccctccttctttgttgttttatgcttgagctcctccaacccttcactacctggccccttgcactccctattcctctgtcttcctccagcccttcctcrggctgcttccttcttcttgcccttcaggtcttggtttcagtgtcacatcagagaggtcctcatcagccaggtgaaagtagactccaccatcctctcatctcacttcatcctgtttca

SEQ ID NO: 849327 - DNA, 633 bp, Homo sapiens
atgtatctacaatactgggtctgcctgtagcactccagaaagaaggataagggttgaggacccttcttgggctgctattggatctgtgctatgcttggactgtttgagtttgagctctttttgtctctaagkccagagccctgagtagaatgcaatgcaatttgcaactgtgtccccaaagctgactgtgcaaattctgcagtttgcacatttatgaggatggacctttgtgtctgtggctgtgatttcagtgaggcccttgttttgctactgccaagtcagtctgttactgctggacaacaggcagcacacacaaggctaccagccaacctggacctgaaaaccactaaggccacagggtccagtataggccaagtgacccaaacacaactcccttcccccctagaccttgaaaggagagagtgcggaagccaacacctgctggagagacggggccagcatggaggttcctacctgtgggcttagaagccaggggtgaaggtgggaacctgctggagttggtggaagacagtctgggccgacgccttctgaaaaagctcctcagcagcccacacttgagagattctacaagggtggttttcccggatcccgagtggccaaacagcttgagct

SEQ ID NO: 849328 - DNA, 525 bp, Homo sapiens
gcaggaggtgggtggtgtgggggacccagctagaaggtctctatgtgcatggagtggacaggttcagagtcttggtgggtgggtttggagtggtagaacyaagagcaaagcaaacaagcggaggtgctgctttcctgcttgggagccatcagctcttccacattctactactaacttcaaaagactactaagtattaatattttctaaagaaagtacaactggccaattttaatttaagttctgcatttaaaaaatcctttaaaaggaagaagtgggatatatggaatcggcagccatccctctgcattttggatgctacttcttgaggcagtcctatgtagtactgtgtctcagcaacttggtatttagcattcagaaaatgaaatgtctagaaacaaaagagcaggaggaatgtgtgtgcatgcctgcagacatatgtatgtgtccttgtgtgtttgtgctgggatttgtgtgtttgcatatgtgtgaattaagaggataagcacagacatggcagtgtggca

SEQ ID NO: 849329 - DNA, 570 bp, Homo sapiens
caaatctcaactcaaattgtatctcccagaattcccatgtgttgtgggmgggacccagggggaggtaattgaatcatgggggtcggtctttctcgtgctattcttatgatagtgaataagtctcacgtgatctgatgggtttatcatgggtttcagttgcttcctcctgattttctcttgtcaccgccatgtaagaagtgcctttcacctcctgccatgattcagaggcctcctcagctatgtggaactgtaagtccaattaaacctctttttcttcccagtctcaggtatgtctttatcagcagcatgaaaacagactaatacactactgattattgtatgttgattttatatcctgaaactctgttgaagttgtttattagctcaaggagattttgggcagagactactgggttttctagatatagaatcgtggtcatcagcaaacagggatattttgacttcccatcttcctttttgcatgccttttatttttttctcttgcctcattgctttggccaggacttccaatactatgttggataggagtggtgagagaaggcatccttg

SEQ ID NO: 849330 - DNA, 617 bp, Homo sapiens
gtttaatagaaaaagatcagctttggttttaaaagtgaattgaagcaagcaaaaacagcaaagaagcatgctgtcatcatgaggagttagactgctagaagtaaaaaatagtcttgtgtttgcacagatctccataatgtgctttgtactgactgtatgaggccggcttcaacgtgttctcatttttcttctcactcataaacccgtgatttctagtccttcacataaagactagaagagtgtatctgagcccgactcagggagcaattctttggaagcagaactggcgtgtttaagacacaaaatgcgactttagagaccaaactgccctgcctccctgaaattcagtctcctcatccatgaaataaagggtccgacagagtctttaggttccctttcaattctaaacctaatgatgacagcactgtagctattagcctaacttccccagttcactttttaagtgtcttcttttttatttattcattggagcatattgtaaagaacatgggctttgaggtcaataaacctgggtttgaawccccatttggctctttcctagctctgtgaccattgacaagttacttaacctttctgagattcgaattgcctcccct

SEQ ID NO: 849331 - DNA, 581 bp, Homo sapiens
cgggcggatcacctgaggtcaggagttcaagaccagcctgaccaacatggagaaaccccgtctctactaaaaatacaaaaattagccgggcatggtggcgcatgcctgtaatcccagctactcagsaggttgaggcaggagaatcgcttgaacctgcctgggaggcggaggttggggtgagccgagattgcgccattgcactccagcctggacaacaacagcaaaactccgtctcaaaaaaaaaagaaaaaagaaaaagaaaagaaagaaagaaaagaaaagacagtagcttatgttcatggcaagcacctctcatcacagtccagtttcaaggaaaaattccagcattttctacattggctgcggcctcatctgaaatcagcacattccacgaaggagtcctgctttgctgcatcttctatcctagggtttaatgttggttaatgagtaactctagcatttgtataatgcttcctaagaatcctgcagcagtcgaccaagcccagggacataattgaatctggagattcctggggacttgttttgaaaaagactcgaaatacacataggaagaaaggcac

SEQ ID NO: 849332 - DNA, 560 bp, Homo sapiens
atgttagccaggatggtttcgatctcctgacctcgtgatccacccacctcggcctcccaaagtgctgggattacaagcatgagccaccgtgcccagccccacctcaaccttttaagtagctgggaccacaggcatgcgccaccagcttggttaattttgtattttttgtagagacagtgtcttgccatgttgcccaggctggtcttgagctcccgggcttaagcgatccacctgcctcagcctcccaaagtgcttggattacaggcatgagccaccacagccggctggtcatctctcttgttataatggtatcacctgttgatgatcactttctatatccattaattcaccatggtgaactctaattctctcattctttctataactgtctcatttcattgaagtatagttcacttaagaaagtcaggataaatgcttaattatttccttttcaaaccaattatcaaataatgagatgattctctagcatcctccaaagatgaccaayaatattttaaaagtatcattgtgaattcatgaatttaaacacatttggtgta

SEQ ID NO: 849333 - DNA, 624 bp, Homo sapiens
gaacccccaaataggccaacacaaatgtagtcaactgtttttctttcctgacttatggagaaagaagtaaaaataagcaagggcagggagaaggctagaaggaaccctgtagtgctgggtttgagctggagatgtcagtatgaacttatgtttttttaattaattaattaatttatttatttatttattttgtttttttgagacggagtcttgctctgtcacccaggctagagtgcagtggcatgattttggcttactgcaacctctgcctcctgggttcaggcaattctcctgcctcaacctcccaagtagctgggattacaggcgactgccaccacacccggctaatttttgtgtttttagtagagatggggtttcaccatgttggccaggctggtctctaacaactgacctcaggtgattcgcctgccttggcctcccaaagtgctgggattacaggcgtgagccaccgcgcctggctatgtttatatttaaatgtgtacagataaatagctaaagaaataaaaataggtatgtgtgcacacatggattagaatacatacatgaattycctagctctgtgacattcctagcagcgacacaccagtaacaatgaacacacct

SEQ ID NO: 849334 - DNA, 360 bp, Homo sapiens
tttagaagggggagttagaagactaaagaaatcactaaaccagcccttttgagacattagcatgggtggataaatcagagctttcaggaaaatctgagaagccaggcacatctagctgctgatgtgggactgccatgagaagctggtggagaagtccatgagaagcttttgtgagcctgcagccaagcatctggtggtagacctggggctactgttggtcagcagggctggaagatggaaagaagggctggatatagagtggaagataggaaaaaytggaacctgctgggtacctctgcatctgtccttcactgtctctaatttcaaagactttcacagcaatagttgctccttcccttt

SEQ ID NO: 849335 - DNA, 579 bp, Homo sapiens
aaatagagtataatgaatcatctcttgtgtcttcaccctccatttcactatgaaatgtagatttcccagaaattctcctctgggaaggcttaattccaaatttcccatctaaaaagagaaagaaaaagtaaaattgacacaaacaatagaccgcaagagattaaaaggtacacataagctaatacaaattgaacacatggaaatcagtaaatctcatgatgacaatgatgacaggaaatacatatatagcacttttatgtgccaaactcttacacgacacttacaatattccaggcaccattctaagaaatatatgcagtcaaacattgcttgacaacagggatacagtctgagaaagctgtcattaggcaatttcgttgttgtgcaaacatcatagagtatacagtacttataaaaacccagatggtataacctactacacatctaggctatatggtatagaatattgcacctatgctacaaacccatatagcatgtgactrtactgaatacggtaggcaactataatacagtagtaactatttgtgtatttaaacatatctaaacatagaaaaggta

SEQ ID NO: 849336 - DNA, 553 bp, Homo sapiens
cattttgttttttataaatgttatttatacagaaagtggctactgactttctatttgacaagtagttataattggcaagcagyttgagtttatactcatgacatactgaaagcatctctttggggtcaagaaagaatccctagtggatttgggattctagaggaggtgttataattaattattcagaaaaatgcatgtatttacctcttcaaccaaaagggcagtaaagaatagggataatatattttaatgtaaatttggaagaaggataaaatcacccacagttactctccctattattttcactgggtcaagttttaatcttttggcttcatgagttccactccctttgatgatatatgttgtatatttttagttgtaaagcagtaatctttaactgtagcattcctctaattataaacagtgaaaaatcaaaatcagtccagagttcttttgttgacttaattcctgatcagtatagacaggactatatatatttaatcagagaattacattatatctgaagatggaactcaggagaatgcaccaagac

SEQ ID NO: 849337 - DNA, 667 bp, Homo sapiens
tgacctctggtttaggaacttcgaaccctgttaacaggacacgatagagaattgggtccagcaaattgctttccatttgttctttggagaagtaaccacatttcatkgggaactgagtaataatcacagaggtgaaaagggactgaagaatctcagacaagtcaaggaggacatcatcatagggttctaatgtcccagatagctcagtggtggtgaagggaaacacaacgaggctctgtattggtgtcctaaggctgctataacacagtaccaaaacctggtggcttacaacaacagaaatttattgtctcttatgtctaaaggctggaaatccaaaatcaaggtgtcagcagggtcatgctctctctgatggatctaggagagaacctttcagcatcttctagtttctagtgtttgttggcactctttggcattccttggcttgtgaatacatcaccccagtgacatgtctgtcttctacctgcgtatcttcttattgtcttccctctacgcatgcttgtagcagcaataccccaatttctgccttcatcttcatatggcattcccccgtgtccaaatttcccctttttataaggacatcagtcagattagagtagggcccaccctaatgacctcactttaacttgattacctctgcaaagactct

SEQ ID NO: 849338 - DNA, 544 bp, Homo sapiens
attgcagtgagccaagatcacgccactgyactccagcctgggagacagagagagactccttctcaaaacaaaacaaaacgaaaaacaggtacttcaacaaccagagtcattggctgccttgattgatacctctgaacagactggaaacacaaggatctaacttgggttgaggcactgggaaggaaaaatgtggaggggaggatctgacaaagcacatgttcagcaaaaaacaatcacacaagagctgaagggcatgaagtggagtcaaggagtgacctttgcacaattcttttttctctttttgagagagggtctcactatgttgcccaggttggagtggagtggctattcacaggcacaatcatagcaaactctgaccttgaactcatagcctcaagggattccccctactcaacctcccatgtagctgggactacaggcacacgcaaccttggcccaattctttcaacagactacagatccctcttagaattattttcttgggctacctctaggtgataaaatgcataaggtgaataaggaa

SEQ ID NO: 849339 - DNA, 544 bp, Homo sapiens
attgcagtgagccaagatcacgccactgcactccagcctgggagacagagagagactccttctcaaaacaaaacaaaacraaaaacaggtacttcaacaaccagagtcattggctgccttgattgatacctctgaacagactggaaacacaaggatctaacttgggttgaggcactgggaaggaaaaatgtggaggggaggatctgacaaagcacatgttcagcaaaaaacaatcacacaagagctgaagggcatgaagtggagtcaaggagtgacctttgcacaattcttttttctctttttgagagagggtctcactatgttgcccaggttggagtggagtggctattcacaggcacaatcatagcaaactctgaccttgaactcatagcctcaagggattccccctactcaacctcccatgtagctgggactacaggcacacgcaaccttggcccaattctttcaacagactacagatccctcttagaattattttcttgggctacctctaggtgataaaatgcataaggtgaataaggaa

SEQ ID NO: 849340 - DNA, 578 bp, Homo sapiens; identical to SEQ ID NO: 847415

SEQ ID NO: 849341 - DNA, 487 bp, Homo sapiens
ctgtcctgggcctgaggggatcccactggcctgaaaggtgagtcccaggccaggcaccattgggacttaagggcacatcagtggtagtctggaagtactgttagtggcctgggatggtggtggctatgaggtgaggctcctctgcctttggaaaaaggaggaaagagtgggaaggcctgcatcttgtggtttcagcgccagctcagcagcaataaaacagagcactaagatagacttctaaggtttcgactctagtcgctgactccctggtggcaccactggacccatgcagggcctggggaacctcaccaccccaaagggatgaacacagccctggctggctctgctgattgcagcgccccagtgccttgagcacacatagacagtagccagaaattgcttacarcaggttttgggtgagaccagcgctgtgctggcttcaagtctgatccagtgcagtcatagtggaagtggtcacaagggtgct

SEQ ID NO: 849342 - DNA, 399 bp, Homo sapiens
gccattctaagaaaaaaagaacaaaactggaggaatcacattacctgacttcaaattatactacagagctacagtaactaaaacggtatrgtactgatataaaatcagtcacatagaccaatggaacagaataaagaactcagaaacaagtgcacacacctacagtgaactcattttcaaaaaaagtgcaaagaacatacactggggaaatgacacttgctttattaaatggtcctaggaaaactggatatccatatgcagaagaatgaatctatctagacacatgtctctcaccatatacaaaaatgaagtcaaagttgattaaatatttaaatctaagaccgcaaactatgaaactattacaagaaaactttggggaaaatctccaggacactagtt

SEQ ID NO: 849343 - DNA, 521 bp, Homo sapiens
tgtgctgtttggtgatgagcaggtggagaagtagttggatcccatgggagatggactggcctcctcttcttgggttgactgcagcttgttggaggtgtggataargcacttagtgtctttgctccttcattagtatgagggtagcaagggaagtttcactgcagaggtggtggcagagaggctttcagttccccaggagctctgttcaaggagttgcagagctgctaatggctcgataacccggcaagggatgactagaggccaaggcctggaggatctgcctggtgaagagttatgggaatgggcacccatgcaacagtctgtccacttttgttgtatgccttgtgtaatatgctggggttctactccagtccatagtcgccttgaatattgcagtacctggaggtattaacagtgaaggctgtgaaacagtcaaggtgtcggccttccctttcctctgggacctctgtttcatggatgtatgaacatgttgctgatctaaacacacttgtaggaggtgg

SEQ ID NO: 849344 - DNA, 501 bp, Homo sapiens
cctgtagtttaggcgggggtagwcggtgtctggagctgattcagaaagcttgcccattctttttttttctctttttttattaacattcatttccaagagtgtgcccacttttcagcagctgaacatgacaaggggaaaaggtttcaatgatgaattcttgtgtgtgtctgtaaatttcatgcttgtgaagttggattaatagcaagggagactgaagtccttttgttcttgcacaaacagctacaaagcagagagcgacagtgtgagcgtcccagtctagtaaggcctggaggcatgactggagggacctcacagtcaatctctggcctctcttctgaggcctaattatggcatttgttccactggaccttgatggaaaccacgaaatgaatgtcagcaagacttcacatttctttcagtacccatgaaggctgggtttcaatgaaatctagatttaaatacgttgccatggaatcgccatccaaggcctttacatacttt

SEQ ID NO: 849345 - DNA, 597 bp, Homo sapiens
tgtatgtgaatgaaagacccactcaaagtgcaagatagccactgtattttaatacaacagaatatgaaaagttgattgatattgtttcagattccacatctcaacttatctaactaaccagatattacttgtcagattgatagagtattcaagaaagatatccacagttatctgaaaagacttaaaatactcctctctttttcaactacatgtctatgtgaggctcaattttcttctgattcttaaataaaaacaacatactgcaatagatattaaagccagacagacactaaggagacatacaaatatggaaaacaaagtcagtcctcttgccttttttaaaagatatagttttttcataaaaatattattaatgttaatacataatttgtgtaacatataacaatatttattattgttattttaaaataaattagtaaagaaatattaaaatgtgaatattgtaaatatctatagctataacccatgtaaaakctctttggagttcttaaaatttttaagagaataaaagggttctgaaactaaaaaagtttgagatttgctattctagatgtcctagtaatcatttgatgtgta

SEQ ID NO: 849346 - DNA, 629 bp, Homo sapiens
gagtctcaatctgtcgcccaggctggagtgcagtggcatgacctcagctcactgcaacctctgcctcgcaggctcaggtgattctcatatcttagcctcccaagtagctggggctacaggtgcgtaccaccaagcccaactaatcttgtagttttagtagagatggggtttcactatgttggccaggctggtctcgaactcctgacctcaagtgatccacctgccttggcctcccaaagtgttgggattacaggcatgagccattgcacccggccccagactacattcttaacacccagtttctaggatgccaaatgtctagcacagatttttcctttaagttctattctaagcctccaatataggcattggatacgttgtcctagtttaaatatcatgtgatactgctataagtatccagacatactgcaaaatttgtagaatatgtaatgaaacctgtttttatttaaaggttgtgtgtattggcttattttagwttctcttacatcttgactaaaatctgtgcatgtggaacaattatcgatagagaactggtattctctgtaccaattaaccttagataccatgattttttttttttttttctagatggagttttgctcttgttg

SEQ ID NO: 849347 - DNA, 618 bp, Homo sapiens
aaatctactgttcataaatggtagggtagtctacttggaaaacctatgggaaaactattgaaacaaccaagtttgctaaggtagtttcaaaataatatttaatagtcaatttctttctttstgaaccatgaacacttagagttccagtcttaatggcaaaaacagtatcacaactagccaggcatgatggctcatacctataatcccagcactttgggaggccgaggcagacattcaaggtcaggaattcgagaccaacctggccaacatgatgaaaccccatctctaccaaaaaataccaaaattagccaagtatggtggcaacccctgtaattccagctacttggatggctgaggcagcagaatagcttgaacccaggaggttgcagtgagctgagatcacaccactgcattccagtctgggtgacagagcaaggctccatcaaaaaaaaaaaaagtatcacaacatacaatatctaagaatacaatttcgagaaatgtgccaaactctaataaagaaaactaaatatctgcaatgaaaggcataagattaatacttgaataaatagacaactacaacatgtcaatgaatgaatacacttaatgaaatgcatgaag

SEQ ID NO: 849348 - DNA, 605 bp, Homo sapiens
ggttgtaagagttactttaaaaccttttttgctaacttcaatatctgcatcatctcagaatttccattgatcaccttttctttgtcaaggggtcacattttcttgtttcttactrtgtctagtaattttggtttgtgttccaggcatcatgatagatgtattgtagagaatctggaatcttttatgctcttttggagattattgtttgattcattttaaatttggctgaacataaacccaaaatctgccaccctttgatgggcaacagctgaaatatcttcagttcttttagccttaaaagaacagaggctgctctatgtctgccccaagcatgtgcagttaaaggtcaggcagagatctgagcagagcttatgtgccaggcactgttctaagtgccttatttttaagtcatttaaacttcacaaaactctataaagtaggtattatcttgacctaacatactgtctataagatagcacacagaattatatatcttaacaattatgctatactatctcacaatatctatgtttttacctataaatatactatagttttcatggcacagtagttaagagttaggattctgaagccagactgcccag

SEQ ID NO: 849349 - DNA, 494 bp, Homo sapiens
ggactaagtctggaaaaacccatcgtaaattgaaaatatccctaagtcgaaaatgaatttaatacacctaacctactgcacactgtagcttagtatagcctaacttaaatgtattcagaacttacactagcctatagttgggcaaaatcatctaacgaacatatttatttatttacttattttgagatggagtctcgctctgtcgcctaggctggagtacagtggcacgatcttggctcactgcaacctcttcttcctgggttcaagcaattctcctgcctcagcctccctagtagctgggattacaggcgcctgcctccacatccggctaatttttttgtatttttagtagagatggggtttcaccatattggtcagggtggtctcaaactcctgtcctcaggtgatccacctgccttggcctcccaaagtgctgggattacaggcrtgaaacactgtgcccagtccgagcctcttttataatgaagagttga

SEQ ID NO: 849350 - DNA, 639 bp, Homo sapiens
atatgacttgacattatagggtaggcttagctcatggcaatgttttttttgtgaaagtacctgcagaaatctctcttatttctagtttgttaatgtttcagagattatgggggaaaggggattctatgaatccctgacactgcatgaagcagttttggtttcagtaattttagtatcattcattgtaaggtgatgattcctaggaacttcttcacagtgagaaacctgaaagttcctagcagccagcaatgaatgcaagcgggggcagggccactggcagtgaggggccttgtgagccatgtgcctgtgttctcaagttccagggttctggggatgcatgcaggggattctggacctgattgtttcctctgaaccaggatgcattctggttggcagggcaactggccttcacttggtggccttcagtgggtgccctcattggttgccttcagttagtgccctcagttggcaccctcagttgtttctcttcagtctgtggtccgcagttggtggtcttcagttgttgggcagtggtgraaggaggatgaatccatttgtgctctctcctcccccagacacagctctcaggcttgttgcatccggacccttctaaaataaaccagacaggttggcaagttt

SEQ ID NO: 849351 - DNA, 635 bp, Homo sapiens
caaaacagggaaacatcaaggtcagtcaggaggtagaggggacgggggaaagcacgagcaagactctttactgtactttccacaggaaggaacaagcaaggcagggcaaccagtcttaggattggctagtttgaataatttcatggtatcttggggaggagaggctgtccctagttgtctgctacctggccctgaggcaattagggcaggcggatagtggcctgggacatgagagtgataaagaaggataaagatagataaagaagaatagagggtgataaagaaaggataaagaatggggtatgagctctggattggttggtttatatatgaagacatacatgcaggcaagttgcttacgtccaggaattagcttatcctgagaggggcagtccctccacggacaacaaagccctggatgtcaaagcatcgaattcagaaaataagagacatgactaatacaccattaaagtcaatattatcattaatattattcgacattatcctgaagtctctagccaatacatayaacaacaaaaaaaataggatgaacaactatttgaatgaaaaagacagacttttaaattctcagatggtgtatctacttaatactttaataaagtcaacctttaatt

SEQ ID NO: 849352 - DNA, 411 bp, Homo sapiens
actaggatcatttagaatatggatcctatattaaagttttcagcatagtaaatacagatttggaccaggaagaatatgcgaacaaaatgaaggaaatgtmtaagagcaaagaagtcatcgcacttgtcacagctgctctgtctcttacctcagcaacatttactgagcttctggtcatcctggcccgtggagagttgtctactttcacgaggcattatttcttttttttttattttttattttgttattattacactttaagttttagggtacatgtgcacaatgtgcaggttagttacatatgtactcataggtgggaattgaacaaggcattatttctaactacccatttgctttctgggtcagttctgcctggattcacaccatgtcactgaaattgctccatctagt

SEQ ID NO: 849353 - DNA, 411 bp, Homo sapiens
actaggatcatttagaatatggatcctatattaaagttttcagcatagtaaatacagatttggaccaggaagaatatgcgaacaaaatgaaggaaatgtataagagcaaagaagtcatcgcacttgtcacagctgctctgtctcttacctcagcaacatttactgagcttctggtcatcctggcccgtggagagttgtctactttcacgaggcattatttcttttttttttattttttattttgttattattacactttaagttttagggtacatgtgcacaatgtgcaggttagttacatatgtactcataggtgggaattgaacaaggcattatttctaamtacccatttgctttctgggtcagttctgcctggattcacaccatgtcactgaaattgctccatctagt

SEQ ID NO: 849354 - DNA, 462 bp, Homo sapiens
gaggcagaccaagtccgaaaagggagtcagcaaagrgagagaggggtggggcagttttataggatttgggtaggtagtggaaaatgacagttaaaggggttttttctcttgcaggcaggggcaggtcataaggtgctcagtggggagctcctgagattcactgtccaggagaaggaatgtcacaaggtcaactggttaattagggtggggcaggaacaaatcatgatggtggaatgtcatcagtaaaggcaggaattggctattttcacttcttttgtggttcttcagttgcttcaggccatctcaatgtatacctgcaggtcacaggggatatgatggcttagcttgggctcagaggcttgacaaactctaattcctagatgtaaaaaaaattataaatctataaaccaatacttttttgaaacctattttaacttctttgactctttctcttactttgag

SEQ ID NO: 849355 - DNA, 613 bp, Homo sapiens
ggccatggcttccatccagacaagagctgatgtgccttgaatgaggcaatagaagtaccgataaagagaagtagatggatttacggctgaatcgtcaaaagcccgggtataggagagaagagaaggasaggaatccgaatgataaatgtttggcttgagcagttcattaccatccatagagatggggaagactggaaaagagggaagtcaaaggttatgttttggatatgctacatttgacaagactattagacgtccaattggaaatgtcagatgggcatttcgaccatataaatgagtctggagctcaagggagaggtcagaactgcacatatcaatctgggtgtcatcgccagagagataggactcaaagccagagagtagaatgagctcacttagctctggagataggtggagaagaaaaggggatctaggagcaagttctagggtattcccacatttagaggcttgaaagagaagcagaagccagcaaaggagaggcagagggagcagccagggatgcagaaagaaaaccaggagagtgtgatgtggttttcagggaagaggagcagttgactgggtcaggtgttcttgaaagatcaagtaagataag

SEQ ID NO: 849356 - DNA, 503 bp, Homo sapiens
gtcagcccctcccagcttcttgggaaatggcagttcccgtttagagactcattgactccaccctgtcttcmgtgaaacccctgctgactccctgcagaggcaatcgtcccatctgtgggcacccttgtccacggtgtgcactctgtggggtgccccatctcagtgcgcttgatttgtgtatctctgtttgtgcccacaccaggtcctacctcttgtgccctcagcctgcagcacaaggtttggcacacagcaggttccaagacggtatcagttgagtgactccactgagtctgacaaacgctagccccattaatacctcacccatggcagactgagcacacactgaggaggaatccataggggtgaccacagctgtccttgcctttgaaccccagccagaccttccacccacacagcaccccaggcaggtggggagttgagccaggcccttctgttgtcttctactcacggcccagcttttcaggaaacatattctgtctcac

SEQ ID NO: 849357 - DNA, 637 bp, Homo sapiens
atacctagcgtgtgatcagcactcaggaaactttgctgtcasggaggaacagcagttctggatatctgaaagagggtgtccagaagtttgtagcagcccacgagctcattatcatacccggaggacctgatgcaaaacggaacggcaaaccaaggcaaatcaagactgtgtgctcaccctaacagcaagaacagttcctgcatggccagagaatgctcctgaaactctgcacattgtggtcttttaagtcccatgtaaaaggactcattgactgaattaaattaaccattctccaccctcttctagcgcaagagcccagatgaaatgagatacggtagacataagggttttttgcatcttttatcaaggtgtaatttacatataataaaatacagccctaataagtgtaccattgaagaaactcttataaatatacacagtcatataaccaccatcaaattcaaaatatggaacattttcatcacctcaaaaagtttgctcatgtcactttgctgttagtccccacagcaacccctaaccccaggaaacaactgatctctctgtcactatcgattagttttgcctattctaggatttcctttaactggaatcacactcttttgtgtctggcttcttt

SEQ ID NO: 849358 - DNA, 684 bp, Homo sapiens
cactcttttgtgtctggcttcttttgttcagcatcatccctgttgcaggtatcagcaggtcatgcgtttttgtccctgaacagtattcctgtgtgtggctacagcacaatttgtttatctattcaccttcaatggatatttgaggctactaccaataaagcttttataaatattcttgtacaagccttcttgtggacatatgttttcatttcctttgcataaatacctaggagtggaatttggattcagatagtaaatctctttaactttagcagaaactgccaatatgtataaagtggttatacaatttttcactcccaccagcaatgtgtgagagttccagttgcttccacattctcaccaacacttcatatcatcggtctttttaatttagccactctagtgcatgagtagagaatctcattgtgatttgaatttgtgtttccatggtgactgctgatgttgagcgtcttctcatacacttattggtcctttatgtatcttcttttgtcaaatatattttcaaatatttaaaaaattaagttgttttattattgagttgtaagagaactttgtaattctaaatgaaaactttgtctrtgaaaacttttgtctaagattttatatatataaaaacttataatgacataaaatatatatgttatatttatgggtttggtttgt

SEQ ID NO: 849359 - DNA, 535 bp, Homo sapiens
aaaggcctggacaatttatcaaacactgcagatgaaagaaagagagggaaaaaattttaaaactgaccacttttaaaatgaagaaaataggrcagtaaagggtattgtaatatactttaatcttccttaatgtagaaaaatatgaaatgccattaaatcttcctttgaaatggatgtggttacatggcttgagcacccaaatctagttaatgaatctattgttaaggcaaataaacaggaaagaagcagtgaaggagtgatctgtgcattatatgactaattcagaagatgaaaggcagaaaaattaaagttaaattcacataaatattagagctaaggagaatagttgcaggtgtaaaaagggaagcctgcattttccttgggttggtgtgaggcacaagcagacattttctgctcgagagcaagtcgggaaagatgaaagtgtttcaaggggcccaataattaacattttaaaaggttttcttaaaaaaaaaagatctgacaataatagcaatttaatcattttatttgaaaa

SEQ ID NO: 849360 - DNA, 650 bp, Homo sapiens
caacccaaatgtccatcagtgatatactggataaagaaaatgtggcacatgtacaccacggaatactatgcagccataaagaatgagttcatgtcctttacaggaacatggrtgaagctggaaaccatcattctcagcaaactaacacaggaacagaaaaccaaatgccacatgttctcactcataagtgggagttgaacaatgagaatacatggacacaggcaggggaacatcacacaccagggtctgtctgggggttgaggggctaggggagggatagcattaggagaaatacctaatgtaggtgacgggttgatgggtgcagcaaaccaccatggcacgtgtacatctatgtaacaaacctgcacattctgcactaccccagaaattaaagtataattaaaaaaaaaagtggggggtggtaatagaccttgttacctaaagattgttatgatggttaaattaaaactcctcacccctgtcaagctggaatgtagcccctgttaacttgagatcccccttctttggctagctaacttctgctctcccaacagaatcctatctttcatgtctcatctcccaggacacccccctccccaccgggcctgggaaggattaggagggccctgtccagtgaattccttggcctt

SEQ ID NO: 849361 - DNA, 487 bp, Homo sapiens
gggggctgaggagggaggatccattgagcccaggagtttgaggctgcagtgagctatgatcatgccattgcactccagcctgggcaacagagccagaccctgtctcatataaataaagaaatawacaaacaaataaataagtgctgagatacaagaatggaaataaagcaaaaagaatctggacaagaataggaaagaaacagtgattgatttgagcggtgtgtgtcgcagaacacctaactaggggccagatgtggtcatttttgtggttggagcacaaaattcatacagaggcaaaacaattacaatcatgatattcttttctgtcatctgctttatatgcatttttgtaaaaacagtaatttttatatacacacatatatacacacacacacatatatatagagagagagagagaaagagagagagagatagagagagagagagatggagtttcactctgtcgcccaggctggagtgcagtggt

SEQ ID NO: 849362 - DNA, 624 bp, Homo sapiens
agataggctcctgggtattttgaataacaatacaaagagcccctctcttcaacctgcatccaacaactcaacttatgaaaataaattgagaaagctgtatttgctggaaagtatgttagatgcagaaatacaagaaaaaattgatgaagttaaaagggaagaaaaaactgccatgcttatgcagtccagccttctaggtaacaaatttaaatgccaaatatttgaaaagaaattagaaactatctaaccacaggaaagcagcctggcaaagattcaaagtgtaggcaaaaacctgcagagagtgaacagagtcctcatgggcccaaggagcatcttgaaaaggcacttcaaagaggtggaaagcagaggatcaggagggaacagggtgcccaggcatttgcagagaacgctgccaaagaaaaaaggctcgggagtccagccccaagggagctgagacagcctcacatagagcaggggcctgacaagttagtgggaaacaccatctacaccaagccttcrttcatccaagagcataaggccgcagtctcctctgtgctgaaacccttctccatgggtgtgccttctgcctccacccctgcaaaagccctacctcaggtcagagac

SEQ ID NO: 849363 - DNA, 571 bp, Homo sapiens
atgtgtgtgtgagggtgaggtgtgcaggagggatggaggaggaggtggctcctttgtgaccttctgtttccgtgagaamccttgggacacacctctcacccaggttgggggttccctgtcctggattaacttttgtttcacccagaggccaggccaacctaggcaggtttcggatatcgcctcctgtgtgggccagccctggttcaaacccgagctctggccctatgtggctgtggccaactgcccttcctcagaagcttggtttttgtgcctgtacagtgagggtggccatgtccatctcatgcaccatgtgcctgatgtccagcagcgcgttactgttcctcagtgattgtgtggcattgcgctgtggctctgtggcacttggttagggcttgtggaggtagaagggtgaaactggctggccactgccctcaggggtgccagaggagggaggggcaggagccaaggtgatgggcagagatgaaatggggagcaggacctggggacccccaggtagccagggggtttgcataggcccgggggcagagggtcagcttgctggagggcgtcg

SEQ ID NO: 849364 - DNA, 613 bp, Homo sapiens
ccctgccctgtggagactgagggaggcaggggaactgtcctgtggcccggcccaggcttctagtggacacaggcagctttaccctggcaaggctccctgtgggcctgggggtggaggccttgtgggagccctgttctctgaggaggcccgtccctctccagaccttgcttcccttctgcagagatggcttggctcccatgggccctggtatcgggcagaggtggtctgtggctgttgatgaacaaacctgctcgcttggtgttctgcgactccgcccaggcggccactctctcacctgtttccctgccctcaagacctttctctaggccatagggttggggcagcagggaggaggcgtgcattgagtacaccgggcccagcgagcacagcccactctgcaccctcctccagtggcatttgaatgcccaggtggacagagcctgcgcagccccttccctgtgaggcgggcgtgatgctggcggtctgggggctgctctgagaatagagaagcagtgctggggccgggcctggcrcctggcatacaggtgccctggagtctctgtgtgtggtactcatggctctcctgcctcccctgaggttccactgatggtgc

SEQ ID NO: 849365 - DNA, 568 bp, Homo sapiens
ggaggcaggggaactgtcctgtggcccggcccaggcttctagtggacacaggcagctttaccctggcaaggctccctgtgggcctgggggtggaggccttgtgggagccctgttctctgaggaggcccgtccctctccagaccttgcttcccttctgcagagatggcttggctcccatgggccctggtatcgggcagaggtggtctgtggctgttgatgaacaaacctgctcgcttggtgttctgcgactccgcccaggcggccactctctcacctgtttccctgccctcaagacctttctctaggccatagggttggggcagcagggaggaggcgtgcattgagtacaccgggcccagcgagcacagcccactctgcaccctcctccagtggcatttgaatgcccaggtggacagagcctgcgcagccccttccctgtgaggcgggcgtgatgctggcggtctgggggctgctctgagaatagagaagcagtgctggggccgggcctggcgcctggcatacaggtgccctggagtctctgtgtgyggtactcatggctctcctgcct

SEQ ID NO: 849366 - DNA, 568 bp, Homo sapiens
ggaggcaggggaactgtcctgtggcccggcccaggcttctagtggacacaggcagctttaccctggcaaggctccctgtgggcctgggggtggaggccttgtgggagccctgttctctgaggaggcccgtccctctccagaccttgcttcccttctgcagagatggcttggctcccatgggccctggtatcgggcagaggtggtctgtggctgttgatgaacaaacctgctcgcttggtgttctgcgactccgcccaggcggccactctctcacctgtttccctgccctcaagacctttctctaggccatagggttggggcagcagggaggaggcgtgcattgagtacaccgggcccagcgagcacagcccactctgcaccctcctccagtggcatttgaatgcccaggtggacagagcctgcgcagccccttccctgtgaggcgggcgtgatgctggcggtctgggggctgctctgagaatagagaagcagtgctggggccgggcctggcgcctggcatacaggtgccctggagtctctgtgtgtrgtactcatggctctcctgcct

SEQ ID NO: 849367 - DNA, 544 bp, Homo sapiens
cagatgggaaaactgaggcccagaagattcatgggctgtcctaggctctcccggcccagaccctcccacctcctggctgccccttcaccctacccagccctggctgcagcrttggtgcccgcaggcatgaggcaggcatgagggctgcgtgtgtgggtgggcagacccccttccttgctaagagggcagcctttggtggaggccactctgggctgaaaggtcctgggtccctttccctggtgtccagggagcatctatccagggggcagctggtgtgagtaggttcctacaaggagggaaagaacacctggctgtgtgcagggggtgagtggggcctaggtgcaggtttgatttttttttttaatttcaaaggggatgtgttccctagagaagcttaggaagatggggaaatgtagaagaaaaacccagacccatgcaacccagtcccgtggcctctgctgggaagatttctttcccctgagattgatctgtgtgttctctcccgggcaggggtgtgctggctgcgggcccacctgctgtgggt

SEQ ID NO: 849368 - DNA, 553 bp, Homo sapiens
tggtggactgccatgtgccctccctctccacagagaggatactgtgcagagtgaaggtgggtggtccctcccagtctttctggcctccccttgagacccagattgcaggttggagttgtagtaactgaactacaccctggggtttcaccattctcctccactcaggatggatgctgttcccttgctcttgtcctaacagttccacaggtactctgttggtcactgtggcccttcagccctgacctcaaagggacgtgacagtgtagaaactttgggcctcctacagtccatgagagggcaatcccggttcccctcctgccctctactcccgttgcctgctctccttacctgccctgccctgggcaccagctgcagcattttgttttcccacttcactgcctgtccttgagcaatcatggtgtccaactctatgtggaaatgagtcctcagataccattygcaccccagagctcccaacccacagggctccctcccaggcacagagcttagaaagagatatggaagaatgcactccaaactcacaaaaatggca

SEQ ID NO: 849369 - DNA, 561 bp, Homo sapiens
tccagaaaaacaacaaggcatgaaaaaaagataagaaaagtcacagtcaggagccgggcacagtggctcacgcctgtaatcccagaactttgggaggcygaggcgggcggatcacccgaggtcaggagttcgaaaccagcctggtcaacatggtgaaatctcgtctctactaaaaatacaaaaattagccaggcgtggtggcacgcgcctataatcccagctactgggaggctgaggcatgagaatcgcttgaacccaggaggcggaggctgtagtgagctgagatcgtgccattgcactccagcctgggtgacagagcgagactctgtctcaaaaaagaaaaaaaaaagtcagtcagaaggagcatcagagccagcctgggacatgacacagatgctgaaattaccagacatggaatttaaaataactatgactaatatgttaagggctctggtggaaaaagttgacaacatcaagaccaaacatctctgaatattgacaaggacattggcaaggacaaatgggtaatagaagcagagaggggtccactttaagaaaaaa

SEQ ID NO: 849370 - DNA, 335 bp, Homo sapiens
ttatccagatagtatgtggccrgttatcatacaaacactgaatctcttgcagctattgtagaaacaaaactgggctacagcgttaggtgaacaataaaatcctgactcccttggtggactcagactgaggtcttcccataaaaccaaaatctggaaaagtagaaactagcaatttactctcacagttttattaaaagtacaaaattatattctgtgtgggtaatggttggagatgaaactcatcagtggttcctattttttcttcattagtgaattaggattcaccaaggctcaataatactttcataaacacaggcatcttctaaagtttcttt

SEQ ID NO: 849371 - DNA, 608 bp, Homo sapiens
tagaccaagatctggagccctctaagtgccctacagaatatttttcaaaaactttagacttggtaccccagggatggcacccctacttaaaaatagcagtggtccaagcacggtggctctcgcctataatcccagcactttgggagactgaggtgggaggatcacaaggtcaggagttcgagaccagcctggccaacatggtgaaaccccgtctctactaaaaaaatatataaaaattagctgggtgtggtgtgcacctgtaatcccagctactcggggggctgaggcaggagaattgcttgaacctgggaggcggaggttgcagtgagccgagattgtgccattgcactccagcctgggcaacagacaaaaactccatatggggagggaaaaaaaaaaagctgcagtggccctcttagtccaaaaagcctccaactatattacctgctcctcctgggctcttagggctttgtggcactgccaataattatttaaactcttttcaagctttggcyctatcccaccttgataattctcttcattatggtgattgcactctgagaacaatagttcccatccaaatcactgtcttgaatataacttccaat

SEQ ID NO: 849372 - DNA, 572 bp, Homo sapiens
tttgttgggtttttaaaaattatttattattattgtattattattattattattttccccaattttttttgatccacagttggttgaattcatggatgcagaatttgtggatatggaaggctatctgtatagaaatggccaacaagtacaagaaaagatttcaacatcattagtcattaggaaagtgcaaatcaaaaccacagtaagatatcacttcacatccactaggatggttaaatttttttaaataaaggacaacatgtgttgataaggatgtggagaaattggaaccctgatacacagctaatgggaatataaaatggtacagccactatagaaaatagcttggcagttcctcaaaaagataaacaaaatggaattaacccagcaattccacttctaggcatgcaccaaagagaattaaaaatatttgcacacaaaacttgtacagggatgttcatagtagcattattcataatagtgaagaggtgtaaacatgtaaatgttcatcagctgatgattcggtaaataaaatgtggcatatccaaaaactgkaatattactctgtcaca

SEQ ID NO: 849373 - DNA, 552 bp, Homo sapiens
acattcctagctagagaggagaagacaatgcctcgcttcaaagcatcaaaaaacaggttgacttgtctaatgcagccagtgagtttatgttgaagctaatgctcaattaccattctgaaaatcctaggaattatgctaaacctactcttcctgtactctatacatgaaacaacaaagcccagatgacagcacaagagtttagagtttacagcatggtttattgaatattttaagcccagtgttgagacctactgctcagaaaataagattcctttcaaaatattactactttttgagaatgtacctggttacatccaagaactctgtgggagatacacaagaagataaatgctgtttaaatgcctgctaacataacatctattctgctgcccatggatcaaggagtaattttagctttcaagtcttattatttaagaaatacatttcataagtttatacctgccatagatagtgattcctctgatgggyctggaagaaaaccttctggaaaggattcatcattctagatgccactaagaacatttgtgattt

SEQ ID NO: 849374 - DNA, 646 bp, Homo sapiens
aagtcaaggatgtcttggagacataaaaggacaacttgttagatctcygtggctcacaagattgggttttcttagtgatcagttagctggtcagacaattaaagctacatggggaagaaatgaaatcagattcaaacttgatttgttgacggagcagatggagccacatcctgcgttccttttctgttgctaaactgctctgagctcatgagaatcacagaattttaactgcggaaccatttcattgagaagaaaaccgcaactccccatatactgacgagtttaaaacatatttaaactttctgtacctgtctttggaagataagtatcaggatgtgtctgaattatcaagtatctgccctttgagtatcctcaattgtgaaaacttatccaagccaagagtgaaatatccctggaattctggagctaagcatacgaatcctaagattatcttaaaatatgtcaccactaggtagtgtctgagttcatctgctcaataaaaatatactctttcaatacattcttgagatgaaaacaaattaggcagtactatcaggaacgttaacctataagtgagatgtgccataattcttgagaaagtctgtaaagtactgatattttatgcatgattaaagtcagtgaatga

SEQ ID NO: 849375 - DNA, 683 bp, Homo sapiens
catcatagaagctgaaaaaggatccatgagaagggagaagagctgcagcctcagctgctgcgccagagcactgaggcgagtcagcagatcagtaacaatctttgtgagctacagaatrgctactcctccccttctgcctccagaatgtttcttttgacccacccaaaccagaaacatacagggagggatttctgggaaatgaagctcagcctagccaagctgacatgtcacaaagccacgacagcacccttaccagctcatagaagcagctgagactccgcatttagttttagaaagagtagtaggtatctcagatgaaaatgtgtgaactttctccttcaaacatgctctaaaggtcatgggatttggagacagaagacctggctttaagttccaattcttcccctgtattatctggaaaaatcactgaagtctttatcgagtgccttaacttctctgatgctcagattcagcatctgtaaaatgagaatagtattgttggtagagggttggcagacttccatgatataatacatgtgaggtttttgttgtttttctgttgtccttaaaatcgcagacactaaaataaaatcgatcctgctttgctttgctttttgatgatggtgtgtgctgatgcagcatacagacaagtctttttcagagagcactgacacatgcctact

SEQ ID NO: 849376 - DNA, 569 bp, Homo sapiens
cataataaaatagttaaaatacacacacgttggctggaagtggtggctcaggcctgtaatctcagcactttgggaagctgaggtgggaggatcacgtgaggccagaaggttgagaccagcctgggcaacatggtgtgtctggaattggtgggtttttggtctcactgacttcaagaatgaagccgtggaccctcgcggtgaatgttacagttcttaaaggaggcgtgctcggggtttgttccttctgatgtttggatgtgttcggagtttcttccttctggtgggtttgtggtctcgctggcttaagagtgaagctgcagaccttcgcggtgagtgttatagctcttaaggcagcgtgcctggagttgttcgttcctcccggtgggttcgtggtctcgctggctcaagagtgaagctacagaccttcgaggtgagtgttatagctcttaaggcaacgtgcctggagttgtttgttcctcccsgtgggttcgtggtctcgctggctcaagagtgaagctgcagaccttcgtggtgagtgttacagctcttaaggcagtgtgcctggagtt

SEQ ID NO: 849377 - DNA, 569 bp, Homo sapiens
cataataaaatagttaaaatacacacacgttggctggaagtggtggctcaggcctgtaatctcagcactttgggaagctgaggtgggaggatcacgtgaggccagaaggttgagaccagcctgggcaacatggtgtgtctggaattggtgggtttttggtctcactgacttcaagaatgaagccgtggaccctcgcggtgaatgttacagttcttaaaggaggcgtgctcggggtttgttccttctgatgtttggatgtgttcggagtttcttccttctggtgggtttgtggtctcgctggcttaagagtgaagctgcagaccttcgcggtgagtgttatagctcttaaggcagcgtgcctggagttgttcgttcctcccggtgggttcgtggtctcgctggctcaagagtgaagctacagaccttcgaggtgagtgttatagctcttaaggcaacgtgcctggagttgtttgttcctccccgtgggttcgtggtctcgctggctcaagagtgaagctgcagaccttsgtggtgagtgttacagctcttaaggcagtgtgcctggagtt

SEQ ID NO: 849378 - DNA, 607 bp, Homo sapiens
tctgaaaagcctgaaacccatggcccaaagtgacaacttctctccccgttttcccactcgaatgttgtcttttcctaaactacccatggcccaccccacyccccatcctgtgcccataaagaccccagaaccagctggcagaggggagaagcagctgtacatcagggactatggttggacattggagagaagcgggcttgacttcagagggacagcttgatggcataacttcggagaagaatcagccgaatatggccggacttcagaggaagattacctacacacctcatcctcttttcagcttccctccccgttaagggccactttcactggcaataaaatcccctgcattcaccagcttcaatttgatcatgtgacctcgtttttccctgatgctggacaaaagcttgggagccacgagtgcagagggctgtcacactggccctttgccttcactggcagaggtcagccgcctcatgtgaaaaggcaaagagcccaatgagctgttaacacttaagctgcctgcgggcagcagagctaaaagagcactgtaacatgccctctgggactttgtgaattgcaggcaccctgcctggacactgctgca

SEQ ID NO: 849379 - DNA, 485 bp, Homo sapiens
tgagtacagtggtgacaggaaatgtgtgggaactccagagacgtgcytgcggtcacgattgccaccagcacccccaggaccttcagcgggcccagactgcacacccctttctgtctgtgagctgtgacaccacctggaatccggctgaatgtgtcttcacagcagatgtcataaacaacataaaaatctctgaacctggagacccattttcttgacactgagcttgaagctgcatgtcaagttatctttggacagaagacaccagttctcccggagtttgagcatcagaacacggaaggagaggtgagaaggaggaggaggaggaagctgggcagggatcacagcaggttcagggagctggcatggtgtgtgcagaggctcgtgtgtgtggccttcctgcctggagcgcgtgtgaaccacggatggggatctggggcgtgcagggccacggatccctgtgtgtgcagaggctcatgtgtgtggcc

SEQ ID NO: 849380 - DNA, 631 bp, Homo sapiens
aacaaaggcgagcatgatgacgyagaggttgctatcatccagcatggccttcatccaccatgctgctccctggcacattggcctttccctatggagacaccatcctggaaccctgggccaggctgcacaagttcgcacccatcacagaccttctctaagcctgtaagaggggagggacacatgcccccaccatcatgagagttgggtcgggggctgtgtgcggaccttggggcaaggagctggctgagcaggtgtgagtctgcagctcccggggccaggctcagccgctatgcacctcgctcggtgcaggggggtgtgactcagcaggagtgcgttgctttgggactttattttcaggagaagcttccaggggggaagcccagagtagtgggtgaaggagctgaagaaaggtgggttttggtgactgctacggagaggatgaaagggggctggagacacccacaggtctgttactcagggagcattaggaggtggattgtgtccacagaagtgcagggaagatgaggagcacgtggggcccctggagctggtgagaggaagggaccagagtctcccttgcaccccagaagaagccagcccacctggatgttggccttctttgtccagaact

SEQ ID NO: 849381 - DNA, 465 bp, Homo sapiens
cactcatcttggtgaacaggatggagagacctggactgagtatgaggaccatttaggtggatccataactgggtgtgcaactctactctggaaggttattttctagtaatatattagtgctatggactgtttgtgtcccctctgccccccaaattcatacattaaatccctaacccctactgtgcctgtacttgaagatagggcctatgaaaagataataaaggttacatgaagtcctaagagtatggcttttacccaacagggctagtgtaaagctcttatccaacagggctagtgtaaggctcctttccaacagggctagtgtaaggctcttatccaacagggctagtgtagggctcttatccaacagggctagtgtagggctcttatccaacagggctagtgtagggctcttatccaacagggcyagtgtagggctcttatccaacagggctagtgtagggc

SEQ ID NO: 849382 - DNA, 496 bp, Homo sapiens
aggctcttatccaatagggttagtgtagggctcttatccaacagggctagtgtaaggctcttatccaacagggttagtgtagggctcttatccaacagggctagtgtagggctcttatccaacagggctagtgtagggctcttatccaacagggctagtgtaaggcttttatccaatagggttcgtgtaaggttctcatccaatagggctagtgtttttacaagaggaagagacaccagagctctctctgccatgtgaggacacagcaggaaggcagttatctacaaaccaggaagagactcctcaataggaactgcactggccagcaccctgatcttggacttctcaacctccacaactatgaaaaaataaatgtcctttaagtcamccagtctgtggtattttgttatggcagccctactgactaatacagctaaggagctatgatacttaccaagttactatgactactgactgaggtgggtactaatttaaa

SEQ ID NO: 849383 - DNA, 509 bp, Homo sapiens
cattatgtagcagatcatctttttttttctttaatttcattttattttattttaagttctgggatacatgtgcaggacgtgcagccttgttgcataggtaaacgtgtgccatggtgatttgctgcacagatcaacccttcacctagatattaagtccagcatacattatcttatttttcctgatgctctcccgccccccaaccccacgacaggccccggtgtgtgttgttcccctccctgtgtccatgtgttctcattgttcagctctcacttataagtgagaacacgcagtgtttggttttctgttcctgtgttagtttgcagaggataacggcttccagctccatccatgtccctgcaaagacatgatcgcattcctttttatggctgcrtagtattccatggggtatatgtgccacgttttctttgtccagtctatcattgatgggcatttgggttgattccatgtctttgctattgtgaataatgctacaatgaacatacgcata

SEQ ID NO: 849384 - DNA, 546 bp, Homo sapiens
acatttggagtattagctaaaatgggtatttaaaaaattatggcttttcatgaagccatacaagcytcagagtatagagtcatagaaagaaatggacttaggaatcagacagggtttttatttccagctatcctcgtaggtgtgggacttgagttaacctttatagcattggttttctcattttgaaaaggaaaataatatgtcatagagtttttatgagaattaaagaaaataaggtatgtaaatatataatacacatggtttgtcctattttgacactttgaaaatgatcattattaaatgttctgcggcacatcttgaatttttgtatttgaggctattgtcttgagatcaaaatattaaaatttttgcttgggtagtagttctgctctaaagttaaattatatgtttcctcttttgctgatttagagcagcttttaacatttcctagaggcatgttccagagcttggcattatagttagatttttttttctctgacagatatatcttattctaaaaaataatctggaattgtatccttgtct

SEQ ID NO: 849385 - DNA, 546 bp, Homo sapiens
acatttggagtattagctaaaatgggtatttaaaaaattatggcttttcatgaagccatacaagcctcagagtatagagtcatagaaagaaatggacttaggaatcagacagggtttttatttccagctatcctcgtaggtgtgggacttgagttaacctttatagcattggttttctcattttgaaaaggaaaataatatgtcatagagtttttatgagaattaaagaaaataaggtatgtaaatatataatacacatggtttgtcctattttgacactttgaaaatgatcattattaaatgttctgcggcacatcttgaatttttgtatttgaggctattgtcttgagatcaaaatattaaaatttttgcttgggtagtagttctgctctaaagttaaattatatgtttcctcttttrctgatttagagcagcttttaacatttcctagaggcatgttccagagcttggcattatagttagatttttttttctctgacagatatatcttattctaaaaaataatctggaattgtatccttgtct

SEQ ID NO: 849386 - DNA, 608 bp, Homo sapiens
ttacctacattgtttttgaacaaatgtcaggtataagaaatactgctcttattaaaaatgaaatgaaaagggaaaaaatgagattttggggaaaagattttgtattataaaagaacgagataattatggcaagctaaacagaggaagaacatatttttaaaatatgtactacaagcaagaaaataagctttagacagcatttgctttgtactctcaagttaatgaaagaaaatagggcctctttggaaaataaaaagagataaaataacagattttagtaaagaaagatctggtagtgctgaggaaaggattcaaggaaatggaaaactagaacatgcaattagcaaaattaaaaataatgtgagatgctatagagagtggaatggatttcaatgaaaatggatcagtgatatgtatatcaagattttgaggctttgtctactcaaactgtaaaaacactgtagactgggtggcttaaacaacagacatttattttttacagttctggagtctggcaagtccaagatcaaggtgcctgcatatttggttcctgatgagrgctgtcttccttacttgcacatggccaccttctcactgtatcctacata

SEQ ID NO: 849387 - DNA, 519 bp, Homo sapiens
agagcttaatcccctaatttaccaattaggaaaaagccaagacaagagttcaaattatgttgaaaacttaattaacacttatatgacaaacattacatttactcaatctttaacctcataaagacagaaaataaattagcatctattttcttttctcacatggctaattagtatatgaaatagaatccaagagagatccaccatgcaaacagaaaccataatgtaggttctgttaccatctccattttatcaccaggaacctgagacacagagaggtgaagtaacttgcccaaggtcacacagcttagaagggacagagccagtattcaaatccagatagtgtggctccagacattttgcttatattcaccaagtcctacagcaaaaaccatggrcagccaattatagaaaataaaaacataacatgaagcgatgctaaaacccccatatactaaatcaacacaaaactacaatgagattttatcattttctctgtccttcaaagcttcctgaaacatc

SEQ ID NO: 849388 - DNA, 573 bp, Homo sapiens
tccaggttacttccagcctctcctacatctgacattggcaaaatgctccacatcagcttgtgtgttatgttttgccttaaaacagagctatyggtctcttaggtttcctaatgacgttctattatgctcattctgcaccgcagtctcctcgtcataaaaaagtcaatctgtgtgcctgggtagtagggtagtttgagtagcatgtactatatatatttggagttatccttctccagaaaacaactagcctagtgagaataaaacaagtagacaaccatctgcaaaccaggaagtggggcctcatgagagaccatagctgccagcaccctggtctcggacttcctagtcttcacaactgcaagaaataaatatttgttgtttaagccacccaatctatggtaatttgttatagctacccaactgaccaagaaaatgcttctaagttataaaatttccatttgttcttctttgtgtcgtttatttatttgttcttttaagagtgtttacaattgcttgctggagcatttttataatagcagctttaaagtctttgtcagataatcctaacaaatg

SEQ ID NO: 849389 - DNA, 502 bp, Homo sapiens
gaaagaaagaacatacaatggagctccaaaacatctggcagcagactttccagtggaaaccttacaggccaggagagagtggcatgacatatttaaaatgctgaaggaaaaaaaaaaccaaacttttatcctagaatagtatatccagtgaaaatatccttcaaatgcagagaaataaacaatttcccagacaaacaaaaggtgagggatttcatcaacactgaaccaggcctaaaagaaatgctaaaaggaattcttcagtctgaaagaaaaggacattaatgagcaataagaaatcagctgaaggtgtaaaactcactggtaatagtaagtatacagaaatacacagaatattataacactgtaattgtatgtaatctcatatcttgaattatactasagtaaaagagaaagtaataaaaaataactacaacatttcaagatattcaataagatagaaacaacaaagttaaaaagcagggggaaaaagttaaagtgtagt

SEQ ID NO: 849390 - DNA, 502 bp, Homo sapiens
gaaagaaagaacatacaatggagctccaaaacatctggcagcagactttccagtggaaaccttacaggccaggagagagtggcatgacatatttaaaatgctgaaggaaaaaaaaaaccaaacttttatcctagaatagtatatccagtgaaaatatccttcaaatgcagagaaataaacaatttcccagacaaacaaaaggtgagggatttcatcaacactgaaccaggcctaaaagaaatgctaaaaggaattcttcagtctgaaagaaaaggacattaatgagcaataagaaatcagctgaaggtgtaaaactcactggtaatagtaagtatacagaaatacacagaatattataacactgtaattgtatgtaatctcatatcttgaattatactagagtaaaagagaaagtaataaaaaataactacaacatttcaagayattcaataagatagaaacaacaaagttaaaaagcagggggaaaaagttaaagtgtagt

SEQ ID NO: 849391 - DNA, 522 bp, Homo sapiens
ggaaaagaacagtacataagatcaatgaaataaaaacttgtttttttaaagataaataaaattgataaaaacctttagccagactaagaaaaaaatgagagaagacccaataagtcagagatgaaaaacaagacattacaactgataccacagaaattgaatggatcattagaggctgctatgagcaatcatatgccaataaattggaaaacctggaagaaatggataaattcctagacacataccacctactaagattgaaccacgaagaaatccaaaacctgaatagatcaataagaagtgacaaaattgaagcggtaataaaaagtctcctgcaacaaaaagaaagggggaaaaaaaaaaaaaaaacaaaaccgtacctgagagcttcwctactgaattctgaattttgccaagcatttaaagaagaactaatgccaattctactcaaactgttgaaaaaaatagggaaggaaatatttcaaaacttgttctatgagacctgtattaccctcgtaccaa

SEQ ID NO: 849392 - DNA, 430 bp, Homo sapiens
gtaataaaaagtctcctgcaacaaaaagaaagggggaaaaaaaaaaaaaaaacaaaaccgtacctgagagcttctctactgaattctgaattttgccaagcatttaaagaagaactaatgccaattctactcaaactgttgaaaaaaatagggaaggaaatatttcaaaacttgttctatgagacctgtattaccctcgtaccaaaatcagaacaacacatcaaaaaacaaaaacaaacaaaacacacacaaaaaaaccctacagctcagtttttctgatggacattgatgtaaaaattctcaacgyatcagcaaactgaactcaacaatacgttaaaaagatcatctaccattttcaagtgagacttatcccagggaagcaaggatagttcaacatatgcaaatcaattattgtgatacattgtatcaa

SEQ ID NO: 849393 - DNA, 604 bp, Homo sapiens
ttagtcaccttcgaagatggtgcaactttgtatttgcaattccccatgctctttccactttttctaaaagtaaccactatcctgactttaatcactgtttttyactcttctttgttttatcaccaaagtgtgcaaccttgaatactctggtttcctccctccctttcttcttttcatatacatattttatatatatgtatatatgtgtatatatgtatgtatgtatatatacatgtatatatacatatacacacacacaagcacacacacattttagtgctcgtgtagtgaagaatagttcctttacagtctctttagtgtacagattttctttccatctcccctttctcgcttgcaatttatttgttgaaaaaaccgagatctttgatccatcgtgtttcccccggtctggattatattttgcattctcaacatatggcttagcatattcctctgtcccctttatttcctatatatttgtatctggatataaaaacttagacatgaattttttggcaaaaccatttcataggtggtgtgtgtcctttactgctgatgttagtagccattgccactgaaaggttagatccagtaattcattaag

SEQ ID NO: 849394 - DNA, 618 bp, Homo sapiens
attgtagaataagattctttctcggccgggcgcggtggctcacgcctgtaatcccagcactttgggaggccgaggcgggcggatcacgaggtcaggagattgagaccatcctggctaacrtggtgaaaccctgtctctactaaaaatacaaaaaattagctgggcatggtggtgggcgcctgtagtcccagctacttgggaggctgaggctggagaatggcatgaacctgggaggtggagcttgcagtgagccgagatcatgccactgcactccagcctgggtgacagagtgagactctgtctcaaaaaaaaaaaaaaaaaaaaaagattctttctcaactgagtagtctccagaggctggaggcatggggtcaagtatgagctggtctagttgctgccatttatcttctaagagcataatctctcttgcttcctcatcacacaaatgtgctagctgtgtctctaacagatcctcagtccattgatcaaactggccttggatttccctcctctcctttttgctgtaggtggatatcttagtattctgtattgaggtgtgatgcactccagagcttgttctagttgcagatgttaaaacagggagcagttgtgctttcc

SEQ ID NO: 849395 - DNA, 428 bp, Homo sapiens
tttaatacacctaacctactgaatatgctggcttagcccagcctacctcagatgtgctgagaacactcacattagcccacagttgggcagaatcatctcacacaaagtctgttttataatgtgttgaatatctcgtgtgacttacggaatactgtactgaaagtgaaaaagagaatggttgtgtacttcagatactcacacaaccatcgtgtttttcacttctggtgaataaagcagcccttatcgatacagtttctactgaatgtgtatcgtgttcacaccatcatcaagtcraaaaatcatcaagttgaaccgttttaagccggggaccatctgtgttcaactttctgatgactttcacaagctctgcattttatctcccagctctgttgtaaggtattgtcagtgccttgcagaaaagaatcaaa

SEQ ID NO: 849396 - DNA, 636 bp, Homo sapiens
ccatgagcatcccagggagctggagcacagccggggcgttagatatggagcctcagggtgcgcaagtcctaggacaatctaggccaacattctcttccaaattctgacttgtttttatttcacaatgtcgatctcaaatctctttctcttcattatatttcatcgccaaacatttatgaaatacttaaaatacactaagtgagagtcaggattcttccgtaaaactccaattagccaaaagcttgcccagtccgtgccttcagcctatgttatcatgcaggaaagaattaacccatgagttctgaggctgctctgcttaggaaggcctgcctgcgaggctggttcttggctggcatctgggaagttggattccgaagggttaacactgtcccctaactgatcttccctaagatgtctcacaaacaatgtggattgtgccaagcaagtgctttccttctgggagtctgggatgttggcatgcaccaggcagcctgtgcctgtgtgaccagtcccacaaaaccccccgggcactaagtctctagtgcgaytccctggtagacaaccctggacatgtgttgtcacaatcccatgtgggggaagtcagcacatcctgtgtgactccgctgggagaagact

SEQ ID NO: 849397 - DNA, 608 bp, Homo sapiens
aatgtattgtatattataaaatagctagaagaaaagatattaattgttctcaccacaaaaaaagatacatttttgagatggatatgctaattatcctgacttgatcattacacaaggtatacacgtattgccctaaatatgtgtaattattattattgtcaattaaaaataaaataaaactttaaaaattatgatgtattttagactacatctaattttatttcttggttcacaaaattatgcagctgatttagttggaatcaattagatcttagggctataaaataagtattttgcaaggaaacaaacaaaatcaccaaacttatgtaactctccctatagagtgatgtgagtagaggtcaaaaaacttcctatcttccctgataaccagtgactccactttattcctggacttaacactcctatagcttctaacatcccaaatctacttttcaaagtttgaggattctgcctcttttgacaatttctctgtatttaccacctagatttattaactttctgtaaattctttcatttgccaakactaccactactgttttgaaatgtgtattttcaaatgttagaaactaattttctatatatctggt

SEQ ID NO: 849398 - DNA, 670 bp, Homo sapiens
cccaggatccagtcttctggtgagacactggggatgacacggggattgacagggctccaggcatcactgccacattactttggatcttgtatctgaactctagaatatgtcacatagtcatcaaaccacagtttagtctgcttttccacaaaggaaaactttatctgttggcctgtgttacactataatgtgtgaggggaattggatggtgttacatcgggaagccaagcaaagtttattgtttcttgggattacattcttatatttttatattctttaataaagcacaggctggagcataagtaaaaggaagcaagttcttaactactaaaaattgactgcatggccctgtctcacaccgtagataaatactagctaaaaatggaccgtagacccaaatgtcaaagctaaaactataaaactcttagaggaatctgcaggagtattctttgtgacctggcgttatgtaatgatttcttagacatgacagtaaaagcgtaagtgacaaaatacaaaatagataatattggacatcatcaaaatcaaaacttctgtatttcaaaagacactagtaagaaaatgagragaaaatccacagaatggaagaaaatatctgcaaatcatatatctgataaggggcttgtgtccagaacatatagagaactcttaa

SEQ ID NO: 849399 - DNA, 625 bp, Homo sapiens
acgagccaaaatatgaataagaacataggcagtcacagtgaccttttattaaatgcagagacagttatgtgtcacatgaaacatcaacaaaagcccagttctggtagccagcaagatttttttgccacatttatacttggtcctctttaattatacagagttgcccccagagtactgaaatgatagactagaacacgatgacttcagcaggggatcagagctttagagcttcatcattcatgtgagccaagtgcgaaatttcagcctgtctctcctctaaatgcagttaggagtcttcgaaaccttttgtgtgaatccaggagggaaaattgtctggcaaagtctgataagcatcgtgtcaagagcacatttgtactctggtaagaagcccaggccaattgctgctgggttgtcatggcaacagaaatacacaccatttacacatcagcttctgaaatgagcacaaaataacaaaaccttttcgacaggatgggaggtgaagggaagagcagcakcatctgtgcagcctggtgaaacggtgtttacgacagtctacacggcactactgggtatgctgtctccttggattgtgtcatatttttaacccagtgggaaattcatagga

SEQ ID NO: 849400 - DNA, 571 bp, Homo sapiens
aataaaacacctttacaagtggaaatttatggcacttaaagcagaaaggagaagggcagaagattctttctcaaaaatagctcaaaatagtacttatgctaaattagcatattttgggggacacattctgrtccccttcgaatccatattagaaaagaaagactaaagatggggaaattcagtgcttagttaagggagatgtaggtcacagagagtagttttcactaagaaatgaggagtaagtctgaaacaacaatgaaagaatcttgcttttcagtgattgaggcaaacagctccaataattggatttggggaagagaacaaaagtatagatgaaccagtataaggcaactactttgatcaaatggtgatttgtgacaacctgtactaaatttaacagcagaatttcatcaaggtcataagcacaggaacatagcaaagcttttatactccaaagagttggtgcccactttatgccatactaggtctgtgaattacaatgatatgaaaggtctggtccttgctttgtggaactttactcacttcattcatttggagaatagtaatgaat

SEQ ID NO: 849401 - DNA, 547 bp, Homo sapiens
accaacatcaataattcaaaaatagtcaaggcaatatagaatgcctttgcttagctttctttgttatctccttctggtaataataataataataataataataataataatgtttttctcaagggaagaagagaatatacagttacctaatgtctaccaatcactgtgctgaggcacattaaaaagaattatcatagttaattccaaagcagtccaacaatgctgttattattatccccaagttaatgatatggaatctaaggtaactcagagtttaaccaatcagtgacaaggtcttaggccaaatctctctgtcttcaaaacctgttttcaggaacattgaagtgaagcccaagtacagaggaaacagtagaacctctgtgatttagtcaagtcctggccaaagtgcctttctcaatgcctattttacagtttaacytctgaatatgaaataaagaaatggaacaaatcattgtctttgttcattcctactgctataacaaaatatcttaggctgggtaatttataaacattagaaatttatttc

SEQ ID NO: 849402 - DNA, 603 bp, Homo sapiens
agggtctgcggcttaattcttgaagtcagcagaccaagaacccacaaattctggacacagtaggtcctacgttcttgtcccacgtgcaggaagaatgaggtacacagacaactggagggtgagtgagacaaagagatgttttattgagtgacagtacagctctcaggagcctttccacaggcaggtcatccctatgtctgctcagctctcagctgagaggagacccacagtgcctagctcctccctgcaggcagattgttgggatgtctgccaaagtttggctaactctgggctttttgtgagcttcagagggcaggaagtgggtgcttattggtccatagctggccatggacaggcctagaaaaagccccattaagttctcactctggtccagggaactggcagcctgaccccctaggtttcaggccatcagtcctaggcctgaaggtggggcttggctgggacctgtccctttaagcccaggagcctttctgcctctcactgccatcaacctgtcatccccagtgcccaarctgttcctaacaaggggtacctgcaggcctgtgctgaggcaccatcaactccccctttgcctccgtccca

SEQ ID NO: 849403 - DNA, 560 bp, Homo sapiens
cctttatatcttagtgctaattaaaagtagaacaactaaaaggaatgatatacaatgaccaagtaagatttatcttagataggcatagctagttcagctttcaaaaatcaatcacatcaacagcctaaaggagaaaaatcatatgatcataccaactgatgtggaaaatgcatttcaaaaaaattcatcacccattcacaacacacactctcagcaagctcaaaatgagggagaattacttcaacttaatgaagaacatctatagaaactatacagtttttaatatattatgcttattgggagaaactggatactgtcttattaaggttaagaagaagtcaaggatgtcttctctcatcattcctattcaacattgtactgaaagtcctggctagtatgataagatgagaaaaggaaataaaatgaacacaaattaggaagaaagaaataaaacttccttttcacagattacatggttgtctgcrtagaaaatcccaaaggattgacaggaaaattcttggaattaatatgcaattatagcaaggttgtaggatacaaag

SEQ ID NO: 849404 - DNA, 516 bp, Homo sapiens
caccagtgtcacatcaatcaatcaaccaatcaatcaatatctctatttatatctattcatatttcaactatcaaggaaaaatttaatcttctgtggctcacctstaaagaactcattgatatcgttgatccagtttcacttcttgatagtcctgcattatcatccaactcagaggccatgaaattcttcacagctgtgcgaggttcaaagggcaaattctgcatatgttcctggggtgcgagatgttgctctaagttcatattgaactggtccattacagggggattcatattgaattcagggtttactttgtagtgcaatagcctttcatgcggcaaggtttccatgccaatattcattttgctttcttctttcattgaaggctggttatttacagaacttctgggcatcacaatatagtcactttccatcattctttcttgaggatggactatgtccatgtcagcccctctcaaattatcatccgtacataagtacacagttctccgcaattca

SEQ ID NO: 849405 - DNA, 658 bp, Homo sapiens
agagagctctctttctctgagcacacgaaccaaggaaaggcctcgtgaacacacagcaagaaggcagccatccgcaagccaggaagtgagccctcatcagaagccaaaagggtcaagatctttatcttggacctctggtctttaaaactgtgagaaaacaaattcctgttgtttaagccggtctatagtgttttgtcatggcagcccttgcagactaatatatcaagccaaaattctgcctaggagagagcaaaatattgtatctttagttcttctgtatatacacgaaagcctatctgtacaagtttgttcatttgcagatctgcttgacaaactgtgggccatatccctagcttgtaaggcttaaaaaggcagtgataatgtcatccttaagtgttctcacaatggaatcccatggcttgggttcaagtgcagctctgcaacttgggcaggtcatgtaacatcttctttatctgtcgtgtggataatagtgccaacctctcagagttgttgtaagacttactacataaagtactatgtggaaagcacagagtgcrtggttcctaatacataataagtgttaccatggtgataatggggagaaatcaagtcttcacacaaaatgtccccttcaggcaaaatatttgtctggatagac

SEQ ID NO: 849406 - DNA, 551 bp, Homo sapiens
aggatgccagaccatcatcctgaccactcccaccaccatgaaggtagaaggaattccggcctggatccaccacagccacgtgaaacccacagcacytgagacctgggaggtgagaccaagcccggacaatccctacaaagtgactctgaaaaagacaacaagccctgctccagtcacacctggaagctgactggtctatgcacagccaaagcataaggaaactcatcgtgggactcatttttctcaaaatttggacttgttcaataagaacttcagctgattttccccacatggaggactgtacccagtgtattcatcaggttacagaggtagggcaacaagttaaaataacctttctgttttatagttattatgaatgtctaggaattttgaaagggatctgcttatataatgccactcagtataatgtgtgtagcccagggaatgaccaacctcatgtgtcttacaacctgtctgagcctcctatgaccacagtttttgaaataagattaagaactgaggactggtggggactcatgaaagatacaagt

SEQ ID NO: 849407 - DNA, 551 bp, Homo sapiens
aggatgccagaccatcatcctgaccactcccaccaccatgaaggtagaaggaattccggcctggatccaccacagccacgtgaaacccacagcacctgagacctgggaggtgagaccaagcccggacaatccctacaaagtgactctgaaaaagacaacaagccctgctccagtcacacctggaagctgactggtctatgcacagccaaagcataaggaaactcatcgtgggactcatttttctcaaaatttggacttgttcaataagaacttcagctgattttccccacatggaggactgtacccagtgtattcatcaggttacagaggtagggcaacaagttaaaataacctttctgttttatagttattatgaatgtctaggaattttgaaagggatctgcttatataatgccactcagtataatgtgtgtagcccagggaatgaccaacytcatgtgtcttacaacctgtctgagcctcctatgaccacagtttttgaaataagattaagaactgaggactggtggggactcatgaaagatacaagt

SEQ ID NO: 849408 - DNA, 637 bp, Homo sapiens
aatggatccaagccaagaagaaatctgaattgtctgataaagaatttagaaggttgattattaagctactcaaggaggtaccagagaaaggtaaaaatcaacttaaagaaattttttaaaaatacaggatatggttgaaaaagtctccacagaaataggtaccacaaagaaaggacaattacaacttctggaagtaaaagacacacttagagaaatgcaaaatacactggaaagtttcaacaatagactagaacaagtagaagaaagaatttcagagcttgaagacaggcttttgaattaacccaatcagacaaagacaaagagaaaaagaattaaaaaaaaaaaatgaacaaagcctccaagaaatttgggattatgttaaaatgaccaaacataagaataactggtgttcctgaggaagaagagaaatctagaaatttagaaaacttatttgagggaatagtcaataaaaacttccctggtcttgctagagatctagacatccaaatacaggaygctcaaagaacacccgggaagttcatcacaaaaagatgattgcctaggcacatagtcatcaggttatctaaagtcaagataaaggaaataatcttaacagctatgagacaaaagcatcagg

SEQ ID NO: 849409 - DNA, 629 bp, Homo sapiens
aaatattatattcaatgagaataaagagaaaataatgtctactacatttaagaatacataaagcaaaggaaaataaatcagtgaaataaagtgcaatgccaaccaaagcaggagtgcagaagtttggttgacactttatatgtagcaagtgagctttcctaaatttcttttcctatgtgtatttatcaaattcttgcaattaaggaccaaggctacaacatgctgtgaaaacaagagaaagtagttaaggagcagaagctactaataataactgcatggtaggataaggagtttggacaaagtaaactattttattacagaatacttttctaaaggtataaattcatcctttttatcatttcattggaataaagaaaaagttgaaatatattattggcttataatctttcatgataaacatctgtccttaattgcttaaagaacagtggccaggagtggtggctcacacctgtaatcccagcactttgggaggctaaggcaggctgatcacgaggttaggagttcgcsaccagcctggtcaacaaagtgaaacccccgtctctactaaaaatacaaaaaaattagccaggcatggtggcgcgcacctgtaatcccaactacttgggagg

SEQ ID NO: 849410 - DNA, 529 bp, Homo sapiens
tttttctagtcaatgtttaaaaaatagagaaagagaaaaactttcagtaagtatgatgttatttgagatatgggagacatagctttgtgatcttttttaatttgtaagttttttttcattccyatgctatttgtagctaagtcaagaatttcattgatttggattagacagaattgttacatagtatcgttgtactatgcaggtatcttgtttgtgtaaaatattgaaaccaaatttatttcatgctgaatttatagagatatttacttcatagagatatttacttcatagagatattaactcatagagatatttaaataaatacactttacatgtactaaatattatttaataagaatcaagtgttttgcacataatatgtttcagacactatactgaaaattttttgtaagctaacatggaaaggttgactccttcaaagacatgtccatctaggaggagaagactgtgtcttaatgaggtgaaactacaaagctttagtgtctcaataacttatcacaaaaatcag

SEQ ID NO: 849411 - DNA, 576 bp, Homo sapiens
cactcttatgcttgatggaaaactttagacacattcatgttagagtcaggaacaaggctgatgaccagcatcagtaatactcaacattgttctggtgatactactctcccagctatttgaaacgatcatgaaaataaagctgtatgtaggccgggtgcagtggctcacgcctgtaatcccagcactttgggaggccaaggtgggtggatcacttgaggtcaggagttcgagaccagcctggccaacatggtgaaaccccttcttgactaaaaatacaaaaattagctgggcatggtggtgcacgcctgtaatcccagcaactcaggaggctgaggcaggagaatggcttgagcctgggaggtgggggttgcagtgagccgagattgtgccactgcactccagcctgagcaatagagagagactcagtctcaaaaaaaaaaaaaagaaaaaaagaaaaagaaraaaaaaaagaaaagctatgtgaatagaagtaataagtttggatacaaaatcagaatacatcagtagttcacgtatacacagttggcatttaggttaactgttgtaatgaaaaag

SEQ ID NO: 849412 - DNA, 531 bp, Homo sapiens
gcatacatggctgctttttagtctcttgtttttgggatttggcaagagtacccttacctaggtggatggtaaagttagaggtgggcataaytggtctgatttgcatctttggtggctgagccaaatttttttttttttttttgagacggagtctcgctctgtcccccaggctggagtgcagcggcgcgatgtcgcctcactgcaagctctgcctcccgggttcacgccattctcctgcctcagcctcccctgtagctgggactacaggcgcccgccaccatgcccggctaatttttttgtatttttagtagagatggggtttcaccattcacaggatggtctcaatctcctgacctcctgatccgcccgccttggcctcccaaagtgctgggattacaggcgtgagccaccgcgcccggccgcaaaatgctctttttacttagtaactttgccatagcctgtagcaaaatttttaacattataaaggaagagataagggcgatttcaaaccctgagagagagaaaagaggg

SEQ ID NO: 849413 - DNA, 608 bp, Homo sapiens
taaaaaatgtacatttcctacatacacattccatagcataagaactgaaaaagtcaaataatstaataattctaaaacgttaaagaacagtacgatggcatggtatttgctgtatctttcacatgaacattttaaaaagatatttcaaggataaattctattctcttgtcatccttttcagaaactaaaaacctgacttacctaaagtaacatgaaaagtgagtgtcagaggccagacgcggtggctcacgcctgtaatcccagcactttgggaggccacagtgggtggatcaggaggtcaggagttcgagaccagcctggccagcatggtgaaaccccatctctactaaaaatacaaaaattagccggacgtggtggcatgtgtctgtaatcccagctacttaggaggctgaggcaggagaattgcttgaacccgggaggcggaggttgcagtgagccaagattgtgtcactgcactccagcctcggcgacagagcaagactccatctcaaaaaaaaaaaaaaaagtgtcagaactgatatctaggtgtgagtcctgttgcctgaggatgtagtcgagaatattctatttgcattttgcattgttaa

SEQ ID NO: 849414 - DNA, 470 bp, Homo sapiens; identical to SEQ ID NO: 832169

SEQ ID NO: 849415 - DNA, 612 bp, Homo sapiens
ttttatggctgcatagtattccatggtgtatgtgtaccacattttctctatctagtccatcattgatgggcatttgggttgawtccatgtctttgcatagctttacctatgaaaaagctaggctcagaagtattaaagtaatgtatctaatgccctggggcaagtaagtggctgcactagaattcaaactcaggtctacagaactgcaaagctcagggtctttccatatgatactcatgatgtttcagctggttcaccccagcttgctctctctgaatggagaaagggctgaaaaaaaaagaaccaggcagcaataggttccgagactaaacaagccaataacattcaagacggaagtaacaaaattcaggtcaaggcaagaaactcagagtccaagtgaaggctgttggggattgcagcagcagagcaaagaaggccagaaagaagctgacagtgtcagcagcccgccgccctagaagggagggcaaggacgaggctggctataaacagggctggcagcacagggagtgacatcaccctgatgtcgagacaagggactttctcaacaccagatgcttttattctcttctcaccttggttgcaccagtcctt

SEQ ID NO: 849416 - DNA, 612 bp, Homo sapiens
ttttatggctgcatagtattccatggtgtatgtgtaccacattttctctatctagtccatcattgatgggcatttgggttgaatccatgtctttgcatagctttacctatgaaaaagctaggctcagaagtattaaagtaatgtatctaatgccctggggcaagtaagtggctgcactagaattcaaactcaggtctacagaactgcaaagctcagggtctttccatatgatactcatgatgtttcagctggttcaccccagcttgctctctctgaatggagaaagggctgaaaaaaaaagaaccaggcagcaataggttccgagactaaacaagccaataacattcaagacggaagtaacaaaattcaggtcaaggcaagaaactcagagtccaagtgaaggctgttggggattgcagcagcagagcaaagaaggccagaaagaagctgacagtgtcagcagcccgccgccctagaagggagggcaaggaygaggctggctataaacagggctggcagcacagggagtgacatcaccctgatgtcgagacaagggactttctcaacaccagatgcttttattctcttctcaccttggttgcaccagtcctt

SEQ ID NO: 849417 - DNA, 577 bp, Homo sapiens
ctttctctcccgaggatatagttatcctcagactgagctggagcaaacattcagccagggataaatttatgactttagctcatacaagatgtgatacatttgcacatagccaattagcattgggcttctcaagcggatgtccagattcacccttgggtcctcaaaaaacttccaaaagacagctggatgtgaagctggaatgccccagttggaaaaagcctccactatttattggctctattattcagagggcaagctaagccatcttgaggcctcactttcctcatttacagaaggaattaacacggtttacatgtggtgtcaagatcacacgaaagcatgaacatgcaagtttccagcatggtgtccagccttcctgtctctctccagacctccctttcttatttgttcactcatccatccatccatcatggactcccggtcatataccagacaccatgctgtcactgggcacagagctgtcaacaagagagattgtctctggccrtgtgcaactcacagactgaagaggagagagaacttttccagactttgctgggaagagagcaaagcagcg

SEQ ID NO: 849418 - DNA, 601 bp, Homo sapiens
tgagtgagggaaattcaggaaacttctgtcagtcactttagccaatttgaagctctcccttttttgtgcaaagacaaactacagcttactcaactggtactaatttatctaggttcagcatttgattttattgggccttggattttcatctattttgtgtctatctcattgctccaaactagtacaagctcctgaattgccagggccacttcttattcctcctgggatgatcaggttgggcgggccagggtgctgctttaaaagtcagattttgcttctttagtcttccctattgttaatgaacagtttttggatgtcactttgtgcctagcttgttctaagtgtttatgttagttaagggttttctgtgtctatagaaggaaaaattcaaactgagttaagcccaaactagactttgttggctcacatagctgaaaggccccggggtagctgccttcaggcctggctggacctagtagttccagtgtcatcacaggactctaagaactgtcatggctctgcttttttatgtgctggtgccaagactatctgttcctggkggatcccagcagccccagactcatgggaaaaaatgaccatg

SEQ ID NO: 849419 - DNA, 381 bp, Homo sapiens
tttcctcatgttactgaaaagtaatcattgtaataatgaagaccacatgtgtcctgggtctaattattaaatcattatattgttatatcattcctattagttgctttggcgaaagggtcaaatgaaaaaagtcagggcattcttttttatgtcgacattttattttctatcaatacaattcgctccagcccgagacatggcagaatgggacgtgagctggcctgcatgggggctcggctttggccttcatggyggttgggtccggagggaggtgagcagtgcccttgactgatgcactgtccgtcgctgctggactagggctgggactgggccccagagccagggtctccagcgctggcaagggggagctgctgggtcctt

SEQ ID NO: 849420 - DNA, 539 bp, Homo sapiens
ggccccactccagacctaccaaagcagaacctgtgagggtggaagcccaaccatgtggattttgacaagcctcccagagaattctaatatatgctcaagtttgagaaccacrgctcgattgcattttaaagcaattaggccaaggggaaatatccttgttcttacataaaaccaagatgaccttaactagcattggctcctttctttcaacaggctcaaagtgaactcattttcataagaattgcattgtttaaataaatatgaagtttaaactgtatatatcctgtcccatgccaataagtccaatgcatacaaatcactttaaaatccacccatggagatctgtactcagtgatgttgctagaatcactcctctgttagatatcaatagtggcagatgataaactctcttctgcaatgtgacaccttctttactaatagaccattacgctgtctgaatcagagtttcactgattaaacaggaaatgccatctgtagagtctggtatccttccagggtctgcaaaggttgggaccaga

SEQ ID NO: 849421 - DNA, 607 bp, Homo sapiens
ccacctttggtagcctgcctttcacccctgtaaaatggagatatcgatgtgagttctagcgaggctcaaaacggatccctggctggaagtattctgagaatcatgatgcatggcacacacgcgsggcctgccacagctcagccccttggttctggctgctggaatgtggttcttgtggccccacaatgagtattttatacttctctcttgggacataagcctgtctctggatagcatcgtgttcctcctgagacacaaaaaggagctcattgcctttagagctgacccgagcctcgtactggagcctggcaggcaagcatcttcctcttctgggacctgcctcagttttctgacttaggaagtgggaatccaggttctccccagttccagttcttcacagagtcctgggggtgcccttggcctcttgtctcggcctcactgcttctatctgagaaacacctggcctccatgctttcccgcctgagctccattgtccacacctctgccagagtgatccctccaggagaattctaaggactctacttccctgctaagaaatctccaactctgaacagaatgaaatccagactcctcatctctcatcttg

SEQ ID NO: 849422 - DNA, 582 bp, Homo sapiens
atattagagctgcaaaatatttgaaggaaacattgatagaagtgaagggagaaatagttctaaaataatagttggagkcttcaacaccactttcaataatggatagaacaaccagagagaatattaataagaaaacagaggacttgaacaagtaataaaccaagtagaacaaataagtcatattcgaaacactccacccaacaacagcaggatagaattttttatcaagcgtacatggaactttctccaggatacacaatgtgtagaccacaaagcaattcttaatgagttttaaaagattaaagtcatacaaaatgtattttcagatcacagtagaataaagctagaaatcaataacagaaggaaagctggaaatgtagaaatatatgaaaattaaacaatacaattttaaacaaccagtaggtcaaggaataaatcacaagggaacttataaaataccaagaagcaaatgaaaataaaagcacaacataccaaaacttatggaatatggtgaaagcagtgccaagagagaaatttatagctaaaacctacatacattgaaaatgaagaaagatctcaaat

SEQ ID NO: 849423 - DNA, 582 bp, Homo sapiens
atattagagctgcaaaatatttgaaggaaacattgatagaagtgaagggagaaatagttctaaaataatagttggagtyttcaacaccactttcaataatggatagaacaaccagagagaatattaataagaaaacagaggacttgaacaagtaataaaccaagtagaacaaataagtcatattcgaaacactccacccaacaacagcaggatagaattttttatcaagcgtacatggaactttctccaggatacacaatgtgtagaccacaaagcaattcttaatgagttttaaaagattaaagtcatacaaaatgtattttcagatcacagtagaataaagctagaaatcaataacagaaggaaagctggaaatgtagaaatatatgaaaattaaacaatacaattttaaacaaccagtaggtcaaggaataaatcacaagggaacttataaaataccaagaagcaaatgaaaataaaagcacaacataccaaaacttatggaatatggtgaaagcagtgccaagagagaaatttatagctaaaacctacatacattgaaaatgaagaaagatctcaaat

SEQ ID NO: 849424 - DNA, 577 bp, Homo sapiens
ccatctcaggtcagtgcgcccgcgggctgctagagcgtgcgggcggcgggggcggtgcttgsaggaaacgcgcgccggctccaggaagtttccggagttgcctcacttttggcgcaggaagccgggcgctgtcacctccgaacccgccctagcctgccgccctgccgaggccctgcgtggggcacagtcggggcttcctgggtggcagcgacctctcagccccggaactcgctgcagccgccttccaggggcccttcccgctcccagcgcgcagccctcctagaacgccccgggtgggcgtggacgggagcccggagccctctcgcctgagcgcccagcgcgggattctcggggtacctgcggttccaaacttgcccacgataaggatcacctgggcacttgctgcggcgacggcttcctgggtagttccttattgagatcccattgtcagggtgtgtatctggattgaagcctcggcgcgatccttccccgaaacctcggggacctgcattcccactgatttgccaggggatcggagtcttagagttgtgcttttttttttgtccacctcaagttt

SEQ ID NO: 849425 - DNA, 504 bp, Homo sapiens
attttaacaaacgtatgcagttatatagccacccatacagtgaagataggaactatttccatcacccaaaaaagtttctttctttccttttgcagtgaagtyctctctcctacctctctggccctggtaaaccacctgtctgccttctatcactatagttttgccttttctagaacataggtagtctcttctgtgtatggatgtcttctttcacattgtagtgtactttggagactcaaaccatgttattacatgtatcagtaattcattccatcttcttgctgagtgtactccattgtttatatgttccagttgagggacattgtccttttgctttttagaaaactttttattgggccaggcacggtggctcacgcctgtaatcccagcactttgggaggctgaggcaggtgggtcacctgaggtcgggagttccagaccagtctgaccaacatggagaaacccgatccctactaaaaatacaaaattagctgggcgtggtgg

SEQ ID NO: 849426 - DNA, 504 bp, Homo sapiens
attttaacaaacgtatgcagttatatagccacccatacagtgaagataggaactatttccatcacccaaaaaagtttctttctttccttttgcagtgaagttctctctcctacctctctggccctggtaaaccacctgtctgccttctatcactatagttttgccttttctagaacataggtagtctcttctgtgtatggatgtcttctttcacattgtagtgtactttggagactcaaaccatgttattacatgtatcagtaattcattccatcttcttgctgagtgtactccattgtttatatgttccagttgagggacattgtccttttgctttttagaaaactttttattgggccaggcacggtggctcacgcctgtaatcccagcactttgggaggctgaggcaggtggrtcacctgaggtcgggagttccagaccagtctgaccaacatggagaaacccgatccctactaaaaatacaaaattagctgggcgtggtgg

SEQ ID NO: 849427 - DNA, 504 bp, Homo sapiens
attttaacaaacgtatgcagttatatagccacccatacagtgaagataggaactatttccatcacccaaaaaagtttctttctttccttttgcagtgaagttctctctcctacctctctggccctggtaaaccacctgtctgccttctatcactatagttttgccttttctagaacataggtagtctcttctgtgtatggatgtcttctttcacattgtagtgtactttggagactcaaaccatgttattacatgtatcagtaattcattccatcttcttgctgagtgtactccattgtttatatgttccagttgagggacattgtccttttgctttttagaaaactttttattgggccaggcacggtggctcacgcctgtaatcccagcactttgggaggctgaggcaggtgggtcacctgaggtcrggagttccagaccagtctgaccaacatggagaaacccgatccctactaaaaatacaaaattagctgggcgtggtgg

SEQ ID NO: 849428 - DNA, 548 bp, Homo sapiens
taaaaaatagagacaggatcttgccctgtcactctatttggagtggagtggtgcaatcatagctcattgtagcattgaactsctgggcttaagtgatcctcctgccttagcctcctgaatagctatgactataggagtgtgctgccgtgcctggctaatttttttcttattttttgtggagatgggatattgcagtgttacctaggctggtctcagaatgctgggctcaagtgatcctcccaccttgccctaccaaagtgctgggattacaggtgtgagccactgtgcctggcctgatgctttctaagagtacttgtttagatattttgtgtccctagatttgtctgatgattaggctgcagttatggatttttgggaagaataccgcagaggtgatgtgcccttctcatggtgtcctatcaggagctacctgatgtcagtatgtcctgttactggcaaagttaaccttaatcatttggttaaggtagcctctgccaggtttctccaccaagttactatttttccttttctgtactctgttaaggcaa

SEQ ID NO: 849429 - DNA, 639 bp, Homo sapiens
atgagggctttctgcactacccagagaaggatccttatgatgttgttctggattcccatcgtaacttaaagggaaactttcacaatgtctagaacctckatgtcctgcaaatgaaggaggaggatgtccttaagttccttgcaggaggaacccacttaggtagcaccagctttgtcttccagatgggacagtacatctataaaaggaaaagtgttggcatctacatcataaatctgaagaggacctgggagaagcttctcctgggagcttgtgccattgttgctgttgaaaactctttcaatgtcagtgtcatatcatccaggaatactggtccgaaggccatgctgaagtttgctgctgccactggagtcactccagttgctggctgcttcactcctggaactttcattaaccagatccaggcagccttttaggagccacagcttcttatggtgactaatcccagtgctgatcaccagcctctcacagaggcatcttatgttaacgtacctaccattgctctgtgtcacacagattttcctctgtgctatgtggacactaccatcccatgcaacagcaagggagctcactcagtgggattgatgtggtggatgccgatccaggaagttcgcatgtgtg

SEQ ID NO: 849430 - DNA, 639 bp, Homo sapiens
atgagggctttctgcactacccagagaaggatccttatgatgttgttctggattcccatcgtaacttaaagggaaactttcacaatgtctagaacctctatgtcctgcaaatgaaggaggaggatgtccttaagttccttgcaggaggaacccacttaggtagcaccagctttgtcttccagatgggacagtacatctataaaaggaaaagtgttggcatctacatcataaatctgaagaggacctgggagaagcttctcctgggagcttgtgccattgttgctgttgaaaactctttcaatgtcagtgtcatatcatccaggaatactggtccgaaggccatgctgaagtttgctgctgccactggagtcactccagttgctggctgcttcactcctggaactttcattaaccagatccaggcagccttttaggagccacagcttcttatggtgactaatcccagtgctgatcaccagcctctcacagaggcatcttatgttaacstacctaccattgctctgtgtcacacagattttcctctgtgctatgtggacactaccatcccatgcaacagcaagggagctcactcagtgggattgatgtggtggatgccgatccaggaagttcgcatgtgtg

SEQ ID NO: 849431 - DNA, 635 bp, Homo sapiens
gactccgtgggcgtgggaccctccgagccaggtgagggatacaatctcgtggtgcgcggttttttaagcccgtcggaaaagcgcagtattcgggtgggagtgacccgattttccaagtgccgtccgtcacccctttctttgactcggaaagggaactccctgaccccttgtgcttcccaagtgaggcaatgcctcgccctgcttcgggtcgcgcagggtgcgcacacccactgacctgcgcccactgtctggcactccctagtgagatgaacccggtacctcagatggaaatgcagaaatcaccgtcttctgcgttgctcacgctgggagctgtagaccggagctgttcctattcggccatcttggctcctccttcataaatttttaaatgttattgtgacattagtatattaaatgctgcttgcagaaatataatttaaatgtttttaatacatgataatgtatatttctagtttgaactagtaatttaatttttgtgacttcactagagcaatagmtctaaaatattaaaagttaaatgataatgttatctggtctatactattcaaattactttgctatttattcatattaactttatgatacaatatgtcactctttatcaatattccatg

SEQ ID NO: 849432 - DNA, 615 bp, Homo sapiens
aatcggatcccacgtctcccatgtttcgtcttcctatatttaagcatcaagtccagtagtttaaacctcttaatatttcctaagtcttcatcatttaactctatgtttccactactactgacttattctatttatttgtctttctatcacagcttgcttagtattctgtctttaagtacaatgtaaactatcttcgacagcctggctagtgattgtttaaattgcattactgataatgtcaaatttaaaatatttctttctctcctcatcacttcttagatcaactgaaggtttctaaacatttctcattaaaatatgacatgatttggtgctaggatctggtgcccagccttggatctcataactctactactccacccacttccccccaacctcctccaccctgatcccacttaagtttaggcatatagaactacttgatattccatggcttcatgacatgtcaggtttatctgttgattagtgatagggaaaagattataacacagaaatttaccttttcaatttagamgtctctccagtgtgccgcagtgttagttttatgtgtattacccacatcatgaactgccttgataatctttctaatgctgtcag

SEQ ID NO: 849433 - DNA, 565 bp, Homo sapiens
ttggaatgggattctgtttagtaaatttttactgaatatttgatttttaaacaggtattcttatattaattataacagttacataagaaatttgatatgacacttttcactagaggttgattggttttggacactatatgaataagttttgtctattaaaccacagtagatgtgataaaaaatgatcatttagcaacagttctgtagatctgttcatgtccaaagaagccacaagaaagatttatgaaagagaatatccagcagtgttaacatttctgagcttctggaagaaaatgggggatcaagggaaacatcttcacattagaggaacaacaatatctcataaggagtccattgttgaattaaaaatttaaaaaaaagttttttaatgccacgaagtctgtggattagtcttctctgtttaccatagagaaactatattggctttcacakaggtgactaaatgttcttgagctatttatttttactaaataattttagttgattgaattaaaacattttgtattttttcaacgtgtttattaaatcactataaagacacaaa

SEQ ID NO: 849434 - DNA, 549 bp, Homo sapiens
gcctccttatgcaatttggtcactgtgtgaacatcatagagtgtactgatataaccctagataacatagcctaataaacacatagtttctatgatagagcccttggctcctaggctaccaacctatactgcatgctactttactgaacactgtaggcaactgtaactcaatggtgtctctttgtgtatctaaacatattaatatagaaaagttacagtaaaaatatgatataaaagataaaaagagggcacttaacatagatggagtatgccggcatggaagttcctcttagtgagtcagttaatgagtagcaagtgaatggaaaggcccggggcattactagacactatgtagactttgaaaacattggacacctagattatattaattttttttaattttttattcagtaatgaattarccttagcttactgtaacttctttataaacattttatttattttaatttttgactcttgtagaaacacttagcttaaaacacaaatacattgtacgactatagaaagatattttcattctttatgtcct

SEQ ID NO: 849435 - DNA, 448 bp, Homo sapiens
agttctcagtgcctgaattttgtttttgtaatttttggctcagtatgaaaaatgaacacacactgaacacataagaaatcattatgtactctaaaagtaaaaaatggataattttgattatgatgaggttgatgggctaattttaacagagagtctctgaagctgatgacttataacgataaaaatggtcatcttatattattaactaacaaactttcttatattgcacattttattgtgtaagtacatacatgtaacaccgatttgctagagttgtttgattaatcctgatcatctaattgtttaaaatcaattcataatmtcaatattttgttcttgatgtaagctactattaagctcaattatcttttttaataaaatatatattatcttattgatgaagtagaaatttcaggtaataacctaaaacaaaaacaaaaaaataaaa

SEQ ID NO: 849436 - DNA, 596 bp, Homo sapiens
tattccattctatgtctagtgcaagtaagtaatttatcatttatagaatgaatttgaatgtttattctttgtgacctactatgcaggtccatcaaaccctcgctcccttctgtctccaaatttatcctagttcmcgctaatccctgggagagaagtgctgcaatattcaaatgacataagccttttactgtgccttcagcaatcagttcacttgcctctccagttgcctgacttaaaatacatgcctggtgtttggaaaaccaatagcagctacaggaagtgggctgggatcaattaagccagccatagcaatcagtggctctaagcctctatattagtttaattaattaattattcattcattcacttacaatttgtatgtcaagttctactatgtaccaaaatccttactaaaattgaggaatgcagcagtaaaaatgaaagtgaaaagagataaaacatccctaacttcatagaggaaaggtacagataaaaaaacatacataactgcaacatggagtatgcaaattggaatgactgttttgaggaaacacaagacaataaggaagaggggtgaggagtgtgtattcttaaat

SEQ ID NO: 849437 - DNA, 642 bp, Homo sapiens
aactgacaactctatcattttttgagggaagatttttagagctaatcatctgatgattacatttattwttaatgcttggcattgagccgccattgtacaaaacttcctataggttgcagatcagaagctgcaaagtactttaactgcctttcatcaggaaaatgatttcttctctctggctcaatgactaacgtttaaagacacacgtttgcctctctgctctgtgaaatccctttgcaggagacttggcagggtcaccctccatccttgaagcaaccatatggagcctgctgctttcaagagaaggttttggtttctgccagtttcccgggtcagctattagcacactggggaatgttgaagtttccaagcacagaatgaagagggaggaaagaaatgggtgattaggggaattaagtaactgattccctgtgtacatctgccacccctgcaggaagaaatatctggtaaaaccatttattagcccctatctgcttaaaacagcaatggtatttatgtaaaagaaggcagggagctttattgaacaatctcaaaataatatgtagctctcataattaaaaagatcttagtagaaaatatgtagcatatgctgtatactcattcacatgtatacaagtttat

SEQ ID NO: 849438 - DNA, 572 bp, Homo sapiens
tgggttatggagctagactgcccgggtttgaatcttggttccactaatgttttaccttaggcaaaaaattctgcactactcccctcacctaaaacatatggataataggccgggtggggtggctcacgcctgtaatcccagcattttgggaggccaaggtgggcagatcacacggtcaggagatcgagaccatcctggctaacatggtgaaaccccgtctctactaaaaatacaaaaaattagcggggtgtggtggcaggctcctgtagtcccagctactcgggaggctgaggcaggagaatggcatgaacctgggaggcagtgcttgcagtgagccgagatcacaccactgcactccagcctgggcgacagagcgagactccatctcaaaaaaaaaaaaaaaaaaaaaaaaaaggataataataatacttaactcaaaagactaytgagaaccaaaagagttaaacacacactagagcagtgcctggagtacaaacagctttcaataaaagttacctataatctactgctattattattactatactgtagtaaacatttaataaaattat

SEQ ID NO: 849439 - DNA, 552 bp, Homo sapiens
ttgttattggatgcttttccacaccctcacaaattgattcatgggctttatgttttcacagtagtgcaaggattaacatccattcagagctggaatgtcagaatgtggackcttgatcaattacatgcacaggatcagaaggggtgaaagaaatccatcccgaatgttctcagagttgcaggggaaagccaacattaagtcggttctaggtgatgaatccaaattttatgtttagaattcttgagaacggctggctatggacccagccgagttttgttttagggatgcagaaagggtcaggcacttttaggtttagtgctgtagttgagcacgttccacattgtgtcactcccaaatgctgaggacgctcctccaaggaagggaactgtgccatgagctcttcatcctacttgctttgagctagaagaaaaattgagttggtgatgtggtaggtgtggcctagggctctcccctctgagatggcacatgagatggctggctgttacgatggcatgtcatgggacttactgtggttaaaagtgagagagttat

SEQ ID NO: 849440 - DNA, 559 bp, Homo sapiens
gtataataattctgggtttatgtcttatatgtacagtgtaaagaaaaaataaaagmcaagttcagatgtgccttgatttttaaaaactttatagataaaaatttaaaatcagtaaaattggtattttatttcattaaaagtcttctatttataaatgattttcctagtgtttcccattactatatgtcattgtctttatctcagagatgcctgcttcaattttacattatattttaaaataataaaggcaacttgatctttactttacctaccatgaatagattgttgatttgtctgatagtcataaaatgtgatttggtttaaatatttacctctgaaatttgaggacgatctttcttaagtttggtgaattgtagctggatttagagtatctgaattttcatttcctaacttatttaaattttatttttattttgtccagattaaagtcttattgttatcttggtaaagtagtgctctggttttgaaatttgatttttttgagggaaaataaaagccaggcagttggggagtgtttttagaattccaagtcatcctg

SEQ ID NO: 849441 - DNA, 559 bp, Homo sapiens
gtataataattctgggtttatgtcttatatgtacagtgtaaagaaaaaataaaagccaagttcagatgtgccttgatttttaaaaactttatagataaaaatttaaaatcagtaaaattggtattttatttcattaaaagtcttctatttataaatgattttcctagtgtttcccattactatatgtcattgtctttatctcagagatgcctgcttcaattttacattatattttaaaataataaaggcaacttgatctttactttacctaccatgaatagattgttgatttgtctgatagtcataaaatgtgatttggtttaaatatttacctctgaaatttgaggacgatctttcttaagtttggtgaattgtagctggatttagagtatctgaattttcatttcctaacttatttaaattttatttttattttgtccagattaaagtcttattgttatcttggtaaagtagtgctytggttttgaaatttgatttttttgagggaaaataaaagccaggcagttggggagtgtttttagaattccaagtcatcctg

SEQ ID NO: 849442 - DNA, 640 bp, Homo sapiens
gcctcagtgtctgaacacagggtaagggctcaaacagtagctgytattataaccccccaacactgatggcaagtttggccatgtgccttgtgttggtccataaaatggaatggagatcagcaagtagttcaccaggataccagcaacattctatttaggggctgggtctcaggtgaagactatgtggcgcacagccacagcaaacctgtgaaggacgtgcagtatgagcaataaaccttttggtaaactacagagattaagaagctgtttgttaccacaaaataatcttgcctattctgactgataagacttaactacttagtaaatggtcttgctatccacttacattttcaaagaaaatcctggggaaatttttatcccctctcttagttttgttctatgacttgttcaccaattttacctccttaatatttctcaaatcgtgtatcattaacatgaccttaattcaggtttttttaatctgatattacaatattttccttccctagcttcactctccttaaacattttaatctgcattaataacatcaataaattttattttaaatgcctcaaatgcctgatcataagtgcttaaatagttcttattaaatttatttaaaaactcaacttttcttaa

SEQ ID NO: 849443 - DNA, 608 bp, Homo sapiens
cagtttaccttttatttctttttttttattttgtcttggtgcatgaggtaggatttcttgtatgatgctgaaaatgagtggtgaaagggaacatccttgccttgttcctgatcttagtggaaagcttctagtttccatcattaagtatgatatcaactctagagttttggttttgttgtggttgttgtagaaattctttaccaagtagaggaaattcctttccattcctagtttactgagaggtttttgttgttgttgttgtttaatcatgaatgggtgttagatttttcaaatgctttttgtgcacttactgctatatgtgatttttttcccctttagcccactgatgtgacatattacattaactgaatttcaaaggctgaaccagccttgtgtatgtgggataaatcccattttgtcacagtgtgtgatttttttaatatacattgttggattcaatttgctaatattttgttgagaatttttgtatctttgttcatgagagatattggtctatagtttcyttgtaaagtctttggtttaggcattagggtgatttctggcctcacagaatgagttagaaagtattttctctgctatattctgga

SEQ ID NO: 849444 - DNA, 639 bp, Homo sapiens
gagtaaacctctagacctactctgattggactttattttcatgatctaattggttgtcctcaggcttgctctcatccaatcagaacatgtagtccagaaacctcatttgcataacatctgtatataaatgatgctgaaatcagcccatttaaggctcttctgtgtcttcctgaccagctgctctgttcccagcttagaggaccagagggagaagccacctgctacacgctggatgctgcagcctgtgccactgtggctcacatcgctgtggttggtggcagcaacggagactgcagccagctggagtggtaggaggaaggaaatagttttggggtagatggaggagtaaagagggtggtgagtgccaaagggaaaagtggatggcggggcgagcagaagaaggagttgcaaaaagatggtggggaaaagatggtggaaaaaagtgggtagatggaggcggaaaaacagggagacaaacaggagggggagaaggtttgcaaagatggtggggaaaaacactgtgggaagaaaagaaaggcagtggggaaaaasattgtgggtagatggagggcaagaaagagggtggcaagtgggaggagaagagagggtgctgagagggagggggaagagagggtggtg

SEQ ID NO: 849445 - DNA, 607 bp, Homo sapiens
ttattttaacagctcttttttttgtttgtttgagacagagtctcgctctatcgcccaggctagagtgcagtggtgcgatcttggctcactgcaacctcygccacctgggttcaagtgattctcctgcctcagcctcccgagtagctgggattacaggcacgtgccaccacttccagctaatttttgtatttttagtagagatggggtttccccatgttggccaggctggtctcaaactcctgacctcaggtgattcacccaccttggcctcccaaagtgctgggattacaggcttgagccgccgcacccagcattaacatctttttttttaaaaaataagtaaaaggagtatactctaaagcaatgatgaatagtattataaacacataaaccagtacatagttgtgtatcattatcaaagtattatgtactgtacaaattgtgagtgctatacttttatatgcctggctgcacagaagatttgtttacaccagtatcaccacatacacacaaataatgtattatgccacaacattgcgacagctgtgacatcagtaggcaataggaatttttcagctctgttataagctatgggaccactgtggta

SEQ ID NO: 849446 - DNA, 571 bp, Homo sapiens
aaagagaatagaggttaacatcccatagtgccaaacccattcttagccaacagggattttactgagaagggttttatggaatggggcctctaaccctcctaagttggctctaatccaaggtcrgtcaagcatccttgccttttattaagagaggcctctaacccactctgtcttaggagagactctaactctcctaagttggacctctaacccaattccattcttttcccaagtaccccaccacttacccaaagttgtctaatcagttctgcagtctatttcctttggatggggggggtttcctcagtatcatcccttacgtggttcatcagaaggatgttattggaccccaccacttatccaaagttagctgttgggtcggtggggggttccgcactatagttgcttctgtggtagccagaaagatgttacaaggaaaggggtaccaatccagaccccagagagagttcttggatctcgagcaagaaagaattcagggtgagtctgtagaataaagtgaacgcaagtgtattaggaaaataaaggaataaaagaatggctactccataga

SEQ ID NO: 849447 - DNA, 610 bp, Homo sapiens
acacaaggactgccaacagcagttaggatgctttgcgtgcaaataaaataaagcttgaaatcaaacaggttaaagcaagatgaaaataaccacaatacatwgctatgcccctgttttttttcagctgtttattacatgctgttttgtaacctgctattttgctttaaaatcccatgattttcctccaatcataagtatttttctacatcagtttttatggctagatggtattctgctcagtgttcttgaaggtctttgggagagttcagtaagtagcacccatcttccccacccaaatcgagaaatagcaggtggagaaccaaaatatcacccttatttctaatgaaggcagaatcggaaggcatagcttgcagcaagagacgaagtgggcttgtggaatctgttctttgttagactgttgagaagtgggataaacccacctaaaggaaagcttagccctgtggggccagacagctcaccagtccccacctaacactggccttggccagaggaatgaagacagggagcaacttgtccaagcagaggacctttgaccatctccacccaatgtgtgtgacctaccaactgaggtaaagctggcccctgctct

SEQ ID NO: 849448 - DNA, 532 bp, Homo sapiens
tcacaacataatgtggtagatgggatcctagagcacaaaaatgccattaggtaaaaactaaggaaatctgaataaagtacagactttagttaatawtaatttttcaatattgggtcagatgtaccatactaacataagatattaataatgggtaaaccggatatgagatatactggaactctctgtactactgttgcagtttctctgtaaacctaaaactcttctaaaaataaaatttattaaaacaaaactaaactaaagatacattctatacagaggaacaaaaataagaacaaacttctcgtgggaaatcatgtaagccaggagaaaatggagtgacatcattaagattttttaaaaactgtcagccagagttctgtacccaggaaaacatcttttaaaactaaaggtgaaataaaatctttctcgaaaagaaaaatggagaattaattggtaataggcctgcattataagaaatgtttgagaaggctatccaggtagaagtaatatagcaccagagagaaagttggat

SEQ ID NO: 849449 - DNA, 634 bp, Homo sapiens
tgaaataatacaaagagatcctatggactctttcccaaattattccctaatggaaataacttacaaaactacgatacaatatatacccaggatactgasattgatacagtcaagatgcagaatattcccatcatcataggctcccccgtggtgcccttttatagccactcccactcccttcctgcccccactccctgagtaatccctggcaatcactaatctggtcttcatttcaataatgttgtcatttcaagaatgttatgtacatggactcatacagtatgcaatcttttagattggctttttatactccatataattccctgaggatccatccaagttgttgtgtgtatcaatagttcgttcctttttattgctgaataatagtccctggtatgccatgtaccacagtttaatcattcacccattgaagggcatctaggttgcttccaatttggggttattacatataaagctgttgtgaacattcatgtatatgtttttgtgtaagtatgagtttttctttctctcagaggatgcccaagagctcaattgctggattgtatggcagtgcatatttagttttcttaagaagctaccaaaatgttttccagagcagctataccattttaca

SEQ ID NO: 849450 - DNA, 636 bp, Homo sapiens
ggtggaatgattcggaagctgcaggggcagaagggcaagggatgggagcctggaacagcggaccaggatttgagaatacattttttaaaagcaattgaaagyttctgagaaggggaatgacccagtcaaagcccacattgagaatggtggtgggcagatggaaggcggagagagggggagcagggatgaaggcactgcatctcctggggtgaagacagccagtggcagtgggacttgtaagaaggggacagctgtgaaggtattgaaggaagtagaatccaccagatcaacagccaacgtgagaggtaaagagaagggacagaggccaaggatctttttgtgcctgtctaacagggaggataactactaaagtagcctctaaatacatttaagaaattagtaaattaattaataaattactaaattagcctctaaattggctctttttaatcactggcagcgttgtttctcagaatgttttgacctgtgggcaatttaagtggacccaagaccctatttaatctctatactcttgcttattacaaaaaaaaaaaaaaaaaaaaagaatgaagctgtatttatgagacaatgaaatacataaaattctaaaagtaactcgtgtcaaaagcaaaagac

SEQ ID NO: 849451 - DNA, 594 bp, Homo sapiens
gccacacggtggtaagtgcctggaagtaaagggayagtgatgagatcaatctgtccttgtagatagggaagtcagggcagcctctacaaggagatgacttctaaccagagaccagaatgaaatgagggattgagccatacttgggggaagaaggttccaggctggagatcagcaagtgcaaaggtgctgaagtggagcctgccaggggtttcaggcagagcaagtaggccagtgtgggaagcagtttggccggtcgtgaaattgagagcacttgctctgtttcaggcaggcaggtaggttctactcatctccaggactgctgtcctatacagaagcaggactaatgtttaccaaatctttaacattttttcaagagaaactggggaattttgacttccgtgtgaaatctcttaatgttttcatcttggctcaaatttttaaaaaattttgtaagccaaaataaacacatttgcaagccaaatctagtctacagacaccaatttgtgaactctgctctaaataaatagaaaaaaattaatgtgtttaaatgtcagatcttttcaccctatctttagccatctttttttttttttt

SEQ ID NO: 849452 - DNA, 642 bp, Homo sapiens
cctactatataccagttactgaaattcatctcatacttggctacaaatgtcactgttttcttcttctgatcttgttccctgttgagtctggkacatcccagaccacaaaaagcaaataccaggagtattttggggagacatggccagctgacttcacaattacttagtctgctccaggctctcccaaagtcaaggtctgcttgaattttgccagggcttttgttccatgtcctaactttgacctctctttcaacatctttctgcatgtaggttgcacatagcatcatctcctacctagaagcatcctctagctataagcaagtctctctaagcctattttcacaaaagaggctttcatgcttaccttattccctggaagccaagccatcatccatcactgtgctacagggtggtctctagagctatcacatcctccactttactgcttctctgatttctgctcccagaccctgggaaatccctctcagtcttacgggtgagatgaaattttaaaacatcagctctcagttggacccttgtgggtaaaagccacctcccttcaatccacactcaacactttcccattccccattgcaatttttctttgtttacttttttattatgtgtgcagatgtcatcctc

SEQ ID NO: 849453 - DNA, 693 bp, Homo sapiens
actttggatcctaggtgacatagcagttgctgtgtggaattttaccagtcattctgacygcaggaaagacagagctctggctggtcttaacgggcaattaaatgctctggcttggaagtgacagagtgttacaactcgctggccaggacaatttacttggccctatctaaccacaagagagccagaaattgcaatgctgccatgtgaccagaaatgaagagaactggaaagatctggcaaacagcattgtgagcctcctaatcatttgtgtgcatttgccatcaccccttatgttagcatatctttattcagaaggtcggagaatcacaaatgtgtcaaacaatgtcagttactaccatgatcatttattttagatcccattcttcctccataactacttttttccacacccacgttactcaaatacaaaaaccagtatctctaagcatttttctgaaattcaccttaacttctttgaacctcaatttgtttcagtaacaacaacaaaaaaggctcagactacagtgtctctgataaattttaaaattttatgattacattgtgaagttattaaattgtggcatttatagtattcagttatgtaggtatttataatgtgtgtttagcacattttaaaaacatgctgtagttactcagtatttagaacaaacaatataaattgaaataatgaga

SEQ ID NO: 849454 - DNA, 607 bp, Homo sapiens
agaattgatggcactaataacttcttgagggtgattctagctgagtgtttcctgcttgtttcttataaatgtatttggtacaggatcagtgtagttatatttccctgaagctatttcttacacacgatggcttcagcaggtttgaggccaaaatgccataggaatgcacatgccttcctcagattttgcctctccattttgaatgtatgcaagtcttgaaaatcctcgttattgggacccttctgacccctgaccacagccttgtggtctgacagacgctgtagcctcatggaacagggcattttctccacctgtggacttgttttctgtattcctaaagggaagaaaataaagaatcctcaagatctcttccttgttcaaaaatatgggccaaataatagtacaacattccctccccagcctcctgggtctttaatagttgccctcacctccctcatctaaattagtcattaaagactagagcattatctccaagaagcctatatgaaaggcacagcatttaactggcatgaaggccattttrtctctctcctaggtattgattagtttctcagattagatcacggtcacggagtcagatgctgaa

SEQ ID NO: 849455 - DNA, 584 bp, Homo sapiens
tttagaggagctaaaatcagtgacttcatttttgaagagaatgactgtcatgggtaattgacagaattactgcatcttagccatagaagcattggaaattgtgcagaagctaaatggtttttgccactcaatatagttaaactctggaatgactttcgggggatacgtgatgaaagtagcgtgtttttctttaaccctggctactgaactggaattatggagggtcactggcattttttcaaagctctgtaggcaatttggataaacaaccagagctaaaactctggattagagagttagaccgacttttgaagtgtaacagggactagggttgtcaccttccacatgaaatcatgagcttttgggggctaaaagcccaaaggtagtaattgttaaaattatattttaaaatttttacctaattcttttaggtattacccaataaattcacaatagagtgtgaaggaagaaatagaagctgcagtgaaccatggtagttccttaaatctgaccccctgtccgattaactgagaacaatcmcacttgtcccaacataattatagccacctccctttcactttcaa

SEQ ID NO: 849456 - DNA, 533 bp, Homo sapiens
aggtatttgtcctaatgttctctctcccctttccccacccccaacccccaagaggtcccggtgtgtgttgttcctctccgtgtccctatgttctcattgttcagttcccacttgtaagtgagaacatgcggtgtttggttttctgttcctgtgttagtttgctgagaatgatggcttccagcttcattgatgtccctgcaaaggacatgatcttattcttttttatggctgcatagtattccatggtgtatatgtgtggctgtggctatgtgtgtgtgtgtatgtatatgtatagttgtacatatctgtgtaggtggttgtgcacacacacacacacaaattattcagtctctctggatctcataacactcctcccaaagctctacatatttatttttaatgctggtattcatggaggtatcatgaaataaaatacacatgttgtagcrtgcagtcccatgagatacgaacatgcagacacctgtgacgccactcctgccagtcaagatccagagctttttcctcttcccaga

SEQ ID NO: 849457 - DNA, 457 bp, Homo sapiens
ggaggcggaggttgcagtgatcagagatggtgtcactgcactccagcgtgagcaactgagtgagactctgtctcaaaaacaaaaaaaaaggagacagtgaagcgttctctctcttcctctggatgtgcacatgcaccagggaatggccacgtgaggacacaatgcgaaggaggctgtttgcaaaccaggaagggggatctcaccagaacctggccgtgctggcaccctgatcttggattttcaacctccagaactgttggaacataacttgatgtttaagccaccggtgcatggtattttgttgtggctgcccaaatagatgcatccattggctcttttttattttcaatccrttgcattgccagaccccactaggatccatttatttattctcctgttcacaggcatttggattatttccagtttggggctatcatgaaaaaaatcctgttatgag

SEQ ID NO: 849458 - DNA, 671 bp, Homo sapiens
cacttttgagggatccttttcaggctctgactccaaatgttgaggtatccagattcagtccttggtctcttctctttgctaaagacacttactccttggtgatctcatcccatctttgtatcttcagctagactttccccagggtcacatacacaactgcctgctcaacctcacccctgggatatcttaaccttaactcactcaaggtaacttactccggagaaaccaacaacacctgctcccgcatctcagccagtgcacacttcactcttctggctacttgctccttctctcacgaccacttctgatctgtcagtacatcctattggcaccaccttaaaaatacaaccagaaaatccattagaaaggaaacattcccagaaatcccatccctgttagttcacagttaacactggtaccaactccccctaaataaagtttgtatagataatcattgacacaaatgggctcaggagacacatacaggggccttgacgtctcagtaagattcaggcttttgtttattctctttgtgctgggggcagggtattccattcctgagtagttattttttccctttttwaaaaaattttcttgcttctagaggtgaaaacctgagtgtttttattcctttttcactcctcacaatgtcaaccctggacacacactag

SEQ ID NO: 849459 - DNA, 627 bp, Homo sapiens
ttaaacattaaataattttaacaacaggtaactatytctatttttagtggattacacgtctatttctcttcaacaagggttcatccttgttttaaaaaacagttgccttatatggcaatttttcatttacatttttaacccattaaattagtgtactctaagaagttaatttgtcattttgataacctaaaatatctctgaaagacaaattgaacatattaaatataatttaaagataacttcaaaattgtcttttttttctaccactatccataaattttaataccattttcttctttatgaatacaattttttttggcttaaacatttttggattatctgattatatgaggagtctattttgcaattactttgtttcttctttaaaatgatttttgtgtattataaaacctgtttctatacttttttgtttgtgtttgagtttgtttttgtttatgttttgagatggagtctcacgctgttgcccaggctatagtgcagtggtgcgatctcggctcactgtaacgcccgcctcccaagttgaagcaattctcctgcctcagcctcctgagtagccgggactacaggcgggtgccaccacacctggctaatttttttttttttttt

SEQ ID NO: 849460 - DNA, 608 bp, Homo sapiens
tgcagaagtaatacagggaggtaatacaggaaagaaaacatttaatagtgttccctgtgctttcatgtttcttacatcatctgaattagtttcctagggctgatgtaataaagtaccacaaactatgtggcttaagcagcagcaacacattgtctcatagttctggaggtcaggattttaaccttacctctaaataagttaacattctcaggtactggaagttaatacttcaacatattttttgaacaacacaatccatgatgttattgctattctgtcagcaaagcaaattctggcttgaacacgatgattcaggggcatcaacacctgtgcttactgagtagcagacataacatgctttccttgtcctcactgctttgggcctccttaagctcccacacattaccaatccacaaaattttgttttcgtgactcatcatgaacactacatataaatgcactattgagaattgtggtggactcagatactgtgcatatctcctatgcttacttgtaygttgtactgtctcatcggacttcagttacaaaacacaagttccaagagaaaattattaagaattttgtggcatcatggtttcagataatca

SEQ ID NO: 849461 - DNA, 628 bp, Homo sapiens
gcaatttctttggtgtactttccatttgcagagaatatctgcaatccctaggaacaaacataaggattatcattgaatccctatgaacaagcaccctaagaatgtcataagcttatttaaaatatttgattctgcctcaatgcaatcatgctgaaattagaccaaataaattaaaaataagtatattcatcaatattcgaaagacactaatttattcatctttactcaggcagattcaatatttatttaacatctactttgtgcaagcacatgacagcattgaatgaatcggcctttgatgaggatcgatcagccttcaggcccagatgagaaaagtctcagtatatcatgtttagatgtccctaaatctaatcccgtttatatttggcattttctggtcacttattaaatactgtagtcagtactctgtttctattatctttattattccactcttactatgtttctgttaaaagtgggaaatgtaaaatacaaaatataaatataaaatgattttaatatctaatctgtagattctgacartttctcacagtagtttttgttttcatcctcaaggctataggaaatcactacatccatgaacctactttattctaaacataattct

SEQ ID NO: 849462 - DNA, 655 bp, Homo sapiens
tgcaacaccctattaaagagcctaatataaaattatttggtagcacgatataacaaaactgtaaaaaatattttttcttcacaatawgtagtgataaatgtactagaagtgttaagtctatttaagaagacaatagtttatgagaacaagtaaagacaatgtgtggaaccatacaaagaagataatgtattgccacagatctaggaaactatgtattaataatgaaactgttactttctattgagatctttcaatgtatcagtctttgtattgtatcaggttccctgtcatttacttttcacaatgattggcgaagcaagcacaagtataatttgcattttacaagtgaaaaactactaaaatttaagtaacttgctcaatgtagaaaagctaagactggaattaaaaactgaatcttgtaactccagataaacaagattcatacaacagtgttgcccaaagcaaaatatttacctccaatctttgcactatgtttaaaataattacctgaatggatgctatacagctataagatttaattcattattatttacttatttttatacattatcattgatgtactctggactccattggctaaattatctggtctatttatgcctgcaaaaatctaaattttctaattcataaatgg

SEQ ID NO: 849463 - DNA, 655 bp, Homo sapiens
gcagttccaatttctcatactacttgtgtcttgtgatggggagagctgtttgttggcttgatgaagggagaaacccctcttaccgataaggattgttaattctcttaattttattcattaactgaaaatgtgccagttaagagaaatcagtgagactaaaaatagcccatcagttctttagagattcagggaaacaaatttccaggcaccagatgcttcatttggaaattattttatttaatgagaatatcaatgtcttctgagtcacgggggtagtttggttagtgtggaccataatcatatatcaaccttacatgaaaccagttgtgatgttaatattgagtgtcaacttgattggattgaaggatgcaaagtattgttcctaggtgtgtctgagagagtgttgccaaacattaacatttgagtcagtggactgggagaggcagacccaccctcaatctgggtgggcaccatctaatcggctgccagcaaggctagaaaaaagcaggcagaaggatgtggaatgaacaacytgctgagtcttctggccttcatgtttctcccatgcaggatgcttccttccctcgaacatcggactccaagttctttggtttttggactcttagacttacaccagtggtttgccaggggctct

SEQ ID NO: 849464 - DNA, 413 bp, Homo sapiens
gagaatcttctgagggagcatagcctttgacccttggattttggacctctggcctccacaactgtaagaatataaatttctgttgctctaagccatccagtttatgatactggttatagcagccttgggaagcgagcacagccacctctaacaaatgttagataatgtattttgtcttgagattggcggttacaccagcaaaatactacagtctcctccaacactaagagttgtttctgtgaatgtgtattcaatttttttcatgatcttaggtaatgagatctccctatttgckcaaaaataaactataacaacccccaaatccctaacaagtacgatgattttctaccagtgaaactagtcagcttaaatgccatccgatttttcccacggaagatttaatagaagagatt

SEQ ID NO: 849465 - DNA, 612 bp, Homo sapiens
gaactcctgataagaagtcaagtcaagatgctaactggaattttacctttttacaatatctgtgaaggtggtaattagcacttacttgatccagggtgggctggtaattaaaagaaggaagaatatgggcagaaagcccaacagaacacagaagactgattttcaacctttattttttttaagcagcagatttccaatgaagcctcatgtagaaggtcaatataaaaatcagatcttaaggtataaaggttaaacagagcttctctaaattaggcagagctggtatccctccaactttctcccctcagggactgttgtggaagtaacactatagaacttattattttaattctatgcaataatgcattttgtttatgtaataatgtatttgtaacaatgcatttatatatgtaataatatatatgtaataatgcatttaatagtttgcaaagctctgtcatttcatcacatcacttgattttkataacaattctatgagctaagcagactagatattactattattattgccactttgcaaatgacttgcataagatcatctggcttataaatgacagatctgggatccaaaatcaagtctttaaagatctt

SEQ ID NO: 849466 - DNA, 322 bp, Homo sapiens
gtcttaatcacacattccttgttycacttgtaaagttttaaaaaatgtgttcattggctgggcgtggtggctcatgcctttaatcccagcaccttgggaggctgaggtgggctgatcacaaagtcaggagttcgagaccagcccggccaatatggtgaaattccatctctactaaaaatacaaaaattagcgtggtggcgggcacctgtagtcccagctactcaggaggcttaggcaggagaatcacttgaacccgggaggcagagattgagcaaatatcgcaccactgcactccagcctgggtgacacagtgagtgagacc

SEQ ID NO: 849467 - DNA, 322 bp, Homo sapiens
gtcttaatcacacattccttgtttcacttgtaaagttttaaaaaatgtgttcattggctgggcgtggtggctcatgcctttaatcccagcaccttgggaggctraggtgggctgatcacaaagtcaggagttcgagaccagcccggccaatatggtgaaattccatctctactaaaaatacaaaaattagcgtggtggcgggcacctgtagtcccagctactcaggaggcttaggcaggagaatcacttgaacccgggaggcagagattgagcaaatatcgcaccactgcactccagcctgggtgacacagtgagtgagacc

SEQ ID NO: 849468 - DNA, 630 bp, Homo sapiens; identical to SEQ ID NO: 847009

SEQ ID NO: 849469 - DNA, 589 bp, Homo sapiens
ttgcctgacagctgcctcaggggaggccatcactgttgcctcaggcagcgcagggtttatctcctcagacaaaggtggagaagctgatggcagcatgagtcgggtgagggrggaatgttgccactactgacgatagggaagctgtttcttctggcaaaaagggttcatcagagtttacaaactcagtgtccccagcttcatcatggtcctcccatacattcccattccaagttgcagcgtcccattcttttccaatcaatgccctcattttatcagtagacacctggcaaggctgtgcatgcaccttttgttgcaggtcagccactcacatgataagagtttatgtctgtttttccacaatttcagctctttctctgcaagagataagactctcactcagggcagtcttaacagagttgaagctcagtatctgcttctgaagccaggagacagaatcactgaattcataattttctttaatcactttgtccattgaacttaggagcaaccaaccagcttcattatattccttggttctccatatatggtcaaaggtattatgtatagagtcactaaactcattgcccct

SEQ ID NO: 849470 - DNA, 589 bp, Homo sapiens
ttgcctgacagctgcctcaggggaggccatcactgttgcctcaggcagcgcagggtttatctcctcagacaaaggtggagaagctgatggcagcatgagtcgggtgaggggggaatgttgccactactgaygatagggaagctgtttcttctggcaaaaagggttcatcagagtttacaaactcagtgtccccagcttcatcatggtcctcccatacattcccattccaagttgcagcgtcccattcttttccaatcaatgccctcattttatcagtagacacctggcaaggctgtgcatgcaccttttgttgcaggtcagccactcacatgataagagtttatgtctgtttttccacaatttcagctctttctctgcaagagataagactctcactcagggcagtcttaacagagttgaagctcagtatctgcttctgaagccaggagacagaatcactgaattcataattttctttaatcactttgtccattgaacttaggagcaaccaaccagcttcattatattccttggttctccatatatggtcaaaggtattatgtatagagtcactaaactcattgcccct

SEQ ID NO: 849471 - DNA, 612 bp, Homo sapiens
agaacatcatcattagagcagcagaacactgttgacacagcatgtggtcactaattttgatgacagctttccagtttggcaggggaggagctggccctggagctggcttccttgttctgcaggcaccttcctgattttgtccaattcaacatctcttgtggcagtctgggcttgtagtacagggatctttccatcacgctcagtctggagactgttcttcagccccacttaaagactctgtaagtcattgaatatcctgtaaaaaaaaagtggctaaactagctacagttgactgtttcttcacctggacttccctcgatacagtaattggtacctgaggtagctggagacaatagactgtcagggaaacgggaatctgaaacgcgtctgaactggttagatttgaaggcagtaaagtttctgccagcattgaaggatgagacactggcagtccacagtatctggtggtgaaagagatacttaaattatmccctgtgcttgtgggaaataaagtgcccattgaaggaaggctttggcaggctacatgtctactgtcgagggcaagtatggcaaaaatgagaagcacaatgactatggagtatgtctggctgt

SEQ ID NO: 849472 - DNA, 601 bp, Homo sapiens
tcatgatactgagtgagttctcatgagatctgatggtcttataagcagctcttctccctttactcatttgctgtctctctctctcacctgctaccatgtaagacgtgcctttgctcctctctcaccttcctccgcaattgtaagtttcctgaggcttctccaacagtgtgaaattctgagtcaattaaacctcttttctttataaattacccagtctcaggtatttatttataatacagtgtgaaaacggactaacacagtagacttgcaagagtcctgcggttcacaaaaccaagaagtccagagctccagatcatgggtacgtaacaatctggactgttgagtaaaagaataatagcagtaaggctattgttctagaccaaaatctagccattacgagaacatgttgcttggagatgagattaaataactgatagaacacagaggaggaggaagggtacatcccagtttgccatgtgccatgaaaacttcggagaagtgaagatsaattacgactgatgagataatttaatgcaaagagccaggtaaaacgtctgcaagcattttaaaactgtgtatgcgggacaccaaagaagaaata

SEQ ID NO: 849473 - DNA, 625 bp, Homo sapiens
accaggataatacagcaattctaaatttgtatggatgaaataatatgggttcaaaatatataaagcawacactggactacaagaaggatttgacaaattaacaattacagtggaagacttaacatatctttcttagaaatagaacagttgctaatcattaaggttttcatctctttcttgtagcaatttcctgaaaacagaaagttaagtctactacacacaaatattctgaaaatttggtagcatttgctctaacattccaacctcagctggcacattgtctataccccagatctagcatgcaactacctgcctatagtgtctatcaagagtcactggcttcccaggctgtaaatgactgggcccttttttccttgtagtgctcctggcattgactttcgttttggttttggttctcagatgagaacaacagtagctggctctgattaattaaattaaaaggagtttatttggagagtattgagttgcacacattattgaggcaagggttagagaaccaggcccaaagctaagcatttaggaacaatgtaccaaaccatgcaaaagtggtctgataatattgatgccacagtgaacatcctatttgctggaacttttctttatt

SEQ ID NO: 849474 - DNA, 582 bp, Homo sapiens
ggaactgagttcagtactgatccaaggatgctggcatcaaagcccttacacggaactatccctaaaggttccgtatttccgtaatataccaycaatcactctaaatttataataccctgtctttaacttggtatataccatcttttgggaaaaaaattattaatattttgagatgagatacaagaataaagtcattcttgaggttccacctctaatatgaaaaaatggacgctgtttgcacatagcagctagtttgatacctcctgttctgttaggctagccttcacacaatgagcatgcatatacagccacagttcactgcatctgttttgaagttgcaaagtgctgctcattcaagtcacagatgctaccatgttatgcaatgaaacagtaaaattgtatgtccaccatgagaaaaggaaaataaacaatgaaaaaaatgcagcaaatataggcagttggcattcagaacacgccaaaaagctaacactcatgaatcgtcattataaggttttcctttccttaaaaaaaaagtctttctttgcatatttcaaaatgtaacggtcccagagaatcatgaag

SEQ ID NO: 849475 - DNA, 682 bp, Homo sapiens
ccaactacactaaaaaggaaatcagtattttgtttcccctttcccatattaggtttggttatagagtacttcagaaagtactgagtgacactgtaaatccagtggaaagggcaactgactcacaagtgagaagtctcatattcaattcccagctttaccatttacttaggcatgcggcttctggcaagtcaaactctatgactgcttgtcaatatctgtacaatgggatatcatttgccctgtcaacccaggattagttggtcaccaactgaattctataggagaccatgatcagtctttaaagaactgctaagcttactatagaaaacagttaaatactggaaaacatgaatgtgttttcattttagaactggaaaagaccttaaatgatcttgttcagtcagtttacatgagtaaccacaggcccagaaaaatgtggtgacttcctcaaagttacaaaaatatattatggcagaatcagtacagcatctaaattttctttttcagtccagaacactttccactatactaccctgtgtaacacttcttgcaacccatcccctcttttattccaacattctctacagccagttctagatggtaaacactaaatgaygtttaaaaagtacctaggcagatttctgaggctgagaccttacctaatttgactgaattgaattga

SEQ ID NO: 849476 - DNA, 352 bp, Homo sapiens
tatctactatcatatataatatataataaatgtaacaaaattaataatatattaatactttctaagtaaaaactataacaaaacaagtccaagatctctacactaaaaactacaaaacattgctgagggaaattagaaaagatctaactaaatggagaaaattcctatgttcatagattggaaaattcaacattgttaagatgtcaattttccccaacttgggtctatacatttaaggcaatcccaatcaaaatcccaatagacattttttttttggtaaaaattaacaagctgatattaaaakttttgcagaaattgctaaataattttttaaaaagaacaaaattggagg

SEQ ID NO: 849477 - DNA, 623 bp, Homo sapiens
ataaacagagtcaaggtgggtagggggaccttgtgagaggtgtccagccctttagaagattctattagcatgtgttggcttgttaaatgatctacccattgagattggtggcctggtccaaggctttgcttctgataccacttaatctcttttaatatttgaactctatactattaacatagatttctttgggaactgtatgcattttccaccacagggaatcaaatccagcatataaagatggcaagaatctcagtaattacctaaattcatgaagaagccaaagtaaaaatatttcttctcttgggaataataaaataaaataaaataaaataaaataaaatagatgagagctgaatagctcttctccttaccccacactcacaaatctcctaaaactcaaaattaatgttacaatacacattagcagatagcatttttatcgataagtgttaaattaaggagttaacactgagaaattgaaactgattaagaaaatggaaaaggccacagtatttgaatgtcacatatgcatacttatattgtacygtagatactgaaataagatcattgttactggtgcagcctgtggtcaaatgcattttttttcttttttttttttt

SEQ ID NO: 849478 - DNA, 529 bp, Homo sapiens
tacaatgccgcagtttctttcctctcttctttttataaaggggactacagttatctgttttcacagtgtttctgttggtcacacctcaggaagctaggcagatgttacttacaggaaacctggttaaaatggrcacaagttatatactctgccttttcaaaactcagactgaccacatattttggcaagtttcaactggttactagatttctggctgttcagatactgtacatctcctaagggcaatgttgaaaatgctgaaaatcattcaacagttagagccccacataagatgatatttcagcactgagatatttcttaattatatgtgtttccactgtatgtgtaaatagggaataaaagttgctgaaatgccattaacaatagctgtggaaattttgctgttctgaaactatatgcacagaaagagagtggaacatttcatggtcaataggcaatcaggctatttcctgacacacagagctgacttgaaggtcatataattcatattactgtcagacttctaaaa

SEQ ID NO: 849479 - DNA, 529 bp, Homo sapiens
tacaatgccgcagtttctttcctctcttctttttataaaggggactacagttatctgttttcacagtgtttctgttggtcacacctcaggaagctaggcagatgttacttacaggaaacctggttaaaatgggcacaagttatatactctgccttttcaaaactcagactgaccacatattttggcaagtttcaactggttactagatttctggctgttcagatactgtacatctcctaagggcaatgttgaaaatgctgaaaatcattcaacagttagagccccacataagatgatatttcagcactgagatatttcttaattatatgtgtttccactgtatgtgtaaatagggaataaaagttgctgaaatgccattaacaatagctgtggaaattttgctgttctgaaactatatgcacagaaagagagtggaacatttcatggtcaataggcaaycaggctatttcctgacacacagagctgacttgaaggtcatataattcatattactgtcagacttctaaaa

SEQ ID NO: 849480 - DNA, 587 bp, Homo sapiens
ccttttagtcctcggataccttatgttgaatagccagatcattttattattgcaaatgccatggctgtaatcttttattgcctgcagtacaggcctacagcattaagttagtataaaattacatatagtttaatatatctgtacaacacctttaaacaagcttctctaggcaagaaggttatccgtcttataaatctattattccattgtacatcttgatagcctagcattgctcctagccatgtttaagcattaaatagtgcattattatttcacataaatcaaccagagatgtgtgaattcataaattttgcatttgcacagacagtattttaaacgttttactgcttcgtgggaactcagagcaccagcctgtacacaaatcaggacctgagaaatttcaataaaatttaatatcacaattacatcttctcaaagtcaaagcaggcatgttttggaagtattttaactgagtccaaaaatgaaagtaaatgtkaagagtggcttttttgttggcatttagtcagctattgttataacaagctaataaaaactttacttttaaaattctttatagccaaatggta

SEQ ID NO: 849481 - DNA, 626 bp, Homo sapiens
tttagtatgcatagccaaattgccttccagaaaggctggtrcaattatttccatggtagtgtagaagaccatctgtaataaatccagtttttgagcctaaattacagagataatggggggcgaggggagaatttcagattctaaaatatgaccttgaatagttattgacaaaactgaaatctacttaaagattcttatttgatgatggaatttgagccatgtgactggaaatctataaaatttctgtcttcctatttggttttaaattaataatgacattgtttccctatgatatcattgtgcaatgatcatgaaaatgtattgtcagcttcaaggtttatgggtaatgtgtagttttcaaaatttgtatagagagttaaaaaaatgaatgtacatagtaaagagacaatatagtgactgtaaaacttaaaatttgaatttggggcaaattattgaaattaacaatcatctttgagactgtgtctagacacacaaaagatagtagaaataaatgcaaaaacaaaagggtgtcaagataaatgagaacaatgtctttaactcagtatgattaaatctagtctcaaatgttccaaagctatttttaagcaattgttttaaatttgcaa

SEQ ID NO: 849482 - DNA, 609 bp, Homo sapiens
ttactcattgctttccttaatggattttggcttctcttgactttctggattttcttactttggatgacctctgatgggcagacccctcttccccaaatgctccgtctcaccctgctatggctccttggaagacatggccctggcagtcattgctgggacagccttggctataccatccttgagttggggcagatatttggaaaattaaagtatatagtttcttaaagggttcacataattattgaaatttcctagtaaatcatcacatatttatggtaattttcttctgtgcaaattgggcaaaaaaattaataaaaggcacccttcctatctctcaaacatgtaaatctatgggtataatgaggtgcaactttgatctaatgaattcatgttttacttgaatcactaaatggagatgtagtattttataatgcaattatcctgagagtagatatacacattgcaatgatgcaaccattcttccaactgtatatagaattcctctttttggagaaacgggagtaggcgtggtaaactttgtgaaatgtgagctctattccctactgttgcctctttctcttrtaattatgctgacttgtgtgctgctgc

SEQ ID NO: 849483 - DNA, 568 bp, Homo sapiens
tctgttggtgttctcctgtttactgtattgaactctaagttgtttgaaggcctatctaaaccagtcagtgcmtagtcactgaaagccagagctatgatgggtacagcaggaattactgacaaatattaaagtgccatgtctgctcttaagaagctgatagttttctgaattaaaaactaattatacacccgggcatggtggctcatgcctgtagtcccagcactttgggaggctgaggtgggcgggtcacttgaggtcaggagttcaaaaccagcctggccaacatggcgaaactttgtgtctactaaaattacaaaaattagccaggtgtggtggtgtgccgctgtaatcccagctacttgggaggctgaggcatgagaattgctcaacccgggaagtggaggttgcagtgagctgagatcacgccactgcactccagcctgggcaacagcatgagaccctgcctcaaaataaacaaacaaaaaaactaactatacttgttttatttgagatgccagaacttttaagatatactgttaggttataacagcttccatgtaagaaaaga

SEQ ID NO: 849484 - DNA, 568 bp, Homo sapiens
tctgttggtgttctcctgtttactgtattgaactctaagttgtttgaaggcctatctaaaccagtcagtgcatagtcactgaaagccagagctatgatgggtacagcaggaattactgacaaatattaaagtgccatgtctgctcttaagaagctgatagttttctgaattaaaaactaattatacacccgggcatggtggctcatgcctgtagtcccagcactttgggaggctgaggtgggcgggtcacttgaggtcaggagttcaaaaccagcctggccaacatggcgaaactttgtgtctactaaaattacaaaaattagccaggtgtggtggtgtgccgctgtaatcccagctacttgggaggctgaggcatgagaattgctcaacccgggaagtggaggttgcagtgagctgagatcacgccactgcactccagcctgggcaacagcatgagaccctgcctcaaaayaaacaaacaaaaaaactaactatacttgttttatttgagatgccagaacttttaagatatactgttaggttataacagcttccatgtaagaaaaga

SEQ ID NO: 849485 - DNA, 593 bp, Homo sapiens
gggggagaccatataacacattgactaagagcagggactttggagccatataagtgcagttcagatcccaactttaatacttattagctctatgtccttgggcaagttatttcatctttctctgttctagctttgcttttttttttttaaagacggagtttctctctgtcacccaggctggagtgcggtggcacgatcttggctcactgcaacctctgccacccagcttcaagcagttctcctgcctcagtctcccaagtagctgggattacaggcatgtgccaccccaccctgctaattttgtatttttagtagagacagggttttaccatgttggccaagctagtcttgaactcctgacctcaggtgatccacctgctttggcctcccaaagtgctgggattacaggcatgagccaacgcgcctggcctgaaccagctttttatctttaagtggggaaaatgatactgtaatatctacctcatttgccatgacaatccaatgagctgtacgtgaaaatcacatgcccyagtatatgtgattgctcagtaagtacatagtgcatgctcaatgagtattagctatcatccatt

SEQ ID NO: 849486 - DNA, 643 bp, Homo sapiens
aagaaaacctaggcaataccattcaggacatagacatgggcaaaggcttcatgacaaaaacgccaaaaacaattgcaatagaagacaaaattgacaaatgagagctaattaaacyaaagagcttctgctcagcaaaagaaactatcatcagagtgaacaggcaacctatggaatgggagaaaatttttgcaatctatccatcagaaaaaggtctaataaatatccagaatttacaaggatcttatatatttacgagaaaaaaaaaacaaccccatcaaaaagtgggcacaagatatgaacagacacttctcaaaagaagacatttgcgcagccaacaaacatgaaaaaaagctcgacatcactgattatcagataaatgcaaattaaaaccacagtgagataccacctcacaccagtcagaatggcgattattaaaaagtcaggaaacaatagattctggtgaggttgtggagaaataggaatgcttttacactgttggtgggaatgtaaattagttcaaccattgtggaagacagtgtggcgattcctcaaggatctagaaccagaaataccatttgacccagcaatcccattactgggtatatacccaaaggaatattaatcattctaccataaagacaca

SEQ ID NO: 849487 - DNA, 592 bp, Homo sapiens
aaatctagttttatttttttttgaggatcctccactctgttttccatagyggctgtactaatttacattccaacccacagtgtactaccagtcttttcatttttctacatccttgccagcatatgttgttttttgtctttttgatagtggctatcttaacgggggtgagatgatatttcattgtggttttgatttgcatttcccttatgattaatgatgctgagtaattgtcacatacctgttgaccatttggatatcttttttttgagagatgtctattcaatcatttcaaatttttaaaatcaaattatttgtgactttttgctattgatgtcgtttgagttccttaagtattttggttgttattttcttgctggatgaataatcttcaaatattttttcctattctgtgtgttgtctcttcattctgttgattgtttcctttgttctgcagaagctctttagcttgatgtaatcccatttctatatttttgctcctgttacctgtgcttttgaggtctaaacccaaaatgtgctttcccagaccaatgtcctgaggtgtttttccaatattttcttctagtattttcat

SEQ ID NO: 849488 - DNA, 569 bp, Homo sapiens
gaggtgggaggattgcttgaggcsaggagtttgaaactagccttgataatatagtgatccgtctcttaaattttttttttttaaacttagcctggtgtaacagtgcacacctctagaatcagcttctcaggaggttaaggtgggaggatcacttgagcccaggaattcaaaactgcagtgagctatgatcacgccactgcactccagcctaggtgacagagcaggaccccatctctttttaaaaaagaaaaaaaatatgaactgttgatacaattacttggatgaatcccgagggaattatggtgagttataaaaaaagactacatattatatgattctacttatgtaacattcttgaaataacaaaattatagagatgaagaacagattagtggttgccagggggtagggagtggaggcgatggggaagggaggtggttgtgcctctaaagagttatcttaagagatgctcgtaatggaactgttctgtatgttggctattcagtgttaatgtggtcacacgagtctgcacatgtgaaataattgcctagaagtaaatacacatagac

SEQ ID NO: 849489 - DNA, 619 bp, Homo sapiens
agactgacagaaaagggcatctttagaaagaggaattttcaaaaacactttaatctcataaaaatgaacaaaatgaaattaaaatcagtaaagaaattttgcaaaaaataggaaatcttcagtaagagaaagcccttaatttgttccttaattgtcaaaaaagcttagcaaaaattacagtttttcaaaacacaattaagtgaccctttccccacaaaagtcttagttccatggtaaaaccgagaattttattataggtcagtgttgatctccatcagatgtgattagggcccacagttatgtaagacaaacatggctgttgaagagccactcctatgaataagaaagtccttattctttcttattggactggatgtggactggatggatatcttatgtttacccgaagaaagatttattatttttatgattttgatgatgttgtttctacatccttggatttagatcatacaatcaagcaagaatcatagtagccatagttttattttggtcgctatgtggttcttttggaattatgtttgaaataattatgtttgaaattataatgcagaataatygattaaggtgtttgttgtcacttctgtataatgttgggact

SEQ ID NO: 849490 - DNA, 518 bp, Homo sapiens
tggaatccatgaggccaagaaccccaggtcagagaacaagaggcttgccaccatcttggaagtggccggccaccatcttaggagctctaagaacaaggacccccagtaacaatggctcactgcagcctcagcctcccgggctcaggtgatcttctcattttaaaaagctggggagaaacctaatgataaatcacagaatagaattgttgtgtttattttattggcatgtttacatgatgcagccacatattaatttgtatttgaaaccctttagttttattttgtgaataatgtttgcttaaccaaaaataaattgccaataaagaaaagaaaagaaagaaacatgacttgtacatttgaagcactgaaaaagtcaaaccctagtgcctagggcygcagatcttcacctccactttgcagtatctcaaaatatatctactttacggtcatttaactaaaacctcctctgaaactgagctttcggtggggtagtcttttgtgaaatggtgtgtgcagtt

SEQ ID NO: 849491 - DNA, 628 bp, Homo sapiens
tgccagtttggagcaatgtcatgattcagctttaaatgcaccatcctgctgcactgctctgagtctccaacccccattctctgccctgccggggaattcattcaggcatagaagcccgagaggctgaatggctgagtcccatctgatctgtgccatgggaggtatggggctcacctccaagggagaaggttcagggtagcattgcagcgaccctggtgcaccagggaagtaaaaaggagtgtatgaaacaaaaggtctcctgtgggaagaggagcagaggggcagggtgagctccccagagcttaggcaagctcactttaggtggaaagatacctctatgccactatccatggaacaggaagggaactaacacttcactgaatgtcctttttatggcaagaaacgtgtatgtattgtctcatccaatattctcaactcctgtgtgaggatagtattttgttgttcttactatatataaagaaactggaagtcagaagttaagaagcatatctaagaatgcccagataaataagggaagagctggaatttcagatcacttcagcttgccttgcctttaaakcctacagttgactgtagatgctaactcagtgcagcccactggactgta

SEQ ID NO: 849492 - DNA, 683 bp, Homo sapiens
tctagcatgcacctgtttacrgtagagtgatgactgcttcctttcctctgaactttgagctcactttgagggaggagaatggtacggtggacacttgagttctcacttaacattcaccactgggcatgagaagagaaacaggaccatttagaaatttgatagcaggagtccatcactgaaatttccatgaggactggctacatttttcagctttggttgaaatgtgaaagaagcatgaaaacaatactcttcaagattctgggggtgagtagttatggcctttagttttgagggctgtgcaatgcaaactgaggttcttgcagccaatgtttttttctcacataaaggcagtttgcttaaattttccagccccagtttttttcccctactaatttgaaaggagcaaataaactaaatgcctgacatatagtaggaaaagtccaattttttagaatattaactttagtatgtagaactttttttttctttttccttcccatctagtttatactaaccttttctggtcttgaaatttggagttagaagatgtgtcctcagaacttcatgcctacttgtcagattagatgagaacctgtacttgtgagattttgctgggtccatttatcattcccacttgctataaggtagtcccagcatcttttagactttataatagcctagtt

SEQ ID NO: 849493 - DNA, 498 bp, Homo sapiens
caagttcttgggaagctactgsaggatgtgtgtcatcaaaacaagggaatcagcagtcctgtatctatgaagaaacaactggaaatgataggttcttgaattccaattttcttttagggtgagaaagtgggccactcagctctgctttataatattgggcttccgagaatgattagcattcaagtgagcagagatacttctaaagtgttctattatataaattatacagggataagaaaatgggaggttagcacagacagaggcggagttaacctccagggtgagggtgaagggagatgtctggtacatagcccagccccgggtagggaggacgagcatccggacccaagcactgaggcacaggaggtagacaggctgcggattgtcatcaccacatcattggccaccataccttcttcttcttctttttaataaacttcatttttagagtagttttagggtcatagcaaaattgaatggaagatacagaggttttcc

SEQ ID NO: 849494 - DNA, 526 bp, Homo sapiens
cctcagaagactcagaacaacacacaagttcttgggaagctactggaggatgtgtgtcatcaaaacaagggaatcagcagtcctgtatctatgaagaaacaactggaaatgataggttcttgaattccaattttcttttagggtgagaaagtgggccactcagctctgctttataatattgggcttccgagaatgattagcattcaagtgagcagagatacttctaaagtgttctattatataaattatacagggataagaaaatgggaggttagcacagacagaggcggagttaacctccagggtgagggtgaagggagatgtctggtacatagcccagccccgggtagggaggacgagcatccggacccaagcactgaggcacaggaggtagacaggctgcggattgtcatcaccacatcattggccaccataccttcttcttcttctttttaataaacttcatttttagagtagttttagggtcatagcaaaattgartggaagatacagaggttttccacaa

SEQ ID NO: 849495 - DNA, 643 bp, Homo sapiens
cctgccacagggaagcaggtagagagaacgtccctctaagggacccaaatgaatgggggcaaataggatcccaattattgaagtcagaggttggcaaactatggcctttgggcttgtttttataaataaagttatattggaacatggtcatgcccattcacttacaaactctccaagtctgctttagcaatactatggcagtcaagtagttgtgacagagcctttctggcccataaaacctaaaatatttactatctggccctttacagacaaaagtttgccatcttctgctctgatggaagatttatttcccctttttatcaccagcttggtcctagcctggttatgtttacagggtccagcttgattttgtctatggtaatgggcttcaaatatttattataaacattttattttttgaggcagggtttcacttctgttgccccggcaggagtgcagtagcatgatcatggctcattggagcctcgacctcctgggctcaggccatcctcccatcccctttttacatkttttgtagagacaagatctcgttatgtttcccaggctggcctcgaactcttgggctgaagccatcctcctgccttgacctcccaaagtgctgggattaaaggcatcagccacc

SEQ ID NO: 849496 - DNA, 643 bp, Homo sapiens
cctgccacagggaagcaggtagagagaacgtccctctaagggacccaaatgaatgggggcaaataggatcccaattattgaagtcagaggttggcaaactatggcctttgggcttgtttttataaataaagttatattggaacatggtcatgcccattcacttacaaactctccaagtctgctttagcaatactatggcagtcaagtagttgtgacagagcctttctggcccataaaacctaaaatatttactatctggccctttacagacaaaagtttgccatcttctgctctgatggaagatttatttcccctttttatcaccagcttggtcctagcctggttatgtttacagggtccagcttgattttgtctatggtaatgggcttcaaatatttattataaacattttattttttgaggcagggtttcacttctgttgccccggcaggagtgcagtagcatgatcatggctcattggagcctcgacctcctgggctcaggccatcctcccatcccctttttacattttttgtagagacaagatctcgttatgtttcccaggctrgcctcgaactcttgggctgaagccatcctcctgccttgacctcccaaagtgctgggattaaaggcatcagccacc

SEQ ID NO: 849497 - DNA, 557 bp, Homo sapiens
gaacaactttctgatagtgtgacagagtcagccgatctccaggtcagtcagctgatgtgcagtggtcatttgtcataatcatggacaccctacgtcttttgggytcccagcttatattttggtgattttttctctttgagatttgcacctttgtacccaggttccaagccagcctgaacactaaggccagacatgtgatccagtttccaccagtgagatgggccccatgacgaagaaggtcacattcagcatccacctttccagagagaatggcaggaagtaactgggctttcaggagcaacagaagcaaaatacctagcagtagaatcctgcagccaccacacagtgtgtcatgcattgtatccactgggcaagctgtgttgctgcatccacaatgacagtgagactgacctgtgagtgatccagcatctgggtttacttcttggctgtggggtctctgagcctgattcactggctctgaattcctggaaattctgtgagtttagcattatctttaatgattttcttttatggcctaaactagatagcgtaggttc

SEQ ID NO: 849498 - DNA, 639 bp, Homo sapiens
gaaataagaaagttatttcttgacatgttaaaatgtaaccattctgaattggatgcatcacgcttaatgaagaaatatttgaagcattttaattaaatttagtaaaataaaaaataaaaccaarccaaaatataaagttactcataactaaatcattagtaaatattttttctgatcatactagcctaaacaaaaaataagaaaaagaaataaaaaggcatacattctggaaaaatgagataataaattaatttgcagttgatatgattacctagaaaatccaagataactcactaaaaaagggaaaaaaaccacactattagaactgattattaattaaatactaaataaataaactaatattatataccttgttcagaagaaatatacaaaacaagtagcggtcatatatatgagtaacacttttttctataacagctttaccagacagttctgcactgagaattacagaaaatgcttaggtaggacacagtaacagaattacaaaatccagctctgaatttctaatacatgatccaaaaaccatctgttaattattgcaatacctacttagctgaatggatgagcaacagaaggggaagtcaaggaagtagaaatcattgcccctgatattatgaa

SEQ ID NO: 849499 - DNA, 685 bp, Homo sapiens
gcatgtgtgtatgttcattgcagcattattcacaatagcaacgacacagaatcaactaaatgcccatcaatgatagactggataaagaaaatgtagtacatattacaccatggattactatgcagccataaaaaggaaaaagatcacggggtggaacaacacacactggggcctgtcaaagggtgagcaggggaagagggagagcatcaggaagaatagctaatggatgctgggcttgacacctaggtgatggaatgatctgtgtcacaaactaccatggcacatgtttacctatgtaacaaacctgcacatcctgcacatatacccttgaacttaaaattaaaaaacaaataaataagcaaacaaaaatggaaacttggaaaagaaaaaattcctaaagagagctatggttcataaatgaaacaaactatgtgtggtctgacatgaagtagttaacagaatatatcagagttttctggaaaaacaatagcatacatataccagtgaagaaattgcaggtggaagagggggtctactgagaaagaaaatcatttataatttgtaatttttatttaatttataatgtattatgtaatttttatttaatttatgatgtattaaatataataattatgyccttatgtatttttaaaaaaatcttttgtcactaatagaaatttcagat

SEQ ID NO: 849500 - DNA, 577 bp, Homo sapiens
ctgggcctgcctggcacagtgctctgtatgcagcagatgttcaatgtgcacacacttgataccccatctacatactaaaactggagtttccttcaaggcttatattgaagacgtgggtctctgttaagtttgcacacaatggtaacttgaatgacttgggtgttgctctgacagacaccttctgttaactggtactgcaatttagaaaggctgcaccagggtgtattctgatattaaactcagtaatgagctcagactggctcctggagggagaaggtgctcatcggtggctggtggggttgaagcctctacagccagaggactgagcagaatgttctttcaaatgctactgatagatgttttttaccactgtaaatgacaacccacatcataatgatttaccagcttaaaaagagccccaggatgtggatgggacagaactgaccaggccataatggttgctggggctggataggtcctcaaaggtttattatactacagtrtctcttttgtatatgtgaaaatactccaaaataaaaatataacacaaagcttctgtgaagacagttaggattct

SEQ ID NO: 849501 - DNA, 568 bp, Homo sapiens
tgacgctctccagctggaagttgtggctggactggattttgtcaagctgctcccgctgcttctccagctctccctggaactcgttcttcttcagctccacggcgcctctctctgcagccgccctgcggaccctgccttccagctccatgatccgtgtctacaaggagaccgtggcattagggctgatgccaagttacctgaggagcctggaccacctgagcgccctccacaaagaccaccttggggcccagggccagcaccagtcttatacacacaagtgcccaaggctgtgttttaagtcaactggacagaagctggagcggtttcttctggaaaaaatggtctctgtcagtgtaagtgaaggaaggctctgtgcactcacaccacacttcccactgggtttttgtgaggcttaaatgtgctaagtgcacagaatgcctcatgctttacctggcatragatgatgctcaaatatttagttcttcttcgctgctaacaaagcacttaacaactctttagcagatacaatttctgaaaacagattcagttctccaactccagacaagca

SEQ ID NO: 849502 - DNA, 568 bp, Homo sapiens
tgacgctctccagctggaagttgtggctggactggattttgtcaagctgctcccgctgcttctccagctctccctggaactcgttcttcttcagctccacggcgcctctctctgcagccgccctgcggaccctgccttccagctccatgatccgtgtctacaaggagaccgtggcattagggctgatgccaagttacctgaggagcctggaccacctgagcgccctccacaaagaccaccttggggcccagggccagcaccagtcttatacacacaagtgcccaaggctgtgttttaagtcaactggacagaagctggagcggtttcttctggaaaaaatggtctctgtcagtgtaagtgaaggaaggctctgtgcactcacaccacacttcccactgggtttttgtgaggcttaaatgtgctaagtgcacagaatgcctcatgctttacctggcataagatgatgctcaaatatttagttcttcttcrctgctaacaaagcacttaacaactctttagcagatacaatttctgaaaacagattcagttctccaactccagacaagca

SEQ ID NO: 849503 - DNA, 621 bp, Homo sapiens
cacatactggagctcgtggtgcagctagactgcaacctaatgtggtggtattttcgtttcccatattacttggtcctctcaaatgactataaaattataaagggtttacaattttaagggattagttttctaagggaactcttgttttccatcaactctgtgaagtcttgggggtccttcagtaaccaggggactatagaatccttttgatcctaagaataggaattaggtcagatttttctctttctgggcaaaccccttcctacttagttgaaatcccttgaaactctagtcaatagtgaatgagaggccagctgaacaggacaacccactgtctccatcaccagaacgttctccgctcaaaactttgttgtatatgcctcaatatgttgcctatatctataatctgtatcatctatcactgtctctcttatatacattgtatttttccatgacattacatcttctctgatatgtgtgacagagttttccattgtatgattatactaaagtttgtttaattaataatgtaaagttcttagtttgttttttcttcttttttgttgaytacattagctagtcccttcaagacaatgttagacactgaagtgataagtatcc

SEQ ID NO: 849504 - DNA, 586 bp, Homo sapiens
atgttctgcactcagggcaagccacttacttctattggtgcgactccaggaaaggagccgaacctctcagtttccctcagcctcatgatgaagaaacataatgaggcttaatgagggtatatgtcaaagtgcccagcatggagtctggtccctggcaggggctcctgccatttcctcatgtctaggtgccccagcatctgatgcaaacactacacttccttcagtaccccaccccaaagtttgcaaagcgcaggccatactttgtactctgccatcaattcactgtgcgtcctcaagcaagtctctgtcccccccgccccaacctcagtttcccaatctgtaaaatgaggctgttaggtttagatgacctcaatgatccctccccaccctgacattctgaacatgacccaaagtcgctcctgtaaccactgctcctttaaaccggagccaacgcctgctgaatgcaagactgacagagctgyagggaggtgcaggccgcaggccacagcccaagggctggagctggtcctggggcttccacagagctggtgtctcaccaagcctgatggaggtgagggcatgcact

SEQ ID NO: 849505 - DNA, 537 bp, Homo sapiens
atggacccggcacacgctcagtgctcagtaaatgcygcttcctctcccttctttctcctaattcaagaaggaatcaggagaaggtgctcaaagacaggaatgcaaaaaaccaaacaaaaaccagacaaacaataagagggccacagaaagaggtatctgtatcccaagtgtccagatacacagggtaccaatttgataggcctccaaagcccaggcagccccaaacttgctcccagccactctcctgcaccctgcagcacaatgtgctgatgtgcccctgcccatggcactgcctgtgtggggtcacaggggcagcctacacagctgctcttcagtgtctggcctgccctcttgaaccaggagaagccacaacaggggtttcccttttgcttgtgacctccccctaatcctgcctacaagatgactgatgtctgctaacccttcacttcttaaagatgctccaagtcttgtattatcctggctaaaataggcccccaggatgctgcatacccagccacattcttcttgactccacac

SEQ ID NO: 849506 - DNA, 537 bp, Homo sapiens
atggacccggcacacgctcagtgctcagtaaatgccgcttcctctcccttctttctcctaattcaagaaggaatcaggagaaggtgctcaaagacaggaatgcaaaaaaccaaacaaaaaccagacaaacaataagagggccacagaaagaggtatctgtatcccaagtgtccagatacacagggtaccaatttgataggcctccaaagcccaggcagccccaaacttgctcccagccactctcctgcaccctgcagcacaatgtgctgatgtgcccctgcccatggcactgcctgtgtggggtcacaggggcagcctacacagctgctcttcagtgtctggcctgccctcttgaaccaggagaagccacaacaggggtttcccttttgcttgtgacctccccctaatcctgcctacaagatgactgatgtctgctaacccttcacttcttaaagatgctccaagtsttgtattatcctggctaaaataggcccccaggatgctgcatacccagccacattcttcttgactccacac

SEQ ID NO: 849507 - DNA, 684 bp, Homo sapiens
  misc_feature 626: n = A,T,C or G
acaaaactgtcatcctctgtggccagttgaattttccaaacccactatgtgacgtctcacagtcgcagatactatcaccagctacagagcatcttcattgcctgagatctatttacttagcatttcacaggaaataatctaagggatgtgtgtgtgtgtgtgtgtgtgtgtgtgtgtgagagagagagagagagagagagagagagagagagagatgtgatgtgtctggggcatgcagagaggacccagaagttgacctggctaggatgtttattttgaatatacctagacttaagtatctccgttaccctttaaattgttcctctgtcgcattggcacttaattatcttgcacgtaaggaggccccagtagaaaacctgaaaggcaaggacatccttgttttaagccccacctttcatccaaccacaaatcctccccagctcccttccttcccatttctacttctgggctcagatcctggcaataggccaggccacctgagacaagaaagtcctcaccagaatctggaagcttgctccctgcatgtgtcttgcacatggaaaggttatctctgccttttccaaaagttcaggaagagaagttatatttcataacttattttttcncatgtcactttcatcaggccrtagagtcggatccacttttccatgtgatacctctgct

SEQ ID NO: 849508 - DNA, 630 bp, Homo sapiens
agaacagaggcagatgttttattwaatttcttaaatgcgtgcctatgtgtgatttcaattttcatgttttgtggcagcatttttgatcaatattccttggctgctatctattttctctgttccttttctgactttttaaatatctctaattaaatatatataatatatatataaaccttatatataatatataataaactttagttaactagtagaggataaacctgcttctgcttcactcaaagataactttatatatatgtatatatggtttatatattacataatttgcatcagttatcctgggtaataactgccggagagatgggagtatatatatatgtgtgtgtatagataggtagatagatagatagatagatagatagatagatagatagataatctttgagtgaagcaggtttatcctctactagttaattaaataaagttcatgcattggagacaagtattctaaggagaattttttttctgttttatactaaagttaaaagctttatggcatagatactttatggcacagggctgagcgtgtgtgtgagtgcgtgtgtgcttctttatggtataaaataactttcagggaagatctgtcactagtccaattacccgctt

SEQ ID NO: 849509 - DNA, 600 bp, Homo sapiens
aacagtaagaaatgtttgcaccatcctctggacactaagtrtggtcctgatcaattaacaggggatcagtgttctctctggggatggtttccttcacatggacatacaggcagagacacacctcaactgtacaatggacatatggatctcattggaccattatgacatctctatgagctaggaagactcaggatcattcactatatacagatgagagaatgaaaccaaaagaagttatccaagatggaataatccatacaagttatccaggatggaataattcgtaagtggcaacagaatcagtgttgagcataagccacctctttcaaactgtgctaatttcacctcatcacacaccttctgactttgagagcttagctatttggttgacctaaattgtaacttagtagaaaatacatacctgagtctcttctgttcatatccagagaaagaactcttcaaggaatggtttggtgcttttgattacatctcaaatttcaagatcagaaacacaaaagctgaaccaaagtccccaacttaaaattaaaggcttcacagggcaccacatcacctatgaattattcttactcacaatttgaa

SEQ ID NO: 849510 - DNA, 379 bp, Homo sapiens
agtttgtaattttcttaatcctgctaaccttgaatcatataactctatgtttaatttattagtgttcttctaatacacttatattctacatttgtgttggaaaggctataaatattgttcctttatcttgatccagttatcatgctttttatagataactaggtcatattctatgtgcttgattacaggatatgggcaatgatttgttaaaccttttactctgttaatacgccagtgctgtacaccatccttttgcacttgttttatgaatggggtcttatataatgaaaactgaacaygttaaacatgtatgagctgtagcattctttttccatcaacaaagagtgacattgattataggacttgggaatctacaact

SEQ ID NO: 849511 - DNA, 617 bp, Homo sapiens
tacctcctttaatagttttatagaacttactcatcactttacaattgaagaaacctgatgcttagcctggcagtacaatttactcaaagtcacacagctaagaaagcaaagatttgagattttgagagaggtctgcctgtcttagtctgttcagtcttgctataaaagcatacctgagattgggtaatttataaagaaaagaggtttatttggctcatgattacagtggctggaaagtccaacattgggcagctgtatccagtgagggtctcatactgcttccattcatgttagaaagcaaaagagaagcacgtatgtgcaaagaaatcatatgatgacagaggaagcaagagagggaaaccaaggaagccagactcttaacaacccactctcatggaaactaacccattcctcaagagtgagaactcactcactctctcaggaaggcattagtctattcataaggcatctgttcccatgaactaaacacctcccactaggcctcacctcccaacattgccacattggggatcaaatttcaacatgagtattgttgaagataaatcccatcyaatccatcgcactgcctaacaccaaaatctgcacagttctacact

SEQ ID NO: 849512 - DNA, 599 bp, Homo sapiens
atttttattgggttgttttctattgagttttgagagttctttatgtattctggattaaaatttttttatcagatatataacttgcaaatattttcacttagtctttgacttttcattgtgtttacatcatgttttgaagagcagaagttcttaattttgataaaatctaatttattgatgttttactttgtgcatcatgcttctggtattatatctaaaaattatttgcctaataccaggatcatggaaattttcttatggatttcattttaaaattttatgctttttagttttgcatttgtctttgattcattttggattagtttttgaatcatatggaaatgcaaaggaccggtaatgaccaaaaaaactttgtaaagaaagaacaaagttgctgtactacctgatttgaagacttattatgaagctacggtaatcaacagagtatgtcattggtctaaaattggacaaatagatgaacaaaacagagtaasaagtctagatgcagactcactcatatatggtcaatttatttttgacaaaggtacacagacaattcagtggaaaaggctaaccttttcaataaatcatgctggaac

SEQ ID NO: 849513 - DNA, 615 bp, Homo sapiens
ccatgttggccaagcttatctcaaactcctgacttcaggtgatccacctgcctcggcctctcaaagtgtgtgagccactgcacccagccagaatctatttctttaatggttatagttctgttgaagttttaaattaatgaatctttttaaagttacattttcacaaaaattgtccatctgtctatattttcaagtttattggcataatgttgttctagcactctttgtcttcataacttataattatgctttttaaaagttcttagtgtttatctgtgcctctttttttcttattatccttgacaaagatctattttgcaaagaatcatcttttattttgttacttctccctattggatttttatcatgtccatctctaacctttctttgggattactctattgtcttctactatattgagttagatacttagatcatttgctcttattttctaatataagcagataaagctacaatttttcctcttgagtttcaccttagttgtattccacaatttttagtacatgatattggtaatcattattcattataaatgcctcccartgtatttttcctttgacttctgagttatttggaagttatttgtaaataaaa

SEQ ID NO: 849514 - DNA, 620 bp, Homo sapiens
catgaaaatgaaccgagtttatataaactaccaatgaagaatataaaaatgaaatttcaagaacagttccacgctgggcacaatggctcactcttataatcccagcactttggaaggccgaggcrggcagatcactagaggttaggagttcgagaccagcctggccaacatggtgaacccctgtctctactaaaaatacaaaaattagccaggcgtggtggcgcatgcttgtaatcccagttacttgggaggctgaggcagaagaatcacttgaacccaggaggcagaggttggagtgagccgagattgtgccactgcactccagcctgggcaacagagtaagactccatctaaaaaaaattccaaaccaaaaagaatactaaagaaataaatttatcaaaacaagttcaagcttgtacaatgaaactacaaaacatagttgaaagaaatcaaagaagtttcaattaaatagaaagacgccccatgttgaaggatcagagaccacaccgtgaagacggtgacacgatgacgtgctctgactttatcctttcatgctattataacaaactgccttcatgtgggtggcacagacccaacagaaatttatttgtttaagttct

SEQ ID NO: 849515 - DNA, 574 bp, Homo sapiens
agtgggtccaccacagggctcccgccccgggggtctcagtgggatcctccgagcggccccactttakcagcctgggctcagtggcagcactggagagaggggcactggcacctccgtcatcactcctggagcaaggcagagctggccctgttctctgagatccttggcccaccctggccttcttatggtttgtccagagccaggatctgtccagacactggggctgcagggatgcgggtatgtggggaggccggccacagtgagggaggataggccaccataccagggtgataaacacgccccaggagccacaaacccacgtgggacaggcctcctgggggatgagcctgcaaagcaaccgcctctccccagggccgctggctgtgcaccaagcgaccactgcctgcctgccgcccagactagcatcctcgcctctccatctcctgcctggacgtgagtcttggcagaggccacaggatggcccggaaatgggccaagatagcagggccgaggtgagctgaggcggagccagcctggttgtccacgggccacacgtggagggcagggcagaccc

SEQ ID NO: 849516 - DNA, 559 bp, Homo sapiens
cacttggaatttttcactttgcgatgaagggctacattaaaaccacgtgtttgccagtaatgtcagactttcaaragctcatggtttgctttttgacgaaatgtaaacccctggaaagggtcaggcccgggcccagcatcgacagtaaaagggcccagctgaggcttcccttagctttgtgtcctcatcccggacacgaaaatgacctggccccaaatatgtgcccagggtcgaggctggtggtccaggcacctccggctccctgtagtgatacgtccagctccggaactactccatcctgccccagagcacctgcccctccccacccactgtgaccccacgtccttccccgtcagggctggtcatgctctggtccacctaggcctgaagacagagctcccctctgccctttcctcaccaatccctggtcggcatcctcccccttcccccacacaagggctctggggcctgccagtcccaggtggcacccacagccctgaggccctgggcccccctcccccgaccctggacacaggagatgaatgaagtcaagtggtgt

SEQ ID NO: 849517 - DNA, 552 bp, Homo sapiens
cagaccagcgagccccccggtccacttccacccaggtctctctcctgcctgcccgccctctccatacccaactgggacacctccacttctcccgaatgaccacggtccccagcctcccaactgtcttgtagttgttcccgtcgccacaaacttaaagtccacggcggccagctggcctttctagacacaaacaagaacatgtcgcttcttcccaaagtactccccagtcacagcccctctgaagcagctcccctcccgctggagttcccggctctgatgaggagtccacgtccgtcctttcccactctgcatcctcccagctccccggcctctgacctctagttgggatccactcatgggggccctggcaggagatcagagggtgggaaggaggaagctggtggttcctccccatccttgcagagcctggcgcacatttcctcccctcgcccctcagaggagatgctcccagctygcgttcttaacccggccccatcacttggtaaattgtccctcgttaaatcaacttataaacacatgcctgagaattta

SEQ ID NO: 849518 - DNA, 641 bp, Homo sapiens
ccatgtgaggcaggcactattatcatcactaccatttaacagaggaagaaacccaggttccagggcctcacaaattgctccaagtcacaaaactctaagcagaggtgctgcaagtcacaaatactctaatcaaatagtatttgatttcagaggccaagctctaaacctctatgaacaattcttttcttatacttttgtactgttcctactagacagatagctaaatcacatatatgaagttgcataaaacatttttaaaagtgagagttcatgaagtatctcaatttagtaacaatatttgctttagataaatatcaaaagtcagatgtatctatttccccaacttgcatatcaatatcgtattttcctttcaaatctatctttttaaagaaacaatcaagaggatacactaaaattagagggcatttcataggattgcccttatttgggacaacattaattaggtttagttccatagtaatctacagaacctttattccattgcccaagctagaagaaacacaagatgaagaactataaaagaagactactatatttttttaaaatcctcttgaagtccmctcctcatattttcttgaacaatttaacaatgtagttttcctacaaattctaaaagttag

SEQ ID NO: 849519 - DNA, 639 bp, Homo sapiens
gaatgtcaagtggtgcaattgcttacgaagaccatatggcagttcctttaagggttaaacatagagataccatttgacccagcaattccgctcctaagtatgtacccaggagaattgaaaayctatctctgcacaaaaacttgtagatggatgtccacagcagcattatagtcaaaaagtggaaatacctcacacatccaacagcaaatggatggataaacaaactgtggtacatccacgtgatagaatattacttggtaataaaaggaataagtactgatatatggtacaaagtggatgaaccctgaaaatattacaataagtgaaagaagctagtcataaaggaccttgtattatatgattccatttatacaaaatgtcccaaataggcgaatccatagagacagaaagatcaggggttgccaggggctgtgggttggagggatgttgggaggaagatgacagctaaagagcacaacatttcttttctggggtgatgaaagtgttctgaattggttgtggtgataactgcacaattctgtaaatatactagaaactgttgaagtgtgccctttaaatgagagaaccatctggtatatgaattatatatcaataaagatactatatatttatatttta

SEQ ID NO: 849520 - DNA, 554 bp, Homo sapiens
tcttcttagccactcttccatgctcatcctttgaatgacagccatgtatggacttgaacctcacagtcctctgtcgcacagggaagaatgccagtgatcttgaataagactcagtttttgtgttgctggaagaaggaacagtatctgggtatctgaggttggttttgtttcctttattttctcaacatctttgagctttgtttgaaatgcaaaacctaattttaaaaattctgctgttggatatatcatttgaaatgtagaaatactctgaaaaaataaacataattgaaatagctttcaactattaataattttaaaaatacatggtttcctttgtctcctctatggttttgaaatttaacaatgggatatttgtcatcattctgcaggttgagtttttcagtccagcgtagagtgattgtttctgtttttattttatttctaaatttttatgcctgcagtggatgtgcgtgagctatggccttggggcctaaacagctctgggtctcatggagagcgaaatgagtgcawttcatgctttcgctttccacaat

SEQ ID NO: 849521 - DNA, 526 bp, Homo sapiens
ccctgagaaggggactgtccaatttcacctataaatgccaagtggtgtaccctgaagcagcagctcatttgcttcctatgtagaccatgtgggactggctttatgatgactgagatattcactcactgaatacatccattactctggctgtagtaaatgctatggctaagggagcctcttttgtatgggcaccaatgaaaacatgagcgtaattaacaagagactggggaaaggcagaggggagagtcacaggactcatcccaggaaggtggaaagtctaaatggttattgagaaataaggtgaatgaagaaaacattgatggggtgaaactaagaggaaaaagaaaggagagtcatgggactcatctaagcagggtagagtctttagagggctattaaaaaatgggatgaataaagtggaaatygatggggttaaaacaaaggtcatcactatagaaggttggtagggagattctgctgttctcctaacggtaagaggatccaaacaggtttggtgtatttatcc

SEQ ID NO: 849522 - DNA, 601 bp, Homo sapiens
ccagcctattcatatcgtatacactgcctgcccccgagtcacttaatagctgacttagtgatcagatacaaagacatactatatataggtttggtactatctgtggtttcaggcattccttgggtgtcttggaacatattccctgtggataaggggggtatattataatactatagccggagtgtttctttggttatttttttttgagatggagtttcattcttgttgtccaggctggagtgcagtggtgtgatcttgattcactgcaacctcctcctcccaggttcaagtgattctcctgcctcagcctcccaagtagctgggattacaggtgtgtgccaccacacccagctcattttttttttttttgtattcttagtagagatagagtttcaccatgttggacaggctggtcttgaactcctgaactcaggtgatctgcccaccttgacctcccacagtgctgggattacgggcatgagccatcacgcctggccaactgaagtgttctttgatgttataatcctattatttttgtaagagacaagaaagtagatttgaattctttgtcatgtgstaagtcaagttttcctttggcaat

SEQ ID NO: 849523 - DNA, 614 bp, Homo sapiens
atcaattggatctaacagacatttgcagaacactccayccaaccaccacagaatatatattattctcatctgcacatggaaaatattctaagatcaaccacatgcttggtcataaagcaagtctcaatacattcagaaaattcaaaattgtaccaagcacattcttggatcacagtgcaataaaaatggaaatcaatatcaagatccctcaaaactacaaaaatacatggaaattaatttactcctgaataattcctgggtgaacatcaaatttaaggcagaaataaaaaaaattatttgagattaatgaaaatgggaatgcaacttaccaaaatgtctgggatgcagccaaagcagtgctacaaggaaagtttataacactaaatgccttcatcaagaagttagaaagatatcaaattagcaatctaaatttgcacctaaaagaggtagaaaaaagagaacaaactaaccccaaaactagcagaagaaaagaaatagctataattagagaagagcttaatgaaattgagatgccaaaattcatacaaaagattaatgaaaccaagagttggttctccaaaaaaaaaaaaaaaaaaattaagattgataaactc

SEQ ID NO: 849524 - DNA, 467 bp, Homo sapiens
aactgacaaagctacagtttatacttagttggtaggttagcttcagatgaactgctggagtagaagacctwtatggttccttctagacataaatattatgatgctctaacagaatattaaagctaaaggtaaagtggtcagaatgagaaaaaatacactgaaatctattgtatggttaatagcatcagcactgtgtagaaagcatccacttacattatgtcattgaaactgcattgtcccagaatcagtgagtaagaaaactagagattcctatgattccaaatatctttcccccaaaagggaaaacttcttgtttggtgactgctgacacttttcagttgtgcttatcaaaccatgagtgatcctttccacagggggctgttggtgccaatatacatgtagccacccaggaaagaaaatgtgcctctacctgagaccgtaaggatcacttgcatcagagatacagc

SEQ ID NO: 849525 - DNA, 613 bp, Homo sapiens
taacccataaatatatacacctactatgtagccacaaaaataaataattaaacaaaattttaaaataaagtagttaactcaaaaatcaggtgcatagtagatgctcaawaagtgcatgtaaagcagccgttccaatactgactatataatagatgttcaataaacagaaatcattactaacaataatattagaagtggtagtatgttaccactaaacattctttgctttatttataggagaaaatatttggaacaaaaggcttagtgaacaccttgtgtaccaggcatttaatcgttgatatcgcatgtaaaactccaagatgccaaatattagatattagtttcccccattttgcaagtacaaaaatggatacttgagaaggttttataccttgccaaagactcacagctcaaactaagttatgctcaattccaaagttgctcatgttcaattacaatattttgcctccaagaaggtaaaacttaagtccttactcttagaaaagcctggctagtattgaataaatatacgtactagaagatagtcactcttcttctacaagctgttcaaccatttatgtaggctttacaatttttaactaccctttcagtt

SEQ ID NO: 849526 - DNA, 674 bp, Homo sapiens
atagaaatataggatccaggacccctgaaaccatgccatgtgtgtgtactaatagggaactttgagtatattaagtttctgtggaatgtgcttacctctgttcacctatctccattgtgacaaaagtcttattttagcaaacattcctcaaaatcctggaattttacagataaaaggaactttgggattagcttgtatattcttatcttgccattttattggacacaactgtgatctggagaatttttgtgatctgtccacaattatgtagctagatagtacaggcagttttgttttaatggagtctgatacatgtgtaagcatcttattgtcatgctctctttaacaaatcgaaattactgttctttcaacataaaattaagtcatactttaatttttttcatgttctaatcaagcccttgttcataggcataactgatttgtgtacatagttactaagagacataacattttatacaatcagcattttttcatgttgtttacactattgaaagttgcctgttttgtttttgcttatttttgctacrtaccatctagaacagtggtagatttgttagagttttacttatagaaagtattatttctggctgtggtaagtgtattctaaggactatattaattataattatagtttagtagtggccatgtggcct

SEQ ID NO: 849527 - DNA, 381 bp, Homo sapiens
atgtcaacttaaaacagattraagacctagaaataagaccagaggctatgaaaatatactccaggacattggtttgagcaaagatttttatggctaaaatctcaaaagcacaggcaaaaaaaccccaaagtagacaaatgggactatattaagctaaaaagcttctgcagagcaaaggaaacaacagagtaaagaggatacctgtgttgaacaggagaaaatattcacaaactattcatctgacaaaagactattattcagaatatacaaggaactcaactcaacagcaaaaaaaatatcaaataatcccattaaaaagtaagccaaaaggccagatatggtggctcacgcctgtaatcccagcactttgggaggctgagg

SEQ ID NO: 849528 - DNA, 626 bp, Homo sapiens
gagcccaggtgccactgcactccagcctgtggtgacagagcaatgccctgtcttaagacaaataaacaaaagtcaatatacaaaaattagttatgttcctatataccaatagcaaataattagaaaatgaagattttcaaatatcatttaaaatagcataaaaacttatcaaatacttagaaataaaactaacaaaaggtgtaaaacctgtacactgcaaacattgctaaaagaaatcaaacacgacataagtagagagatatattatgttcatgagttggaaatctcaatatttttatatgtcaattgtctccaaattaagttacatagtcaatccctaggtcaaaatactgtctgtgtgtgtgtgtgtgtgtgtgtgtgtgtgtgagtttgggtgtgtatgtaaattgccaagatgattctaaaatttatacggaaattcaaaaaatctaggagagccaagatagtttttaaacaaggaagtacaaagttggaggacttatacmcaagttttcaagactcactataaagccataataattaaaactgtggtctggacttaagtatagacacgtcataatgaaaggacaaaaagcccagaaacagacctatacatatatgttcac

SEQ ID NO: 849529 - DNA, 605 bp, Homo sapiens
tatttcttctttggtgtcccgcatacacagttttaaaatgcttgcagacgttttacctggctctttgcattaaattatctcatcagtcgtaattsatcttcacttctccgaagttttcatggcacatggcaaactgggatgtacccttcctcctcctctgtgttctatcagttatttaatctcatctccaagcaacatgttctcgtaatggctagattttggtctagaacaatagccttactgctattattcttttactcaacagtccagattgttacgtacccatgatctggagctctggacttcttggttttgtgaaccgcaggactcttgcaagtctactgtgttagtccgttttcacactgtattataaataaatacctgagactgggtaatttataaagaaaagaggtttaattgactcagaatttcacactgttggagaagcctcaggaaacttacaattgcggaggaaggtgagagaggagcaaaggcacgtcttacatggtagcaggtgagagagagagacagcaaatgagtaaagggagaagagctgcttataagaccatcagatctcatgagaactcactcagtatcatgaaaat

SEQ ID NO: 849530 - DNA, 563 bp, Homo sapiens
tacaacaagatgaaacccttggtggtgggttagtggttgcatttaattttcttttgccattgtccgtttttaatttattgaattttcagcgtatgctactttcacaatcagaaaatgacaaatattatctataaaataaaagtatagcttctgccttatcatttcaacaccaatcaagaaccaaaagcaaggtggcaccagtcagcaagccttaaattaaagggtgttttcccagtttctggttaagataggaatgcaagacacagtaaaggtgacaggtatgtatttacacagcacagtcccaacaacaatcatagctttaaagcaaaacctctcactcttcttcttccctgttttatagtttaatttctgcctgcagttgtcttccttttttcatctgtcttattctcactagtcaaggcacaaaatgcaacacaacccttggctagagcctattattatattaaaaggataaaagaagtttgttttgtcgtggtattrtaaaattgcatatcccttaaacacctatcaagttgtttcatgtgaaaatctttccttgctgc

SEQ ID NO: 849531 - DNA, 572 bp, Homo sapiens
gatacagaggaagagcaaagaatatatgctgtttccataggctaagggcaaagagaattaactgggtgacttttcccagatgtcttcaatccatgcatggttcagcccttagagtgtgcatctatcgactgatgcatactgcagatgaaacactgactcactcctttgagtcctgactgtgacatattttgcccgaacagttcccagaccctccctgctattctctctgcttccgctcttgcctcgttacattccatacttcacacagcagtgcttggccttggacaccaaggtggtgagtaaataaaccttctttttctctaaagatttcattagaaattcctaagggttgatagaccaaccattcacatgtacctgtcattacctttaactgctgaaatatccatcatgatcttactccatctcccatggtaagttctctcagcyttcatgtgctttcattgcagttgccacaaaaagtcctacggctgaagaatacactgttaatattgagatcagttttgaaaatgcatccttcctggatcctatcaaagcctacttgaacagcctca

SEQ ID NO: 849532 - DNA, 628 bp, Homo sapiens
agagtagcttttattggactgttaccccaatcctacatctcttatacctttcactttctcgtcatgttttagattatgttcataacacagtgtgacctagggtctggcttctgtgtgttgccacaccgggtaagtccacatagatgtctagtaataattttatatagaagtgattaggaaccatacaaatcacaccctactaagcccaaatcaaatgcatgtccaactcagtttccctttagctagatttcaaaaatgctgtagttagtccactgtcactcaaccccacaccacttatgatgaaggaatatttagagtggaaagagagaattatcctaattctggttaaaatatcttaattttgaaaattttacaaaagcacagatctatgcaaacacatagctgagatttgttttggagccttgcaaggggcgcatgtaagtgaagagcctgaaacctaatctttatcatcttcacagaaaatttagtctgcccrtgttgtggagaatgtatgagtacatgctttggctatacccagtaagatggaatggacaaacagaatggctgagtttattcaaggttgggttcatgcctggctatgccaaggacaaagagtcataggtattaa

SEQ ID NO: 849533 - DNA, 487 bp, Homo sapiens
tttaaaaccacttttgttctttatgttcctgaagactcacaaatgctgagccctgttaactcctaagtgatttaagagccagtctcttgtatgtgagctataaaagttggagtgtttgttgtgtggataaactgtccaaaacgtggctggaagttaaacttacttttatcattggagcaagccatggggtaggagacacaggaaacacccaaacacctgttcaggctcttggatctctcactaattctctactccatcgactcccaaatgcaagctacttaaaagtccaatccttaaatagcaactgaaaatgtgtgcagtcaaacctcttccaaggaggaactgggggctgaaacttattgcctgttcatctgtgctgagccctgggagaatgcagactgactatttgttctttttagtcctggtggactgacaaawgccaagtcccatttactctcggagctaggtgggagcttcagagtccctc

SEQ ID NO: 849534 - DNA, 604 bp, Homo sapiens
actcttcacgataaatcttgctgcggctcgctctttgggtatgcaccacctttatgatctgtaacactcagcacgaagktctgcagcttcactcctgaagtcagcgagaccacgaacccaccaggagggacaaacaactctggatgcgccacctttatgaactgtaacactcaccgcaaaggtctgcagcttcactcctgaggccagcgagaccatgaaccccctggaaggaatgaacaactccagacgcgctgccttaaagagcctaacactcaccgcaaaggtctgcagcttccctcctgaagtcagcgagaccatgaacccaccagaaggaataaactctggacacatctgaacatctgatggaacaaactccagacacaccatctttaagaactgtaacactcaacgtgagggtctgtggcttcattcttgaagtcagtgagaccaagaatccaccaattccagacacatcaccttatacaaaaattactcaagatggatcaaagacttaaatctgagacgtgaaactataaaaattctagacgataacattggaaaaccccttctagacattggcttaggcaaagacttcatgaccaag

SEQ ID NO: 849535 - DNA, 531 bp, Homo sapiens
ggcaagacagcaaatggcttggatcgagctgtaaaattgactcctgtggcggggaaaagaagaygtttcaatgatatgttaataagatgctaatataattaaaatatggtaaaaataaatacattcataatagtatctgggatatagtaggtgttcaatatatattcattaaatttaataaatacataaattataaatccaagatttatatttctagagaatcacaagattccaacaataacacataatagttatttccaattctgtcaattattgattgagaattcttccaattctctcttttaattttcagaccaaccttccataccaatgcaaaatttcagcttctttcactcatgtttcactaatgagaataaaaatattctcagctccagaatgtgtgaaattacttgctctgatgtatgtatctactcaatacgtgccatataacacatcaaaacaggggcacagggactcctgctgcagcaccatattgtcttagagagttatgttatctggaaaactaggact

SEQ ID NO: 849536 - DNA, 606 bp, Homo sapiens
attaggtatttgccctaatgctctccctcccctttgtccccaccccgctgacaggccccggtgtgtgatgttcccctccctgtgtccatgtgttctcactgctcaactcccacttgtgtgaygttcttatatgtcactcggtagtctgctctaatgatgactctcagagtccttcttggacactcaatctaaaatggcagtcctgttgctctagaactccccttaccattgttttatttaccttcataacacgtatcaccacctggtgttgtatgatgcttgtttgttcaccatgatctttccttcaacagaagtggctttggttcacttgatggcttctcaggacttagaacaatgcttggcatattggcaagactgaataaatatttactcagtaaatgaatgagggggtgagcaagatggtggccgcgcacgaggtcaggtgttcagctatcctcaccgctatctggtcctcgatctcactccgttgtttctgatgggaagcagtacagttatacctgggcaccaggggcagcctgacagaggctgagaggctgctggccgccagcttggccatcacggccggcaccgtcctcctctctgccc

SEQ ID NO: 849537 - DNA, 606 bp, Homo sapiens
cattgatgcagaatagaataaaattatacttaagttctttttaatccttgtggtagaaatgtggttgaatgcaacaatattgggccagcgtctcaaggggaattttaaaaggcagcaataaaatatattasagacatgacacacatgcgcctttggactaggtgtgttaacagagcttgagagagggaaccttgacagctatttttactcttagccaaaaacaaagacattaggaaagagagtgaaagtatagtgtctagttccacagcataaagttattatttggtgctttggaatgggttgaattttaattctttagtccatctaaatcagctggaaaaatgaggaacattctgccttgaatggttcttcccctggttggctgctttctccacaactggtggttcagcaggaagccctcttaggttcttgcatgtgggcaacttattttctcttcctgctgctttgtgcaactgtcaaatactttcacagattcagatcagcaaagggtatcaaggatagtcattgtgagcttttcgtgaggaaactgttgaatgcataggtagctactgtataagctaactaggatttttcagtcttagtaca

SEQ ID NO: 849538 - DNA, 534 bp, Homo sapiens
ctcttccttccccatttgctgttgtaacagacaaattcttcccctcccctactgtagcatcagttccayctaatttcaggcccttcagaccgagcttttgccccacagcagcttatatcaccattcatttcctcaaaaagggcaggttttgtcctacaaggaatgctctctttttaaacattgagaaaagaaaaatatttttggatctccacattaaaataagacagtgagggaaaatgagagagtatgatgccaacagagaggctggtcacaaagataggtcaagcagtttctgaatttgaaaagttgtgagggagggcagaggaaggattgaaatcaagcaacatgacaaagaagtatctgaataacttagcagctggtgggacctgtggaaccaaagagatggggaagtaaagttacaccagaattatgaatcagggatatttaggaaagtagccccatcatgggatggaataagaaacttagaaaggagagtcactttggaggggatgatggcgcatttaccttctcagg

SEQ ID NO: 849539 - DNA, 629 bp, Homo sapiens
aaataagatgggttgataggtgaatagagggttgaatcaatggatagatatatgagaaagcaagtatactgaaatgttaatggcagaacctaggtgatagtcactcaaaaattcttccaactttgctgtatgcttaaagcttttcattataaagtactgaggaaaattgtagaagtgaaagcaattgctatgtagttgttgatttcatggcatttacaatactcccagattaagggcttagtatatttaattccagaaggtaaaaatggaggagtcagtcacaacagctggatgatttctctctaccctgtctttttctcaaagctgcctgattgacttgcttagttaaaaggctgggttattctaacttgaatgtccaatataaagtgctcctggccaggacccctttcaggatgatgggaacagtatcaaagggagccactctcagtggaaatgctgttaagaccattctcctattactattttgaaatccaaaaaactaccttccaagcaatcttcttgtgaaattccccagggagttgtccaagtttgagtcatatacaaaacctccaaagtgggtatccagcactggatccmctacttgggcatccaatacttgagttgcataa

SEQ ID NO: 849540 - DNA, 626 bp, Homo sapiens
caatcatgctttcaacttcagttagaaaagtaaattacagacatcagtacacatcccccaaaatacttgagcatgcgtatcattaactggagatgtccacagctttttaagctgttgagtagatcacataaactatgagatatctgtagaggaatacctggcacatccatgaggatacttcctttcatggtaggtgtcgaggtaacatattcctttcccaagcatttcagtgaataactaaaatatgagctaagtatggttataaagtttatgttaagatttgtttaaaaaaggatatcaagaattcatggatccatcttatccataaatatcactgcatctttccctgagcatgtatgcaggaacttgggttggtatgacctcagaattcaggcctcacagatccccagctatcctataaccacactgaatgtgctgatataagttctctccaaaggccacaatccttacacccctacaaggacatctttcacattgctttcatatattacaatcctctttcatatacaggttctcagtartaaaaatcccataaagcataagcttattttttattaatatttgtcaaaccctatctttccattaacaaggaaaccttcttggcc

SEQ ID NO: 849541 - DNA, 310 bp, Homo sapiens
tctggctaattgtttgtattttcagtagagatagggtttcaccatgttgtccaggctggtcttgaactcctggactcaattgatccacccaccttagcctcytaaagtgctgggtttgcaggcgtgagccaccaagcctgaccaaaagaacatggtcttctgtttgccattccccacagagtcctgacaaagtcctttgcttgataaaagtgagttggattatgtaatttttgattacataattattgatgtaatatgattatagcccaatgatgaaagttttagcacccattgatgattcttgcctgaa

SEQ ID NO: 849542 - DNA, 639 bp, Homo sapiens
tgtccccatggcttccttcatagtattcatcccagttcactcagctagcttcttaccctcttctttgcctttccaaattatgacctttcctttagtgactttcataagccccttsaggagtgccttcataagccccttctgtcattaaaacattttttaaaaatttattttataactttgttggtataaagacaaatccacttgaaagtataataattttttcttctgactataaaagaaaatattctcatgggctccttaaagtatcatgggccctgggcactctgtctcctgtgtctgacagagaataagccattcctgctgcctgctccataaaggcgcccgaaacagatatctctcctcttatttcctcacttgtataattcttgtctcgcagggttgccctatgtaaagtgaaatagcgcagagtgcttaacacctggtccaacagcaaatagcctgtagttagtacccattttatacttaaactgacattgggcattgactagcttgacttaaatattacactgctatctacctttttacttatgtctaactctttagttaaactgtaaactcctagacggctgacagtatgttttaaaccagtggttctcaagctttggagggcatcaggag

SEQ ID NO: 849543 - DNA, 589 bp, Homo sapiens
tgtcagaaccatacaattccataatcccagaagacccctgggagaggggggcactgcctgccacggcttctgttgaggatgtccggctattggaraccatctctggacacctcctgttgatgacttccttgacaacgagaaccacctgatcacaagtcactgaagggtcctcttgttggtacaccaggatctcatcacagccacagtcaaagggctccagttctaggcaagggttctgacactcttccagctcacagcaaatctgtcggaaggcacaggaatttgtgtcagcactcaagcactgttgcactttgcaattgcactttgcaatttatctcgcttaatttttaaatataaaattaatctgtgttcatctgtctgaaaaagaagatctcaaacttagaaagttctgattactgtaccaccaaccctttctccaattctatccaactgtctctctgtttaattcaaaatccaggtgctcgattttgaaggctcctgaacgtttgggtaaaggagtttaaaccacctattctttcctaactgtaatataataccatcttccaatagcaatgtaattcgagttgca

SEQ ID NO: 849544 - DNA, 612 bp, Homo sapiens
tctcgttaggatcccctttttacttggtccttactgggtgctcttgcacagtggtaccaacagttgtccaacccatgggaccctataagccgccagggccttgcctgcatccagtacctgatagagtccagtagctatgttactaaggagggtcagtaggcagacagcagttgctcctccacttccttgacttataatgataaacctattgtaagtcaaaaatgcattaatacacctaacctatcaaacatcatagcttagcctagcctacctgagtatgtttccatactcagaactcttgttagcctacagttggacaaaaccatctataatacagtgttaaacatctcatgtcatgtactgaacacaacacattagagtacagtatcggttgtttaccctcgtgatcaagtggctgagtgggagctatggttccaagatcaggatgccagcagatctggtgtctgatgaggcttacttcctagtttttagagcagcaacttctaactgtgtcctcacatggtgggaggagcaamtgaactcccttggacctattttataagggcactaatcccatttgtgagggccctgctcacatgacctaattacttc

SEQ ID NO: 849545 - DNA, 506 bp, Homo sapiens
gctcagtcgtttaggggtagaagctattataaagtaagtttgcatttcttacaaatttccaaaagacatcaatgctgctgatccatgggccataattagaacaacaagaccttgagaacagagtccaggtcttattctatgtactataataatttattagcaatctactttggcaaccaagattatgtcatgttgaaggtgatatggtggtaagtagttggaacactgtgtgaaatactgcacattttatttcaggcaagtccatatccttcatgtttatgcacgtcaatttagatagcaagtgctactgtaaaatgtatttgaatacttttaggtattatttcactcatatgatactactcagtttctaaataatagcttggtacatagaggtctgtggttctaatcacacakagtgctcaacattggtcaagtcaatcacttttcctttaccagagttccttacctgccaaatgaaggcatttgcatcaactaatccacaaggc

SEQ ID NO: 849546 - DNA, 625 bp, Homo sapiens
ccactgctggctagggcagcctgcttttattctcttatctggccccacccacatcctgctgtttagtagagcccagtggtctgttttgacagggcactgattggtgcatttacaatccctgagctagacacaaaggttctccacctcctcaccagattagctagatgcagagtgtggaaacaaaggttctccaagtccccatcagagtagctagatacagagtgtggattggtgcattcacaaaccctgagctagacacagggtgctgattggtgtgtttacaaaccttgagctagatacagagtgccgattggtttatttacactcccttagctagacgtaaaggttctctacgtccccaccaatctcagaagcccagctggcttcacccagtggatcccgcaccggggctgcaggtggagctgtctgccagtcccgcgacttgcgcccgcactcctcagcccttgggtggtcgatgggagtgggcgccttggagcagggggtggcgctcgtcagggaggcttgggccgcacaggagcccacggaggggcgggggggaggaggctcagacatggccggctgcaggtccsgagccctgccccgcgggaaggtggctaaggcctgg

SEQ ID NO: 849547 - DNA, 327 bp, Homo sapiens
tgcagacaatgacaagaaccctgaaggaatgtgaagggtctggcacccacagctacagcaaacattaaacatagcccaactctttgtcagattatcataaaacttcacaggaaaggcctatttatctcagtttctattccctagcacatcgtgttcagattttcataaaaatgtacaaagcatgctaagagacaagagaaacacagtccgagacacaaagcaagcmtcagaaccagacttagatatgatacagatactagattatctgacagggaatttaaaaactatgattaatatgctaaagatgctaataaaaaaattagacac

SEQ ID NO: 849548 - DNA, 545 bp, Homo sapiens
ctaatccataaaactaccatggtcatctaaatgatctccaggatcactcttgcaaaactctaccataacagcactaactaatgcttcatttttgtcatggttactcatygagaacccttagatattccagacctgagcaggactggggcaagggtgagacgtcataagcacttacctcaggaacagaacttaaggccctaccaaaaagcacaatgatatggtttggttgtgtccccacccaaatctcttcttgaattgtagtttccataattcctacgtgttgtgcaagggacccagtgggaggtaattgagtcatgggggagttttccccacggagtgcaatggcgcgatcttgtctcactgcaacctccacctcccaggttcaagcgtttctcctgcctcagcctgctgagtagctgggattacaggtgctgccaccacaccaggctaattttttttttttttgtatttttaacagagacgggtttcaccatgttggtcaggctgttctcgaatttctgaatctggtgcttttataagggggt

SEQ ID NO: 849549 - DNA, 545 bp, Homo sapiens
ctaatccataaaactaccatggtcatctaaatgatctccaggatcactcttgcaaaactctaccataacagcactaactaatgcttcatttttgtcatggttactcatcgagaacccttagatattccagacctgagcaggactggggcaagggtgagacgtcataagcacttacctcaggaacagaacttaaggccctaccaaaaagcacaatgatatggtttggttgtgtccccacccaaatctcttcttgaattgtagtttccataattcctacgtgttgtgcaagggacccagtgggaggtaattgagtcatgggggagttttccccacggagtgcaatggcgcgatcttgtctcactgcaacctccacctcccaggttcaagcgtttctcctgcctcagcctgctgagtagctgggattacaggtgctgccaccacaccaggctaattttttttttttttgtatttttaacagagacgkgtttcaccatgttggtcaggctgttctcgaatttctgaatctggtgcttttataagggggt

SEQ ID NO: 849550 - DNA, 589 bp, Homo sapiens
attaaacattttttattttctttgttctaacaaaaatgtattcatttgtggattttttgccttgttatattgtaaatgccaacatttatggcctgggatgcaaacactacacattattgaataaaaatcaatggcttattaacaaacatattgattgtttagtaatgagatgaagatatgtttacatatcatgcactctgaccctatcaattgtaatgaatctaagtttttttcaaatgttgtagctccattgttcagaaattagtggaaggcttcagcttgataagtaacccttggtaagtttgtttactgggaaatgaggtcctagttgatgttcttatgcagtgtctaatcttggggaatggattactgatgttacctggaaaaggcaatgcctttgcttcatcacacccagaagacagattccaaggcagtgagtgacctgttgagataagatggaagcaggctctagatcatggtgaatcatagctactaggataaataatttgtataaagacatctctggaaagtctttgagtgatctcagtgatgtgmatttatttgaacttagaaaggtcattctgctgtc

SEQ ID NO: 849551 - DNA, 605 bp, Homo sapiens
caaatatagaaaaatatgataataggacaataaattgtttatagaaaacaaagcagagcaaaggctagagaatttttcatgggatgatccacagaggacagttsaatagaactctgaatacagtaagaaaatgagctttatggggaatgaacattcctggcaaagaagaaataaagtgcaaaatctgaaatcagaacaatcttagcttatcaaaagttaagtcagaaataggtgtggcaaatgaagtgaataacctagaaccatatgagagacaaggttggaagggcaggcatgtgttgggtcatgcagagcttccttggtgtggaaaaatttgccttttgctgtgagtagataagaaggctcaggagatctgagtggaggagtggtgtaatctgatgtacaattatgaatgatcagtctggctgctgagtggaaaagtgtcagtaggtggaaaggagttgaaactgtgtcattaagaagacattacctggtttaggaaagatgacggtcatttggaaaagggcagaatcaatcatggtaatgagaaaacacagtttcgggaaatattttgaagatgaaacaaacgacttgctgagaaattgaat

SEQ ID NO: 849552 - DNA, 615 bp, Homo sapiens
gactcatccgtgttgttgcatttatccggtaattttttttttttttttttttktttttgaaatggagtcttgctctgtcgcccaggctggagtgcagtggcgcaatctcggttcactgcaagctccgcctcccaggttcaggcaattctcctgcctcagcctcccaagtagccggtactacaggcatgcgccatcacgcccagctaatttttttgtatttttagtagagacggggtttcaccatgttagccaggatggtcgtgagctcctgacctcgtgatccgtccgcctcggcctcccaaagtgctgggattacaggcttgagccactgcgcccggcgccagtaattttttttattgttgagtagtattagattgtatggatatatcataatttgttcttggttataatgaataaagctgctataaacattaaaaaaaagaaaataattgcacatttcaatcatatggctattttgtatcaagtagtttaatatatagccactataaagatgattttttcctgtactgaatttgataattgttgcattaaaattttcctcagaaaaaaaaaaaatctcaagaataaaacaaaggagatttagactgaaaattt

SEQ ID NO: 849553 - DNA, 487 bp, Homo sapiens; identical to SEQ ID NO: 848520

SEQ ID NO: 849554 - DNA, 574 bp, Homo sapiens
agaattgagcagtgaagccattggatcctgggattttytttgatggaagactttttataactaatttaatctccctactagttattgatctgttcagattttatatttctttgggattcagttcgatagcttgaatatttctaggaatttgttcatttcttccaggctatccaatttattggtatgtaataattattcatagtagtctcttacgatcctttgtatttctcttgtatcagttgtaatgtctcctctttcatttctgattctatttatttgagtattctctttttttcctaagtagtccagctaaaggtttgttgattttatcttttcaaaaaaccaactcaaggtttgttgatcttttccactgtttctttttcctctactgcatttatttctgctattatctttattatttccattcttctgctaactttggacttattttattcttgttttcctagttccctgagatgttattttaagttgtttattcaggacctttattcctttttgatgtaggcatttattggctggtaaacttcactcagagatactgtgctgttccctt

SEQ ID NO: 849555 - DNA, 446 bp, Homo sapiens
ctttaaacttttctttgtgatacccatgctttgctcctccttctgcatcatcttgagcttgtacccaggctagggtaaaaaaggcctgggaattttactctttctgatgttcaattctgattcaatgatacaatgtcaaactgacatgtattaacctcctgaaaaaaaaagagagatcagattttaaagtaactaggaatagcatagatgaagaagagaaacagtcaataataggagaaaagacaaaatgtctgcataactattaatagaatatatcaaaacacaggaaaatttgcatgacattctaaaagtcatttagtcctgcctcccatcaaattattctccaccaaaaggccttcaaaagattagttggsacttcattaaacacttgctgggccagacagttgataaacttaggaagtgctgctactggcctgagaagaggg

SEQ ID NO: 849556 - DNA, 628 bp, Homo sapiens
cccctcgctggatgtgttgaagaaaagatgctgtttttctgctggggttgctaagtacaaggatcatctttctgaaaacaaagtcagtacagaagaaagccaagccaaaagatggagaaaaaggctccttgaaacagtgtttgagtgcctggttccagacaagcctaaagctacactgattcatggaactttcaattaggtgctatacatctttttaattttttcctaagttggtttgagtttaattttgttacccacaaccaaagaatttttttttgtttttgtttttgttgttttttgagatggagtcttgctttgtcacctaggctggagtgcagtggtatgatctcggctcactgcaacctccacctcccaggttcaagagattctcctgcctcagccccctgagcagctgggattacaggcacccgccaccacgcccagctaatttttgtatttttagtagagattgggcttcatcatgttggccaggctggccttgaactcctgacctcaagtgatctgcccactttgggctcccgaagtgctgggattacaggcatgagccactgtgccyggccaagaaattttaaaataccaatcatgagatgaagtaatatatgaaaag

SEQ ID NO: 849557 - DNA, 668 bp, Homo sapiens
tgcatctggggtcccaaaatttaatttcttttcacaatgcctagggttgttgtgtggcttaaaagaaattcagtacttaatcactkagaacagcatctggcgcactcaataaatgccagctgctttctcttgcccttccttttcataccatttgcctcagccacaaccaaatcattcaatttcctagacatgctaagctgctacatgcttccaacccttttcatatactgctccctctacttggagcacctcttcccatttcctcctccctgctatacacctagtgagctcttattcaccttttttttttttcttttcgagaaggagtcttgctctgttgcccagtctgcagtgcagtgacgcgatctcggctcactgcaagctccacctcccgggttcacgcctttctcctgcctcagcctcccgagtagctgggactacaggcacccgccaccacgaccagctaatttttgtatttttagtagagacggggtttcaccttgttagccagaatggtctcgatatcctgaccttgcgatctgcccgcctcgacctcccaaagtgctgggattacagatgtgagccaccgcccccagcccttttttttttttggagactgagttttgcttttgttgcccaggctggagtgcaatggcacaatcttggca

SEQ ID NO: 849558 - DNA, 590 bp, Homo sapiens
aaatgaaacaattaacaaagtaacagacaacctacagaatggtagaaaatatttgccaactatgcatccaacaaagatctaatatccagaatctataagaagcttcaaaaaatttacaagcgaaaaacaagcaaccccattaaaaagaaagtgggcaaagaacatgaacacatttcaaaagaagacatatatgcatttaaaaagcatataaaaatcactcatcatcactaatcactacagaaatgcataccatctcacaccagtcagaatggctgttactagaaagtcaataaataacagatgctggcaaggttgtggagaaaatggaacacatacactgttggtgggagtgtaaattagtttagccactgtggaaagcaggttggtgattcctcaaagaactcagaattaccattcaactcagcaatcccattattcccaaaggaatgcatatcccaaggaaatataaatcattgtaccataaaggcacatgcacgtgtatgtccattgcagcactrttcacaatagcaaagataaggaatcaacctaaatgtgcattaataataggctggataatgaaaatgtggtat

SEQ ID NO: 849559 - DNA, 641 bp, Homo sapiens
aagaacttaagtgttataatatttagaggctaaaaggagaaagaggatagagtaatctgaaaaagtctaccaataaggaaggtggaaaattaggaaatgtggtattctaataggaaccaattccaagtgaaacaggcatttcagaaaggtggaagggatcaaatttatgtaatgctcctagagaaataaaaggcttatggaagattggaagatcaaatgaggtgagaactgtgcattacatataggaatatgggggtgatcttgatgaaatctaattcagtataatgcttgaaactaagctaatggaaatggtgaggtcattgataatgaactaggttaagtaatgtgtgagagtggagaatgacaataagggtggagagttccaataaggtgatggaactgagacaccagggtgttaaataattgtctattggttgctagtctctaaaaagacactaggaactaaaatctttaatgaatgaaggatgtatttattggaacgttgctagataattgcaacaaaaatagtgktgtagtctgagggcatatatattaaagaagattctctttttaatggtaaaggaatgagaaagtgtccagaactctaatatggagcaaggaggatacctaactcatctctt

SEQ ID NO: 849560 - DNA, 501 bp, Homo sapiens
attgtaaacgcaccaatcagtgccctgacaaaacaggccactgggctctaccaatcagcaggatgtgggtggggctagataagagaataaaagcaggctgctggagccagcattggcaacccgctcgggtccctttccgcagtgtgggtgctttgttcttttgctctttgcaataaatcttgctactgctcactctgggtccacgctgcttttatgagctgtaacactcaccacgaagatctgcagtttcactcctgagcccagccagaccacgagcccactgggaggaacaaacaactccagatgcgcggccttaagagctgtaacactcaccgcgaaggtctgcagcttcactcctgagccagcratactaccaacccaccaaaaggaagaaactccaaacacatccaaacatcagaagggacagaatccagacgcgccaccttaagagctgtaacactcaccgctagggtccgcggcttcattcttgaagtcagtgag

SEQ ID NO: 849561 - DNA, 550 bp, Homo sapiens
ttccagtaatagccagtcctaactgtaaacttgcaagtggtctaacttgcaatcagagtccctgcaatcagggtgcgttctgtgaagactctctcttggcaagagccagcacacatattaagtcctgtgagtaagctcctgtaaacaaataaacttttgtttcagaacaccctgcatgtacttctcctttctgtctttaaactttcccacgtctcaaccaccctggatgcacctatgatttattataatgtgcatacctgaatttggtatgcatatggtcccctgctcattcttaaataaactcatttctttggagaactactttctctcttgttattttagcttgacataatctggcatcagaagtaggacccaaagtgagctcatcttggaatgatcatcagcccctgaaaccatgcatggtattcacttgttgagccctttgatttyttcatttccacagctgaccttttctactgtgttgagtctccccttgggttaaaatcccttctttttgtctagttcaggatcttatttggataaggtcacc

SEQ ID NO: 849562 - DNA, 596 bp, Homo sapiens
atacaagaaaaacattttcagagacacctaatagactattagaagaaagcatctgtgcaaaaatgatagtaggtgcccatytgttgaacgggttggtggcctccccacatcaggcatgtttaggcagagggtgagctgagctggcgtgttgccatcttgcagggagtgatttagagaaggttcctgtactgagtgagattggacagctggtaacctctaagagctcttccagcagggagattttagaatctcaacaatacttattgaacaagttctaccattcaaagggatgagaagactctggaagttttcttgttggtgagaaaagttcagacgaagcccagaggtcactatctagggagatccccattgaggtcaacttgacctgaggaacttgggtccctgacctcgtcacatcccaatgcctgctatgggctgaaacactcacccttgccatgagatgtttcgataatccaggtgcagttcaagttgttggggtagaagtcagggaaaccctggcgacaagatggtcccactggagccttgaatgaagccaccacagagagctacagaaggagtgaagagggcagtgaaag

SEQ ID NO: 849563 - DNA, 623 bp, Homo sapiens
ctagggcagctgacctggggctccgggtactctgagccctgctgcccattttactttttattttacagacaggaaacaattatacataaatgataaaagttcagagttcagggaaagataagtcgacccacccaaggtgatccctagctagtccttttctctaaggttaacagagcttcaagtttcttccatgctgttggtgaaaatgtgtatgtatcataacaacacacatatatacatgactgaagagtcatcctatttacagcctgttctgcacttcctttttcacctgatgtctctggattgtaggctcttgccacatcaccacataggatctcttcgttcttttgagcagccacattagtatctgttgatggcagtccgggttgtttccagttgttattagaaataatgctgcagtgagcaccctcgttcatgtatcttagagtagttttgccagcagagccattgggtaagttcctagcagtggaattgctgagtcaaacgtttttttttttaaacaacactctgttgggagtacagaggaggagctggtgggatggcggtagggagtccagctggaggccactgyggggatcctggggcaagtggtggtgatggct

SEQ ID NO: 849564 - DNA, 536 bp, Homo sapiens
gtgggtccaccagacacggaagccacatctgcactgtctcaagaacatccatggcatgtgagcctagaaagaattcccaactggacagaacgccagtgggaaaggcccgctgatgggtgcagggcgccatctgcagcagccaggaagatgcctgccttggtgaggatgaacctctcacacgctggcctcttggatttcctccctgggagaaggacagcagcccctctggctactgcctttcttgggtccatgagtttccagtattttaaggtctaactctcaacccatctttaatatgtctgcagccttgccccaagctgagaccctagcaatgcctggtccagtccaacctggagctcacacacctatttctggggctacactcatctccaccccttggacaaggctccagttttggcagtgttctgggaatgcayacagatccacatgtggccatccaatgccccggatggccatcctgcatccctctctctcctcccaccaccatcatgtgacctaccacttctgtttttggg

SEQ ID NO: 849565 - DNA, 626 bp, Homo sapiens
actcacccctgtagttcccaggaagagttctgtgtgctttgactcttatgaaaagaaatagccggcacttcattaaacacatgagagaagcacaatccattcccgkgtttgagactgtctatatgtttttgtgcttccccaagtaggctgaccttctagctctgctctttctgacaaatacttcaatgagttggcattcaccaaggggtgtgtatgtgtgtgtctgcacacacatgtgtgtcaaggaatgcaagatcccactgaagagtctgttggatctaactggcaaattaccctgagaggaggagaaacaaggtggggggtggggtggggggctgtaaaaaggttcctagtgctttttacacatcagatgcatcagcaaacactcgcttctggggccacccagactgcgctgtgctcaccagagcagatgacaggttgcaggtctgccctgcaggtcaggaggatgcaaggagttgtggtgacagagaactgagggacaggcaaggtgctctgggcaggcgctgtgagcggggattagggggatcagggaggctttgtggaagagatggtacttgagctggggccttaaaggacggcaggactcgaggatgcaggaggtgata

SEQ ID NO: 849566 - DNA, 350 bp, Homo sapiens
tccccaagggtggcctgtcccctggggaccagctgggtatcactctccggcagaccagactcccagagccttgccatccctgcccccaaagcctcctggctctctgtcccaggaacaataataagcccccacatcctaagactctatgtaggcaccaaaggaggctgatctcacttaatcctcccaacaatctcctgaggtgagtgaatccactcatttattttatatccgacctatcttgctggtgacacgaacagttaagkgtcttgcacaaggtcacagttaatggatgctgggattttcttcctggctggatccagacatcacaaactcacataccacccaccacc

SEQ ID NO: 849567 - DNA, 614 bp, Homo sapiens
tggtcttgattgggtcaacgcatttcagtgaatttgaaacatgtatcagatgcacatgacttacatcctagttgattgactccctgcaagctgaggatttctatcctcttcctgtccaaaagtgcctgagttatacattttgtgttcttgagagcacaaactacacagctaaccagtggggactaccatatggaaccgactgattttgaaccccagctcactgatcctcatttttaattttttttttaatttcagggagtctgtgtagtccagacctgtaatgaaggaattgaagaaataatcacaaggtatgtgtatgtgtgtatgcaggtgggttccagacctcctgggcccactgtgagagcgtctcgggcctgcatccctctgcctgcggacccagaagaagctggcaggtaccagagatgagcaatccagagaccaggaggttaaggaagcatttattgaaaacctgtgatgtacctctggcccagaccaagaggcagagtcaagccaaggcttcaatcagtcatcaggagactggggatcttgggccygacccctactcctcaccagtagacttagctgtatcaaaatagctcctttatttcctgaaa

SEQ ID NO: 849568 - DNA, 546 bp, Homo sapiens
acttaagagtatagtgcagcaattaagagctcagtttctggaattagacagkttagcggtcccaatcttggaggtgccttctgcctccctggagacagctgtttctggacaggggccagcgggccatgtcagggagacatgagagagggaggagggagacaggcggcagcaggagcagagctggctggacagggctttgtccacttgataaagctggcatgttccttccagctgtccctgtgatgctcgcttatgtctggttttctcatgactcagagccacagggcaggcctctccagcagtagggagaatttggatttggatatggtttgagaagaaatgaggtagaagactgtcttcctttgctgccacccaccacaactccccaggccagtgctggatcccttctggtgatcagtgagcctggggacagcctgccagttagagctggtgaccactttggctggaggtctgcaggagtgtacaggacccaagagccagagaatcattcctttctcctaggaagaggcaatgagaagccagaga

SEQ ID NO: 849569 - DNA, 607 bp, Homo sapiens
cttccctccaatcaccatcaagtgcgagttctgttcttctcatccgtgcctggcagcatgtgccgtagggtagtacatagctcagtaatactgaactcacctggggagttggactgtgccttagctgcagggtaagaggagaggaaagaagatcattttgccctaagataactaacaggttaacactgtctcttaataacactgagtttagacaactggtgtattatttcatgtatgaatgttaacataagattcagaggggtctctacactacttagtaagaggatagaaataaggactagttaacaatcctggcttctcatggacttcagagatcagatggacacccccataagacattcatccattttctgagtgtttcctgtgtatgtggcattgtcctagaaactgtggggttggtagaagtgtgatagagaggagacaaagaaggataagacagcatttgcctcatggtcctgccgacatgctttggatgtgagactgctcttctgtraagttaaataacacatgacaacaagacagatgccatggggtgatatgtggttaattgtcaagtgatcgtttcaggctatgagctcgcagaaga

SEQ ID NO: 849570 - DNA, 591 bp, Homo sapiens
ttttccggataatgatttttgtagttaatgaggttccccctcccagttctctaattacatgactctgcrgtcaaatttagtaaccatccagctatctatttatacaccactgggcttctcagctcttcctcctgaggttcttccatgaccctgttatttctcaccactgtagcaaatgaagtatgtcttgaagaagatggttatttcccctaaaaggactctcggtatgtgaagagacactgctgttgtgaataattagcagaaatattgttgggatgcttggtcttaagactaagtgtttgaaagctcggttaatgctcgtctggaattgcctaatgttcttataggttttctcactattaaagtggaacctcataatgatgcccaaaaggaattgcccttccttgtcaatcatatttatcacagaacatctcaatcaacttatgaaatccttcttgaacatttgttgaacccagtaatgtgctgtgagctctagggaaatggctgggggagctttcaaggaatagatcctcaagcctcatcccaggattcctgggatcagaaactatctgccagagtctaatatgcagc

SEQ ID NO: 849571 - DNA, 599 bp, Homo sapiens
attttgaaagggtttaatgttctgctgacctgtctaacaggccccttggaagagcaagatgatgtacagattgtcctacctgaagactgtggaggagaggarggtgtctcatctccccagtctccaaatcgtcagcattaagaagtgtttgttgaataaactgaataaacaaatgaagagatgagtggaccaaatttttaaatgtcttgggaaggggtcataatcatattgagaatataaatataatgaaaactatgacttcttattccgaaattacacttatgaaaacacattttatgtgtcatttcaggatgtttacagatactgatgaccatccctagaattcatattgagaatttccgtgccacattaacttccagatgtccttgggaaaagtgtctactatgctgccttggtttcctcaatgagagtgagaacaaatggatctgaagaggtgatcttggccctaatttccaagttctgggaagataaacagggttttcttttgaatccttcggagcctgggagcttcaagagaaactcaactccaggcacttgaactgacagagaatttagattctcctccagggaaaggggca

SEQ ID NO: 849572 - DNA, 602 bp, Homo sapiens
agttgagcggggaaagtggggttagggggaaataactctgggagcccccaggtcctcagatagcctcctctgtrctaagcttactgcccttagggatctcacttttgctgggccttgccttgttcagcgcactctatcagggtcatgagcctcttgcatgtaaggaagagaaagagtcctcaaggtaggagagtggctcctagtggttcccaatgtgagtagctgcagggagaagacactagagagagtggccagagtagcctcagttgaaatgcaggcgtgttggaggagagaggtgcccgaatctctctggacttgagtctcttaggaacaagtggctcaggcctgtgggtctgaagacaattggagagtgggggtgagaggagcctgggctctgatattaaattcttttccattttatcttgatttcccagatcactagctgcatggtcctgggcaagtgactttgtccctgtggtcctcagctccctcatgtttgaatagaagtaatattccattggaggggagtggtgaggattaaatgcaagaacatagacaaatctccctgttctggtcctagcaggaagtgcctaattgatgtg

SEQ ID NO: 849573 - DNA, 602 bp, Homo sapiens
agttgagcggggaaagtggggttagggggaaataactctgggagcccccaggtcctcagatagcctcctctgtgctaagctyactgcccttagggatctcacttttgctgggccttgccttgttcagcgcactctatcagggtcatgagcctcttgcatgtaaggaagagaaagagtcctcaaggtaggagagtggctcctagtggttcccaatgtgagtagctgcagggagaagacactagagagagtggccagagtagcctcagttgaaatgcaggcgtgttggaggagagaggtgcccgaatctctctggacttgagtctcttaggaacaagtggctcaggcctgtgggtctgaagacaattggagagtgggggtgagaggagcctgggctctgatattaaattcttttccattttatcttgatttcccagatcactagctgcatggtcctgggcaagtgactttgtccctgtggtcctcagctccctcatgtttgaatagaagtaatattccattggaggggagtggtgaggattaaatgcaagaacatagacaaatctccctgttctggtcctagcaggaagtgcctaattgatgtg

SEQ ID NO: 849574 - DNA, 602 bp, Homo sapiens
agttgagcggggaaagtggggttagggggaaataactctgggagcccccaggtcctcagatagcctcctctgtgctaagcttactgcccttagggatctcacttttgctgggccttgccytgttcagcgcactctatcagggtcatgagcctcttgcatgtaaggaagagaaagagtcctcaaggtaggagagtggctcctagtggttcccaatgtgagtagctgcagggagaagacactagagagagtggccagagtagcctcagttgaaatgcaggcgtgttggaggagagaggtgcccgaatctctctggacttgagtctcttaggaacaagtggctcaggcctgtgggtctgaagacaattggagagtgggggtgagaggagcctgggctctgatattaaattcttttccattttatcttgatttcccagatcactagctgcatggtcctgggcaagtgactttgtccctgtggtcctcagctccctcatgtttgaatagaagtaatattccattggaggggagtggtgaggattaaatgcaagaacatagacaaatctccctgttctggtcctagcaggaagtgcctaattgatgtg

SEQ ID NO: 849575 - DNA, 618 bp, Homo sapiens
cacttgccacacctggtgacaaggagaagaaggcgggaattgccatattggccatgtcagatgaacctagtttttaatcgccagcatttgcctatcaaagcttgctggcctggctcttcaagccacctttctgttagaagcaaaatgtttcgagggttgtttccattaaaagaaaaatttccactgagaactattaccctatccagctgcctaaaattatttcttaataactcctgtattatttcccttttaaagagaagtaaatctaactgctgttaggaggtgttgaacgatgacttttttctggatacttcctgctgaaaaggggcattgtgtggggggacagcagttaggccttctcctgaggttgatctaagggttcttgaaagaatggcccacatgtggctctgctcgcagcactgtttggagtttgattgtttctaggcaaaaagagatacattttacaagaaagtttaaattataaggttagaatgcgagcattaagatgaccattgtttagtgggggtcctatggakgtaggccagagaggtagacacctgttagttacaccaatggaccgcaatactggttttcctccactagatgttgctgtacatt

SEQ ID NO: 849576 - DNA, 625 bp, Homo sapiens
ccgcattctgtcctgtggttggtaccatttcctgtgttcttcatgagaaaatgatactcctcatcccttttttgactctgggcgtcttcatgtgtggttcttgcctgtagcctggtgatgcccttggcccatggaggctgtgtggtctccaaagacagctgtgttttttatatgcttgtatttgctcttcagttgattttccttctctgctgagtgcacttgccgctgttaatggccttgtctccatcagacctccgtttcctaatgtgctgcttctaaatctgtgcttgcagacaccaaagggtaacgggctagaattatgtcggaaggaaaattcagcatatttggagtaataatttaaagggctccgagtgagcagagtgtaggaagtggagttcatggacttgtgacatgtattttggcagtactttgtgagctgtggttccctgtatccaggtgactgggttagttagttgggttgtcagggtcagcattgtattcctatatctgttcatatttttctgaacttgagctaatcccactyggttggcaatgtaagtgatacagctttgtgcgtgattgatgcatttcatttgggatgagtttataaggatatttattatta

SEQ ID NO: 849577 - DNA, 674 bp, Homo sapiens
tacactttgactatttataaaatgtgtgactttgagtgcttcgccgtaactctycaggaaatgaggacaccagtacctgcagcagccacaagccctgactcgcagacgagtggctttgggcttttagagaatggccagagagtgtccctctggggtgagaggattccaagaaggtactggatacataatcattttgtatgaaatctggatgccaaccacctaagactcctggtctttcagaggacagaagtccatacgagcatttccaggcatctgggcccagtgctgcggctttgcttgctgccagagaagaccacctgggtgtggtcacaaccacaccactgggtggacagcacaccctacccttgcccctggcagagcaagccctgatcaggtgttagctacaccttaacacagcacaagccacgggaacacttccacggcactgtcacacagtggtcgtgacggctgaatgagctaagatctgtgatgcactgtgccagtcaggacctgcaggagaaagaactcgccccacgaggtccagaggaaaagtcgctaatcaaattacaactttgttacaagagaaacttgggactgtaacacccttcccctacaccagaaagatgttgagagaccaaagaatgactggggccagtccagtctggtgagcagat

SEQ ID NO: 849578 - DNA, 611 bp, Homo sapiens
gggttgttccccaattcctaggctgctgcagaagcatgtgyccttagaaatgccccagaatggcaggaaatcaggaccagaatggaaagaaaagcaggaaagcaaggtgcacttacaattacttggtagatttgctcatgtggtttggacgcaatgttccttgatgcgtattcatcttaagcccacctcagcttagaccatccacatttgctaagccctttcctcagcatcctgcagccaggttgtcgctgttctaccatcaagggcaagcagagggtgatgtgttctgagctcagaaaggctgcaaggcttgtccgagaccatgtcccatggagggagctagggttaccctacaccctgtctctccttctccaggaacagaccacacacctcacatatggagggggcccttcatcaactgtccctgctccccagtcttaatccatcctcccaattccagctccttctctgccagagacacttccctcccttccttccccacctttgctccccctattgtgttggtccctccaggagcagtggagatgtctactctctctaaccccagcttccagggcttgggggtccactatgtgtagccatagcaacaa

SEQ ID NO: 849579 - DNA, 634 bp, Homo sapiens
cctgctcagcgcccaccgcggcggccctgccctttcccccgggagcagcagggacagccttggagcagcagctcccgcagggggaggaatggcgcagtggcccgaggctctggagctggccccctgctcgcccggggctacctcggggaagcgcagaattcgcacctttcttctccagctccacgcacccctcatggaaccttagcgaggcccagggcaggggatgctgccaggccgctgccaggctctgacgcggttgcggatgcctcgcccggtctctccggaggtggaggagtggcacccctggctgtgcactgcggtgcaccggtgtctgctcagggcattctccaccttgccctccatcccctcagggtcaagtgaggagggagacaaatatcccaccttcagaaacagccctgagaaacgtttatttccaggggacagtgcgattagacctctcccggcgcggtgtatttctgtgcttaatattattatttatacatcaatattgacatccagcgtccattkatacgtggcatgcgtaggtgctaagaagcgccagctacatagcatgctttatttatgtgcggtaaatatttaaagactcccatgtgtttcgattggaaagtgcgta

SEQ ID NO: 849580 - DNA, 528 bp, Homo sapiens
ggatcccactttaacagcataagtgcctgtttattgcttttatagtgcccgttttctttctactgcctgggaaggataattcaattttaatctgtattacagactattaatattaataagtttatatattaatagttttagcattcttgtaaatgatataaataatattatagataataataagatttcatggctggggtggttggggagctgcagaaagctgactctagtcactcattgtagggatgtagtctacacagggtggaggaggggaggatgagaccctgaggggaaaacatgtcttggggctcagagtcagggaagaggccagacccaggctgggagagaagggaactaggacaccagaggccctttcttgctggggctgtccctgctcccagctctgaggtagcagygactgcactgtatctcagtggctttccctgagcaggtcagtcacaaggcctggtctctatccgcttccccacaactacatgggcaagggaagagggattttgagcccgtcgc

SEQ ID NO: 849581 - DNA, 657 bp, Homo sapiens
agcgtgtctttcctactctgcaaattctcactgtgactatctggtcttactgtgcttggagagtggacactagttcagcwgtataacaattttaaagtaaatgtttccaaaatttccaaaattcactgggaagtcaatcagcagagctcaccctgtcatgcaggaagttgatctatggtcactgattttcactgattttttttttttttttttgagattgagagacaggaccagctggatttcctaggctcactaagaatccctaagcctagctgggaaggtgaccacatccacctttaaacatggggcttgcaacttagctcacacccgaccaatcaggtagtaaagagagctcactgaaatgctaattaggcaaaaacaggaggtaaagaaatagccaatcactatcgcatgagagcacagcagagggacaatgatcaggatataaacccaggcatttgagccggcaaaggctaccctctttgggtcccctccttttgtgtgggagctctgttttcactctattaaatcttgcaactgcactctcttctggtccgtgtttttacggctcaagctgagctttcgctcactgtccaccagtgctgtttgcctccgtagcagacccgccactgacttccatccctctggatccagcag

SEQ ID NO: 849582 - DNA, 437 bp, Homo sapiens
tctagagcaaccaagagagccactcacgagaaggacagccgaggagccagaggagaaagtcactgcaggcgccgctgaaccttctytccagctgtgggatatcattccattctttttccagagctcaagtaaccctggtgctcaaattgctcaaggacacacaggaataagaaatgatggaccaatttcacctatgagcaaaaattcaataacattaaaaataagcagattcaatacagagatatattaaaatatataattttatgaccattaagatttatttaagagaataagaataggtcaagaacacaatatctatcaatatatttcagtgaatgtgagaaatatattttaaaatgtatatatttaattgtgaattatgatgaataatgaatttatgtggaattttaaagatggtttaaaattcatgtttaata

SEQ ID NO: 849583 - DNA, 618 bp, Homo sapiens
agttaggaagaaaagaaaaaggcatgctggagtaaagcaaactgaagtgaggggatgggctatatagaggtgacattttacaggcataaaaaataactaacagcaaggggtccagtcatttattcaccattgcataaagatgtattcaagaaacaggtagaattctggtatttctggagcaccgagagagatcaaaagtggtacaaaatgatatcataggccaggggcagtggctcacgcctgtaaccttggcactttgggaggccaagggggggcggatcacctgaagtcaggagttcgagatcagcctggccaacatggtgaaacctgtctgtactgaaaatacaaaaaaaattagtcagcgtggtggtgggcacctgtagtcccgtctacctgggaggctgaggcaagagaatctctgtaacccaggaggtggaggttgcagtgagccaagatcacaccactgcactccagcctgggtgacagagcaagactctgtctccaaaaaaaaaaaaaaaaaaaaaaaaaaycataaagttactcagggaccatagaatggaaattccttactatctgtggtaaagattttgatttataccatcaatgtgaggttgtaga

SEQ ID NO: 849584 - DNA, 478 bp, Homo sapiens
aattctcaaagaaaaaatatcagtgaagaaccctatatcaagcaaagtattgttcaaaaataaaggtatgataaaggtgttcccaaatgaataaaactgacagaatatgttgctaatagacataycttacaagaagtagtaaaggaagttcttcaggctgaaagcaagtaactacaaatggtcacttgaattcatataaacagcaaaagcattgataaaggtacttacataactataatatatactattaatacagatccttttctttcttttattaactaacagaattagcaattgaatagaatcatgtttataatggatttttaggctcataacacatacaaatgtaatgtatatgtaatatgtttgtgaataatggcacaaagaaggtgggctggagcaaagccataatgggctaacgtaataacgacagattataatataataattatgaaaatgtattgtttggtttgtaaaa

SEQ ID NO: 849585 - DNA, 559 bp, Homo sapiens
ctctgcctcccaaagtgctgggattccagctgtgagccactgtgtccggccttatatttatttttaatggcaaaaatataytgatacatgctcgttataaaatatttataattcagacttatatggagtaaaaaatttaaagtcttcccacgccacaagtactctctagacaagtgcatccctccttagaatagggaagagagttctgtaacatgtctttacgaaagtttatgtagtgaatcacttatgtttaagttgtttccattcttctgccatcacaaaaaaatgctgcagtgaacatccttctacatatgacattgcatgcttgtgaaagtctgtctataaggtgaattcctagaaatggaaatgttagataaaaggcatgaatatgcatttaaaatttacatgatttagaggctgggtgaggtggctcacacctgtaatctcagcaccttaggaggccaaggtgggaggattgcttgagcccaggagttcaagaccaccctgggcaacgcaggcgaaaccccatctttaccaaaaatgcgaagattagccggat

SEQ ID NO: 849586 - DNA, 561 bp, Homo sapiens
aaaggcatgaatatgcatttaaaatttacatgatttagaggctgggtgaggtggctcacacctgtaatctcagcaccttaggaggccaaggtgggaggattgcttgagcccaggagttcaagaccaccctgggcaacgcaggcgaaaccccatctttaccaaaaatgcgaagattagccggatgtggtggcctgtgcctgttgtcccagctactcaggaggctgaggtgggaggatcacttgagtctgggatggagaggttgtagtgagccgagattgtgccgctgcacttcagcctggggacagaggcagaccctgtcttaaaaaagacctagctgggcatggtggcaggcacctgtaatcccagctacttgggaggctgaagcaggagaattgcttgaacccaggaggagaaggttgcagtgagccgagattgtgccgctgcactccagcctgggtgacagagcaaaacactctcaaaaaaacaaaacaaaaacraaatttacatgattttcagttggattcctagtatatcacatgacaaatggtcccaagtaggcca

SEQ ID NO: 849587 - DNA, 594 bp, Homo sapiens
gtcctgatgacaaagctggttctgataagtagctattttgacatgcacagcagcttcctctacaagtcctgtgtttggagggtttcatttagatcagaggaagttggaatccaagtttaaaagkctctctgctgacaaaatgtgatatatccatcagtggatttctactcagtaatgaaaagaacaaactactaaaacatgttatatgtcatagaacaacctcaaaaacattagctaagtaaaagagccagacacgagaccacatatggtgtaattccattgatttgaaattttcaaaaaaggcaaatttatagagacagaaatgggctgatttacctcaaaaggcagggattcaagctctctagactacacatgatacatacatgagaaaaaataaggaaaagaaatttaaatataaataaatgaaaataatacttctccctgattataacgaaaatcttttgtaattctttttgtaataattctttttgtaataatttgtaattatttttgtaataatttggaagacaaaatatgaagaaatttttttgtaataatttggaagacaaaatataaagaaaaatctttaatttt

SEQ ID NO: 849588 - DNA, 594 bp, Homo sapiens
gtcctgatgacaaagctggttctgataagtagctattttgacatgcacagcagcttcctctacaagtcctgtgtttggagggtttcatttagatcagaggaagttggaatccaagtttaaaaggctctctgctgacaaaatgtgatatatccatcagtggatttctactcagtaatgaaaagaacaaactactaaaacatgttatatgtcatagaacaacctcaaaaacattagctaagtaaaagagccagacacgagaccacatatggtgtaattccattgatttgaaattttcaaaaaaggcaaatttatagagacagaaatgggctgatttacctcaaaaggcagggattcaagctctctagactacacatgatacatacatgagaaaaaataaggaaaagaaatttaaatataaataaatgaaaataatacttctccctgattataacgaaaatcttttgtaattctttttgtaataattctttttgtaataatttgtaattatttttgtaataatttggaagacaaaatatraagaaatttttttgtaataatttggaagacaaaatataaagaaaaatctttaatttt

SEQ ID NO: 849589 - DNA, 634 bp, Homo sapiens
cattcatccatatggggagtgggggaggaagggggagcggtgaggtcatggccatcgttatgaactcatagagcacctttcaggagcacaaagagcttgctgggagrcagggcatagggacacatgggcttggagatgacctcctctggctgtgatttggcatttcctccgtatctaacttgcctgggagactcctgccaagccagaggagcagggcacaaatggaggcagatcctgctggagatgggcatggggagggggactgacagagcacccttggctgctgttagacagttgttcagtcatcacacctgttaacccaagttggtcaggtctgtccaggtgctgtgactcaccttgccggctcagaagagacactgaatgatacggtggggagcacaggcctaggggaatcctgcagctgagtatctggcttttgctctgccaatggtccagtagattagggggtctgtggcctgtttcctcatgctctgagattctgtgcccagcccaggtctctctgttctggaaacaaaggcccagatccccatatttccttcttgctgttttgttttggtttttgaagagtctcgttctctctcctggagtgcaatggtgtgattttggctccctg

SEQ ID NO: 849590 - DNA, 611 bp, Homo sapiens
atttttttaaaacttaaaagaggcagcagcagccgctgaagggaatgtgacaaatccccagatctaccacatgggaagagaatgaactcttgattcatctgcagatgcatgggacttcttaytagggacacggctacagaaatagttctagtaactgtaagggccattcagtcagctccaccactgctaattttagctacacatcccacaaacagatgtgttcactattagtcagggaataaagcagagactaactctaatgcttagaaatatgaagtcattaaatttagaaactatttactgagtgtttctgctgtgtgagaccctgtgcagggccctagagctaacatgaataagtgcagatggcggtcttgccttgtttgaaagataacctgtatgtcgcctctggttgctggaggcctcttttgcagcatgctgagaacatgatagatttagtcccttttcacatttagacagaaccctactcacaacactcaagagcacttgctgattttccgtttcttgtcattaaatatttacaggcctgatttcacctcaccctccagtgaaccatctctgtgtttaactcatcttcatgaaagttttaccaa

SEQ ID NO: 849591 - DNA, 623 bp, Homo sapiens
gctcaccctgtaatcccacagtttgggaggctgagctgggagaatcacctgagcccaggagaccagcctgggcgatatagtgagactccatctctaaaaaaaattcgttttttaattagcctatgtggtgggggtacctgtactcccatctaatcaagaggttgaggtgagaggatcgactgagctgaggaggtcgagactgcagtgagctgtgatcaggccactgcactccagcttgggtgacagagcaggactctgtctttaaaaaaaaaaaaagaacatgcgtgaccaggtgcagtggctcatacctgtaatcccagcacgttgggagaccggggcgggcagatcacttgaggtcaggagtttgagaccagcctggccaacatggaaaccctgtctttactgaaaatataaaaattagccgggtgtgggggcgtgcacctgtaatcccagctgcttgggaggctgaggcaggagaattgcttgaacctgggaggcagaggttgcagtgagccaagattacaccactgcatttcagtctgggcaacagaataagactctatcaaawaaaaaaaaatgaacaaaataaaactagaatattatacccttcaaaaataatttat

SEQ ID NO: 849592 - DNA, 670 bp, Homo sapiens
tatcacaaatttactgagaagggatcctatgtaactggtattttctacagtgcttgcatgtgattaatgcctagtaaatttataccakcaaaaccaaagaagaaaacgcccagtggtagagatgagacaaacctgataaagccaagcacacaatgagaaaatgtaaggggatggtaaatctcatgtgtatactcaaccaaaatacctagagcactgttcaggactcccttctacaccaaggcaatcacacaggaaattttctgctcttctgacttgcaaaataaaataaattccccactcttgtccctgtttttcctcctgttttggcagatatgatcaaatgaatatataaatctgaattatagttcacattcgctggctgttataagccaaacaattccgttagttaacagacaatgtccatgcccagagggatgacaattccttttttatatcaaatttttctctaaaaaaaactgctctaaggacaatgacagatgtctgttttctagggatgttctctactttgatttctctgatgttaacacaactgtgtctttgtctgtttccaagaaatagttcagaattcattttggaaatctgttgacttctataaattctaactactaaattgtgactactaaatataaacacctattattaattatac

SEQ ID NO: 849593 - DNA, 619 bp, Homo sapiens
tttaaaaatcaaaattggtacattttatttgtgtaaattatatctcaataaagctgatactttatcaaagagtaaactaagtcatacattactttaatttttaaaattatccgtacttatcctgttgagatattattattatttatatttttttatttccataggttactggggagcaggtggtgtttggttacatgattgttctttagtggtgctttgtgagattttgatgcacccatcacccgagcagcatacactgcacacaatttgtagccttttatcctaaccctcttccaaccttttcccgctgagtccccaaagtccattgcatcatttttatgcctttacatcctcatagcttagctcccacttacgagtgagaagataagatgtttggttttccattcctgagttacttcacttagagtaataggctctaatctcatccaggtggctgcaaatgccattaattcattccttttcaaggctgagtagtattctatcgcatatatatgtatatatatatatgtatctcacagtttcttatatatatctcacgtatctcacatatatayatatatatgtatctcacagtttatctactcattgattgatggga

SEQ ID NO: 849594 - DNA, 588 bp, Homo sapiens
aagcgtttagatactataaatatttttatactatttttcatgaatatatgctaattgtatttttataaatctttttttgaaaataggttttgaaaggagctatttcataggtttaccagcataatgaaaccaattcatcagatggttttaataactacacaattataataattgtagcaccaccttttattcaccaaaatgtccaagttggtactgtaattgtacagttaccctactaatgcaaaagccaaataaaaagaaagtaaaagacaataaaagaggaaaagagagccaaaatttgaagaagatggaaaaatttgggcacattaaaacctgaaaacatttagcaaaagaaggtatcataaagttgaaaacaactggtagtcttgggaggacaatatgtgcaacatatatcacagacagcctatgtatcaaaagaagaatatgaacagcatatacarcatatataacacatatgatatatgaaaactccttttgctggcaagcaaaagaccagcaacctaatataaaaacaaaatgaaccagaacacaaacagccaattcacataaggaaaaagtggcagaata

SEQ ID NO: 849595 - DNA, 596 bp, Homo sapiens
tttgatgtaggcatgtattgctatcggcttccctctaaggactgcttttgttgtatcccataagctttggtgtttcaatttttatttgcttcaagaaattttaaaattaaaaaaattgtattgacccatttgttgtttaggaacattttgtttaatttctatatatactgttttcaatgttcttcctcatattgatttctagtttaattccattatggtcagaaaagatacttgattttgatttttcaaatttgttaaggcttattttgtaaatgaacatgtgatctctcccggagaatgttccatgtgcatttgtgaagaatgtgaactctatagctgtttgatataatgttttgtaaatatctgttatgtccatttggtctagaatacattttaaatctgatgtgcctttgttgactttctgtctggatgatctgttcattgctgaaagtggaatgttgaagtaagctattattatattcctttctatctctctctttaggtctactaatgtttgctttytatatatgagtgtgctgatgttgggtgcatatatctttattattgttatatatctttttatattgaccccttta

SEQ ID NO: 849596 - DNA, 439 bp, Homo sapiens
atgtgtaacagacgggaatagggtcctgagtgcaggtggagctattcactttggacagcagaagatctgaattttatctgtgactacagcaacagtgatgctgatgaggcagatgycaatggcttggggttaagacaaaactaaaaaattctaccttgaattttctggctgggatttggaataacgtcacttactaagtgttcttggctagagttaggtagagatttgagaagactattgaaagtttggtattgtcactgtggggaaaggaggatgaagttcaagtgcacttagaaggattactgaaagcccagatcgggttggtttctctgaagttctaatcaaaggaagaagaggcaaaaaactgaaaggtagaaaatattggcatcggtagttatgttaactgaatggttatcatctgatgaactgcaaatgtttt

SEQ ID NO: 849597 - DNA, 576 bp, Homo sapiens
tgtttgcttccccttctgccatgattgtaagtttcctgaggcctccctagccctgcagaactgtgaatcaattaaacccctttcctttataaattacccagtcttgagtatttcttcatagcagcaggagaatggactgaaacagtaaattggtactacagagactggggtgctgctatagagatacaccaaaatgtggaagaaactttggaactgggtaataggcagaggttggaacagtttggagggctcaggagaagatgggagaatgtggcaaagtttggaacttcctagagacttggagggctcagaagacaggaaaatgtgggaaaggttggaacttcctggagacttgttgaatgggtttgaccaaaatgttgatagtgatatggacaatgaagtctaggctgaagtggtctcagatggagatgaggaatttgtygggaaatgaaataaaggtgattcttgctatgctttagcaaagagactggcaacattatgcccctgtcctagagatctgtggaactttgaacttgagggacatgatttagggtacctggtggaaaaaatttctaa

SEQ ID NO: 849598 - DNA, 593 bp, Homo sapiens
gcccttcatcccagctgttccagctatgactaaaaggggccaaggtacagctcaggttgtggattcagagagtgcaagccccaagatttgccagcttccacgtggtgtgagcctgcaggtggaattggggtttgggagcctccagctagatttcagaagttgcatagaaatgcctggatgtccaggcagaagtttgctacaggggtggagcccttagggaggacctctgctagggtagtgaagaagggaaatgtgggattagagtgcccacatagatgcccactggggcactgcctagtggagctgtgaaagacagtcactgtcctccagacctcagaatggtgttaaatttatccaccaacatcttgccttgtgtgcctggaaaagccacagatgctcaatgtgagcccatgaaagcatcagggaggggggctgtaccctgcaaagccacttgggcagaactgcccaaggytgtgggagcctacctcttgtattagcatgatctggttgtgagacatggagtcaaaggagatcattttggaatattaaggtttaatgactcccctgttggatttcatacttgcatggggcct

SEQ ID NO: 849599 - DNA, 596 bp, Homo sapiens
ggactccacatctagaagtgcatataccttccagataaggggttggaatggaggtgtgttgtaccctactaaattgttaaggatcttatctgaagaatgcccagccactggaataagtatgggactcacatcaagacatttgctcagtcaacatacaacttttagaggttgtatgcagttgcagtcccaggctgttatgacttttccttttggcttcaattcgatggttagttattcagccttattgttctcccactccttcaataggctaagggactcgccaccccaaaagtttcttaacatttctgtgactattttgttagaatcttttacccaccttcctttaagactgttgtgaagcatgattcagatccggcctgtcttgtgcttttcctcggtaaatataggaattcttagctttccggggaagtccatttgatctagacttttatatccctgtgctcatatctaactcagtgtctggttaagggaacctrtagcatgtgtgttccacagaactcctagagtcctcaggactagcaaagagagtgcttacttatacatgcctctctcatcccctctcacctgccagggct

SEQ ID NO: 849600 - DNA, 520 bp, Homo sapiens
ccagatattaaatatataagcattctactagaactaaagttaagaatttgaaatagtctcatgtgagtaattaaaataacaatagcatctttttcaagaaagttttttttaatatggtggagataatgacatggaaaaaagtagttaattatttttggtattcccgtatttcatcagtaggttgccatagaacataatagttatataatcaaacagcagaataattttatatgaggtttattgatacagaaatgtttggttcagtgtttgtcttccagttttgcagattttcttttcgattttaaaactggagaatacattaaaaccagaaactttcagcctctataatgccctcaaaactcagcaggttttgaaaatgcctcttccttctcttctcctccccataatcytgcttatttttggcattaagtgagtcaggggttccaaacccaaatacgtttttcaaggctatgtagtcagtgtgaatgagagaagtaaatctgttgggtcctgtgccaca

SEQ ID NO: 849601 - DNA, 586 bp, Homo sapiens
ttggttaggttggtcttgaactcctgacctcaggtgatctgctcacttcggcatcacaaagtgctggtattacaggcgtgagacaccacatctggcatgaacacatatgtttaagtgaacactcatgtactctcatccaagtaagggaaaagcacattgtgagcattccagaagctccctatgttcttctccctgaatgttgcctcattgctcccccatagaatcaatcacaattctaaattttatcataatcacgtccctgctctttttttatctttttttgtttgtttctttgtttttgagacaggatctcactctgttggccaggctgggatgcagtggtgcaattcctgctcactacagcttcaacctcctgggtacaagcgatcctcctgcctcagcccctcaagtagcttgaaccacaggcacacaccaccacgaccagctaatttttgaattttgttttttagagaccaggtctcgctgtgttgtgcaggctggtcttgaactcttgcrctcacgcaatcttctcgccttggcctccctcgctgctgggattacagatgtgagccactgtgcccagctg

SEQ ID NO: 849602 - DNA, 577 bp, Homo sapiens
gaaatgagttgctctgccaggcccttggttcaagaagagcccaggtgggatcctcttttcacacaatgygtccagaagccaactgatgagagagtgcaagtgtgcagaataggaactgagggctgggccgaggcccgcccccggggagaggacctggggcacagagacaacacgaagatgagctaaggtgcccggtagctttaatgagcaccttttcctcactttgtccctccctctctactcttccccttcccgtcttgacaggtccagcctgccctagggctcttaaaccgcaggtatcaatccttctgtccccttagccgctccaggcgcctgcgaaggtccgggggcaccttggccccagctgccagcagctcgcgcagcctctgtttgggagtcttggtgagcacgaaattgcaggggaaggggccctcttcaaaggtgacccgacagttccgtgtcactgaatggtagccctcggcactggcagtcaccatgtagtcccctggggtcagcagacgccaataatccccgccccacgctgaggagagtgaagggcacgatcaggacccaatta

SEQ ID NO: 849603 - DNA, 577 bp, Homo sapiens
gaaatgagttgctctgccaggcccttggttcaagaagagcccaggtgggatcctcttttcacacaatgcgtccagaagccaactgatgagagwgtgcaagtgtgcagaataggaactgagggctgggccgaggcccgcccccggggagaggacctggggcacagagacaacacgaagatgagctaaggtgcccggtagctttaatgagcaccttttcctcactttgtccctccctctctactcttccccttcccgtcttgacaggtccagcctgccctagggctcttaaaccgcaggtatcaatccttctgtccccttagccgctccaggcgcctgcgaaggtccgggggcaccttggccccagctgccagcagctcgcgcagcctctgtttgggagtcttggtgagcacgaaattgcaggggaaggggccctcttcaaaggtgacccgacagttccgtgtcactgaatggtagccctcggcactggcagtcaccatgtagtcccctggggtcagcagacgccaataatccccgccccacgctgaggagagtgaagggcacgatcaggacccaatta

SEQ ID NO: 849604 - DNA, 530 bp, Homo sapiens
cctagagcacatcttctgatttcaggctgggttggttactttctttacccgggggtatagttgacatcccaggcctttctcatcgtcccttttctgtgyttaatctcatttattgaatgccatattgctctctttcttagtttaattctttgttttgctgaagcacatcctccagtagctttctaagaaagggtatatgcaaggtcaaatttctgagaccttgtatgattgaaatgtcattattctaccctcccaattaataatcattcagacctatacatttctatattagacatcattttgagggcatttattgtcttctagctaccagtattggtgtttagaagtgtgataccattcttgcttcagatccgatgtatgtgatgtttttatttggtggaagctcttaggattgtctttttatccctgctaatgtgaatttcattatatgccttgatgttagctgccctgtttcatgtattgggctgtgaattggtggaaagttatggtctagagaatcatgtccttca

SEQ ID NO: 849605 - DNA, 380 bp, Homo sapiens
ttccgttggcactccagtgcaccccctctgctctccctgtctagccctccgttggcactccagtgcaccccctctgctctccctatctagccttcccttggcactccagtgcaccttggcttcatgcccagggccccacccaacactgagggcattgccttttcctttgtcgcccccactttgtctacaaggaggaaaccacagccagagggagtgcaggcctcactggagcttcaggcctctccctatttaacacccctagggccgaccatgcttttakaaagacagtgagagactcagggcctgagaaggtatttctttttttccttttcctacctgacttgtaaatgaaagtttgtgaaagtccttcaaggagatat

SEQ ID NO: 849606 - DNA, 450 bp, Homo sapiens
ttccctaaggtcactgtcacaggcagtggactggggtcctcagcctggtacctggctgggggacttccctctgagtccctccacatccctgcctmtccatcagcccctgttctaagctctgatatgccatcaacccaggagtgggttctttacagtcggaaacctaaagccctggcatctggggctgtgtcctccccactttctgtatattctgagcctggtctgcaaaccagcctattcctgccctacttcccagcttgggtggcaaacacccgagctctcaaaattgagtttagcaaaatggaaaagcagggggaggctggactgcccttgatctgaaatgtggtgatgagagctgctcagcaccatccctgttaggccaagcttctccccagtgtacattttgaatgagtctgatttattggccgcgtttgaagggatcctaaaaca

SEQ ID NO: 849607 - DNA, 623 bp, Homo sapiens
tcccagcctgtattaaataggcctaggctttgtacaatacagaaacaggtacttgaggctcactgctggttcgttcttgggccagtcttattttctttcatcctaattgcgcagacagcatcggagctttgtcagctttacctgctctgaatagaagcacttttggccccccttgtcaaagactagggaagaaagcccgcgctctggttggcagcagtcttggattctcgcccccggccatactgtgcaatcacgctgtttattccactgtaacaatcagacagcgagagcagagcacctggtactccccggcccgggccttccttggcagctgacgggcaacctcactgccaggtggtcgcgcttcaattacattagctagccattctagggttaacgaggacccactttcttcagaatgccccgggaaaatcagttattcataaaagacagtatgccttttgttgatcattgaacaatgttgctgaaaatccattaaattaaattctctttattgggctgaataatgcaatagcaatagccccagctagaagtttgcatgtttatttaccaaatttctgaataatttatacatggatcckggctcttttatcagttagtgg

SEQ ID NO: 849608 - DNA, 572 bp, Homo sapiens
cctctgggtcctagaccgcagcccattcctaggtctccaccctctgcgctcccgcagcttttgtccgcttttccttccccagctgttccattcagcagcccccgccacaacctgccctccccrcatggaggtctcagaggcctccattaaggctggcggtcaaaggccggcccagcacgtgccgtgtcttatcggcccatctcaagaccctgctccttcaggcctgggcaacaaaaaagggggcggccccagcgcccgctggctccctgcagccccacacacaaaagggcaggcgacaaagacattttccgggatggcaggtgttggtgtcggattcctccccgagtgcacgggcagaagaaaggcaaggctgggcttccccgggcagcgcagacatgcaggggcaggagtgtgggcagggcccccggggaggggaaggcccaggagggcgaggagcactgatgcagggtccgctaccgagggcagccgattagaaaagtcccaccccctccccaaagcagggtggctggacaaatccactgaagtgtctgtcttaccttgctcaaatattg

SEQ ID NO: 849609 - DNA, 565 bp, Homo sapiens
aaagaacaaagggatgaagaagcacgaagcctaaagtggtgctaaacaaggtgatcgataattccctttaaaaccctcgagaccatctacgaaagcacctcgaatcaagtttcagttactcggtctgtggattcgctggctcctgacttcccctgcctttctccacaccggcttcttatcagatttcttgtcggtggcccactttcactaagagactgggaaggaggggacagatgaaacataattacgagtgtttgctctgcatcttgcatcaggcccacacatctgtggtctagagacacacctgtgctgcttaaagcaacagcctgattcctttctgtcctcctttctattcactcctgttgcatgtaggaaagaaatcccatgtaccagtctctaaagaatttacagtccattatggagaggagacacacacgcaggataaaggcttacatatgctaaggaaaatcaagatatatgtaaycacaagtcggatggcactaaaattaaggcctaaatatttcagagaggatttagggcagtggttctcagtcctgcctgcacg

SEQ ID NO: 849610 - DNA, 409 bp, Homo sapiens
ggatgggtattttaaaaatgacaagagataacaaatgctggtgagggtgtgtacacggttggtgggattataaattggtacagctattatggaaaacagcatggaggttcctcaaaaacttamaaacagaactaccataagatccagcaatcccacttctgggtatatatccaaaggaaatgaaatcagtatcttgaagagacatctgaacccctatgttcattgcagcattattcgcaataaccaagatagggaaacaacctaagtgtccatcagcagatgaattaataaagaaatagtggtacatatatacaacaaaatattattcagccacaaaaaagaaaatcctgccatttgtgacaacacagatgatcctagagaacatattatgttcggtgaaggcagacac

SEQ ID NO: 849611 - DNA, 604 bp, Homo sapiens
caggatccgccccccacggcctcttggccctcacgtcctcctagtctctctccctcgctcaccctgttccacacactggcctctttgctacaccccaaacacaacagccacagcccccactcagggcctgtgcaccgttcccactgcctggaacactctcccctccccgcggctccctccctcacctcctacagatcgttgtcagctgtcacctgctcaccaggctgttcctgccccgcccattgaaatcccatctccttttcctgcttcatttctctccctagcatggatcttctcaaatgcaatatgcaacttatttatcttgtgtattgcctgctctctccacaagtgtgaactccacgggggcagagacctttgaccgtcctatgtcctgccatgtccccagcgcctgacccacaggaattgcccaataaatatttgttcggtgaatggattctttttttggcagaataacttggtgaggaccttccctggggatgcrgatggagaagcgacctgcccagggtcacccagctcacaagtggcaacctcatctggccccaaagtctgtgatttttgcctccattccaggctgcccttctag

SEQ ID NO: 849612 - DNA, 627 bp, Homo sapiens
tataaaaaaggacaagtagctagaagktgagttttgggaagacgtaacaattaaagtagcttgctttaaagacacagtaaaaggtaaggacaccaataacatattcattcattcatgtaacaaaaacaaattcagtgcttactctgtaatgggccctgtgcaccacgtgctgtgggaatatggtggtaagcaagacaggcctgattcctaccctcaaaaattcagtcaaattcagaacctttttgccggactgctttattttttcctctaaagagcaagcttgggggctgggtgcggtggctcatggctgtaatcccagcactttgggaggcagaggcgggtggattacctgaggtcaggagatcggagatcgagaccagcctggccaacatggaaaaaccccgtctctactaaaaacacaaaaattagccgggcgtggtggcacatgcctgtaatcctagctacttgggaggctgaggcaggagacttgcttgagcccgggaggcagaggttgcagtgagccgagatcgtgccactgtactccagcctggccgacagagcaatactctgtctcaaaaaaaaaaaaaaaaaaaaaaaaaaaaagcttgggttacaaaaattagctgg

SEQ ID NO: 849613 - DNA, 574 bp, Homo sapiens
ctaaaacacaaaatcaagctgtagcctgagcaccttgggcacatattctcagtttaaccacccactgggttcaccttgcctgctgcctagacagagccaatttctcaagacaggggaattgcaacagagaaaragtaattcatgcagagctggctgtgtgggagaccggagttttactgttactcaaatcagtctccacaagcattcagggatcagagtttttaaggataacttggcgggttgggggaagccagtgagccaggagtgctgattggttaggtaggagataaaatcatagggaattgaagctgtcctcttcatgagtcagctcatgagtgggggccgcaagattagatgagccaattaatcgttctgggtggtgccagctgatccatcaagtgcaggatctgcaaaatatctcaagcactgatcttaggagcagtttagggaatgtcagaatcttgtagcctccagctgcatgactcttaaaccataatttctaatcttgaggctaatttgctagtcctacaaaggcaatctaatccccagacgagaaggaggtttgttttgggaa

SEQ ID NO: 849614 - DNA, 537 bp, Homo sapiens
ctgatccctctagcagagcaaactctctctggactcctgaaatacttgttattttctcctatcttgaaaaagtgttatttaggttcacattatctcccaacctaaaatataagtcctttaaaaaccaaggttcacgtttgttacatttttacatactcatggcccagggtcacactcacaattggtacaaatacccattatgaaagtagaacgtggtaacagaagacagtgaaataaagtgctgagggagcccagtggaggaagagtttatttcagttgccttcacatttgaagtaaacctttaaggatattagaactgtgttgggcagaaaagatggaaatcggcaatctaggccaagggagcgacatgaataaaggtggagagagaaatgcacaactgaagaacaatttgtatgactaaaatttcggtggcaggttgttaggactgaaaaggcagattatggagggccctgaaggagctcctaaatgcatttggactcamttttgaggccatgggaagctactgaggcttttgag

SEQ ID NO: 849615 - DNA, 623 bp, Homo sapiens
tagctgccttttacaagcatcggctgctttgtaaatctagcgaactatcaggatcatctactttgaggtctagtctgcttttttcccttggcattttcatatgtaggaggaaagatcaaaagtggatgatctgagggggaccccgatgtcagtaggaaccttggaagagatcattgatgacaatcatgccatcgtgtctacatctgtgggctcagaacactacgtcagcattctttcatttgtagacaaggatctgctggaacctggctgctcggtcctgctcaaccacaaggtgaggtgatagtctttttcagaaagcccacggaagtgctttctcttctcacttaggttcatcttcctgtcccgtggaagtagatcaccaaagcactcctcaggcagaaggatgccatgactggcattgctttgctgtaaacagatccagcaaacctcacgttcctgtgttaaaccttgatgtttcctgttaggtgcaygccgtgataggggtgctgatggatgacacggatcccctggtcacagtgatgaaggtagaaaaggccccccaggagacctatgcagatattggggggttggacaaccaaattcaggaaattaaggtatgattg

SEQ ID NO: 849616 - DNA, 505 bp, Homo sapiens
aaaaaactaagatgctacatgctcatggccatcttgttatctgccacggtgctttataggctcattctttggccatattcttaaagagatcagagaaaaatgtaattgacatttgaaacatgttttttttttttctctagaaaccacgccaatattttgcatcccattatgttcttttttcactactttcatatggcaggaagcccattttaaactccttaagagagaaaaagctatctcctttcctcactaaagaacttcacactggagaggcatggcttctacttctatcccttctccagctcccattcccaatcaaagtagagctaggtgtttagcagagttccttacacacagtaaacatcaatagagcrtatccactgaatgaacactattaatattgggtgataggttgttggaagtaggaagatggcactgaggaagaaaagattaaaaaatgaaaggtgttgcgtgaagtctgttggtaggtgtaactagtagttgc

SEQ ID NO: 849617 - DNA, 601 bp, Homo sapiens
ggctgagaggaagcactgggcaagatacaaatttattcaaagtgaccatgttcatcttaactacatattccttcaccaggatattccatttttaagccacttcaaaacatttttagaaaaacgcacaaataaattcaataatatctatttacagggacccagcagaatttcttaccaaaaagaaagagaaatggggaaagtgtggggtgggggagagtagggagagatagaggaggaagggcgggagggagggagggacgaaagaaggaaggaaggaaggaaggaaggaaggaaggaaggaaggaaggaaggaaggaaaaatgaatggactttccaacaatgttaacatcactaaaatttagtcaggtaccttttacatttgtgaaaaacatttaatacattaactatgttttctccaccaatgtgtcaaaccagtaaatctaccattcccttcacacattaacagagaagagtttctgtagaaatgtgcacatccagtgttaatgaagaaaaacagctgacttgctcttaactgaagggaaagcamttatcatttagttcagtgaatcagctagtgttactccccaccttcacttctatc

SEQ ID NO: 849618 - DNA, 502 bp, Homo sapiens
aagcagcaaatggacatgataaaataagggtcacaaagcagatctataaaatgcaggactagttaaagctctttttaaaaatatgctttatatttcacctttgttggcatattgccatcctmctaaaagggaaatttctacagatgaatatgtcatttgcattagcggttttggaaacttccaagaaaactatggtttgaataaaaggatgtggcattggagcaaaaattacacttagctttacctagcacccaactcccagaatcaaagttattaccaaaatgattttgaataggctgtgtgcatttatctgcatatgtatatacacacacacaaaagcatttgcatgtgcacatacacacagtgtctgtttagggaaaccatactagcccactgcccttaagacctgtttgcaagaacatattcctgtgactgaatgcccttgataccacagtatatcaagtttcacattgctgtggcaaagtgccattacacttctatt

SEQ ID NO: 849619 - DNA, 581 bp, Homo sapiens
tatccttcatgataaaaagccctcaacaaataaggtatagaaggaacatacctcaaaaataataaaagccatctatgacagactygcagccagcatcatacagaatgggcacaacttggaagcattccccctaagagccaatacaagataagaatgcccactttcaccactcctattcaatatagtattggaagttttagccagagcaatcaggcaagataaagaaataaaaggcatgcaaattagaaaagaggaagtcaaattatctgtttgctcattatataatcttatacctagaaacccctgaagagtcctccaaaagactcctagattcgataaatgaattcagtacagtttcaggatacatagtcaaggtacaaaaatcagtagcatatctatacaccaataacaatcaagctgagaaccaaatcaagaggtcaatcccatttataatagctaccccaaaaaattaaaatcccacctaggaatatatttaaccaaggaggtgaacgatctctgcaaggaaaattacaaaacactaaagagacacaaacaaatggaaaaacatttcatgcttatgg

SEQ ID NO: 849620 - DNA, 301 bp, Homo sapiens
gatcacttggcattgaagacttaagtcactggtggtagctgtagcttacayttcaacagtgtaagcattccccctttgggaaacacaacctctaaattcacagagcccaaagttataggaacaggaagcacaaactccccaagatgatcactaggagcaaccccgaggtttctgaactcatgcattctacctattattggtggatcaaacactctgtatcactcagtgaatccatactgagaaaatgtgtcttttccaatcaaaatgagtcgctacccctttcagagtggtacaaaataat

SEQ ID NO: 849621 - DNA, 564 bp, Homo sapiens
accaccctgaaaagctgctttctcccttscatccatatcctctcttcctgtcacctccccatacagcttcacatttgcctcatcgcacttttcttttctgtccacctttcataatcccatccactccaaatcccggaccctgcacacgccaactccctgaatccaattcaggagtgccccagttcccctttcgatccatctcctttctactgtagcggagactacaagtcccaggatgccccgctagcccgtgaccggctaggaaataaagagccttctctccgcggtaggggcgctgttggatgtgctgagtgacgcgaggcggggaagtcggggcctagcctggcgctttctcggacgcgaccactggccccgcgttcggggaggagccgggcgggcggtcctgcactggcgtgccgctcccccagccactgcaatagagagctggatctgggtccccagccctgcgctggcagcttcagagactggcgagggctcggagctgacgcttggcagagctggggcttcccagatgctgtcgccgcaccccctcgcaggagggcc

SEQ ID NO: 849622 - DNA, 572 bp, Homo sapiens
attagattagtagagattatgcaaaacaaagaatggaggaaaaaaagaatggagaaaaataagcagagcctcaggggaaagtgggacataattattaagctcaccaacatatgtgtaatgggaatacaagaaggagcagactcagaaaggagcagaaacaattttttaagaaataacggctgaaaattgccaaatatcttgaaaattgccaaatatattgaaaaccaatgagttcacgtcctttgcagggacatggatgaagctggaaaccatcattctcagcaaactgacacaggaacagaaaaccaaacaccacatgttctcactcataagtgggagttgaacaatgagaacacatggacacagggagaggaacatcacacaccagggcctgtcagcaggtcggggcctaggggagggatagcattaggagaaatacctaatgtgtatgatggattkatgggtgcagcaaaccaccatggcatgtgtaaacctatgtaacaaacctgcacgttctgcacatgtaccccagaatttgtggtataataaaaaaaaataataataaaaatata

SEQ ID NO: 849623 - DNA, 554 bp, Homo sapiens
tgggcatttagggagtttccagtatgttgctactgtaactgaagtgactagtctggcactcaagttgctttgcatagctggtagagcatggataaggtacattcctggaaggagaatggctgcctcacaggttcctgcatttgtcagcctgacccggaagcccaaatcaccctccacaggggctgtgcaaaatgatgcccccaaagcagtgagcgagagagagggcctggcggccggcagcctcgcacacaaagtgttgtcactcaccggggtattggtcactctaatgaaccacatgcccattctgcagacatctcaaactttaaaaaaaaaaaagattaatagaagatttatttagcaaaaatacatatagccattattgcaagacttaaatgagatgttaaatgttcaacccaattttctttcctggataagtttttctttcatatccctgtcagttttgaaaacataataccagaagaaggggggcccaattccacagagagctcccaagartgagtttctgggagtgagtctgaagttgagataaacct

SEQ ID NO: 849624 - DNA, 627 bp, Homo sapiens
acattctgttacgcgcatcaaatgtgtagtgatcaagtgggaatgttcaggacatccctcacctggagcactcatcatccctacgtggtgggaacactgcaaatcttctcttttggctattttggagaatacagtaaatatagttgttccatggcagagtcggtgacagcagttaatgtgaggcctttccctgtacctgtgtgtgtaccattaagcatcctctccatccgctcccctcccacccacatgccctcccagcctcgtgtcagtatcaaccatcaccccactctctacctccctgagagccacgttagctccctgtgagtatgaggacatgcgctttgtctttctgtgcctggctgatttcacttcacgtcatgacctccagctccatccatgtggctgcatgagaggattcccttctcttgatggctgaatggtcctgcatcgtgtgcaccacgctccttatccattctccagttgacgcctatttaggcggatttcagcaaccgagcagcgctgcagtgaacacgcrtgcaggcgtccctgtgtgctgactcgtttcctttgataatgctcggtgctgggactgccggatcctctgggagtcctatgtgtagttttgtt

SEQ ID NO: 849625 - DNA, 627 bp, Homo sapiens
cgtaactgaacaatggcgacatttttcattactgcttgattgtctaattggccccaattagggcccaaccccattaactgttcaaaggaaacaggcacaggcaactgtgcttgtgtgttttctcttgcctgagtttgagcttcatcagcccaccaagttttaaactgcaagtactgagatggagtgagaacagattttgttaaagtatcccagtcatatggtattaatctattatcaagagccacattttttagtaaagtttgtacaaaaggagaatttggctcatattgactaatggctggcttaaattcctttaacatcttaaaaggaaaagtggcccaattagcaatgttctgtcctccttgctgaattatagtaactggaaattgccatgcttctagctctccttcagctccagccttctgaaaagaattttgtatagcaccagcaattgttccccatatttaatgttgccactacagaagcagtacgttttacagctaattcatcttctcgcccattaaggaaagarggaggaggtggccattcacttaattcagcaggtggaaccgacaggctagtaaaatataccctttccagcgtccctttcttttctttaattttctc

SEQ ID NO: 849626 - DNA, 591 bp, Homo sapiens
gttttcaggcataattagaaaagtatgtgtgaacaagaggtctcctcaactacaactaaggggttgggagaactattgggttaaaggtcttcctgagatgcctctcacggttgtgctaacagaggaaagggacccagattggagaggagaaccgagagaccagccctggtgtccagaatgcggtccactttccttccttcgatttccgggattacccagggctcctgaatgctaatggtggtctagaccaccagagccagggagaggagccccaggatctgtcagtctggctggaccatttgggagattggctctggactcagagaccagcattctcagggacaatccactttccagtggtccccattgcagattggacagggacgaagtggcttcctcatgctgccagggcaattcgttctaaaatcccctggcttgccacgtctgtagcagttaacagctgaacctcasgaattctggggtttgtggacctgcatggtggccattaaagcctctgcctctttcctgcgcgtcctctctctctctcctgagcctccctgtctctattataaatgactgaagtggccactt

SEQ ID NO: 849627 - DNA, 591 bp, Homo sapiens
gttttcaggcataattagaaaagtatgtgtgaacaagaggtctcctcaactacaactaaggggttgggagaactattgggttaaaggtcttcctgagatgcctctcacggttgtgctaacagaggaaagggacccagattggagaggagaaccgagagaccagccctggtgtccagaatgcggtccactttccttccttcgatttccgggattacccagggctcctgaatgctaatggtggtctagaccaccagagccagggagaggagccccaggatctgtcagtctggctggaccatttgggagattggctctggactcagagaccagcattctcagggacaatccactttccagtggtccccattgcagattggacagggacgaagtggcttcctcatgctgccagggcaattcgttctaaaatcccctggcttgccacgtctgtagcagttaacagctgaacctcaggaattctggggtttgtggacctgcatggtggccattaaagcctctgcctctttcytgcgcgtcctctctctctctcctgagcctccctgtctctattataaatgactgaagtggccactt

SEQ ID NO: 849628 - DNA, 605 bp, Homo sapiens
ctttagatggactccccgatgggccctgccaaacttgcagttattagccggtgggggtggctcctyggttgtttccccatcataagcggagtgctgaggcaggaaaataaccctcttgcatagaaaaggaaagaaaaaaacagctgtgggaggaacctcttgctctctgcaaacgggttcctttaatcattgtatcccttccacggtttggaccgagatgaactccctggccaggggaggaaagactctatgggcacatggcagggggggcggcgagtggcaaacactggccagcaggctgcacggggtccctgccctcaagactgccctggggccctggcagcagccatggttctctctcactgcccatggctggtggcatggcatgtgcatgccgcagacatgcccaagcaccccagccaggaagggaggggggtgaggagggggccaccatgtgccacacgtgcctgtggcttttgggctggggatggggacggcacctctaaggacaagtggaaatcacactgtcctgaattgcatatctgactgctgggccaaatgctctagcaatatttctgcagtttgcagcaaaacccttaacatta

SEQ ID NO: 849629 - DNA, 641 bp, Homo sapiens
attcactgtgtccaaaattaygttctacgtgtccagaagtatttgatttcagtgatgatacttttttgtttttaaaagtcttatttagttatttcccatctttctagtattttaatagaatttaaacatgacaaatgaaacatagtattttgtcctttaaatattaactttgtgtatctatcaagtcatcctgtagttggaaatttcagacgtccccagtccatttttttgtctaaaggcagtcactcaggtgtctgtgccctctccgatctataacatggctcatgggttccccttcactggagctgtgcccaagggcatcctggcagcctgtctacactgaagatacattgctccatagacttcaccctttgtgtgaagctcctggggaacttcttactgctttaaaatgtaggagatttttggttgtttgttttagaaaacaaacaaattgaaaagatagcttgttatactgatagaagcagtagacagccaaatgcctaggccgataaggaaaggtcctcagagaccctccgacccgtccaggtcactgtgcacagggggctcacctaaacatgccctcagtgaaaaattccatcccttcacacatgcgcagtaagggaaataaatcaatgtggtgt

SEQ ID NO: 849630 - DNA, 571 bp, Homo sapiens
cgattagaactccatgcaaccagttgatatgagggggatccacttactattacccccaataacaaccagctggcaggatttttgcttcctgtcgcagcaactttgagctctgctaatgtgaaggtcttagtcccggagaggaacatccttcaaccaggagacacagcaatggtttcattaaattgaaagatgatgccgccacctggccatctggggctcattctgtcatgacaccaaaagacctaaaaaatgattgctctcttgactgcagtgataggttctgattctcctgggagaccaggcagctgctactatgtctggaaatcagggcattcattctctgcggcacttctgactatttccatggccaatagaaaaggttcatggaaaactaccccagccatagaaaggcaggaaaattgaggactcagaaccttctgaaatgaaagttttrgttgtttcatcaagtaaagatcaccaactagctgaggtcccggctgagggaggggaaaatccaggatgagtgatgggagaaggaaccatggacttcaagcctcggctcccaactgtc

SEQ ID NO: 849631 - DNA, 575 bp, Homo sapiens
gggggctgaggggctgcaaggcagcacagggtcagaggatgggagttctgggggcgaccagggactgctgggtatagcagcagtcagtatgggtatcgcccatcrgtatgacttctccctggcaagcccctcccacggctcagctatcatcctccatagtgatcgcctgacaaaaccagagtcttggttaaactcagccctgtgattacagtctgcacctcagcgctgaacttggcttcacgccaagtcacaggttgctgatgaacccacttcaaagaggcgctggacatggctggttgagcctacccctgagacactaaagtattttcctcctctctcctcccatctccagcaacaccactttcattttctcagttaaatgttcagttataaaatgctaataatataacacattcacatgcctcataatgaaaatttacaagctatacggccaaatacctccttcctaacttctgtccccatccaaccctgttcacctctctctctctctctctctctctctctcagacacacacacacacaccacaaactctgctctgcactgtgcttttttc

SEQ ID NO: 849632 - DNA, 575 bp, Homo sapiens
gggggctgaggggctgcaaggcagcacagggtcagaggatgggagttctgggggcgaccagggactgctgggtatagcagcagtcagtatgggtatcgcccatcggtatgacttctccctggcaagcccctcccacggctcagctatcatcctccatagtgatcgcctgacaaaaccagagtcttggttaaactcagccctgtgattacagtctgcacctcagcgctgaacttggcttcacgccaagtcacaggttgctgatgaacccacttcaaagaggcgctggacatggctggttgagcctacccctgagacactaaagtattttcctcctctctcctcccatctccagcaacaccactttcattttctcagttaaatgttcagttataaaatgctaataatataacacattcacatgcctcataatgaaaatttacaagctatacggccaaatasctccttcctaacttctgtccccatccaaccctgttcacctctctctctctctctctctctctctctcagacacacacacacacaccacaaactctgctctgcactgtgcttttttc

SEQ ID NO: 849633 - DNA, 445 bp, Homo sapiens
gtggtgacacgtgcctgtaatcccagctactagggaggctggggcaagagagtctcttgaaccaggaaggcagaggttgcagtgagctgagttcgctccacttccctccagcctgggcgaaagagtaaaactccatctcaaaaaaaatatatagatatagatatatacatatctatatatatattagtacaaaaattagctgggcatggtgacacacgcctatagtcccagctacttgggaggctgaggcaggagagtcacttgaacccaggagggggaggtttcagtgagctgagatcgtgccactgcactctggcctgggcgacagagcaagactctgtctctaaataaataagaaataaacttaaatgaaacttaggtgtttcagataagttacattagkaaggttgggccattggatcctgagggtttagtgttctaaaca

SEQ ID NO: 849634 - DNA, 641 bp, Homo sapiens
cttcttcttttttttttttttttttttgagatggagcctcactctgccgccaggctggagtgcagtggcgtgatcccaggtcactgcaacctccacctcscgagttcaagtgattctcctgcctcagtctccctagtggctgggactacaggcgcatgccaccatgcctagctaattttttttatctttactagagaaggggtttcaccatattggccaggatggtctccatctcatgacctcatgatcctcccgcctcgccctcctagagtgctgagattacaggccgtgagtttttcttcttcttcttctttttttttttttttttttttttttttgagacagagtctggcttgtcacccaggctggagtgcagtggtgcgatctcggctcgctacaagctccgcctcccgggttcaggccattctcccgcctcagcctcccgagtagctgggactacaggcacccgccatcacgcccggccaattttttgtatttttagtagtgacggagtttcaccgtgttagccaggatggtcttgatcttctgacctcgtgatccgcccacctcggctcccgaaagtgctgggattacaggcttgagccaccgcgcctggactcagtttttcttcttttatttgg

SEQ ID NO: 849635 - DNA, 635 bp, Homo sapiens
aagaaaaaaaatagctcttttctactgcaaaaacktattgtatagtacggtattgtgaggagaactcataggttctagagttaccatgtgcagaatttgattatttcgaacagcatctacattgaaaataggagttagtatttttacaagttgtagatgttagtaacaattttgcatttatttggtaatcattcaaatgataattttgtgtacaaaacgggcaatttttgaagtaatctaacattttatttagaaaataaagagcttgcaaaaatcaggaagacccgtgtgtccttcttcgaagaaaacacttattaaaatccagggttacctccattagtaaataaggacattgtcaaaactaagttcattttctttaaagtacatgtttttaaaaattacatactttattagataatggggcctcatgtaaacaggcactgcactttattcatcatgattcaccccagtgagcaacagaggtctttcctaaggatatgcatgtaggaaggaaattgatggaatgacgctattcacacaatcagggtcagagaggttcaagttaacatgtctatgtcacccaggccacttgttctattatattcatctctttctgaaaatgtaaaccaggtgtt

SEQ ID NO: 849636 - DNA, 597 bp, Homo sapiens
tgacctagtgaatggattaatggggtaatggattaatggattaatgagttattataggaatgggatttgtggctgagtaagaagcaagacctgagcttgcatcagcctcctcaccacgtcatgccctgtgctgcctctggacactacagaaggtccctacgaggaagaaggttctcaccagatatgcaacctcaaccttggactctccagcctcattctgtaagaaataaattttgtttctttataaattgcccagagtcagctgttctgttataagcaacagaaaatggactaagaatccgatatcgtttggatttgtgtccccgctcaaatctcattttcaattgcaatcaccagtgttggaggtggggcctggtaggaggtgattggatcgtgagggtggatccttcataaatggtttagcagcattcctttggtgctgttttgcaatagagttctcacaagatctggtygtttaaaagtgtgtaacacctcctcccacaacagcccttcctcccgcttcagccatgtaagatgtgtttgtttccccttcaccttacatcatgactgtaagtttccagaggcctccccagaaac

SEQ ID NO: 849637 - DNA, 526 bp, Homo sapiens
gtatgtaaatgagctagataaaagcaaaaattaagaatttgaagtatttcaaaatattaaaataatttttcaaataaagtgaaaaattatgatattattagtgaatgtgtatatactgatgcrgttgcacttttatgtgtactttttggaggaagaaggaagagcaggagtgcttgtgatagtctcaattgattaatggcttttcatctcacaggttttctagacgagcaaaactttactatataaaatattctcggcctggcgtggtggctcacgcctgtaatcccagcattttgggaggctgaggcaggtggatcacgaggtcaaaagttcaggaccagcctggccaacatagtgaaacccgtctctacccaaaatacaaaaattagctgggcatggcagcaggcgcctgtaatcccagctactcgggaggctgaggcagttcgagaatcgcatgacctgggaggccaagatcatgccaccacactccagcctgggagacagagcaagataccgtctcaaaaaa

SEQ ID NO: 849638 - DNA, 650 bp, Homo sapiens
ttgtaaaatgctgtttcctttgtctctgttgtcctgattgaaaatcatgttgatagctaagaagagacatttctgagcagagaatcgtttgttctgaattgttctgcagcctaratacttgaaagcaattttttccctagttgtggatggggtggggagaaataatattttttcctccaactctagacaatattctacatttttcttaaagtatgacttaataaatatatatttggtaaggctttataagcaacacataaagaaagactaattatgctaaattcagtctctcttaactgataactgagagagaatggagcaagtgaagtcataaagagaagggtaaacaagatgcttgtaatagattttcccttgaaagaagtaaaacctatttttactgttcctagaaaagtgaattttaagtatctttgattggaacagaaagagatttcatcttttgataaataaagtttctaaattaattcatctattttctacttctaaaataattttgttgaatctttgaatttaagctttaaagagtgatgagtttcaagacaatagcatatttaaaatactatgcatcaatgtacttaagctcatgtaattgatttttgatacattaggaatgttttagccttgatccaatt

SEQ ID NO: 849639 - DNA, 429 bp, Homo sapiens
ttcattccaaatgtaaattctgtctcaaactgtwagcaggactactgcattttacctcagttctcctctactgaaacatcctctcaacccagtgaggataacagagataagtctgatgaagatataagacatagttccaagatttcagatctaagtcatcacttgcaaattcagcgattatttaaatttgccattcttcataaactagaacaatatctggaaattgtctctctgtctctgtctcacacacacacacacggcacacacgcatacaaatctaatgctccctcactttcccaattcacaaataattttgaaaagtttcccatttttttggcattgtgtgaaggtgttgggatgtattatttctggtgggatagtcattctcagttaagcaaagggtaagtttaaagatgtggaagtggccgg

SEQ ID NO: 849640 - DNA, 609 bp, Homo sapiens
ataaaatgacagtgtgtatctacacaaagacttgtacatgaaagttcatagaagcttaaattttaatagcctcaaacaggaaataaccatcaaaaggtacatgggttaacacattgtggtagaagcatgtaataattatactgaacaaaagaaatcctacaaagcaattgtatatactgtataattcaatgtatttgaaactgaaaaagatgtaatgaatctgcagtggcagaaagcagatcagtggttcctgggaatgagggagtggctgtaggaagagctggaaggaaggtgatatggcttggctgtttccccacccaaatctcatcttgaattgtaactcccacaattcccacgtattgtggaagggacccagtgagaagtaattgaatcctggggcagggggctggtctttctcatgctgttctcatgatagtgaataagtctcactactacttttgggactgaggtgggaggatcgcttgggttgaagctgcagtgattcatgttcatgccactgcattctgccctggatgacaaagtgagaccctgtctcaaaaaatgttttaaatayaaaaaccaaaaataaaagacttataataagaattt

SEQ ID NO: 849641 - DNA, 429 bp, Homo sapiens
ttcattccaaatgtaaattctgtctcaaactgttagcaggactactgcattttacctcagttctcctctactgaaacatcctctcaacccagtgaggataacagagataagtctgatgaagatataagacatagttccaagatttcagatctaagtcatcacttgcaaattcagcgattatttaaatttgccattcttcataaactagaacaatatctggaaattgtctctctgtctctgtctcacacacacacacacggcacacacgcatacaaatctaatgctccctcactttcccaattcacaaataattttgaaaagtttcccatttttttggcattgtgtgaaggtgttgggatgtattatttctggtgggatagtcattctcagttaagcaaagggtawgtttaaagatgtggaagtggccgg

SEQ ID NO: 849642 - DNA, 515 bp, Homo sapiens
gggatgtattatttctggtgggatagtcattctcagttaagcaaagggtaagtttaaagatgtggaagtggccggatgcggtgtctcacgcctgtaatcccggcactttgggaggccaaggcgggaggatcacgaggtcaagagatcaagaccatcctagccaacatggtgaaaccccatctttactaaaatacaaaaaattagcagggcgtggtggtgcgtgcctgcagtcccagcaacttgggaggctgaggcaggagaatcgcttgaactcgggaggtggagattccagtgaaccaagattgcgccaccgcattgcagcctggtcacagagcgagactccatctccaaaaaaaaaaaaaaaaaaagaaagaaagaaaaagatgtggaaatgtgaaaatgcacagttaatttgggaatttcaaggtggtcatcatattrgagacatattatatgaatgtggggaaatagaaaaaagagggactgggaatgtagtcaggatccagccaataaag

SEQ ID NO: 849643 - DNA, 515 bp, Homo sapiens
gggatgtattatttctggtgggatagtcattctcagttaagcaaagggtaagtttaaagatgtggaagtggccggatgcggtgtctcacgcctgtaatcccggcactttgggaggccaaggcgggaggatcacgaggtcaagagatcaagaccatcctagccaacatggtgaaaccccatctttactaaaatacaaaaaattagcagggcgtggtggtgcgtgcctgcagtcccagcaacttgggaggctgaggcaggagaatcgcttgaactcgggaggtggagattccagtgaaccaagattgcgccaccgcattgcagcctggtcacagagcgagactccatctccaaaaaaaaaaaaaaaaaaagaaagaaagaaaaagatgtggaaatgtgaaaatgcacagttaatttgggaatttcaaggtggtcatcatattagagacatattatatgaatgtggggaamtagaaaaaagagggactgggaatgtagtcaggatccagccaataaag

SEQ ID NO: 849644 - DNA, 536 bp, Homo sapiens
tacataaatagaagcaacatctttgttggtgcctacttgtcatcagctagaaaggtccgattttttttgcaaaaaccttaggaacaggattcagggtacyttccaaaagcgaaaagtaaaggcagacttcagggctcctagaaagtttacatccaagaattccctataatgtaaacttgaaaattaatgctttttcctccacaagaacttgtttcaaaaagttagtctggtaactcattctcataaattgttcttagtatttttcttgcagattttcatgatatggttcccaaaataaatcagtagcaagcattatgatctgtgccttccacttcagcatagtactttgctccataaacataatataatgaacatttatgtatcactacctttcttacttttctttactcacttcatcatatcaacaaaatgtatttgatacacagttgcaaataaatattaagctttacattttgtaataaatatttctgagtaataaaaatgttccaactgatcaaaaaatttgatatttgatg

SEQ ID NO: 849645 - DNA, 600 bp, Homo sapiens; identical to SEQ ID NO: 831911

SEQ ID NO: 849646 - DNA, 561 bp, Homo sapiens
acgacactcattcagtaactgccagaacatctgagacacccaatactccagattgacatgatccattcccccgtccaatatgactgtgtcagccattttcagtcacaaagaatagaggaaaaagaacattacttttgtcctagttagagagagcccttgagcaaatgccatttattcaacctttcatttgtttgtttagcaaatatttgttaaatgtgataccagatgcttggaatacaaatggtaagggaaaaaaggagttattacactagtgagaaggcagacacctaaaatctaattataggacaatatggtaagcattgtaatttagcaatttgtacaaagtggtgtgagagcacagaggaggaatcaaattccgtcgttacctatttctgacaacatgaaaatggaaatgtatatatacttttttgtgaggagcggaggaagtgagtraagttcacttctcttgtgctttggttttgcatgagtagtttttcattgctgccttttctacctttctttggggctgtgatggagagagtatgctgttttccacatgag

SEQ ID NO: 849647 - DNA, 488 bp, Homo sapiens
cctaaaaacattaaaaatggaatcaccacatggccsagcagctccacttctggatatctgtccaaaagcactgaaagcagaatctttgtaatagttacacatcgtgtgcaaatatgcacatgttcatatcagctctattcacaatagcctagaggctgaagcaacccacatgtccatcaacagatgaatagataacaaaaatgtagtgtatacatacaagggaaactttaaaaaggaagtaaatcctgtcacgtggtaccacatggaagaactttaaggacattatgctaagtgaaataagtcagtcacaaaaggacaaatactgtgtgattccacttatacgaggtaccaagagtagggatattcatacagacagaaagtagaatggtggttaccaggggctggggcgggggagaacagggagttattgttcatgggtacagagtttcagatctgcaagatgaagaagttcaggagagggactgtga

SEQ ID NO: 849648 - DNA, 606 bp, Homo sapiens
ctagcatccacatatgcccagatctctttctggctatattctattctattgggcaatttacctgccctcgtgccagtgcggtaactggtcgagcaagttctctcaggttaacttcttcaagaatgtcttgttaattcttgtccctttgcattccacagaaagtttttcagctctactgaggtataattgacagatgaaaattatgtatactcagagtatacaatttgatgttttgacatatgtatacatcttgaaatgattaccgcaatcaaactaaataactatgcatcacctcacataggttactattgtgtgtgtgtgtgtgtgtgtgtgtgtgtgtgtgtgtgtgtgtagagcacttaaaatctactctctcagcagattcaagtatccaatacattattattaactatagtccaccatactgtacattaggtcaccaggacctgctcattttacaactgcaagtttgtaccctttgaccaacatcttcccatttctcccattccctatmaatatgcattttagaatcagcttttcaatttccatttaaaaaaatcgattgggatggtattgggttatattgggcatcaagagggctgagat

SEQ ID NO: 849649 - DNA, 586 bp, Homo sapiens
ctgtctcctgaaggaacctaattgtttcaagagcttgaggaagaagtgatgaatagacttgttagagtaaatgcytgtcttacctataaagaggaaatgatatgtaaatatatttaacatcatcctctaatgaaaggattttacatggaggtgaagaaatggcctggctgcacgcattctcgtgtacatttgcatgaggggccgtggtgcctggaggagataggtcagctggaccccaggacgaggcggagaagtctcgggatctgggagtggaactgtccggcctcccttatggcacttgcccagcttctgcagggggaaggcaagactctgcccacgcctgtgttgcaaaaacattgtggaaggctcaagggccggaagtacccagctgcaccgcgtagggaggacgctgctcgggctcgagtcatctgcacctggctccacagttccttgtttggactcgcatggacacacaccgagccttgcctgagatggcaaccaggaagctgactgtgccccagcttccttgagtgttgcatttcaatttcccagcagttcttccaaaccaggcaggtgtgcatcacag

SEQ ID NO: 849650 - DNA, 440 bp, Homo sapiens
acatatcctcactgaccagctgtgkggttccgtgctaatccaactgtgggaacactatttgggtgagatttgaagagagatgagattccacaattctgaagaactggtatgtgtccatggacagtttatctgggaaacttgactttccaatgatagacagtagagagcagatatatttcccaagcatgtctgtaataggcatacaaattgtagaagctgcattatcaattactcagttcattaataatataaaaagttaatgagtatagaaaagagtgaaaacttacattgtaatatgtaagggtttttttcctttttactggttccactatagcacactttatagtcttttggaaatagactataaagtcttaataatatattaacatgtagatatattattaagcatcaacatggcgttcccaatatcctgggtcttt

SEQ ID NO: 849651 - DNA, 600 bp, Homo sapiens
gcaaaaaatagccacaagcaatttatctcaaagtcatgaagaatgtgaagcctctacttgagaaaaggcccttgaaaacaaagaatgcatattattgcacagggttgtatttcaggctcctctataccacaaacatttcagaaaactctaatcattgagaaaatgccaaattaatatttagtctttggaaactaatttcgtgaataatttcattataatagcctacaactatggttttgaatgagaaaccactttggaaattaatagtttggttgctgaaacaaaaaattattaactctccatcatcaattaaaataatatatggtactatgaagcacttccatacggaataaataatgaatatctggaaaactgtaaattatataaatcctaaaaacctaaaataaaaaggaaattaaagactatttagcaaaagcaaatttgttgttctccctgaagggaaaacataaaggtcttttagaagattaaagattcrtgtctgtgctgctttctgaaaattcctatgaatcattcagtcttattgaaatgcacaattactacttacataaatagaacattctcatatatatgtatatgtgt

SEQ ID NO: 849652 - DNA, 524 bp, Homo sapiens
ggagaaaagtgaaacttcgagaggtgaaggaactagcctgagaagtgataagggggtttcaaagtgaggtttgcctgactctaaaacccattctccaggcctcttctgtttgcatctgtccccttctccctctgccatgaccctggcgggaaggtaggctgctcccattggccatccaccctcactgttcctccccagcccagaaggctccctgcacattgacttactgcttcactcctccttccaaatgcctttacttcatttctgtagggaagaaaatgggattagtctattactgtagcctgtctttgaatagagtatgctactcaaatgaagttttcattggtcagtctttggaccctaagataagaatctcagagagcattaagggaatattttttattaacaggtctcttcagactataaatagtctataaatcacaccccctgagttcttcgctttgtctgttataagcaaagctggctcaataccacagtwtgccacatactaccggtgtgatctc

SEQ ID NO: 849653 - DNA, 667 bp, Homo sapiens
gatgatgaagttaaagattaaaattgatagatacttgatttaccaaattacataatcacagagttggaagaaatttttaaaaagtactttaagtacattaaaaaaatgtacctgatggtatctaatgtaccatcagacagatggatgtttactccatgttttcagatacagtagaagtatctgtaaggactttgaagttttccagtatctgacaagagctgtggtttcagtgttactagtatttatgctgcaactatccctgaatttgatatttcttcctcccacacttagtattgatgtgggagaaagtcaaaaggaaaaatggctgtgcttatcttcctattaaagatagtgctctatctctttccttcagtttattgaaactctttttagagtataatatatataaccacaatatatattgtggttccttgaaatgtcataatattaaataatagcagcaaatagtcacatagagcttgtgtcaggtggtggtatcagtactttaaatatggtaactcacaggatcctcatgccaactctctgaaataggcactatcataatctccattttacagatgaggcactaaggcagaggtagagtaaagaactggcccagsttggcacagctagcaaggatgtggcaggatgcaaacccaggcagttc

SEQ ID NO: 849654 - DNA, 618 bp, Homo sapiens
atgtataagtccgcagaaaaaaagatggtagaagtatctttactaatttaatcktagaccattaacatcttccatgaagataaggtggatatgtgtcagtaaataaatggtcaactattttactttatgtttagacaattgagccccaggaatattttcttctattttaacaggctttcaagttgatataagtcctaaaaatttgattcgtaatttttctagaagttacaaattgtaatatctccttgtgcatactgttagaagctgttgttgttgttttttttttttccaactggtgttcttttctattaccattattcagtaagtagttaccaaattgtagtcaaacactctattgataaagataccattcagagctagggaatagagtattacacaaatagaatttttatgcctgttttgagtcttaacataagtctaaaaaattaaatacatctggcttttggatgaagaaagacttttgaagtctaggcagtaaaatatgccaaatataaactatcacactggcatttttacaggttgtaaactagacttatccaactgaataagctaagtgttcttatgacactttaatacacattactaagcagtaagtta

SEQ ID NO: 849655 - DNA, 618 bp, Homo sapiens
atgtataagtccgcagaaaaaaagatggtagaagtatctttactaatttaatcttagaccattaacatcttccatgaagataaggtggatatgtgtcagtaaataaatggtcaactattttactttatgtttagacaattgagccccaggaatattttcttctattttaacaggctttcaagttgatataagtcctaaaaatttgattcgtaatttttctagaagttacaaattgtaatatctccttgtgcatactgttagaagctgttgttgttgttttttttttttccaactggtgttcttttctattaccattattcagtaagtagttaccaaattgtagtcaaacactctattgataaagataccattcagagctagggaatagagtattacacaaatagaatttttatgcctgttttgagtcttaacataagtctaaaaaattaaatacatctggcttttggatgaagaaagacttttgaagtctaggcagtaaaatatgccaaatataaactatcacactggcatttttacaggttgtaaactagacttatccarctgaataagctaagtgttcttatgacactttaatacacattactaagcagtaagtta

SEQ ID NO: 849656 - DNA, 586 bp, Homo sapiens
cagcactattcacaataggaaagatacggaatcaacctaaatacccatcaatgatagcctggataaagaaaatrtggtacatatacaccatggagtactgtgcttccatgaaaaagaatgagatcctgtccttcacggggacttcgatagagctggaggccattatcctaagcaaactaacaggcacacaaaatgaaacaccacgtgttctcacttgtaaatggaagctaaatgatgagaacacatgacacatagagggaaatgacacacactggggcctatatgagagtggagggtgggagaacagagagaatcaggaaaaataactggtgggtactaggcttaatacttggatgatgaaataatctgtacaacaaacccccatgatacaagtttacctatgtaacaaacctgcacaagtacccctgaacttaaaagttaaaaaaaactactgtgtaacattaacatgatatttcaaagttcactgtaagtgaagagtttacttgcatagtgtattttatgcctagatgttttatttttcatattatgtaactaataataagttatcatactttaaccaaatggt

SEQ ID NO: 849657 - DNA, 586 bp, Homo sapiens
cagcactattcacaataggaaagatacggaatcaacctaaatacccatcaatgatagcctggataaagaaaatgtggtacatatacaccatggagtactrtgcttccatgaaaaagaatgagatcctgtccttcacggggacttcgatagagctggaggccattatcctaagcaaactaacaggcacacaaaatgaaacaccacgtgttctcacttgtaaatggaagctaaatgatgagaacacatgacacatagagggaaatgacacacactggggcctatatgagagtggagggtgggagaacagagagaatcaggaaaaataactggtgggtactaggcttaatacttggatgatgaaataatctgtacaacaaacccccatgatacaagtttacctatgtaacaaacctgcacaagtacccctgaacttaaaagttaaaaaaaactactgtgtaacattaacatgatatttcaaagttcactgtaagtgaagagtttacttgcatagtgtattttatgcctagatgttttatttttcatattatgtaactaataataagttatcatactttaaccaaatggt

SEQ ID NO: 849658 - DNA, 581 bp, Homo sapiens
agtacctcacgcttgacctccatctctcaaaccattctattatttctaccttatctttagctatacatgaatctaattatagaaaagataataatgcataatgatcaaatgcatgggctgaacctccaatatttgagaaaattgttggtgaaatcttcacctaccttattatctatctctctaatccatctgtctaataaaatgaaaaccaaatcaataaaaatgagcaaaataaagaaaataaagctgttattacatgcatctccagagaaagctattactgcaagtgactctcttattttagaaagtgtaggaaagtatttttctgtgagtgggattatataatctttacctactcttggaagccaacctaagaaacatgtcatccactccccttcctcatctttgcaagtggtgctatatgccagcaggctgagcattgtcattactgtaagaaagagtatgaattaatccagcacacatcccaaattsagaataacaaatctggaatgtggaggcccacctgtctgtgggtccatgttgagaagtctacacttttgattacatgtttgcctatttgt

SEQ ID NO: 849659 - DNA, 562 bp, Homo sapiens
gtgggttgttgcccttgcagagctgacctatgatgctttcggaaactgctcagggactcagcaagcaacctggggcactcccaggctctgkctacgagatgggctatctatctgaggcaagaatgaatccaaatgtttacaagcaaactctcagggacttcttttttttttttttgagacagagtttcactcttgttgcccaggctggagtacaatggcgcgatctcggctcactgcaacctccgcctcctgggttcaagcgattctcctgcctcagcttcctgagtagctgggattacaggcatgcgccaccatgcccagctaattttgtattttcagtagagacgggttttctccatgttggtcaggctggtctcaacttcccgacctcatgtgatccacccgcctcggcctcacaaagtgctgagattacaggcgtgagccaccgcgcccggccaggacttcttctaatgcaggtgcaaagttataatgagatgactgtcatctgcaaaggcgaatcactctttcaaaaaagattaaattccatgtaaataatgccatt

SEQ ID NO: 849660 - DNA, 619 bp, Homo sapiens
caagcgatatagcaacgtatgtgagtgcctctgatgatttagcataaagcmgtcctgagccacatgacaggcacagccgcgaccagggacacaggctatttcataaagtactagcatgaagaattcagcagtgggactaagaaagaataaccctgaattgttcagtgtcagccaggagtatgtgagttttctgcaggagttgaattcctagggcaagagtttaaaattttcagaaattagtgggaaaatcaaagtaaaagaaaatactcattcaatttctacatgtcattatgataaagaagagaaggatacagaagcctagatatagtcaggacagaacttttttgtttcagaaactttttgtaaatgatgtctgtcttatttaaaaaataatccccagtatctttgcctaagacttgagtaataattttgtttgaatctcctatttttaaatttgtttcagaatacaacctaaaaggaacaaactaatgctctactcagtaggcctcttttcccttttcctaaagctcgtggcccagagtctctaatctcaccctcacaggcaacggggagttctagagcacacaagaggtccgtactctggaagcatctatgtttc

SEQ ID NO: 849661 - DNA, 619 bp, Homo sapiens
caagcgatatagcaacgtatgtgagtgcctctgatgatttagcataaagcagtcctgagccacatgacaggcacagccgcgaccagggacacaggctatytcataaagtactagcatgaagaattcagcagtgggactaagaaagaataaccctgaattgttcagtgtcagccaggagtatgtgagttttctgcaggagttgaattcctagggcaagagtttaaaattttcagaaattagtgggaaaatcaaagtaaaagaaaatactcattcaatttctacatgtcattatgataaagaagagaaggatacagaagcctagatatagtcaggacagaacttttttgtttcagaaactttttgtaaatgatgtctgtcttatttaaaaaataatccccagtatctttgcctaagacttgagtaataattttgtttgaatctcctatttttaaatttgtttcagaatacaacctaaaaggaacaaactaatgctctactcagtaggcctcttttcccttttcctaaagctcgtggcccagagtctctaatctcaccctcacaggcaacggggagttctagagcacacaagaggtccgtactctggaagcatctatgtttc

SEQ ID NO: 849662 - DNA, 637 bp, Homo sapiens
agggaggaaaaattgcaggagctgacaaaagaagttgaaagagagagttattatctcaggccttttcaaggggaaaaaaaaattgaatgcagcaagacacgacaaagttgcacttctgagatawgaattctgagaagttttaaaaagaaacagattatacaatcaaaatccaaacctcatgtacaagatcgtttcacatacaaaattattctattttccttataatataagcagacagggaaggtttctccaggtataggaatttaattaacctgatcaatcagcctgttttatggcttcctgcccttaagcctattcttccccaaaccctgggtagaatagggtcaactccttggtttaagtcagctcctgagatacccctgagaacttgtagatgaactcaagtgaacttgcctcattactatgctaaagtcttcatcttgggaggagctataactttatgactgtaacatgcaacctatgtgctgacatgatgattcacagcatctgcaccactggggctcctcttttacatgcattgacatacgctttcacctctcaatcaccccatgagatcctcctgtcactttcctggcgggcactgttaatgaagaatatttccagtatcctctttact

SEQ ID NO: 849663 - DNA, 656 bp, Homo sapiens
taagttacacgaaatatttacctacaggatttacctcatttatgtttaattcagtttttatrgtttatttagattacttattagcaaagataagttattaataacttataattaataagtaattaataacacaaagctagttattattttcttgttaattatttttgtaacctgtacatattaggtgttcatctaggaaccttaaagttaagcatatgagtatcttcaccaataactcagtagattcagctgttttcattaaactaacaacattacacttgtcttatttatccaaaaaaccacacaaagatcattttcttcttggcttggtttacagtcttataatcttttgtgccaaactctgacacattaaaatatctggcagagacaaatataaaatccagacaaaatgtatgctgacaattctgaaggcatttctacttttattttatcagtaatcctaaagccagcttgtttattaaatatttacttaaatgatatgaacttgaaaaatgggctctcattggctgaagggcatgccagtataaaactatccttctgaaataagtggacaagactggtgccaggaggaaaaggagtcttccaacagatagaaaacaccaggagccagtaaactgcgtttgctgataaggttt

SEQ ID NO: 849664 - DNA, 574 bp, Homo sapiens
ttagtttgctaaggatgatgggctccagctccatccatattctacaaaagacatgatgtcattttttttctggctgcatagtattccatggtttataagyaccacattttctttgtccaatctgtgattgatgggcatttaggttgattccacgtctttgctattgggaatagtgctgcaatgaacataatatgtgcatctgcctttatagtagaatgatttatcttcctctggttatatacccagcaatgggattgctgcaaatagtatttctgcttttagctctttgaggaatgatcatactacttttcacaatggttgaattaatttacacttccacttgcagtgtctgcattcccttttctttgcaacctcaccaacgttggttattttttgactttttaataatagtcattttgactggtatgagatggtatctcattgtggttttgatttgcatttctctaatgatcagtaaaattgagggtttttaaaatatgcttgtttaccacatgtatgccttctttagagaagtgtctgttcatgtcctttacccactgtttaatggggttgt

SEQ ID NO: 849665 - DNA, 636 bp, Homo sapiens
ggggaacatgagagcaaagtcaatatttgaagtaaaaatgggatccttaatttctgaagaactgagttccttcagctcacacatgcataagtatcaggcccaggaagcagcaaagtcttayagaaatggcaaaatgttactaaagatactttacagtggaaacttcaaaaaaaaaatgaagcctcccaaattagtctcatctaaggatgcctaatgatatgcagaaacttctaaaattttttcaatatttttatttaaagcttttacaaaaggcaaataaaaagcttaagcaattacttaatataaaaaattaaatctgctaactttttggcttagttactatcccgatccaaaggaaatcgacttcagtaccaattagttgacttttggtaagtagtggggtacgtttgacctgggcaaagaatggaattgagtttgaggcccaacttaggaagtttagattccctcctaagacatagggagttagaggccctcccctcattaaaatctctcttggttaaaaacggatttggcactatgtgatgttaactcctattctctttggattaatcggccttgcactttttgctgatggctatgggtgacaggattaggcatgtacaggatcataggaca

SEQ ID NO: 849666 - DNA, 576 bp, Homo sapiens
agatttactttctctatctttttttttttcacataagctctgtatgtgactctacctgtttcttggaacaggtagttccaaggtttcttyggttacttaatgactattttgttattttatttttccaaaacatgtcatagggttgtgtctagaactcaggtcattctgtataatgtttccagtaggttttggaggttaagatattgtttccttagaaatacctgatcaagatttcatgtccttacagttgcacatataagttttgtagctggagtaagctcagcagtgtttttaatgtcacaatagtaatgtgctccttgcctgttgtattagtccattttcatgctgctgataaagccatacctgagactagccaatttacaagagaaagaggttaattgaaattgcagttccacatggctggggaggcgtctcaatcagggtggatgatgaaagtcatgtctcacatggtggcagcaaaagagagaacgagagccaagtgaaatgggtttccccttatcaaaccatcagatcttgtgaggcttattccctaccatgagaacagtatgggggaaa

SEQ ID NO: 849667 - DNA, 480 bp, Homo sapiens; identical to SEQ ID NO: 831426

SEQ ID NO: 849668 - DNA, 489 bp, Homo sapiens
cagtctgtgatattccaaatgtctggtgctggtgacataaaaatgcctttgtcagaaggcctggcacaaacctgccgagtccagmtgaagcctgacctgccagtcaggtagccaggagcctctgcgtggtggcctgtaaaatgccacactgacctggcctgtgggacgtcaaccaaattccttcctccatctgggcctcagtttcccttttcataagaggtttttgtgggatgatttctgtagatggctttttaaaagacattgataagacaaactgggattcatccaccaggtgtgatcacttttatgttacacatttatttaatgctttaaaatcaagcaccctggcgcttgattcttgttacagttgattagaggaatagaggaggaggagacagaaaatctcctggcataggagatcagattggaagactggttctcaaaaacctgaacccggggtcccaaggggggacctccacccttagggtg

SEQ ID NO: 849669 - DNA, 578 bp, Homo sapiens
cgagcactgtgacgatgaggactagaggcccaaactctgccctgcgctctgcattccacttgcagcctgcctttgggcgaytcattttacctcctagccaaggcttcctcctcttcatggggacaaaattgggctccaaagccacggaggtattggtaggcccctgtgtggcacccgatgtcgcctggggatccagctcctgagggctgcttaggctgtggctgcctcccaggcacgtggtgcagcccatcctgaacaaaactaaaatgttcacatcaagccttccccggtgtggtgtgggagattaaagatggccacgccttctttgctactcctcccagggcagggggcgggaggggggcggtgtctcaatcccctccctggaacctgggctggccccagtgacaagctctgtgaacagattcagacagaagtgtatcctggggtgtctgtggtgaagtcatgggatgcctggccgctggccccaccttccaccccaaccactgccgcccttgaactctctggagtgcttgtgccaggagcagccagacaccaagtaagaaggcaggtgaagccag

SEQ ID NO: 849670 - DNA, 631 bp, Homo sapiens
cgtctctactaaaaatacaaaaattagcccagtgtggtggtggaagcctgtaatcccagctacttgggaggctgaggcaggagaattscttgagcccaggaggcggaggttgtagtgagcagagattggcaccactacactccagcctgggtgacagagggagactttgtctcaaaaaaaaaaaaaagaaaaagaaagaaaagaaaaaaaaagctgctgagaactgagacaattctgtgtgccaagcactgtgctaagtgtgctttgttttatttggtcctcacaataacctgctgtttcttaggtaaagacactgaggctcaaagagatgaaataacctgctttaggtcacagagccattaaggggcagagctggggtccaaacccaggtctgcgtgacatcaaacccatgcttagcttccagttctggccatgaaggagtaacaggtatcatatttaatttctcttatagaaagctgtgaaactgaacaaaatctatgaagcaattctttagagtcattggacaacagagagacaggtctgtaatccttgagaggcaggaaacatacaaaacgagccccatagtcatcctggatttctacctatgggcacttctcaaatcatggcacag

SEQ ID NO: 849671 - DNA, 619 bp, Homo sapiens
acagaaggagttccagaaatctcataggggttcactgagcctttggccaatatgaagctgcacatgtgcagggtgagactccagaggcctggtagagaaaagctactgggaagctgtgaactgaatggaaattcacacagggctgggagatgctggcattctgacaaccaaagtgacagaccctgctgaacaccccggacattcagctgagattccagaaagggcagaccttagctgcagggatactctagccctagagtaagaacactctagtcccacttaacaaagcctgaaaataagcttcagtaggatggagttaatcctccaaattcaatactcttaaagcagaatggtgacacaatccagaccttcaaaaatgtgagaaacacaatgtctagcatttaatcaaaagctccttgacaagcaaaaaagcaggaaaatgtgactcctatgaggagagaaaacaggccatagaatcagatcggggatgacacasatgtcagaatcagcacaccaggactttaaaacagctattatgagtacacttaaaaccttaaaggaaaagatagttaaaatgagtgaacagatggagaatctcagcagagaaaggaaaactgtg

SEQ ID NO: 849672 - DNA, 636 bp, Homo sapiens
ttgctataaatacctgtatgctactttttgtgyaggcaccttgttttaatttctttttgaggtatacataggagtgaatttactgagtcacgtggtaattctatatttaaccttttgaagaaccgtttcatttttctgcatgtggcttgccaattatcccaggaccatatgttgaatagggtatcctttccccactttgttttgtttgctttatcaaagatcaggtagtctgatgcctccaggtttgttctttttgctcaagattgctttggtttttcagcatcttttgcggttccatacagattttaggactaatttttctatttctgtgaggaatggcattgtaatttgatagtggttgcatttaatctgtagattgctttgggtagcattgaaattttgacaatattaattttttcagttcataaatataggatgtttttctgtttatgtcactttcaatttctttcatccatgtgctataattttcagtatacacatctttcacatccttcataaaaattaccccctagtcttttacttatatatttgttttgatactattataaatggaattactttattatttttcaggtagcagtttgttactggtgtatagaaacaagaattatattt

SEQ ID NO: 849673 - DNA, 610 bp, Homo sapiens
agatgaaatttaatattgattattgatatcaactttatattattgaataattataattattacttaatatgtcatatattattcattacattatttccttatatgattttaaaaaattgttttaaattacttttaaaatttgttgtgggtacatagtaggtgtatatatttatggggtatatttggtgttttgataccagcatgcaatgtgaaataagtacaccatgaagaatgggctatccatcccctgaacatttatactttgagttgcaaaccaattaacactctttaagtatttttaaatgtacaattaagttattattaactatagtcaccctattgtgctgtcaaatagtaggtcttactcattctttcttacgttttgtactaaccatccacacctcccctcagccccgcactccccttcccagcctctggtaaccatccttctactctctatgtccatgagttcaacwgatttgatttctggatcccactaataaatgagaacatgcgatgtttgtctttctgtgcctggcctttttcacttaacataatgacctccagttctgatatgactgttttgtgggatttatactttgcatgtatt

SEQ ID NO: 849674 - DNA, 596 bp, Homo sapiens
tgacacaggagaatcacttgaacccaggaggcagaggttgcagtgagccaagatcgtgccactgcactccagcctgggtgacagaacaagactccttctcaaaaaaagaaagaaattataggaaagaaccaaatagaatagtcaaaaagtaaaatagcagaagtaaaaaatttactagagggacttaatgcagatttgaacaagtggaagaaagaatcaatacacttgaagataggtcaactgagattctctagtatgagaaacagaataaagtgaagaaaataaatgaagaaaaatggacaaagccgcagagacctccaggacattatcaagcaaaccaacatatgtaaaatgggagttctaggagaggagtaagaaaggggcagaaataatatctgaagaaataatggctccaaaatttctgagtttgattaaaaatgttaatctacaaatccagaaagctcaatgaactcmaagtcagataaaaatcaaagagatccacgcctagacacatgataaactattaaaagactatgacaaagaaagaatcttaaaaacatcagaagtagactcagcatggtagcttatgtctgtaa

SEQ ID NO: 849675 - DNA, 504 bp, Homo sapiens
agtttatatcagaaataacccaatttcagccagatgcagtggctcacacctacactcccaatactttgggaggccaagctgagaggaccatttgaggccaggagttaaagaccagcccaggctaatgaggccctttctctattaaaaaaaaaaaaaaattttttttaagtagccagatgtggtggcatatgcttgtatacccagctacttagggggctgaggtgggaggatggcttgagccatccatccaattgaggttgaagctgcagtgagccatgactttgccaccgttcacatcagtgcactgcagcctgggtgacaggctgagaccctgcctcaaagaaaaaaaaaaagaaaagaaaaaagaaataacctaatttgtatcacactgccacagtattctgctttattcacaacctcttattctctagtcccccagaagaatagccctcagacaagtaaaayagcaggaaggatccaaatctcttagtggaaatgggctac

SEQ ID NO: 849676 - DNA, 585 bp, Homo sapiens
ttgcttactttggagaggctaatcagaaactcaaaaaaatgcaaccatttgttgcttattatttacctatgacctggaagcccgctccccgcttygagttgtcccacctttctggaccaaaacaatatacatctttatacatattgattgatgtctcaagtctccctgaaaatgtataaaaccaagctgtgccccgaccaccttgggcacatgtcatcaggatgtcctgaggctgtcacagatacgtgtccttaaccttggcaaaataaactttctaaatttattgagacctgtctcacatatttggggttcacacatatatagcccatttattttcctttgtgggtttaaagctatacatagtcctattcttttaatggtcactcacgttttttttttttacctacatacttagtcttccagtaaagtcagcaggagtggttcccaaagcatagaccccagagcagcagccttagcatcacctgggaactgttagaaatgcagattctcaggtccctccccagacttaatgaatcagaaattctatgggtgggtacacaacctgtgtgttccaagtgattctga

SEQ ID NO: 849677 - DNA, 605 bp, Homo sapiens
tgatccaagaccgtttctcataaagctaatacctcagagaggctacaccatcagagagaaaatgtacgggggagaagcacattacacagtatcaatcagaaaggaatatttctgtctgagctttcactttgagtggagggcaaagaaaaaaaatcacatgagaacttgtggctgctgaccagctgctcccacatgggtgtagaaactggttttatcctatctgtgtgacctccaatagctgcaagttggaaatcttgatttagagtggacctaggtttttaccatccctgggtgcttgacaaaagcaagtttaagtcttccctaactcagagtttccatagatcattgcagccaatatgaacacaccaaaaaaggacatacacacacacacacacacacaccctgaaacaagatatcatgcgcaagagtcagtagaaacaatagttgttcctgacaatttcagatattggaaatattgaatatagactataagttaatttactacctttggggaagcaaaagaaggaattgaaaatatgaggaaagaragagatacatcaaaaacaaccaggcagttttatttttaaaaatcaaatataatgttc

SEQ ID NO: 849678 - DNA, 553 bp, Homo sapiens
cggatgagatatattattgacataaaaaaataggtgcatacacgaatgttcaaatatrtatatattcttacattctatatgtatgtagacatatagaatgttgaccaataccataatttaaatagcatataatttatgtttcttctataattctggaacaagtgatagaaaataatatttacagcctatttattgggaaaacttaagaatatcactaaggaaaaatctttaagtttgaatcatcataaatcagagagaacgggaaggaggctagcggcacaacagctttagtgtgcagatgagaagactaagttcagagaagtgacatctttactttgtgggaagtgtttgctagttacagaactggctccagaggcttgttgggtgacgcatgacagcttctctgacccagtccctcaagcatggatgcacagttttctgctgagtgtctcctccatattggagaatctaaatctccctgcactgtgtaacctcctgagatactcttacattttcttatgattgcaggctatttagtctgaggaagaaaggg

SEQ ID NO: 849679 - DNA, 619 bp, Homo sapiens
taacagagcttgatttttctatgaagctaatgaagtctaagcttcagggctcctaatttgaacagacaccatcaaggacctgagctggcccttaataacgtttctgcatggtcayctatttttgtaaaaaattgaagagaattaatctcttaattgcaagagaatgaacggctgtctctcttattctatgctgatttccccttcattgcatttccactgattcagttgacattacagtttcaggcatttgaaggatgcaagaaaaagttacacatagaatgctattagtttgagatttatgtggtatattttacagtctcaattaaatataatttgataactgatggtcctccaagtgtaagaatggcttccaggaatactcctaccacccctgtgccaaataaatttgcatcataacacaaaacttcagtgtctgaagacagcacatatgaatatgcccgacaccagaagtctatgtgtagtgaaggagaaacaagattaaaaagtataaagactatgatcagctgtgtaaaattttaagtggatgattccattctcattgattcttctcctagtaaaaatgaaaacttgctcaagtcattcacaatatattggcatc

SEQ ID NO: 849680 - DNA, 619 bp, Homo sapiens
caggctatttagtctgaggaagaaagggacatatattaaaggaaatcattttaatttttctttcttttcttttttttttttttttaaacagtcttgttctgtcaccaaggctagagtacagtggcaccatctcggctcactgcaacctctgcctcccaggttcaagttattctcctgcctcagtctcctgagtagctgggattgcaggtgtgtgccgccactccggctaattttttgaattgttagtagagacagcgttccatcatgttggccgggctggtctccaactcctgacctcaagtgatccgcgcgccttggcccccgaaagtgctgggattaaggcaggagccccccggctcgaccaaaaattacttttcttagtcagtgataatttcgaaactgtagtgagtttttcatagtttaggtttgtttctgaaaatcgtttctcccactaaaaggcactggaatttcatacggaaattattggaacttggtctgtagtaggaaaagtcaaggaaatcctgggaccttttgttatgccaaagtgtaatggggacacgtgaaatatacacagaagccagcttcttagttaaacttgraataaatttgagcgtcccaa

SEQ ID NO: 849681 - DNA, 602 bp, Homo sapiens
tggaggatatgtaatttgagatgggtctggaaggatgagtaggattttgaagacagagacaaacagtatgacttttatttcaactgctattcttcaggtttcagtagtcattgtatttcatttgatgttacaagttttggtaatttcttccttcatttctagcttcttaaataaaccctctgctacatgacctctactgagcattaatcatgccaaattaatcactattttctggataagccaaatattctaaaaaatccctatgcctctactcatactattctctctgcttgcttcacctttgctcttttccctaaagtaggctgcgaacgaatatagaaggcttggttcattttcaatgtcttccttgacccccacctcgaagaagtatgtgtacctcacaggtatttccaaatccctctgtatgttctttgattattgtctctcacatcgtatccatttatcaaggaacaagcttgttcctccacacagagcggttcttaagtaagggcaggagaagccatatggktatcctccggcccaggctgtcaggtggttggtattcggtctgtatatactctgatgcaatcagtttttgaagg

SEQ ID NO: 849682 - DNA, 602 bp, Homo sapiens
cgaggtagaaagggacataaactaaaggaaatcatttaaatctttctttttttcttyatttttatttttatttttaatagtcttgctctgtctccaaagctagagtgcagtggcactatattggctcacgtcaacctctgtctcccgggttcaagtgattctcctgcctcagtctcctgtgaagctggaattacaggtgtgtgccgccacatccagctatttttttaaacttttagtagagacagcatttcatcatgttggccaactcctggcctcaagtgatctgcgcgccttggccctcgaaagtgctgggattaatgtgtgagccatcctgctcggccaaaaattatttttcttagtcaacgataatttcgaacctgaagtgagtttttcatggtttaggtttgtttctaaaaatcgttcttcccactaaaaggcactggaatttcatagagaaattattgaaacttagtctgtagtaggaaaagtcaaggaaagtatgggctcttatgttatgccaaagcttaatgggggcacatgaaatatacacagaagccatcttcttagtgagatgtgaaacaaatttcagcatcccaaagaag

SEQ ID NO: 849683 - DNA, 524 bp, Homo sapiens
gtcatgtatttttttctcttttattttcctctagcagttttatagtttcaagctttacatgacagtcttacatatattctgagtagttttatgtagtgtgaaacagcggatcaattacattcttctatgtgtgaatatccgattttcccagcaagatgtattgaagagactattattttccctatgtgagttcttgtcatctttattgaaaatatattgaattctattctgttttattggtgtcttgttttatgccaatgtcatgctatcttgcctataatagcattatatcataattcaaaatttagaagtgtaatgcctccagctttgttctttttaatcaaaattactttgaccttcgggatctcttgtcatttcatacatatttttgaactgtttttcatttttytgtgaaaaatgacattagaattttgatggggactgcattgaatccttacatctttttgtgtaatatgaacattttatccatattaaatcttgcagtccctgaacatgggctattt

SEQ ID NO: 849684 - DNA, 523 bp, Homo sapiens
tccattaggttatccaacagttatatgttggcatataactgttcatagcggtctcttctggttttttgtatttctgtgctatcagttacaatgtttcctgtttcatttctaattttatttgttccttctctcttttttagttcagctaaaggtttgtcaatcttgtttatattttcaaaagccaacttctagttttgtggatcctctattatttttccagtctgttttatttatttctgttctgtaccttactatttttttctttccagtagctttgggttaatttttttcttcattttctagtttcctgagatacaaagttacttgctttattaggatcttcatggagtcattcatatctctaaacatccctttatactgcttttgttgcataccatatgttttttagaatgttgcttttccatttttgtttttctcaagatatttttaaatttccctttgaatttcttcattgccccattggttgttcmggatcatgttgtttaatttccatgtatttgtg

SEQ ID NO: 849685 - DNA, 565 bp, Homo sapiens
tttttccagtctgttttatttatttctgttctgtaccttactatttttttctttccagtagctttgggttaatttttttcttcattttctagtttcctgagatacaaagttacttgctttattaggatcttcatggagtcattcatatctctaaacatccctttatactgcttttgttgcataccatatgttttttagaatgttgcttttccatttttgtttttctcaagatatttttaaatttccctttgaatttcttcattgccccattggttgttcaggatcatgttgtttaatttccatgtatttgtgaatttcctaacatttcttctgctattgttttctagtttcatatgacaatgttaaaaaaatttatgtaatttcaatctttttaaaattttttaagacttgttttgtggccccacatatgatctatattggagattataccttgtgtgcttgagaagaatgtttattctrctgttgtcaaatggaatgttctatataggtctgataggtccatttggtctaatatagagttcaagtccaatgtttttattgattt

SEQ ID NO: 849686 - DNA, 506 bp, Homo sapiens
taacaggcaggggttagaaccatttggaggggtcagaagaagacaggagaatgttaaaatgtttggaacttcctagggagttggacggctcagaagacaagatgtgggaaagtttggcacttcctaraggcttgttgaatggctttgaccaaaatactcacagtgatatggacaatgaagtccaggatgggttggtcacagatgaagatgaggtgaggaacttgttggaaactggagtaaaggtcattcctgctatgcaaagagactggtggcatattgccctgccttagagatctgtggaactttgaacttgagagagatgatttagggtatctggcagaataaacttctaagtggcaaagagctcaagaggaagcatagcataaaagtttggaaaatgtgcagcttgtaaatgcaatagaaaataaaacttcatttttctggggagaaattcaagcctgctgcagaaatttgcaaaaataataaggagccaaagttaatcacca

SEQ ID NO: 849687 - DNA, 677 bp, Homo sapiens
agccatttgcccatttttaaatcaggtaatatattttcttcttattgagttgtatgacttccttatatagcttggatattaacctcttacctgatayatggtttgtgaatatttttcccagtctgtaggttgcctttttattttggtaattgttttctttgctgtgaagaagctttttagtttgatgtggtctcatttatttattttttcttttgtagcctgagcttaagttgtgatactcaagaaatcattgccaaggccaatctcaatattttcccctttattttctttttggagttttatggttttaggtcatatgccatttgtacgtcttcttttgagaaatgtctattcaaatcttctgcccatttttgattggattagtaggttttttttcctatatagttgttttagctccataaatattctagttattaatctcttgtcagatgggtactttgcaaatattttgttccattctgtggtttgcttcttcactttgttgattgtttcttttgctgtgcagagtctttttaacttgttatgaccacatttatccatttttggtttggttgtctgtgcttgtggggtattattcaactattttttgcccagaccaatgtcctagagattttccccaatgttttcttgtgggagcttcttggtttgaggtctta

SEQ ID NO: 849688 - DNA, 564 bp, Homo sapiens
agaccctcaggttttggagtaaagcccaatcatcgtatggagataagtaggctccttttgagagttaacttatggcatgctactgggcctcagtaaaaacctaatgcttaattataggtcatcaagctatcctgcaatctaaactgcgcgtcatgaagtgggatttttctgacccaccaaggcacagagttgaacatacattacagcagtctattatcaaatagaagaggtatgtatgagatggggtttgagcagaaactgaaggaaaaaatgtaagctatatgaggccatggtccaaatgtccatagctcctattattaatgcattatctcctttctctcagcttgaacttatggcaccgtggtaacatccttataataaattgacagagaaacagcaacaacaaaaaacttcagccaaatctatagaaaattctgcataatatacaggcaccacaccaaatatgacagctgcagcactacagccccttgycaccacatctctgaaggacaatgatgaagaaaaattatccaagtgttcagaacttaagtaagcacaacttct

SEQ ID NO: 849689 - DNA, 564 bp, Homo sapiens
agaccctcaggttttggagtaaagcccaatcatcgtatggagataagtaggctccttttgagagttaacttatggcatgctactgggcctcagtaaaaacctaatgcttaattataggtcatcaagctatcctgcaatctaaactgcgcgtcatgaagtgggatttttctgacccaccaaggcacagagttgaacatacattacagcagtctattatcaaatagaagaggtatgtatgagatggggtttgagcagaaactgaaggaaaaaatgtaagctatatgaggccatggtccaaatgtccatagctcctattattaatgcattatctcctttctctcagcttgaacttatggcaccgtggtaacatccttataataaattgacagagaaacagcaacaacaaaaaacttcagccaaatctatagaaaattctgcataatatacaggcaccacaccaaatatgacagctgcagcactacagccccttgtcaccacatctctgaaggacaatgatgaaraaaaattatccaagtgttcagaacttaagtaagcacaacttct

SEQ ID NO: 849690 - DNA, 626 bp, Homo sapiens
cacttacaaacgtgggaggtaaaccctggatgcagatggacatcaagatgggaacaatagacactgggaactcaaaaaggagggagggggggagggggacaagggctgagaaacttcctattaggttactgtgttcactatacaggtgacgggatcaatagaaacccaaaccacagcaacacgaaatacacccttgtgacaaacctgcgcacatgcccctgggtctaaaattaagatttttaaaacttatggactacctactatgtacatacacattgctgtgcttggctccgaagggaaagtgctttgacagcaatggcacataacatggttcctgccttccgatgcttaccatctggtaagaaagaatatctacatagacaggtatggggattccggggccaggcaagctagatgtcacatccctgttctggctgtgtgaccttgggcaagtcatttaacctctctaagtctaagttttcacctttgtacaatgacaataataatagtacctactttataggctaaattatacacacacacaactcacacacacaycaaactctgatcagttcatgacgcatattgagcaccatatacttgttaaagatgattattattgttat

SEQ ID NO: 849691 - DNA, 626 bp, Homo sapiens
cacttacaaacgtgggaggtaaaccctggatgcagatggacatcaagatgggaacaatagacactgggaactcaaaaaggagggagggggggagggggacaagggctgagaaacttcctattaggttactgtgttcactatacaggtgacgggatcaatagaaacccaaaccacagcaacacgaaatacacccttgtgacaaacctgcgcacatgcccctgggtctaaaattaagatttttaaaacttatggactacctactatgtacatacacattgctgtgcttggctccgaagggaaagtgctttgacagcaatggcacataacatggttcctgccttccgatgcttaccatctggtaagaaagaatatctacatagacaggtatggggattccggggccaggcaagctagatgtcacatccctgttctggctgtgtgaccttgggcaagtcatttaacctctctaagtctaagttttcacctttgtacaatgacaataataatagtacctactttataggctaaattatacacacacacaactcacacacacaccaaactctgatcagttcatgaygcatattgagcaccatatacttgttaaagatgattattattgttat

SEQ ID NO: 849692 - DNA, 604 bp, Homo sapiens
tccagcctgggtgacagagcgagactctgtctcaaaaaaaagaccaaaaacatgatacccataaatacagccacataatamgtccatgttatgagtagaagattcaaaaacaggttaaaacaagaggtcaaaagcatgcaaatgctttttaattctttaagaatactcattaaatcatataaatgacataaaactaatgcaaaattacaacattgtaatcataataatacagcaattttctcctatcataataaataaataaaccatctacaccagggctcagataaaataacaaaatcagcaataagtaatatttattaagttcctactatatgccaagagcattatattatttcatttaatcctcaccaaaaaaaaaaaacctagcaaaatacccaacatatactttttatagatgaaaaacatctgagattaaaaaggttaattaatatccccacagtggcagctctgggattcaaggtcagtcaaacttcaccatgctacatcctagaattacgaaaatccagactatcgagtctcaaggttgaggaagttcccagatttttctcatcagagcagcacatctcagatgttaatgtgcaga

SEQ ID NO: 849693 - DNA, 549 bp, Homo sapiens
agcgaatagacattttagccacaggataaatgcaaagtacccagacttcaatggctcccggaaaacacaggcaggaaaacaaaagcaccttcctaatgaggcccttgttatcatttccccrtaccttctgtagtctaaaatcctggacccgaatacaaacgggagttttccttcgttaaacctttctctgactgggtatcttccactaactcattgctcatgtctacttcttgacaaaaagtgagtatattatacatgtaaaggaaaatgtaacaatctcaagcacccccaaactccttatgcaaaagggaaagttaagcctggagactgagtcatacaaacaaatagctgttgctagcattatgcatgcaaaaagcattttagagatgcttgtgactgccagaaagagtgatagaaacaaaagttaacacaaattagcctctactaggtatgcgtctctcacttcgtgatgcatccttttatttaaatcttcatcacagcttcatgagatagttttcattatcctcttatgtcgtggtggtgtttttc

SEQ ID NO: 849694 - DNA, 614 bp, Homo sapiens
ctctaggtggaatctatttctctacccccaacaatctgggctggccttgtgatttctctggacaataaaatacagtgacagagatgtgtaacaagcttaggaacctaagtctyaagataccctgcagcttgggtcattaccctattggaaggcggctctgagatgccatcagggaagatgacccttgtgagaaagacctgttgagaaggagagaggcccagctatttgtgctgtctcggctgagcccaaaccccagatctctgaattagctgaatgtgtcatgtgaaagaagcaaggattgactagcaggaaaactgcaagtcaaccctacgtatcctgacagtaacagattgttgttgttttaaggtctagggtggtttataatgcagcaacacgtagcggaaacagaggccaataaatgtaactgaccctttttccttgacattttcaaaaatctaaggtcagaattggaagtgacccgaggaggtcatttcatgtctgtctgtttcaacaatttatatgaggttaactggaaattcaccaaacataattattcattctcaaccttgaagttcatttgcttttaattgaaaaaaactttacccatttatatg

SEQ ID NO: 849695 - DNA, 554 bp, Homo sapiens
gagaacagcatgtgggaaactgctcccatgattcaattactttcacctcatctctgccttgacagggkgggttatggggattacaattcaagatcagattttgggtggggacacagccaaaccatatcaattatcagcaaagtttgtttagtatcaacaagacctcagtcatccttatgaagaagtctggtctgagactgccttcagagtttttctgagttgggccatgtagtctggactttctatcccagttattaggtgcaggctgaaccagttagcaaagtggttctcttcagtcaaagtatacacaaatatggctgatatttgagggatgtcagggagtaattttaatcctaaaggaggatctgagcagttcatcagagtctatgaatagatgtgcaattacgaactgtgataggcactatgaagaaggattgtccaccgccatggatgtggatagccagaggatctgacctagtctgagaagtcaaggaagtctttcctgaggaagtcataattaagtcaagatttgaaaaaacctagtgcacttcagg

SEQ ID NO: 849696 - DNA, 593 bp, Homo sapiens
tttgtaggatcacacggatgatcaaggttagatcagagccatagccttgacctgaggagacacaagctgtctcctaacagacaggcaggagtcctgcagacactaatttyaaatgacagtgacacaggtggtcaaaattcctagaaaaaatttttttacaaaggccaggtgtggtggctcatgcctgtaatcccagcactttgggaggccgaggcaggtagatcaccagatgtctgcagtttaagaccagcctggccaacttggtgaaaccccatctctaccaaaaaaaaaaaaaaaatacaaaaattagctgggtgtggtgcatgtgcctgtaatcccagttactggggaggccagaggcagaaaagttgcttgaacccaggaggcggaggttgaagtgagccaagatcgcactattgcactccagcctgggtgacagagtgagaccctgtctccaaaataaataaataaataaataaacaaataaataaataaaataaaaataaaaataaattggcatgaaccaagaaaatagttacttccagaaaaaatgaagctaaaaaacccagacctctttatatgaggaagccact

SEQ ID NO: 849697 - DNA, 479 bp, Homo sapiens
ctgaagcagctggattgatagaactgtagaatggccttttgaaatcttgataattacaatgccaactaggtgacaatactttgcagggctggggcaaagttttccagaaggctgtgtatgctctgaatcaacattcaatatatggtactgtttctcccatagccaggattcatgggtccaggaatcaaggggtggaaatggaagtggcaccagtcaccatcacccctagtgatccactagcaaaattttggctttctgttcccacgacattacattctgctagcctagaggtcttagtttcagagggaggaatgctgccaccaggaggcacaacaatgattccattaaactgaaagttaaaattrccacctggacacttggggctcctcctacctttaagtcaacagtctaagaaggaagttacagtgttggctggggtgattgaccaggactataaagataaaaacagtctgctactc

SEQ ID NO: 849698 - DNA, 560 bp, Homo sapiens
tgatgcctgggccaaaggctcattctatctagtaatatcttggcagtttgcaataacatccccaatatcgttaaaaaaaggtaggtgccataacagccctgaaaggaagagggaaaatgacataaaaraacactggattggggccaggtacagttgctcacgcctttaattccagcaccttgggaggctgaggcgggtgaatcacctgaggtcaggagttcaagaccagcctggccaacatgatgaaacctgtctttactaaaactacaagttagctgggcatggtggcatgtgcttgtaatcccagctacttgggagcctgaggcaggaaaatcacttgaaccctggaggcagaggttgcagtgagctgggatcatgccattgcactccagctggggaaactgtctaacacacacacacacacacacacacacacacacacacacacacacacacacaggattggaacagggccaacattcccaacccttgatggtaatagggggtgggtagcagtctctacaggtgtgccattcattcttaattggctagcagagacc

SEQ ID NO: 849699 - DNA, 622 bp, Homo sapiens
aacttaggtgcccactgacaaatgagtggataaataaaatgtggtatatatacaccatggaatactacttggtcattaaaaagaacaaaataatgtcttttcagcaacttggatggagctggaggccattattctaagtccatgtgctgcacaccagtcagagcgattacataaaatgtaagttaacattatgctgcttctcagctcaaaaccctccaagaactccccttttctcattatataaagtcaacgtccttacatgacctggcctaatccaatctttctggcctcagctcacacaattttaccccttggtcactcaggcagctgcactggcctcttcactgttccaagctatttgctttgcttagacttctttcctgcagatatttccatgctttaattctttacctacttaaagtctttctcaaacgttaccttaaataaacccacctttattccataatacaacacatttttgcttgcttactatgctatcatttattgcctatttttccttactagaatgtaaggtaaaagacaacagaaaatgtttttatgtgtatcttttattgttgctgyatccccaaattcaacaaatagtgcctttcgtataatagat

SEQ ID NO: 849700 - DNA, 577 bp, Homo sapiens
cggcctgtgtctgtgacttttctaggtgcatggtgcaarctgttggtggatctaccattatggtgtctggaggacggtggccctcttttcacagctccactaggcagtgccccagtgaggattttgtgtgggggcttccaccccacatttcccttccacactgccctaacagaggtttcccatgaggaacctgcccctacagcaaacttctgcctgggcatccaggcatttccatatatcttctgaaatccaggcagaggctcccaaacctcaattgttgacttctgtccactcgcaggctcagaaccatgtggaagctgccaaggcttggtgcttgcaccctctgaagccacagcctgagctctccgttggcttctttcagccatggctccatggctggactgtctgggatgcagggcaccaagttcctgggctacacaaggtatggggaccctgggcctagcccaggaaaccacttttttctcctaggccttggggcctgtgatgggaggggctgccacacaggtctctgacatgccctggagacattttcctcattgtcttggtgattaacatt

SEQ ID NO: 849701 - DNA, 524 bp, Homo sapiens
ccttaaatttggtgagagctgaagacatagacatggatgaaattgcttaggaagaacacatagatccatcgactccattatgtattgaacatctattatattaagagtaaataggcactagaaatataattaacaaaataaagacaattcttaccataaagaaacttaacttctagggagggagaaaaaaaatcaaacaactgagtaaagaaacaaagagattataccatcaaaagtatggtaagtacagaatagaaaaaatgtcctatccataagaagatataacaagagaatctgacttaatctggagtaatttggaagacttccttgggtgagtgacatttacacaaagacctgaagtttgcatagactaagcaaaaaaaggatggcattagagagactaaaatacagatttatgtctgcaacattgcaatgaagagaagaaatgtcaagacccaagattatagaggtasttacggtcagctcattcagggtcttctaggtaattcgaaggtttagcagac

SEQ ID NO: 849702 - DNA, 603 bp, Homo sapiens
agcacagaatactatttcatcgcttgattttggatttgaccaygtgactttctttgggaggtaagatgttagcagatataatataagcaaaaatttgaagtgggcatttgtgtagattaaaacaatttttcctctttccaccgagaatactactgtgaccaaatgtgtgggagtttccccaccccaacagacacgccaagtatcttggcccattttctgttgcttacaacagaatacctagaaaggagtaatttataaagaaaagggattttttttttcttacagtgatagaggctgagtccagggtcaaggggtcatatctggtgagggcattcttgctgtgaagactctctgcagagtcctgaggcagcacagggcatcacgtggtgagggggctgaacatgcttgctcagagctctctttttcttcttataaagccaccaggcccattcttgtgataacccattagtctattaatccattaaaagattaatccattcatttaataatggattcacacatgagggcagagccttcatgatccaatcagctcttaaaggccccacctctcaatattgccacattgggaattcagtttcacat

SEQ ID NO: 849703 - DNA, 603 bp, Homo sapiens
agcacagaatactatttcatcgcttgattttggatttgaccatgtgactttctttgggaggtaagatgttagyagatataatataagcaaaaatttgaagtgggcatttgtgtagattaaaacaatttttcctctttccaccgagaatactactgtgaccaaatgtgtgggagtttccccaccccaacagacacgccaagtatcttggcccattttctgttgcttacaacagaatacctagaaaggagtaatttataaagaaaagggattttttttttcttacagtgatagaggctgagtccagggtcaaggggtcatatctggtgagggcattcttgctgtgaagactctctgcagagtcctgaggcagcacagggcatcacgtggtgagggggctgaacatgcttgctcagagctctctttttcttcttataaagccaccaggcccattcttgtgataacccattagtctattaatccattaaaagattaatccattcatttaataatggattcacacatgagggcagagccttcatgatccaatcagctcttaaaggccccacctctcaatattgccacattgggaattcagtttcacat

SEQ ID NO: 849704 - DNA, 548 bp, Homo sapiens
cctgctgtagtgaagcacaattagggccttggactcctcttagggatatcaaaggggctggagcaaggtggtacagaaaggaagattccttcagttcccctgagaggacaagaggtacactttaagttgacttaraaaatgcttcttctcgtagttcaagctaaaatgggcttatcttattccctgatcaaatgaacatacatcctaaaattattagggagagatatgacataccatttaagttggctgcagtaaaaaccacttcccttagagaacataagtaagttgagggcattgtgagtttggcacctttaagaaacccctagcaatggctcaataagcctggaggctactacagttgtgctcattcttccaacaagcatttattgagcacttgtttattaggttcttcccatgataatcattactttgagtcttcataattttcatcataaagataaaactagacaatattactccttcctggtaagggtgggtgtgtctttttttttttaaatcaagcaagtttgttttaataaaatacagct

SEQ ID NO: 849705 - DNA, 618 bp, Homo sapiens
taaatgcccatcaatcaaccagtagataaaaaattgtgagatatatatatatatatatayatatatgatggaatactactcagccataaaaagaaacaaattaatggcattcgcagcaacctggatggaactggagactattattttaagcaaagtagctcaggaatggaaaaccaaatattgtatgttctcactcataagtgggagctaagctatgagtatgcaaagacataagaatgatacaatggactttggagactcagaggaaatggttgggggcggtgaggagctaaagactacaaatttttttcagtgtatactgcttcggtgatgggtgtaccaaaatctcacaaatcacaactaaagaacttacccatgtaaccaaatactacctgttcgccaaaaacctatggaaataaaaaataataaaataaaataaaatcactgaactatctgcaaaaaaaaaaaaaggaaaagaatggctggatttgttgcagaggtattacaaaaatcaaatgatgcaatgaaaatgattcgtaaactcaacagaacagagcaaacacaaagagagtattattagagctaatgaccttcagcattattttcagattttccagg

SEQ ID NO: 849706 - DNA, 618 bp, Homo sapiens
ggtctcttggaaatcatgagtcagataactgattcagggggagaaatcaggactctctgtgcccttgcagatcacactgatgttagtaactttgagtccattatcttggaatctgctctgataccttctgcaaatggccactgaagtattttgataaatgggatttttcttgtctatttttaagtggtggtgaagagaaatgttaaattgccatagagactgactatggggtggagccccagatataatgcatgtagctgccaaatttggaggtatcttttattaaaggaaattatttgaagaaacattcagatgattctagccatactgagtcaccctaatcactgaatcttcctagctgaggcctcagacattgtagaagagagacaaggatttctgaaaaaaaaaaaaaaaatcatcactgtttaagccactaaaattgaagtaatttgttgcacagcagtagcaactggagtaactgcttatattatttttccttctagtagctctgtcactgtcttccccaaacaaggctgaagctgtgctgcataytcttacctagcctaggaagtcataaaacatcactctgcttcattctgttggatactgatgagtcaa

SEQ ID NO: 849707 - DNA, 594 bp, Homo sapiens
tgtctgccacatgggggggttcaatatatatttattaaattgaataaatgttaccgatggggtaagtgaaagtgctatgtacataaacacaaagccatatttttgtttggctagattcttaccttgcatctttgtggtactatagagaagactttctgagaaaaactttctttttcttccaaatgtagaaagagcaatccataattcggcataattttttagctttcttctgtgggtttacaacagcaaggcttccaagctgcagatcagatattaggactgattactacaagataaatggcactcatgggtaggggttgtatcgatattaaaatatagttttagaagacttctaaaactgatgttctcttgaggccttacatttgcaggacacctgagctgaactttagcctactgaggttagcccaaaaggatcaggaaagataattgagaggcattcttcagtagaccataagtaactaagttcactcacagatcatcaatccacttttataactttcactggaatcaagttttgctctattcccaatctaggatragagactatgaaggtccatggaacccaagtttgga

SEQ ID NO: 849708 - DNA, 540 bp, Homo sapiens
aacaagataaaactgtagatttgtttctttcgtgaaaggccattgactctttaaatasttttctgttgattgcactagcttaattacttacttaaacagtgaatgttttgtcagctcaatcaaatattttattagtattgcttagtattaagattccaaatgtacattgtgatttagattcaccagcatcattattgtagttattgactacctgtgaatttttagcactacaaataccttcaactttaaaacagagataaactatatttggccatcatgaaatgcattaattttcattaggtttatcaagaattgggttctaaagcaagtaattttttgtttgtataaaccatattcttttgaatagggttttgcttttgaatgaaacatcagtgttcttaattccatagaaagatattcaagggttatgtattaaagatatgtatctatactttcttgtaaacattcattgtattacttgactcacaaatctatcttggtattatctatttacatatacagaaagttaatatcatatat

SEQ ID NO: 849709 - DNA, 612 bp, Homo sapiens
aactcccacttataagtgagaatacacaatatttggtttttcattcctgtgttacttcacttagaataatggcctgcagcttcatctaaattgctggaaaagacattattttatttctttttatggcttagtactaatccatgttgtatacatactacattctctatatccactggttggttgatgggtacttaggtagttccatatttttgcatttgcaaattatgctgttataaacatgtgagtgcatgtgtctttttcatataataacttacttttcttttagtagatacccagtagtgaggttgttggatctaatggtaattctacttttggttcttcaatgaatctccacactgttttccatagtgattatactagtttacaatcccaccagcagtgtaaaagtgttccctttccaccacgtccaccccaacatctattattttttaactttttaattctggccattcttgcaagagtaaggtggtatctcattgtggttataatttacatctctctgatatttactgatgttgagcatttttatatgtwaaacaaatatatttttaagtgagcaaatgatctgggtggacaccttaccaaaatata

SEQ ID NO: 849710 - DNA, 600 bp, Homo sapiens
aaccactttaaaagagatagtttggcagtttcttacaaggctacgcatagtcttaccatatgatccaaaaatcacacccctaggtatttacscagttgagttgaaaactattgtctacacacaaaaagtttcatttgaatgtttatttattatcaccaaacactggaagaaacaaagatgtctttcactagataaaggataacaagctgtggcacaatcatactagggaattctattcagtgataaaaagaaatgagttattgagtcagaaaaagacaaggaagatgcttacatgcatatagctaaatgagagcaatcaatctgaaagggctacatattgtatgattctaattataagacatcttagaaatcataaaaatatagacagaaaaaaaatcagtggttgctaggggtcagtggaggggagtccagaatttttagggatgtgaaacccagaatgaataggtgaagcccagaatttttaaggaagtgaaactactctgtataatattgtaatggtgtatacatgtcacacatttgtcaaaacccataaagtatacaacagaatgaacccctaatgtaaactgtagattttagtta

SEQ ID NO: 849711 - DNA, 620 bp, Homo sapiens
ctggcaatctttcctgttcatttggagcagctactccatttacatttgaattaattattaatatagttraatttaattctattatttttctaattgttttctattttcccattgcttccttgttccattttttcttatatttgtaaaatcgatttttttaaacttttactttaagttcaggggtacaagtgcaggtttgttacattagtaaactgtgtcagggagtttgttgtacaggctatttggtcattcaggtattaagcctagtacccattgtcaggcctctgagccaaagctcagccattataacccctgttacctgcacatatatgtccagatggcctgcaggagccaagaagtctggagcagccaaaaaaccacaaaagaagtgaaacagccagctcctgccttaactgattgaccaaccttatgacattccaccactgtgacttgttcctgccctgccccaactgatcaatcaaccttgtgacattcttctggacaataagtcttatgatctccccaccatgaaccttgtgacccctcctctgctaataatagataaccacctttaactgtaactttccactgcctacccaagccctatattgctgcccctc

SEQ ID NO: 849712 - DNA, 455 bp, Homo sapiens
agatattttcaaactagctttccttagtatcaaatgtccccaagtccaacagttacaatttccaataattaattgtccgcaggcaaggtgattcaggtgttttttgtgttatctctgtgcagggcttgtgttgtccttactggatgcctgcatcaggttgcctgggagagcctagagctggggaggtggaaagatgaggcttcctgtagatttggcactctttgcccagtgctctggattctctaagacggccttttcctatgagtgacttccagggggcactggtgttttgtcacttaacctgtgtacttatagaaaattgcaggtgtttacagaatttatgatttagtaaatttagtaactyagtaatgctcatataccaaagtgagcaatttgcatgcttgtagctctgtgtgagcgagtctgggtgggagagtgtgagtgcttcggaatgc

SEQ ID NO: 849713 - DNA, 627 bp, Homo sapiens
gccctacctcctttaaaacctgtctcaaaactcctctccttcataggagccacacctgacattatttgaacaatgattttgcaatttctgaccccttaattatttttgtatagccttggtttgtcctgctaatatgctgtttgtaaaggttcaactgtttctccatagctagactcaaatttctcaaaagaagattgtatcttttgctaactggagcccttcaggtagatatttgaggattgtgctccttggggacaattcacatatctttggtggcaggtgtttgggcctctatcattcattcagggagtgtttatggagcatccataccagggggcaggctgttcccagcccctgaatgcatctgtgggtaaaggcgagcatggtgttcaggaagttgaccagctgtggggaagagcaacatgtaaacagcctctgggcaagtgctacaaaggagagcacactgaatgaggacaatcagtaatatttgagatttaattcagttgaggaggttagggaaggcttccaggagraggggatgtttttgctgagacctgagtgttgagcagcactcacctagatgaaggaggatgggagaaacagcagcaaaggctctgtgataggagg

SEQ ID NO: 849714 - DNA, 627 bp, Homo sapiens
gccctacctcctttaaaacctgtctcaaaactcctctccttcataggagccacacctgacattatttgaacaatgattttgcaatttctgaccccttaattatttttgtatagccttggtttgtcctgctaatatgctgtttgtaaaggttcaactgtttctccatagctagactcaaatttctcaaaagaagattgtatcttttgctaactggagcccttcaggtagatatttgaggattgtgctccttggggacaattcacatatctttggtggcaggtgtttgggcctctatcattcattcagggagtgtttatggagcatccataccagggggcaggctgttcccagcccctgaatgcatctgtgggtaaaggcgagcatggtgttcaggaagttgaccagctgtggggaagagcaacatgtaaacagcctctgggcaagtgctacaaaggagagcacactgaatgaggacaatcagtaatatttgagatttaattcagttgaggaggttagggaaggcttccaggagaargggatgtttttgctgagacctgagtgttgagcagcactcacctagatgaaggaggatgggagaaacagcagcaaaggctctgtgataggagg

SEQ ID NO: 849715 - DNA, 497 bp, Homo sapiens
ttgttgtctttctagattgaaaggaccaagtccactttaactcggcatggcagccagcacaactytgatgagcatgtagacacttgacagacaatgtttgtggtgctgctatggaaggctccaaaactgtgctgtcaacagtgccataaaatcataatctgggccaggttttgtgcctcacgcctgtaaccccagcactttaggaggccgaggcaggaggatcacttgagcccaggagtttgagaccagcctgggcaatatggtgaaactccatctctacccaaaaagaaaaacaaaaacaaaaatcaaactaaactgaaaaaaaacccacaaaacttagcccagtgttgtggcacacacctatggtcccagctactcgggaggctgaggtgggaggactgctaaaggttgggaggcagaggttagcagcgagccaagattgcacccttgcactttagcgtgggagacagaataagaccttgtctcaaaataaataa

SEQ ID NO: 849716 - DNA, 664 bp, Homo sapiens
ccatgttggctaggctggtttcaaactcctgacctcaggtgatcacctgctttagcctcccaaaatactgggattataggcgtgaaccaccatgcccagccatcatctacatttttgcaatggatagrtcataactgttttatcatctgacaaggccaataagatgaatcttgaaatactgacagtgatcaaattaataaacttgttctcctaaaaaagttgaattttaaggaagtttgagttttggtaaatatcttcttaatctgcataattagctcccatgcctcaagagagcaaacagaagattaacaggaagacattgaaagtctctggggagccagctgttcataagaactatatgttagatggcaacagggcagaggtgaggtgtaggtcactctatggacagaggtaagagccaaagagctgtgaaacaaggggatcagcctgaagagaggggactcctggcttggaaaatcactgctggagctttgatgctgctcaaagaacaatggccaagccatttgatttttctttctcttaaaaattttcttactatgtatatatttgatagaatggggataatgagcaaagttatgtacgtgtactagttgtcagctgttctgactttttctcatgacggctgcagagtgttttgatcatc

SEQ ID NO: 849717 - DNA, 544 bp, Homo sapiens
accatgcctggctaatttttgtatttttagtagatacagggtttcaccatattggtcaggctggtctcgaactcycgacctcaggtgatccacccgcctcggcctcccaaagtgctgggattataggcataagccaccgcgcccggccaattacagtatattgttaataattgctctataatattagatgttatagtcaatgtcttagcatgactaataattaaattttgtcataggtatgtatgtataggaaaaaacatagtatatatagagttcagtattatccaaagttcagtattatccatagtatacatagagttcagtattatccaaagtttcagacatccagtggagatcatggaacataaccactgtgaattaagggagatactgtcgtttctgatctttattgcatttcaagtgtatttggaggtctgctccttgaatcacactcatttgagcagcaccacccactgcccaccctctagacataataagtaagtaatcaaatatccaaaataagctttcctcttagaaataagga

SEQ ID NO: 849718 - DNA, 544 bp, Homo sapiens
accatgcctggctaatttttgtatttttagtagatacagggtttcaccatattggtcaggctggtctcgaactccygacctcaggtgatccacccgcctcggcctcccaaagtgctgggattataggcataagccaccgcgcccggccaattacagtatattgttaataattgctctataatattagatgttatagtcaatgtcttagcatgactaataattaaattttgtcataggtatgtatgtataggaaaaaacatagtatatatagagttcagtattatccaaagttcagtattatccatagtatacatagagttcagtattatccaaagtttcagacatccagtggagatcatggaacataaccactgtgaattaagggagatactgtcgtttctgatctttattgcatttcaagtgtatttggaggtctgctccttgaatcacactcatttgagcagcaccacccactgcccaccctctagacataataagtaagtaatcaaatatccaaaataagctttcctcttagaaataagga

SEQ ID NO: 849719 - DNA, 621 bp, Homo sapiens
cacatttatataatgttcggcctttgaacaaatatctcagattaatcgttcagcagcacaaacggtctggactgtgcacctacaattagttttcatttttttgtttgtttatttcctttcttccttgctttcattttcttttcttttctcttttaagacaaactgaaagccagtgaccctggtagaactgtttaaaattctatgcctttgagataagcaacttttccattgttgcaaaaaaattaaaaattgcaaaattctaattttgaagttttaaaattggacagaaatattcattcctgaatccgaaaatggaaagtttgcattcatgcacaaaaaagaaaaagtatgtgttatttattctctaatcttgagaatttgggagcatgtagtgaaggggatctgtcaagatttatgttttctttgttaataaaaaattaaggttgctatcttttgcatatgaaatactgtttcagacaaacaatgtctgtctttttctttctccattcaatgtgaatactctcataggagccacattagggaataytgtttgagagaaaaataagtcaaattcttccaagtagaaaaaaaaaaaagttcccaacaacagccagacttttt

SEQ ID NO: 849720 - DNA, 594 bp, Homo sapiens
gtttcaagagtagtcacgtggtgttgtaacccttcccttcctctgtatagaaatcctctcctattctcatggacttgtacgtgtgaaagcagcttagctcttggacagtccaagtatttttacagatgaaaaaatagagtaaatgacttgctcaaggtcataactaagtttggtggcagagtcagggtatagacgcagctggtgcttttaccaaataaatcaacacaaaaagaatgtattttccttgacttcttagggattgaagagaattttctagttctgagccatttaacagataaaatatctacataatgtctctagtgacacccctcttgttttagttcccctaaacttgaccttaaactggagagggaaggtcaactccagcttgccttgtgagtgagccctgtacagaattctctgcaaagtgtttagcacataaaccacatacacacctgggcctctccttcggctagaatatgtttatgaaagcgacagacatcagtgtsagctgcaaattgggaaaggggctttttcaaagtaggttagaggaagttttagcacttgcaaggcttgaaccaaagtcctcactag

SEQ ID NO: 849721 - DNA, 550 bp, Homo sapiens
catcgcttttgtcccattcagcctatacgtggacctgatgaagctgtgaagctgccggctgtrcctatcaggaaagactgcagtggagagtagaccagaagcctatttaagtctcccagtaaatgtctacattgcacacctgtagttctttattttttcttcttttttgagacggagtctcactctgtcacccaggctggagtgcagccacgcaatctcggctcactgcattgtgtgcctcccaggctcaagcgattcccctgcctcagcctcctgagtatctggactataggcacgtgccaccacgcttggctaatttttgtatttttagtagagacagggtttcttcatgttggccaggctggtctcgaactcctgacctcaagtgatccacctgcctcagcctcctaaagtgctgggactgcaggcatgagccaccatgcccggcctcgctttatttttttttaataggtgtaagataagcatgccccaggtcagcgtgcagatttcccagagggcttggaagaaccaccagaacattcctttatgc

SEQ ID NO: 849722 - DNA, 544 bp, Homo sapiens
gtcaaaattaatagggtattgctgcttcttatagaacaaaaaagaattctcatccattttattcattgctaaaaaaacatgtgtctgctaaaaatttcatttaraaaaaaaggttcaaaggtagtttccttgattttaaagtgttgcgaattaaaagctactttttctcaggtttgttattatcaaaaccacaccttcattaaaatgtaaagcattttattctttgagaatagattaaaactctgtattcaaccttatattaagagaggcattaaaactccaattatggattatagctttatatgagtttggagatttttttaacttcctttatatcaagaatatgttaaacggttaattgactgctgaatagatactctacatcatcataggaattaatcaatgtattggccttttgattctctgacttgctatttcatgtgttaatttaacgagttctccttccttctttgctgtccatgaagccttcatgcatgctattctatacaaactactttttattctaagttctacacacataggg

SEQ ID NO: 849723 - DNA, 486 bp, Homo sapiens; identical to SEQ ID NO: 815646

SEQ ID NO: 849724 - DNA, 628 bp, Homo sapiens
attataaggtgaaacattcatttattgatttaatagacattgaccgaatatcttctatatgataacatggtggtggtrgggggattcaatggtgaggtaatgatagattagaatccttttttttcaaaacattggagagccagtgcattgaatttctgccattcaacaggctgaagcagatgatgacaaactcttccaaatatttttggccagtggagcttttcaatcaatcctcccttcaactttaaggaaacaatatttgctttttattttagtgtgtacttgtaacaataattaagccgtttttcagctataaaatggccaacaatcaaagggctatcaaattttcccggcttggcttcctaattctttttgttttagggttaagagaaatttgtctaggtattttcagtgtatatataatatatatgaatgcagatataatacacatattattacatataatatatatatttcatactaaaatgatatgtgtgcaatactatattttcaatgacctagagtgtaataagactctgaaggcattcttcagcaaagtaaataatgtctgaattataaagggtaaacctccaaacttctgtgttctattgcactatacacacacaca

SEQ ID NO: 849725 - DNA, 637 bp, Homo sapiens
aatttctcaattctcaccctcctcccaccttccaccctcaagtaggcactggtattttttgttcccttctttgtgtcctcaaatagacattttaaaaattcatacaaaaacattaggttatggctgggtgccgtggctcatgcctgtaatctcagcagtttgggaggccgaggcgggcggatcacctttgtttgggaattcaagaccagcctgaccaatatggagaaaccccatctctactaaaaatacaaaattagccaggcatggtggcacatgcctgtaatcccagctactcaggaggctgaggcaggagaatctcttgaacccaggaggcagaggttgcggtgagccaagattgtgccgttggactccagcctgggcaactagtgaaactctgtctcaaaaaaaaaaaaaaaaaaattaggtttttgtgatggttgatagtttcctaaaaatatcaccctggaaatgtttgattttcatggagttttatcaagcactcatcaatcaaccaacaaaccaatcagttaatcagtatatacatatttttgagtgcctattatatgtccaggatttyattaatgaatgaatgaataaatttacttacttgacaaatatttattaatttccttctttg

SEQ ID NO: 849726 - DNA, 536 bp, Homo sapiens
cccttttctcattataaacaattcacttcacacatgcagaaaaatgaaattaggttgaataatacaaagttatgaatgctgatagaaaataaatawcttcttatcttcctttcactttgctgcttggtctctgtggttttgcctttctggatctgtgccttttaaatgccttaaagtctaaaagttgaaaggtagaaaagacgagaagatttactgttaaggagcacaattgggtcctatgtctttatagtcaatattttaagtagtttaaggaaaaggatgttaatttaagagataggtcaaatgtttgtcttgtttttcaacaggatcacctggaagaatatgttgtttttatttattagatatttacaaggctctcatagcccagccaattatgatgaacactaggtatttaatacaatgtgataaacgtaaaaactgccagtatagtttgtttccagattttttaaaaaagtactgaatcatggatccagtaaaaagaaagacagagaaatagaaagagggaagagaggaag

SEQ ID NO: 849727 - DNA, 640 bp, Homo sapiens
gtaatagcagccattatcagttgatccccctgtctttggaaagaatcatttcattcattgtggagagaaggaggggcaatttsaaatggcctgaggtaagtggcatttcatatattgccaatcaaattaaccttgaacctttctctgctacttagaattcctgttctttttcttctttctccatcattgagaattaagatgatgtgtataaaaccacttttctctctgcaatactgcacttcatcttcccctccctccccagggaggagggagaggaacagttctgtgcatcaatcaaactgactgagacttacagtggagaaaagtgagactctgtcaccgaatgcaggagatacaatggtgtctccgatgcaacccagtaattgcttctcccaaactccccttccctccagcactggattcgcaaatgcagcttgatctgagtcaggctgcgtgagcctcagatcagagctgccaaacatgcccttataaaatgttacaggagtgtggatctgagactctttcgtttcctggttctcacacgtggaatttggatctttgatagagtaggtctctttggagctcctggctgattttctctttatctgagcagaaagaaaacattgtagaaatgtgtgtg

SEQ ID NO: 849728 - DNA, 640 bp, Homo sapiens
attggctgtgttcactttggtcatgattaaggtascaccaggtttctccagtataaaatttttcttcctcttataattaataagtaattcatgggggaaaactttggggctatgtaaatacgctattctcatcaaactttccttcacttgctttagcaatcggtgatgattcttgcttggattaattttgtggtggttgcaaagtggtgattttcattttatttatttatctattagttattatttatctatttatttttagagatagtgtcacgctctgccactcagactggagtacagtggtgccatcatagctcactgtagcctcaaactcttgggctcaagtgatcctcccacctcagcctcctaaatagctgggaccataggcacttgccactgtgcctggcttattttttaattttttgtagagacagtgtcttgctttgttgcccaggctggtctcaaactcctgccttcaagcaatccttctgcctcggcctctcaatgtgctgggattacaggcatgagccactgcacctggctgattttatcattctttccatattcattagttgtaccattactcttttaattgtacattctgcaaaatactcctcattatggtctagcactgtctgaa

SEQ ID NO: 849729 - DNA, 493 bp, Homo sapiens
gaggtctccaggaggaacagaaatattgacttattagggcagggtgtgtgcttcagacagtctcttaaaaactcaacaagtctctgacctgagccttggcatctcctgagaagacatgggtctctgaaacagtctcgagacacaaatgcctccctgaggacctcagaggaggagtgtgaggactgctatgtggtgtcccatgtctgtggcctggccactccctccagcagaggcataccgactgcacgcacctgctgccaccctgctctcagccctccagcctatcccttcattttactgcttaacgcaaatcaaagacaagccgcgatcctattcttgtcaactccttaataaaaatgatgagtttcctcccaccctgcagcctcctcaaatctctgctcacccccttcatgaagaaacactggccctggtccatattttaacttcagtctccgtsaggcctgtttttccctataaggtctggtttgcctca

SEQ ID NO: 849730 - DNA, 552 bp, Homo sapiens
cctgtggcagccggggcccaggtggattcctcctgggaacgacccctccctcctcagcgcgcrctgtgccagagcagtacacaggtacaaagggcaaacgtgttcatgatttcatttgaattctgttgtttttacatcgttctgccctgatgtaaaacaaaccaggattttaaaggcagtgagtgatgaggagctactcccacttggggaagagctgctaactttacttttccgctgctgttggttccggttcaaagctcggtttgggaagtaagaggaggactcggagactttgaccagagcactccaggccaaagttttcttccagttcaggtctgtctcttcgtcccagccccgacttaagatcagaacctagatatttgaactagcccagtgaccctgtgaattctaatgcacaggtctgtactgcatgtaagacttggctcagatttatgaaccagaagcaatgcatgcacgcgcacgcacgcacactcaaagaagggggcgatccctagaaaataccacatcgggctgtgtgtgctttggttgtgc

SEQ ID NO: 849731 - DNA, 535 bp, Homo sapiens; identical to SEQ ID NO: 831571

SEQ ID NO: 849732 - DNA, 565 bp, Homo sapiens
atggggaaactcacttccggggatccaggcccgacgagggcgttcccgggcacctcggtgactctgaaactcrtatctacagcaaagcttgaacgtttgtaactgttcactttggactctgcgtcacacccagagagaccctgaaccatctgtcacaggtgacgtaaccctcagttccccttcacctgtgccagagcctcccagacacaaaggctggagccccaaaacctgtcaggggcctctcaggggccagccacaactcactccgcctgtcactgctggacgcccgctgcggcctgacggagccgctccttcacctgtccacatgcatttcccacacagcacattgtcttgaatgaaggcaagttattttctttctcggccttggcgtcctccacagccgacactgttcttgcaatctgtgaagggatgatttctaagctccgcctttgttcttcactcactcacccaccgtatacatagttgcacattgatgcataatagacatatacttgctgctacggaaggccttgtattcctgtctctcttcctaccacagcactcc

SEQ ID NO: 849733 - DNA, 515 bp, Homo sapiens
ttgaatcccagattcctctaaatctgctgggcctgaagaggtgtcacatttctgtctgttaaggacaaatgctgtttctgtgcttgaagacactgcagagacctctgcaaggcgacacrcctgccacccacctccagctcagctcctccaggtcagcatcatcaagctggagaagtgctgaggctaaaaactgaggaagagacagtcggccaaggagcttcaggaccaaaatgcatgcaccagcatgagccaggggtaaatgcagaactagatccaaagaacgttggattcaggggaggcagaatgtagagttagatgttagaattcattgacatgggcgcattcagtcatgatacagggtttagcccctgggaggtgctccgtgctgctagggtggcgttttcaactcgtaaagtaaagcaatgtcccacattaagcagctgtctgtcaggattggaaaaggcactcctggggtccaggctcactgcaccggctggtggcccaggcccagacgt

SEQ ID NO: 849734 - DNA, 515 bp, Homo sapiens
ttgaatcccagattcctctaaatctgctgggcctgaagaggtgtcacatttctgtctgttaaggacaaatgctgtttctgtgcttgaagacactgcagagacctctgcaaggcgacacgcctgccacccacctccagctcagctcctccaggtcagcatcatcaagctggagaagtgctgaggctaaaaactgaggaagagacagtcggccaaggagcttcaggaccaaaatgcatgcaccagcatgagccaggggtaaatgcagaactagatccaaagaacgttggattcaggggaggcagaatgtagagttagatgttagaattcattgacatgggcgcattcagtcatgatacagggtttagcccctgggaggtgctccgtgctgctagggtggcgttttcaactygtaaagtaaagcaatgtcccacattaagcagctgtctgtcaggattggaaaaggcactcctggggtccaggctcactgcaccggctggtggcccaggcccagacgt

SEQ ID NO: 849735 - DNA, 645 bp, Homo sapiens
agcacatgattctcagaattcaacatcagtacatgccctgacattccttgaattaatatatagtatagtcwatgctttacaaagtcttttatatttgcattgggatcaacagttaaatcatcaaaatcaagtattagagatttgaggcaggaaaatagggtctggaggcagggaacataaggctgattcacactttagctataacaggaaagatcctctccatagggtgtatgctgagtaaatgagtttgtaactttacttcattctcttcatttacatagggtgtacaccaagtaaccagtggaatcctctagagggtatttaaaccttcagaaattctgtaacagggcccttgagcccctatgctcaggcccgctccccactgtggagtgtactttcattttcagtaaatctctgcttttgttgtttcattgtttccttgctttgtttatgtgttttgtccaattttttgtccaaaacgccaagaacctggacaccctccaccagtaacagactttttcagataacttttattacaaaaccatgactgctcctgctgctagtttgttatgttaccataacctaataaagaaaatcatcagtgttacatgcatgtatggataacacattacaagagaataactt

SEQ ID NO: 849736 - DNA, 611 bp, Homo sapiens
ttggtcattatgtctcactcatcaacaaaacatggttttaattcttcagaaatctttaacttcaactctcttcatgaatgttttcaacagcggcatctactggggctcttctgaggaggctgaggtatctcattrgtactgctccatttccatttccacatgatttcaacatttttcccttgcagaccagatgtcttctttgctggggcagcctctctcctcttcccccatgaattttgttcctgatttgcttctcgaagttctcccggtttctacagattggtgttcatgtacctgagtactctactttttggagcccattcattccaattttcatccaatccaccgtaatgtgtaaagtatttcacttgtttgtcctcgatggcaacttttacataatttgcttcataaagaggcccataaaagcacagcacctactcacttcagagtttaggcttcagtaccatttgtaagtgataaccccgactcccttctcctacctcacccagctactgctccctatgctgtatcccatccaattcagcgtcaggtaggctgtcaggcactgccagctgtacagcctgggcccctcagtattgtttttactttga

SEQ ID NO: 849737 - DNA, 548 bp, Homo sapiens
ctcggatccattgctgcattttgggcggctgcagccctgcccaggagggtggggcttctgcctgctcggtggagtagagcaggaggcctggatctgcaggtgcgttttcggcagctgcagctgcacagggagctcccatcccaacttagaaggggccgggctcccccttgctccatggagtgtgcaaccccagctgcacttccctgctgcagccggcgtgatggtagcagcccctgccatcaccaccgtacacatgaggtcattgacccgtctggatttaggtttaccatctgttacttgcggaatttcagactatgctccaatccacctaccttttcattatttgttttacacaagggatactgttgatgtcctctactagaaaatatgcagatatgagccacaccatctattggaaaaatcaggttagcaaagatttcatgaaacagttgcatttgatattgctttttcaattttaagacttcctttgtytgtattttaaacagtagaacaatgataagccttaacgtaaataaaaacacgataat

SEQ ID NO: 849738 - DNA, 623 bp, Homo sapiens
ttaattccttggggttggtctatctatatttgtatctgcaacattaagcataatgctttgcacaaaataagtaataaatgtagtgtctcttcatttgagtgtatgtatgtgtttaatttctttattatgcaacctgcacttttatagttatgtagcatgactataaacatgactttataaacatgtaacagggaaatactccactaggatcactttttgtcggtccatgccaccttagagaaagttatgtcaaatatctttcagaagatttggataaaaaaattggccataaagtttagtatctggttgagaagggaagagagaatatacctaacaaacaattcaccagtagcagcttctttgcacttcttttagtaggtaaagcacagtttggacaggtaaatctcaaggtgttctcccaggttttggtatatgtgctttattttttttcccacaaaaacagctatgagggagtcccaaaaactcacccagcccacaattattctcagtaaatacaagagtaggatgccaaccagaagttatggatgaacaaggcggytaatcgaggcagcaactgacaccataataaaacctctatagtaaaggggatggttgagctttaa

SEQ ID NO: 849739 - DNA, 606 bp, Homo sapiens
catttatccaaagttaatcatgacttaatttctagttcctacagtgacaccataagcctcacagtagtgtagggacactagagaggttctcaaggcattatggaggtgctgactacaaaataggaaaataaggcttggaaaagctttttaacaaactcagtctctctctctctctctctctctctctctctctctctctctctctcatttttaaggtgttgtttgtgcataaagaaataaacacaaggcaatactaacaagacatgacttctgtgagctacagtgaaaagaatgaaacccttactcataaattaatcatagagggaagctctccaaaaactacacagatataactcttagcaactctgttgtcacccactcctaactctggctgacagcagattgtagagtagttaagggtcattgttgaacaagtctcagttttaatctagtaaagaaaacagaaacttgagaaattagtcagagaaaagtatgtcctatgacatcctaattattcattatttattcagataattaaatgacgtaagaatagtargacaagaaaaataaagatgtgagtattcaaaaatagagggctgtctttat

SEQ ID NO: 849740 - DNA, 554 bp, Homo sapiens
acaaagacttagtagttccaaaatctgtagtcagcaagctggacacccagaaaagccaatggtttragttccagtccaagagcaaatctaaaggcaggagaagactgatgtccaagctcaaagacagtcagacagagagagtcttcctctactcacaggagggcttttttgttctattcagacattcacttgattggatggaatccattcaaataaaggagagcaatttgctttactcagtctactggtacaaatgttaatttcatccagaaacaccttcataaacccagaataatgtttggccaaatatctggatataccatagcccagtgaatttgacacataaaattaaccgccatggatgggataagtagaaaacaaatagcaagatgagatacttaaatttaaccatacaaataattacattaaatgtaaatggtccaaacaccaaaactaaaaggcagatactgacagattagattaaaaaatacctaatgtaaatgacgggttaatgggtgcagcacaccaacatggtgcatgtatacatatgtaac

SEQ ID NO: 849741 - DNA, 366 bp, Homo sapiens
aagcccaaagccaggatgggaaagaaaggagtcctatttccaggtttggaggtggggggaaagagcacggtgaactaaaatggcacaaactactttggaaaacagtwtgaatgcaagagatgatgtgctctttctattttaataaactacattccaccaacaaaagatttaaaaagacttcaaagctgaaggaaattcaaacattcctagaaatggcaactgcttactcacttaaaaccggctgtcaggactgaactggttggggccctcagagagcagagttcaaaataatcattttgcagatgaggaaatcaacattgagagggggacttgtcctagtcacacatgtttgtggcgatgacaatt

SEQ ID NO: 849742 - DNA, 587 bp, Homo sapiens
caatggaggttgtgggcagccaaggaggacacttagtcccttccaggtctgggggaaaatcagccactgctagagkgggctgcagggaatgtcatgttggatttagccaagtttgtggtttgccaaggaagtgggagcaaatgagagagggttaagggcaaaagggtacatgcaaaggattaactatgaagtttcagctgcataaggaggggagtgaaaccaccaagaagggcaggagcagtggacagcaacgagatttaagaatcaatgaatcatgggtgtcagtggggtggaaagactcccgaggacctgatttctgtttgaagaacaagaaagtgagagaacattcagagaagagatggcaataagggggatttgtcctctgtgatttgctaggaatccaaatagcacaatggaaggatctcagaattgggggaaaggtggaagagatggacagaatggggatgagcagaccctcacaatgtgggagatgaggggtggccttgcagtttggggcttttgaggtggttttcataaacaggaataaagtgaataatgtggatccaaaggagagggtggggtgaggc

SEQ ID NO: 849743 - DNA, 619 bp, Homo sapiens
aaatacagactatacataaaggagtcattctgagttcaaggggccctcccacggcgtatcaattcctcccaaatatttttgggggtaaatgaaacattataaagtgaatttaatcatttttggaaacattaattataaagcattttatatcattaggcaagcatccccctgaatggctatgaaatattttacctctgaaagttgaaacatttagcttgaataaaacttgacattaaaaaagttatgattagactggttcattgatatatatttggagatcagacatttacaaggacataagtgtatacagtacctgcaaacacacagacacagcacatgaaggtacaaacacatttagttattttcacataattcccaagagaacatgcaatgctaaattggcttgatattatacagatgcaattttggaatatttacttttagttttccaaatgatctttataaatcaaagttatatttcctgatcaatattaacaaacaytttcacatggtggccttgccatgacaacttgccccttacaaattaaatatgctgtatcaacatttggctctgaaaaatgtttaacattttatttggggggcttatcatattttaatg

SEQ ID NO: 849744 - DNA, 699 bp, Homo sapiens
acaatcaactgctgcacaatggatccagttagcygggtagatgctaggatttggctctgtcaatggggtatgcggagggagagtcattcaggttttaatctaagctaggattcagaaacacgtaaatattttgactgcatcgtgacctccaatccagtgactcatcactttttctcaaatttcagcttcctcctgtcctctcttccttgtccagcttaggttccatgagccattattataagcacttcattgcaactccctgatctgtgctcttctcccccgaccctagtctgtggctctctctctctctcccctcccccatagtattcacctggcaaaagctcaactctgattgaacccagcccctgagccaacatgtttctagagacagtcacagaactggaatacctgccttcactttaaattcatgatcacagatatcgaatgacacttaataccacaagtcaatcctggtacatttccctggtaagttcattttctcattatccataacatttatttcataccttatcctctgtctccttaagcctcatacacccctcattctcagctgatgacctcattttatatttccttgagataacagaagaatcctctccttactgcagttatctatcatcaccgtccacctccaccagtcattcctagttattcactgaagatttcaatacctgcctt

SEQ ID NO: 849745 - DNA, 536 bp, Homo sapiens
cagtgggcagtttagggccctcaaattacttgatctatcagcagcattaaagaccattgactacttgcctcttgaaactctttctactcttggtgtctgtatctttctgattttccttctacctcactggcctttcctttccagtgttctttgtaggctcctctcattctactagactccttaatgctgcaattccttatggtttggacctaggcccccactctctatctacactctcttactaggtgatattacctggtcccatggctttaaggaccatctatatggcagtaagagcccagtgggaggcactgggatccaccatctctgcttaagttcctctctgagcaagacttcgtttcctactgaaaaacagagtactgtgtagcttccataagccagatgcaacaggagatagccatgactattgggcgctcagcagatatggagatagatacccagaagatgccaagaaggcaatasaattacttgtgagtacatgtgaggcatctcctaaggagtcccaaggtcccaag

SEQ ID NO: 849746 - DNA, 670 bp, Homo sapiens
ttattttcaacaagtaataaaaccttgattgttctgctgctgctggagtgataaatgtacagcctatctctaatgacctgacagactgtcgagaacagaaacrttatttgatagaaaagttcatgattcctatcatgacaccccttgctaattaggaaaacacaggctttctgcaatttcaaaggcagtttgaaattgcagggaaaacactgattaaatatcttactggcatcctttggcttgcttttcctgggcgcacaaaatgactgatacttgtgtgaaggtggacccaagtaattatggaaaaaagaccctagaaactttggactgctttcaatcaacaatcaactcccaagtattcacagagtcctgacatggagggaaagatatagacacatcatacttaggccactacctccagcagtttactgtatacttggggagaccagatgcatacactggaatagtgaatgattagagcaaggatatgatagaagaaagtgctttacaggtaggaagtcacagaggatttagtcaggctgagagtagggtattccaggtggggccaatggtggcgggggtggacatttgaataagacaggactctatttctcaataccacaggcaaattgtctttattaagcattgatcagcaaatttacaaagcccc

SEQ ID NO: 849747 - DNA, 666 bp, Homo sapiens
gaatcatcgaatggaattgatcgaaatcattaacgaatggaatcaaatgaaatcatcraatggaatcgaatccaatcatcatcgaatggaatcgaatggaatcatcatcgaatagaatagaatggaatcatcaaatggaatggaatggaatcgtcatcaaatggattcaaatggaatcattttcgaatagaatcgaatggaatcattgaatggaatcatcatcaaatggagtccagaggaatcactgaattgaatggaattatcattgaatggaatcgaatagaatcatcgcatggaatcaaatggaattatcatcaaatggaatcgaatgatatcatcgaatgcactttaatggaagcatcaacgaatggaattgaatggtatcatcgaatggactcgaatggaatcatcttcgagtagaatctaaaggattcactaagtggactccaatggaataatcattaaatggaatcgagtggaatcatcctatataagagaattgaatcaccatagaatggaatcgaatagaatcatcgaatgaactcaaatggaatcatcattgaatggaatcgaatcatcaacgaatggaattgaatggaatcatctaatgtactcgaatggaatcaccattgaatagaatagaatggaatcatcgaatggaatcga

SEQ ID NO: 849748 - DNA, 456 bp, Homo sapiens
gaatagaatggaatcatcaaatggaatsgaatggaatcgtcatcaaatggattcaaatggaatcattttcgaatagaatcgaatggaatcattgaatggaatcatcatcaaatggagtccagaggaatcactgaattgaatggaattatcattgaatggaatcgaatagaatcatcgcatggaatcaaatggaattatcatcaaatggaatcgaatgatatcatcgaatgcactttaatggaagcatcaacgaatggaattgaatggtatcatcgaatggactcgaatggaatcatcttcgagtagaatctaaaggattcactaagtggactccaatggaataatcattaaatggaatcgagtggaatcatcctatataagagaattgaatcaccatagaatggaatcgaatagaatcatcgaatgaactcaaatggaatcatcattgaatggaat

SEQ ID NO: 849749 - DNA, 642 bp, Homo sapiens
gaatggaatcatcaattggagtcgaatggaatcatcaaatggaatcgattggaagtgtcgaatggactcgaatgaaatcatcatcgagtggaatcgaatggaatcatcgaaaggactcgaatcaaatcctaaaatggactcgaatggaatcatctaatgcactccaatggaatcaacatcgaatggaccctaccggaatgatcaaatggactcgaatggaatcattgaatggaaatgaatggaatcattggttggactcaaatggaattatcgaacaggctcaaagggaatcatcgaatggactcggatgtaatcattatcgaatggaatcgaatggaatcatcgaatggaattgatcgaaatcattaacgaatggaatcaaatgaaatcatcaaatggaatcgaatccaatcatcatcgaatggaatcgaatggaatcatcatcgaatagaatagaatggaatcatcaaatggaatggaatggaatcgtcatcaaatggattcaaatggaatcattttsgaatagaatcgaatggaatcattgaatggaatcatcatcaaatggagtccagaggaatcactgaattgaatggaattatcattgaatggaatcgaatagaatcatcgcatggaatcaaatgg

SEQ ID NO: 849750 - DNA, 660 bp, Homo sapiens
ctctaaattcttcagagccccttttgcagatggaaacccttyctccaagattaaagttagtattcctttgccttaaagattgtgataacttctttcaaggtaattgtcttgcaaaggattgccaaccttcctgaaaaccttcagtgcctcttgtttctacatttgtaaccagattcaagtctcaccaggccccagagtgtgagttacaaagtgtgaaccatgagaggatgcaagttacatctaaatattgcaagagtttatcaatttatatagacagaaacccgaggaacatgcatggaaatggatcctaagggtctgatcaggaggaaaggaatataatattggacaaggatgaaatcttgatatagaaacgttaagccaagattctggactcaatgtgtccgtttgagtggctctaagagtttgcttggttaattgactaaaatgtggtggcctagactaaatccaggtgaaatgccagaactccactggtatgttgcagaaggtctacagggcccagggaaattgaaatgctagagtagatttctcatcgaagaaccactcacctacccgctaaactacatccaagaagagtccaaaagaccctttaccaaggcagtgagaaatataattgtaaagggagtcacagcatcctgaaag

SEQ ID NO: 849751 - DNA, 564 bp, Homo sapiens
ttccaaaggcaattactttaataaattttaaataatttacatatattttaatytgtatgtctggacaataatattgttattgtgtcttcaaagttatttataaatggtgtcaaataaaatatgccattctgtaatttgtcttattttagttaatactatgctttttgagatttagccatatttatatatatctgtttcatttcttttagctactatatattattccattttgtttctttgttatcctgttgattaaaaagtaggtagttcctaatttttctctttaacaaatagagtttgtatgaacattcaaacatatctgtatatgggggtgagtttcctcatgtagttgtagaatttaaattacacccattttggcaaattattcatgttcacctaacactttgggtttttggctcccaaagaaaagtagataagtaaaaatgatctgataatgtgaatagatgtgattaatacacaatacctgaattcaaatctgttgaagttaaatattgtattgcttaaatagttttccatattttatcattccactgggttagtttt

SEQ ID NO: 849752 - DNA, 578 bp, Homo sapiens
aagcagggaagctgacagtgcagccttcagtctgtggttgaaggcccaagagcccctagcaaaatactggcgtaagtccaagagtccaaacaccaaagaacctgaagtctgagggcagaargaacagatggaagcatccagcacgagagaaaaatgaaagccagaagactcagcaagccagcttagcccaccttcttccacttgctttgttctagccctgctggcagcccattgaatggtgcccacccacattgagggtaggtcttcctctcccagtccactgactcaaatgtcagtctcttctggcaacaccctcacagacacacacagaaacagtacttcaccagctatctaggcatccttcaatccaatcaagttgacacctcatattaaccaaaacatcagggagcagtaaaactagagagaaaactcatacgaccaaaaccagaaaagataaggatgccactctactgaatcaaattgttagtcttagaaaccagaacggaaaaggaaaggacagggagaatttgtgcaactgtgctactttcttgtcacactgcatgagtcttgagtcttga

SEQ ID NO: 849753 - DNA, 594 bp, Homo sapiens
ctttgccacatctaaacctgacaagttcagctyctgagtattctgggaacttgaagtgacttctcatctgtcccttccttctcctggaacagaagagagccttctttgagaagcctcagggtttctgaaggaactgatgtgttcttcactatcccaggcaggatttatgaggggctggcccacagaggaggaagtccccaccctatcttgtccatcagtcccctggaaagatgctcattcccagacctgtacaggagccactcccagcaccccacaagcaacggacccctccccccgcccccaggcactcgggtcctcaccagaagtcaaggcttctgtcttttcttcttcttgagaatcctttccaacccagacaaagacctggaggtgagatgcaacaggaaaggtacatgaggagtgctgatcaaattcacggctggaggaagactggggaggggccaggtatcagaccagacaaagccctcccctttctaacagagcccatgaactaagactggaaggatttggaacagaggttgaaaactggcaacctacaaacatgttttgtttgctcacccaccaccttgtgttagc

SEQ ID NO: 849754 - DNA, 594 bp, Homo sapiens
ctttgccacatctaaacctgacaagttcagcttctgagtattctgggaacttgaagtgacttctcatctgtcccttccttctcctggaacagaagagagccttcttygagaagcctcagggtttctgaaggaactgatgtgttcttcactatcccaggcaggatttatgaggggctggcccacagaggaggaagtccccaccctatcttgtccatcagtcccctggaaagatgctcattcccagacctgtacaggagccactcccagcaccccacaagcaacggacccctccccccgcccccaggcactcgggtcctcaccagaagtcaaggcttctgtcttttcttcttcttgagaatcctttccaacccagacaaagacctggaggtgagatgcaacaggaaaggtacatgaggagtgctgatcaaattcacggctggaggaagactggggaggggccaggtatcagaccagacaaagccctcccctttctaacagagcccatgaactaagactggaaggatttggaacagaggttgaaaactggcaacctacaaacatgttttgtttgctcacccaccaccttgtgttagc

SEQ ID NO: 849755 - DNA, 600 bp, Homo sapiens
ttcaaagagcacctatcattgataaaatggcattagacaataaaatgtcagacttcrtttttctcacttttttttgagacggagtctcactctgtcacccaggctggagtgcagtggcatgatctcagctcactgcaacctccgcctcctgggttcaagtgattcttctgcctcgacctcccaagtaggtgggattataagcacccaccaccaagcctggctaattgttttgtatttttagtagagatggggtttcaccatgttggccaggctggtcttgaactcctgacctcaagtgatctgcccacctcagcctctcaaagtgctgggtttacaagtgtgagccaacatgtctggccctctcttacttatttataaatgtgttcccaactaaagtggaagcccctcgaaggcaggcattctattttgctcatcataggattctcagcactcagcattttgcctgcaagaccatggtgctgaataaatgttggctgactgaatccctaacagatgaacaaacagattaagtagccaatggatcaatcaatgacaactgctgaatggctcaagctgcaatcatttttggtcccgatcttc

SEQ ID NO: 849756 - DNA, 504 bp, Homo sapiens
agattgcttgagcccaggagttcgagaccaccctgggcaacataatggaaccccatctctacaaaaaatacaaaaattagccaggtatgacccacaggtgcatgcctgtgggtcccagctactcaggaggctgyggtgggaggatggcttgagcccaggagctcgaaggtgcagtgagccttgatcacaccactgcactccagcctgggcaacagagtgagtccgtttccatgagagaaagaaaagagaaagagagagagagagaaggagggagggagggagggaaggaaggaagacttttaacaggaagattagaattagggttggatctggggttagagttgagttttcggttaggtttagagttgggttggggttagagttggttttggtgtttcggttaggcttgggattggatttagggttgaggttaggattggagttagcatgggtttgggattagggttggctttaagattgtggttggtattggggctagaactg

SEQ ID NO: 849757 - DNA, 561 bp, Homo sapiens
ccacacccagctaatttttgtatttttagtaaagacggggttttaccatgttggccaggatggtctcaatctcttgacctcctgatccgcctgcctcacgcctcctaaagtgctgggattacaggcgtgagcctggcccgtcctattatttctatctggatgcacatcccaactctcttccgctcttgccccaattctgctccagccccaccccaactctgttccagccttgctccagcagcctggcctccctggactttccacacccactgctgcacttgtgcaatctgaaccatccttcctcactaaccagacagagtttgcccttgaaggatggaagagggaggggaaggaaaagaaaaggaccaagggaaggaggaatgggaagggaggaagagagggagaaagggacagggaggcagggaaaaagaagaaagttaaagaagagatacgctgcctgctagtttgtcgtccatgttcagtktcttccttctttcacctgaaaaccctgcccagaacaatttcttcatattcaaaaaatgaaagaatcccttgaatgac

SEQ ID NO: 849758 - DNA, 530 bp, Homo sapiens
acattccgcctttaagaactgtaacactcactgcgagggtccgcggcttcattcttgaagtcagtgagactaagaacccrctaattccggacgtaatattgtttcactctaaaaaactttttttttttaaccatttgattattttttctagcacacatctatttaaaaactttgaagttccaggattgacctagccatgaaaattacaaggacaacttgggtggggcacggtggctcacgcctgtaatcccagcacttcgggaggctgaggtgggcaaatcacgaggtcaggagatcaagaccatcctggctaacgtggtgaaaccacatctctactaaaaaaaaaaaaatagaaaaaattagccgggtgtggtggtgggcacctgtagtcctagctagccgggaggctgaggcaggagaatggcatgaacctgggaggtggagcttgcagtgagcagaaatcacaccactgtcactccagcctgggtgacagagtgagactccgtctcaaaaaaaaaaaattacaagga

SEQ ID NO: 849759 - DNA, 630 bp, Homo sapiens
tgtgtcacacactctagacacttgagacacaaagatgaataagaygccattcctgtccttggggagttcacagcttatctggagggaaaaatctgtaaacacctacattaggtcagggaagtgacatttgaattgagtatggtcttcatttggatttagtctaggttcaaatcccagcttcacctttggaaagatatttaacctttttggtcctcagtttgctcatatgtgaaataggcatttgtatgctattgctattattatcatcatttgccaaataagaaatctggactttattgtgtaggctttcataatccaccagccctttaagaaggggagtggcagacatgacttgatttttttctttttttactaatttgattttaagcacatcattctacattggaagattgtgaaatgtattttccatccttccagagatggaaaggagggagaccagattggagacctgcaattgtagagggaagaatggtgagaacttgagctaaggcaggggtaacagggatggagagttgttaagagatatttttgaggtataaattataggacttggtggtcggttgacaaggagaagaccaagttaagttggtcttacatgtttctaccttg

SEQ ID NO: 849760 - DNA, 651 bp, Homo sapiens
ctctgtctcaatcaatcaatcaatcaatcagtcaatcratgtatgtatacagatcagtggtttgtagtctattccaactatctaatccactatccatctaatagatatatcaccaccactaattccagacacattagatttttaatacagtctatattgttagtaaagtaatacattcttattataaaaaacttttttaggctgggtgcggtggctcatgcctgtaatcccagcgctttgggaggcccaggtgggtggatcacctgagatcaggagttcaagaccagcttggctaacatggtgagaccccgtctctactaaaaatgcaaaaattagctgggcgtggtggcgtgtgcctgtaatcccagctactctgaggctgaggcaggagaatcacttgaacctgagaggtggaggttgcagtgagctgagatcgcgtcactgcactccagcctgggtgacagaacgagactctgtctcaaaaataataataagaagaaataaaaaacttttttagccttttaaagtacatatagcaaaaagcgaaaggtctataaaaatgggttagtctgtgtagatggttgccattcagcctttagccctgtccctctagaggcaccccggaaggcaccgatgtcaggagtatagcgg

SEQ ID NO: 849761 - DNA, 552 bp, Homo sapiens
tttatcaacagcaaaggattgttttcctgtacacagttcacatttatgaatggcttcctaggcactgagcactgtgcttggtgacttcatgtatccttccagyttgtcttcattgcataaggtctggcagaggatttttgcttttcagattgtcacctcaaaatttccattgtctccacacaaaagcttgcacatgaatcttcgtagcagcattattcataacagccaagaagtagaaacagcccaaatgtccatctgcagatgaacagatcgataaaatgtggtctatccatacagtggaatattatttagccataaaaagtatgaagtcttgacacaatgctacaacatggacgaaccttgttcataaaagcactgtgctaagggaaataatctgatggcaaaagactacctattgttaattccatttatatgaaatgtccagagtaggccaacctgtagagacagaaggaaggtgagtggttgcttgggtctggtgtgggggaaaaattgataggtaatggggagtgacagctaatgagtatgaggttt

SEQ ID NO: 849762 - DNA, 618 bp, Homo sapiens
tttagctattacggttctcattgaattctctgtggcagcagagagccctgtctcctgacctttgctctgtgattaacttctcctgccgcagtggtcttagccacggagcccttcctgatgttttccgagtctgtcgccttccggtaggccaaggaggctcaaaagggcgggctaccccaggctttgatgttgacctctccagaattttgtccaggtgttatctttgtaactcatgtgttcatttctgttgggtccagtggcttggggctctagaaggcatctccaccacccccacctgcataggttaccccaggaagccacaaagccacactcagaagggcattgtcctccctttcccagtcactgatcagctccagtgatacacgtgtcttgcattagcaaaccatctccagtgcccactggacatcagtgcacgctgagctcacctctgctgtggcagggccccgtgctcttgctgtcgaaaccacaaatggaaactaggccatctctgccttctcccctaatcyagaattattcctggtctcctcatggatcgtcatcctctgttgttgctcataaatcggagagggctgggttggaaaccaggaaagacattaa

SEQ ID NO: 849763 - DNA, 630 bp, Homo sapiens
aacttgatcgtgtatatggaaaattctaaggagtctcataaatgaatttagtaagggtgcaggataaagtcagtatacaaaaatcaaatgtatttctatatactagtaacaagcaattgaaaatgagattttttaaagtaccatttaaaatagcatacaaaacacaaaatacttaggaataaatttaagaaaatatgttgaaaatttgtatcctgaaagctatgaaacatttctgaaaaaaaatttaaaagacctaaataaatggagagctattccatgttttggattggaagactcaatatttttttactcaatatttttaagatgttaattttccctaaattgatctatagattcaatataatcccaacccaaattccagatggctttctttttggtaaacttcacaagctgattctaaaatgtatatgaatatgcaaaagatctagaatagccaaaacaatgttgaaagagaagaacaaagttgtaggacttatattacctgtttgcaagactcactataaagttacrgtaatcaagacagtgtagaaacacatataaatcaatagaacaaaattaagagtccagaattagacctacacataagtggtcaattgatttttcaacaaa

SEQ ID NO: 849764 - DNA, 476 bp, Homo sapiens
ttaatttgcatttccctaattgctgatgaaatttgggatctttttttgtatgttcattggacctttgggtttatacttgtgtgaattttctgtttatttcttttgcccatgggttgctcatggtttttttcccactgttctcatgcttaagagtcctaatttcctgtaggttatgtgcattgcaaatatccttttaccatcttttttggctatgtactggtcttttaattttgtgttcatagtatttttgttttacaaaagtttttaatatttagtgtaattcactttatagccatttccctaattttaagatagcttatatgttttccttagaatttaattgtatatggtagtttaaatttttgtcattcattaggacaatatccacacatgtgcttctccactaatattttaatagtattttctgcartgaaaagtagtgtaagaaattgtgcggtaatgacttccaaggttat

SEQ ID NO: 849765 - DNA, 524 bp, Homo sapiens
actttatatatataagttttaaactataaaactttattaaaaatggccattcagatttgaatatttgtttctgtttcagagtgggctggagaagaggaaatgataccatgttcttttaagaaaaaagaggaaaaagcccacaagatgaacactatggtgtataaccctgtcatgtctttttagcaatgaactttggagccctggaaacaagtagccctaagttacaacactcaattttaaagtaagcttttcttcatgaccctggcaaactcatcaactcactctccaccccctaccttcatggactatcccactttttatacattctttcactggcttgtttatttcctgacaggtaggtgctatttgatcctaaagaaaaaagaaccatggcaatttatttggttgattcttctgtaatccctaattcctagtttaatttgstaatttaatataacttatggccctagtttgtagagttttccacttgttttataccaatttgtgattttaaacattttttt

SEQ ID NO: 849766 - DNA, 625 bp, Homo sapiens
gatttgtagtcccagctactcaggaggctgacacaagaggatcacttgaggtcaggggttcaagaccagccyaggtaagatggtgagaccatcccatctctaataaaatgtttttaaaaaagaagaccatgagaaaataggaaaattaggtttgtagtcagcaagacttgagtagatagcttcaagagagaagaaaagaggaaagcaacagagggatggatgaatgagagaagcctcaaagagaagtggtgattctgacatagttacctagactctacgtcccaaccatcgaatataggccaaattttattcctgttttgggttctgagttaggtctgttgtggtatccataggttggacaaagtagggggcagcaaaaagtgtagtagatgttcatagtatgcctgcagttgcaaaatgagtggattgacaatttttacattgtgaatttgagtttgaatatatcagtttgcatatttagctatggataatgctttgtaacagaaagcaaatcagaaggccaagatagttttcagtgtggttcctttccactgattttgtctaaaatccagggaacaccttggatttgccttagcagtatttttctctctgtttagaaaattaa

SEQ ID NO: 849767 - DNA, 625 bp, Homo sapiens
gatttgtagtcccagctactcaggaggctgacacaagaggatcacttgaggtcaggggttcaagaccagcctaggtaagatggtgagacmatcccatctctaataaaatgtttttaaaaaagaagaccatgagaaaataggaaaattaggtttgtagtcagcaagacttgagtagatagcttcaagagagaagaaaagaggaaagcaacagagggatggatgaatgagagaagcctcaaagagaagtggtgattctgacatagttacctagactctacgtcccaaccatcgaatataggccaaattttattcctgttttgggttctgagttaggtctgttgtggtatccataggttggacaaagtagggggcagcaaaaagtgtagtagatgttcatagtatgcctgcagttgcaaaatgagtggattgacaatttttacattgtgaatttgagtttgaatatatcagtttgcatatttagctatggataatgctttgtaacagaaagcaaatcagaaggccaagatagttttcagtgtggttcctttccactgattttgtctaaaatccagggaacaccttggatttgccttagcagtatttttctctctgtttagaaaattaa

SEQ ID NO: 849768 - DNA, 608 bp, Homo sapiens
atcaacttcttgatgtaaaagaatcaggcagaaccgaggcaggaatgctgaggcctgcggataagacatccagtatgaaaacacccaaccagtttttgtctctatctcttttctttcaacaaccctattttctattactattctctaaaataaatcaatcacgtttccaagaaggcctccacatataaaaacaatcctattagtcagcagtggaccctctcttttattaagtgaaggaagaaatggagtctgaaagtagtctaggagtagaatgttgtttcccaggggctggaggaggcaatgaggagttattgtttaatgggtagaatttcagcttaggaagatgaaaaagttctggagatggagagtggtggtggctgcacaaaaaggtgaatgtactgtatgtacttaatgctactgaactgtacatttaaatggttaagatggtacattttatgttatgtgtattttattacagtaaaaaatgtaacttatgtaataagtgaaaatacatgtaaatcatgtctartaaggggttaatatccagaatatataactcctaaaactgaacagcaaaaaaaaaaaaaaaacctgattaaaaaatggca

SEQ ID NO: 849769 - DNA, 606 bp, Homo sapiens
ggctgaaggaagacttaatttcatctgaggccaaggcggaagctttggcctcccaaagtgctgggattacaggtgtgagccgctgcacctggccccatcgatcctctaggttgtcataatcattagtaatttttttatttaagaggtatatgaatctattgcttgttgtgtgtaatgaaaatattttcctagtctatgttttatcttttgatgagatcctttatttaatggcatatttttgtcttatgtgatttttttttttaaatgtagccagagtgtagctttggggtttcctttactgatgaggttataaacatatattcctgtatttcctaattctttagtttttcgtattccaaaagacttatttttgtttataaagtagggctctaattttgcttgcacatggacaattatacttgctccatttattaaaccatcttcttgcctctacagtgaaataccatctttttaaaaattcattaagtacgcacacattcctggatttcatgctgctttaaytacagtatcttactggaagagttagcatctggtaagaaattcttctcaccatacatcttttcattttttggcattgtcacacag

SEQ ID NO: 849770 - DNA, 575 bp, Homo sapiens
aaaggcaatgctgccaaataccttgaatscaattccctttttacctctgagtaattaggaaagaaacctctgaacagacactgcaaagcacctgtccctagggaagcagggtctcttctggggccgggctgggccatatgatatctgaggccaccccctgcagcacagccacctgcagccacatgctcacctgttcttaggatgctctgggccttcgcattgccaagtttcgcagcttggatgagatggagcgcacccacagcctcatcttttggcactgacatcccttccaccaagagcaggtcctctgaacagagtgagaaggaaaagcagtcactaatgagctgtggggaggccaagctcaccactgggcctgtggaaagcaagcccctacatgggaagacggtgttttcttttcacaattgcaaagcttatcggtcacaaacatctgtatacactgcccctaaagactttgctaccctcttgctaattggttgtacataacccagaacctatcttcctggaaaaacctcaagtctgacgacagcctcctacccctctggctccctcacttc

SEQ ID NO: 849771 - DNA, 597 bp, Homo sapiens
catttacaggtagctctgaatttgcagtcctcactattcctatcacaagayagttattattagccacactttacatgtgaagaggcttggagaaattaaaaaaaaaaaaaacttgcctaagggcacacaagtatgagtgacagagtggagagggattcaaacccaggcctgactgaaggctgttgccactattccagccaccactgagtggacttaatgagtgatctctaccaaaggtatttgcatggattgtcaaagctttggaaaggctataaggaaagaaatgcccaagtaaattcttcaggggtcagtggagtgggtggggatctatattctggaggcagcctccagagtctttcacatttccaccaggtcaaaaaataaataagaagcagcataaacaaatattgaactctaattaacaatatgatattgaagtatttagaggttaaagtgtaccaaagtctgtaactttgaaatgtgtccacaatataagaaaagactggtggatggatagatgaacagatttggggtaaagcaaatatagcaaaatgttagttatagaatctagattgtgggcatatggttgttcactgt

SEQ ID NO: 849772 - DNA, 597 bp, Homo sapiens
catttacaggtagctctgaatttgcagtcctcactattcctatcacaagacagttattattagccacactttacatgtgaagaggcttggagaaattwaaaaaaaaaaaaacttgcctaagggcacacaagtatgagtgacagagtggagagggattcaaacccaggcctgactgaaggctgttgccactattccagccaccactgagtggacttaatgagtgatctctaccaaaggtatttgcatggattgtcaaagctttggaaaggctataaggaaagaaatgcccaagtaaattcttcaggggtcagtggagtgggtggggatctatattctggaggcagcctccagagtctttcacatttccaccaggtcaaaaaataaataagaagcagcataaacaaatattgaactctaattaacaatatgatattgaagtatttagaggttaaagtgtaccaaagtctgtaactttgaaatgtgtccacaatataagaaaagactggtggatggatagatgaacagatttggggtaaagcaaatatagcaaaatgttagttatagaatctagattgtgggcatatggttgttcactgt

SEQ ID NO: 849773 - DNA, 541 bp, Homo sapiens
aaccaataattacttgtaggataatcctggaaaggtgtgcagccttggtccaaacaactgccttagtacaagggcaaatcctgggaactgactcagctttgagccatcagtaaccgaytctcctggcatctggggcagtggataccttggtcctgatggggaggatctgtgaagcagcatactgtagcatctgctctaccagggaaactaaaggaagtttagttttctccaggccttaggataattggaaccagacacttggatgctgccagggctctctcttgtctctttctttctatgcatctctctcactctggactgttttcccagtttcttatttcacaaggtcaaaaattatttccagcagcttcatcctcagagagagggtaactctgaatggtccagtttgggtcactgtcaatccatggacctaaccaaacaactatagtagagggtaatgttgttacttagtactaatatggtggcacctgctgtaaccatttgtattcaaagaagtagagaaagggggcaaacccatact

SEQ ID NO: 849774 - DNA, 625 bp, Homo sapiens
ggtgcgccctccatgctgggtttctgacatcatagcccaaggtagtaaattaaaratgctataattcactttccacaggtggtcttggctgcattccacagtcttttggctgaaaggttgctgattttgaagcactggcccaaagtcaaaacttagcccagatgactggccagccgagcaatgagcaatagcatcaacagatgagccactgatttttctgtggaggtcttttgtgttcacttcatatgtatttaatttttgctgttttgagtatttctggagtgatggagaaacagaaattgcaggcatttttcagggatagagaaattcgtaatttgatatacttccatcagtcttttcgatttaggctgtctttgctgcaggacaccaagggtggtaagggtcagtttttgagtcctaatccaggccaccactggattgctacaccaattagcacatccaatgattggcagattttatgagctaaacctctggcagggccctttatgtgcattttactattttttcaaaaagagggtaaaaaactagcaccaatcttgagcctaaaataatttcatgtttgccacaccatttcaaatactatgtaagagtttggctcgctgtc

SEQ ID NO: 849775 - DNA, 486 bp, Homo sapiens
actgtttgccccagtggaggcttcatgaggcagcgtgagtacaacatcatgaaaaaattggagccagaatcatccagmaaatttactcttgaattcctgatcagataattgtgaaacaaatgtcttgttttaaagttctaaatttaggaaaaattttaattgttatgggcatcacatagttctgtaaagagaaaaatgggtgacagaaacatttgtgatacctttttattcatcacaatccacaaactccctgtttgctagaggtaaattacagtaactctcaaattacaaatttttgtttgaagagtaggatatttcctattagaactactcaagcaaaaacactttcttgtttctctgtctatgaggtatgctcttaatattgccactttatttaattttcagaatcgacttaatacatttatgaaagaaaaatgcctgtttggattccctactattccgtaaaaaccccaagcttcctgtcct

SEQ ID NO: 849776 - DNA, 593 bp, Homo sapiens
ttaggttttcaaagtcctctttctgaatatttggacaatttactatgatgtgatcaagttccttttgctttactttctaaagtataacaagtctacctttctagacatgaaacttatcagatataccattaattgaacatattggactgaagttatttttgtactagaacctcagttataattataaaaaaaatctgtaattcacaaatttttacacgtcaaagattttctgcgtagctttgtgtttcagtgattggagttccagataagaaaagtatttttagtattgctcagagacaggtggaacactgaggtatcaaagtagagaaaagtaagagacaatttggccttctaagagaagctccattagcaacatattacacattggtataggaacatgcagttatacttaatgacccaaaagactgattacatgcagcattactgaaaatgatgtatataaaatacataatatgcaattgagattaaggcttggccaaggctagatttggacgaatktgacattatcaaaaaaaaaattgacaacgccgtttccagaattaacttcaaatcagatgcctttcaaatggaag

SEQ ID NO: 849777 - DNA, 568 bp, Homo sapiens
atataaaatttctattaacctagaaagttctcttctggtcttttaaggaggtatagaagctaagatcactactgatcttatttccactagtgkggatcaatttttgacagattttaaatatcctattaaaggagtaatatatatgtagttttatcgtttctcccctttcacacacacatacacacaaataaaaataaagaaaaattttcaaaatgtattaattttgctgcacatatgcattttacccccaacccccgagttggattccctttaatggatatgtgaccataagtttatctatttatctcttgataggaatttggattctgcccagtttttaactattctcaataaagtcactaaaatatttagtcagaagttttcatgtggacatatgtttacatatatctggtgtaaatacctaggagtggaatagctaggccatatggtatgtgtatatacactgccaaactgttttccaaaatagttccttccagacatatgagagttccaattgctccagtacttaccaacatttggcctgtgtctttatttttgttattttagc

SEQ ID NO: 849778 - DNA, 625 bp, Homo sapiens
tttttgctcatgtatcaaataaagaatggagagaaaattgggtagagtactacaaatggaaatacgctattcacttccacatgacaatctacattagagatggtcatttttcccacttatttaacagaacacccttgatcaaaccctcaagtataaatctgtccataaaaacccatgaaaacatgacatttggaagaaacagtattacaaagagagcaatgaataaaacaatcaaacttcagtgacaaaaaatcatattaaaactgtaactgaacattttttaaatgtccaaacctacgtttcagaacataatcagacttaatgtgaaaaaaatgaattttagctttagatgttaacaatttttaaattacacataatgacactaactaaggcaatgcagggttcattcaaagagaaacatctattttaattccaggtttaaaaatgattttaaaagtacttgttccataatgtgctgttgggacaatatggcactagggaattccattataaacatacaatgatcaactcaaaatcraagacaggtaaaaggagaccagaaggaggtgggagatggctgaaagacacactatgagtaagcccaagactaaattcacaaaatctt

SEQ ID NO: 849779 - DNA, 625 bp, Homo sapiens
tttttgctcatgtatcaaataaagaatggagagaaaattgggtagagtactacaaatggaaatacgctattcacttccacatgacaatctacattagagatggtcatttttcccacttatttaacagaacacccttgatcaaaccctcaagtataaatctgtccataaaaacccatgaaaacatgacatttggaagaaacagtattacaaagagagcaatgaataaaacaatcaaacttcagtgacaaaaaatcatattaaaactgtaactgaacattttttaaatgtccaaacctacgtttcagaacataatcagacttaatgtgaaaaaaatgaattttagctttagatgttaacaatttttaaattacacataatgacactaactaaggcaatgcagggttcattcaaagagaaacatctattttaattccaggtttaaaaatgattttaaaagtacttgttccataatgtgctgttgggacaatatggcactagggaattccattataaacatacaatgatcaactcaaaatcgaagacaggtaaaaggagaccagarggaggtgggagatggctgaaagacacactatgagtaagcccaagactaaattcacaaaatctt

SEQ ID NO: 849780 - DNA, 581 bp, Homo sapiens
agtttcaaacttaaagttgcaaaaatactacaaataataatgctgtactactcactcattccaaaaatgttaacattttaccatattaatgttaccatgtccttcgctctaccctcctttgctatctctctcactctctttctcctctactctctgtagaatctttctgaaccattgcagggtaaattacaaataacaatgcctctttagcccaagtactaaagtgtatagttttaattaaaaggggaatttcctaaacaattacagtacagtgatcaaaatcaataaattaatattgttacagattattatctaatctacagatcatattcaaattgcagccactgatgtcatctacaccaaagggggaaacatttttctcttccatgtccaggatccaatccaagatcacaagttgcatttagctgtcatgtctattcagtatttcccagtttggaatatgtcctyattcattgtcttttgtgaccttgacatctcttaaagtcctatttcaggttatctgaggtattgccttctgtctttcttaggtcttaaaaaaggggtttgtagccatactcttt

SEQ ID NO: 849781 - DNA, 533 bp, Homo sapiens
tatgtagttccagattaagggttaagaattctagtagagcaggagtatttctggaaaagatggttggggggcaagtatagggatggggagaagcggagggcttactctccacctcccaaaattttcatggaratgacattcagtaaaagtaaatatccatataacaatggtggtggaaaggaaaatgtaggggtagatggcttttgcggatcaggaacaaagggtatcataatgctaaataaaaatatgttaacatgtattggactaaggcacactgatttccagatggtgtttacatctgaggaagaggaaatggggaaaaggtggggaggtagcctctttataagaatcttcaatgttttattaattaatatttctaaaagataactctttttgaaaagagaaaagataaaaatattatcatccattaaatgtgggtagtgattaacttattatctcaggttaggttcctttctagttgagatttttataattaaatttttagataagagtcagaaaatttaggataataa

SEQ ID NO: 849782 - DNA, 635 bp, Homo sapiens
atgtctttacttctaatccaataaaaacttcctaactatgtcaaggccacaggatgacatctcttgtctgttcagtatgtttccaagctctctgcttggtacaggatcttggtcctagtctctgaggcgaccctttcagctaacctcccatcaaaagattctccttcttccctcccccttataccgtctacctccccaacgacccccaggtccttggcccttttaaccccttttcctcctcttccaggttctgccactcctgtgtcttaccttcatatgagttataagtcatctggtgtctttctctgggacccatcagttgatacaaaggggagaggtcaattcatgtctttactatagtaaaggagaggtgacaagccctcagatgaagtgtctgaaagacaactagccctttttagctatgatggttgaacctcagccagcacaccctatacaattcattttaccaagagtatctccttcctaccattgtgctgcagtctaagggttcacctgtcactatgggctttgtaagtgatggtctttgggaacaaacagaagagayaaaaaatttccaagactcaaggctactgattcacttatatcttgataagctgcattcagcaagggaggat

SEQ ID NO: 849783 - DNA, 604 bp, Homo sapiens
aagtcactgtaccttttctgtctctccagtttttaacttgttgtcttgaagaggcaatctttgcttcctctgatgaggagaatgaattaggaaacatctataaagtcttctaagcacataaacagttcccctcaatttctacagtgtctacttattataagagtggcagccacaaaggtgaaagaaaccatagcagaaagagcttgggcaaggcttgctgccctttcgggctgagaggcgggaaaggagtgtggctggcatcccagaaaatcgacacctaagatttgtaggagcttcgaggagcgtgcgcttggagtaagtggcgatatttacttggaagagttggcatttctatcgcttcctgcagtcaatttgacatccctcacctagaactagatgttatccactgactgcaacgcaccccactcccactgcaagagtaacacaattatcttttttttttttacataatctgcataattaatgcctgtgtatttgaacaattktatgtgaaaaataaatccatgaggactactcctgccaagggcagccagcatagtgttgagtcaccagcaaccgggtctagggaagtattaatagtaaa

SEQ ID NO: 849784 - DNA, 561 bp, Homo sapiens
gtaatagctaaatcaagaaagacattggaaaataatagagagagagatttggcatgtaaggaggcttggggaaggaggagaaacactgccaaatttgattatttactgttgagaatccaaacaagggtctggtctgttaatgccttttgaagaacatgcaagctctcagctatagtgtgtggagtaattctattttatgtggactttagcaaaccaaatgatagaaaccgagcttttgttaactcggtattactattcttgtatcttattgaaagatctggttttgtaatagcctttaacagactttaagccttgtcttaatctgtctgggacctagtattgagaatcttcaattttgaaatcggtgagccaccatgtcgcgatgttgttattaccatacagaactggaaacaccactgtttgttgttctgcaatgcacatattcatgtttcatgcagggtatccagcaaagtttaataagccagtaaagaagaaggrtgaataattagtttaagcaggtaaatgctaattagggaactcctgaaaagcatccattatata

SEQ ID NO: 849785 - DNA, 565 bp, Homo sapiens
ttctaacatctaagaaagtagcatatttaaattaatttacatgaaaagacaaattattaggagtccttacttttacccttgctcagagtttttacaacttaaaagggayatttgtcccttgatgttgcagaatagtaggcaatgtgagtgaacttgtgtacagagatgcttcctagcaggttggtcccatgccatggttctctcaaagctgacttaggtgcccctaccaccagcatcctgtgcatacctctctcaacacacatcacaccacataataatcattcattatcaggtgtactttgtccattagactagggtatcttcaagggcaaggatctgtcttttatttctgaatgccatacttctggcaccttcttagagctaaaaaagtaaaaatacagtcatccctcagtatttgcagggggattccaggaccctttcagatactaaaattatcaggtgctcaagcttcttctataaaatagcacagtatttgtatacaacctacacatatcttcctacatactttaaatcatctctagataactggtaatacctaacacaa

SEQ ID NO: 849786 - DNA, 601 bp, Homo sapiens
aagggctcttagttaatctctttctcaggagtccttctgcatccaggccccactcccttagtgagtgctagcaatatctgaataaaaggtcattcaaaggtcattcctgagrgaggactctgtttgtggtaagtggcttggaaactaaattcccaggtgaggccttcagatctagcaagagaccctgacatcctggttagaaaatcctgagccaggatcaggtggaagttctatctcaccacagcaggtcaggatttgtagttttttttttttttgagggggggtcacatttatattattgaaggataataaagtgagaataaaatataataagatatgatagcttgattagcataggttttctttggatttaccggtatcttaatgccatcttcataacttcctacatattgcagaactccactgaatatttatgaactgttttgacagaaacttgatgttctttactgctctgtctcattctatgtatttgctgacttatctgaagaaaagcacataaaagcattcggtctgttacagaaatacgtgtataaattagtagaacaagaagaaaggttctatatcagaatgatgagataga

SEQ ID NO: 849787 - DNA, 626 bp, Homo sapiens
aatggtttaaaatctgtttgaaatctatttgaaaatgaatatgtaataatatagacatatctccttttcaaagccagtattgtcagatgtattgtgagcactataattcatgaacagagtagrtgactatttgaaaagtattaaaatgagctgacttttcaatacaagtgtcttcacaataagttttcctattctgggcaattcagaaatgtagacaattgtggtagaaaaataatatgtattgtaatattcattgtacagtagtagtgtagtaagtggcaattctggacattacaggagacacaaggattattttctgtgattgcgcagagaatacttggatttcttgtgaagcttttgcattggaaatgagattcatcagtctgaacggggcagggttagagcccttagcaacatgcttattttgtagaaggtcactcaataataacttcctctgccctccaagcttattaagactgactggcatatattaatgaaaacacctgattctccaaccataaaacccagacaaagactttattttaatattaaggaaggaacccttaattagcagggtttcaaaaatgtcagcttcttctattagctgttctggtccatcaaagcca

SEQ ID NO: 849788 - DNA, 616 bp, Homo sapiens
accaacctaacttaaatgacatatatactagatcagactcagcaacagaatacacrtttcttaagcattcaacaacataagtcatttgctaagccattaaataaatttcaaagaactgaaatatagaatataattctatctggttgaagaacaaactagaaatcaaaatctgaaagataaacagaatagcccaatttggaaattaagtaacaactactaaataacctatgggtcatagaaaaaaaaaatcacaatacaaattttaaagtattttaaattaatgacaaaaatagaatatcaaaacttatggaatacaactgaaagctgtgcttagagagaaatttaaggctttccaggacataaaagaaaataaaatagaaaacagatatacaataaagaaaaaaaaagcacagaggttggttctttgaaaaagcaaattaaattgataaactgttagcaagataaaaggagaaaacacaaccaatattaagaatgaaaaaggagacattactatagatatacaagtatggagaagaaaataaaatggcactaagaacaattttaagctagaacatttgaacatgctgataaaatgaacacatgctttgaaaaacac

SEQ ID NO: 849789 - DNA, 503 bp, Homo sapiens
tgaatatataattctataatgaatctatgatcattttcaacaatatttctgtccagcaacctaggcactataccaaaacaacttttatctgcttaaattgctgctacacactctatgttactttttcattttgttggaatttgagtaactatattgctgtctctgggattaaaagaaaaatttacttttagattatctaaaatcatattccttcagatttacacattgttctctgtcagttgtaatatgccctttgtatcaaactccctgcaaaaagtcagaacctgaagcttttaaatcccttggtttctataattacctcttgtttagagttgctttcataattttgcttgctttcatattttgttgctattactgtttataactgcctcctaccacatatataatagtaacaatactctctcaatsacctttcttctgtaaaaattcaaaataatacatatttaattaggaggtctctaaatagtaccttttctctgaaa

SEQ ID NO: 849790 - DNA, 600 bp, Homo sapiens
gtgcttgcatggtttcaccctcatttcttaactaatcttccttgtgacatttgtactgtacctgatggcatttgtatcataaaacagaatayaaataaatacatacactacaaactacagtttgttacagtgatattaacaagcacacacatttgtactttattgagatagcagctctctgtgatactgggaaaatcaagatgaaggttgcttcagagtctgctcatagggaaaatacattccctggacaactatgaagaggagttgggatttatttacttatttatttatttatttatttttttttttgagacagaatctcgctctgtcacccaggctggagtgcagtgggctcactgccacctttgcctcccaggttcaagcagttctcctacctcagcctcctgagtagctgggactacaggtgcatgctgccatgcctgcttaattttttgtattttagtagagacagggtttcaccacgttgccaaggctggtcccgaactcccgagttcgggcaatctgcctccctcggcttcccaaagtgatggaattacagatgtgagccagcgtgcccgaccaggagttgggatttaatac

SEQ ID NO: 849791 - DNA, 604 bp, Homo sapiens
ctctcattttagcagatccaccaaagtggccataagcatcctctcccaatccggcctttgaagagaactcaygtgcatctcacagcttcctctgacagcaacggtgtattgcctgtcacactctcatttggcaagtgtccaactttgaaaagttttacattttagtgaaccttaattaaatcattttatgagcataaatgatcataatttttaaatgattataatttcagtaactaaagaaatgcagatagacaaaatgccctttatattaatctcactgcactcagacacttgcgatcttgaagtattctaattaaactttcattatcttagtgtttaaaggagaagtcctattcctaatgcaggcagtttgcatttataagttctgacaagctgcttggtaccagacagtcaaaagtgatgaacagtcttggcagattaaaatgtaaatttgattgaagaaagcaacctacaaaaatttatgcttctgtataatctatgtgattaaatgttacttgttgcaaagctaatgtttctgacactttcaattacagcttttggaagttttattccacatcatttaatctattttaaataattctcc

SEQ ID NO: 849792 - DNA, 614 bp, Homo sapiens
tgagaaagggtattaaagtattaaactactcaaagaacaccccaaaatattttcattaataagattaataatttgcactgcatttatctgaaaaaaaacacacacacacagtgctacattaatcagtttggcagttgttttaaaaggataatgtcttctgaacaacctattagaagagagagacatgatgcagacttggaggttcagcatttggaaaccatccagagcatcacactgaggagccatagagtaggcttttgtggcatagagccctagaatttttggaaattctaacttgagtgccaaaagagctgtggttatctgtgatttcagaggcagctcactgggttctctatgatgtagaaagcttgaaccctagttctcacggagatcatcagctccacaaaattggctggagaattattattattgcagagaaggagggcaattgtcagggtttgttagtctgtattctataatagtctgtgtattggtcagggttcgccagagaaaaagaacwcacaggagatacacacacacacacacacacacacacacacacacacacacacgctttaatatgaggaattgtctcaagaaatatggaggccaag

SEQ ID NO: 849793 - DNA, 609 bp, Homo sapiens
tttggacttcaagcattttgaagatcgttcttaggtacttgaataatatcttgatatattgactcctttatcattatgaagtgcccagttgcttctctgtcttttggctaagatcatgtgtatgaartgcccttttttatttctaatgatattccttactgtgaaaatctactttttttaatatttatgtagacactccagctttcttttgattagtgtttgcatggtaggagtatttcttatagcgtacgtctgctaacaattttctcagtttttgtttctctggaatgtagtttaccatttataggattcttggttgatttgggtgttttaaacccccaccactttgaatatgtcattctgctgccttcacgtttctgttgtttctgatgacaagttagccagtagtcttgaggttgtttccttttacataatgagccaattttcttttgcagttttcagtatttctttttttctttggcttttagtagtgaatgatatgtctacatgtagttttctttgtatttctcctacttgggctttgttgagtttcttgaatcagattattatgagttgtattagttgctttgaagtatttgttaaacatct

SEQ ID NO: 849794 - DNA, 625 bp, Homo sapiens
ctttgaatatgtcattctgctgccttcacgtttctgttgtttctgatgacaagttagccagtagtcttgaggttgtttccttttacataatgagccaattttcttttgcagttttcagtatttctttttttctttggcttttagtagtgaatgatatgtctacatgtagttttctttgtatttctcctacttgggctttgttgagtttcttgaatcagattattatgagttgtattagttgctttgaagtatttgttaaacatctggctccactcagagtcagtttcttttggctgctttttctcctgtgtactgttacacttttcccttttttccctgtctggtaatttttggctgaaaacttgacgttttaggtaagatattttagcaacttaggattctcttttgtttttctgacgttttttcctcctgatggtttttcttttttttatttcatggattgcttagatgtcagctgtgtaatttgtctccaccgcattgtgcaatcactgatgtttctgctcagtcrcttttattttagcctggctttatccttctgtctgtgtagtttagtgaccaaccaatgatgtgaacagagtttatacttagacatcatgagactaca

SEQ ID NO: 849795 - DNA, 651 bp, Homo sapiens
cataacctagaaatatcttttaaaattttaaaaaggtacatcataaatgcctaaaatatgtgtagctactagtctgtttcatcatttactgtgataaaatatatacaaatctaktacaaaaagttaaaatttatcaaaactttcacaaactcagaccatacatggtgccattcacagccaagagaaatgtaaacaaatgtaaaattcaggggtcctcagccccctgtggcctgttaggaactggggccacacagcaggaggtgagcaaccagtgagcaccagagactattaccacctgagctccaccacctgtcagatcagcaacagcattagattctcataggagtgggaactctgttgtgaactgtacatgtgagggatctagattgtgtactccttatgagactctaatgcctgatgatctgagatggaacagtttcatccttctccaccccttcctccagccttctggggtccatggataaattgtcttccacaaaactggtccctggtgctaaaaaggttggggagtgcagtattaaatcataactgcataaaattacagtacatactatgctgcctgaatacttctgtagccacctcctgttggtattgcagtgagcttaagtgttgtattcatttaaaatgcca

SEQ ID NO: 849796 - DNA, 651 bp, Homo sapiens
cataacctagaaatatcttttaaaattttaaaaaggtacatcataaatgcctaaaatatgtgtagctactagtctgtttcatcatttactgtgataaaatatatacaaatctagtacaaaaagttaaaatttatcaaaactttcacaaactcagaccatacatggtgccattcacagccaagagaaatgtaaacaaatgtaaaattcaggggtcctcagccccctgtggcctgttaggaactggggccacacagcaggaggtgagcaaccagtgagcaccagagactattaccacctgagctccaccacctgtcagatcagcaacagcattagattctcataggagtgggaactctgttgtgaactgtacatgtgagggatctagattgtgtactccttatgagactctaatgcctgatgatctgagatggaacagtttcatccttctccaccccttcctccagccttctggggtccatggataaattgtcttccacaaaactggtccctggtgctaaaaaggttggggagtgcagtattaaatcataactgcataaaattacmgtacatactatgctgcctgaatacttctgtagccacctcctgttggtattgcagtgagcttaagtgttgtattcatttaaaatgcca

SEQ ID NO: 849797 - DNA, 580 bp, Homo sapiens
gaggttgatgtcgctactgtgttaaataaccagtactttggttttcattccsttactaagtactttaaggtcttatatgtcataattttattgctaacatcaaatatttattttattttttagaaaaataactaaacatgggcaaaggagatcctaagaagccgagaggcaaaatgtcatcatatgcattttttgtgcaaacttgtcgggaggagcataagaagaagcacccagatgcttcagtcaacttctcagagttttctaagaagtgctcagagaggtggaaggtaagagggcttaaaacatgctaacaaggtaattaaaagacagtttccaattgaggatgcaaaaaaaagcctagttggcattctcgtagtgggacgctattacatagcaaaagacattggttttgaggataatttacttaaatgttacaacttaaacttacaaataattattttgtagaccatgtctgctaaagagaaaggaaaatttgaagatatggcaaaggcggacaaggcccgttatgaaagagaaatgaaaacctatatccctcccaaaggggagacaaaaaagaagt

SEQ ID NO: 849798 - DNA, 621 bp, Homo sapiens
cagcctcgggaggaaaggttgaatccgagagggactggactcaaggacaccaggcacaaccaagacccggcgtgtgacacaccatagaaacggaattaaaagacactcygtgctttatcgtcattgttgttttgtcttgctgtcacccaggctaaagtacaatggcatgatcgtggctccccgcagcctcaaattcctgagtagctgggaccatgggaacatgccaacatgcccagctaattttcgtattttgtagagatggggtctcactatgttgcccaggctggtcttgaactcctggtctcgagcagacctcctgcctcagcctcccaagtggctgggactcctgagtgagccactgcacccaactgcactctggattataggacaccacagcctccttccccctcttagatcccagaatgctggcaatgagggttctaccccatgggcagaagattcgaggattcatcattagggaagctgaccagttggagaaaaaagacttatagagaatgacctagtgggttccttaatgaaacatccagctctccactgaatcacctgacaatgagcccattggttgacaagcttcactcatgcacacgtcacttgagtgtc

SEQ ID NO: 849799 - DNA, 572 bp, Homo sapiens
aattatttccagccctttgctgcaatgaatatctttgtacacatgtctttgagcccatggggactatatctgtaggataaattgtcagaggtagaatgctggtcaaagggtttgtgcattttaaattttgatagatatggccaaattgtgagtagattttagcctacagtaagaaagaattttagcaaccaaaaccactcaagtggtatgtggacgactttaggaggttgtgagtttcagaaaggaatcaagaccaggctacaaatcaacttgtcagaaatgccactgggtatattcaagcactgtaaacacactgatcacaaaaggcccttccaactctgataccctagcttcctttttatttatttttatgttttaagtgacaaaaaatatatatttatcatgtacaacatgatgttttgaaatatgtatactctagtttcctaatcataggtatcacygtagagactcaatatgtatttattgaatattgttcagaggtaaaggaagacgtcatgtcattcccattggaaggtgtgtagaaggaagtgggtcaatgcaacacatcccaa

SEQ ID NO: 849800 - DNA, 597 bp, Homo sapiens
tctcatccggtgtgaggtgacaaatcccgtagcaagctgggcctattttggcctttctgtgcattcatttttagaattgattatttcattatttgaagatgtacttatccccacaaaaggcatataaagtaaaactttgtaatccaaaactttaacatccagttgttgcttctaactccacatcaaggtaaccccacatcaaggatttacgatatgcagtacaatgactctcatccaacagagcatttatctacttgcaacagacaacctggcaattaaaatgtctcatttgtttaaaaaagcataaaaatcccggaattatccagtgaagtttgttttagtgtaggtgcatgcaataaacatctgctacaaaagctcacgtgatttcctgagggacagacatgacaaggaacacttggcctggcaatgaataatttttctttggtcagctaatttatttggtactctggttgaaaatctaagaagtgttattatgttcaatttttccatctgatttgggactgagaggactctctttttggatactacacttcactatatattwtctgataatgagatagttcagaactatttgga

SEQ ID NO: 849801 - DNA, 616 bp, Homo sapiens
atagatgtctaattaaatcaagtgttttgatattttaagttcagagtaattatgatttagtcagctcataactattctctatacctggcatccttttcagtcattaaaggaaatgttttactatttatgtcaaaaacagtgtttccaaaaaatctaacgatcctacattttgagtcattaaaagtagtatacagtaacttctttcttactttcaacaataggttcctggaaactgaactttaagcaaaatgacacacaatgaaaccagtttcactataggctaatggatataaacaagagttaagttcatatgccatattttggatcacaaaacaccatcaacttctaaataaagacccaaagccattctaatattaaacatgaaatgaatgtgagttatacattcatttaagaaagatcaataaacacaagtaagaaaattatatatccaatttttgttagatcaatatgtgatggcaatggtaatgacggtagactaagtcaaggaataattgtttgcagagcaaaaatggtaaagagcacctccttccatgtrattccaaaacaaataacaaatatggctctcccttaatgctttcaaaagcattgtttattg

SEQ ID NO: 849802 - DNA, 430 bp, Homo sapiens
aggcaaagcatgagatgctaactttatttatttatttatttactttttgagatagggtcttgctstgtcatccaggctggaatgcagtcgagcaatcacggctaactgcagcctagacttcccaggttcaagcgatccttctgcctcagcctctcaagtagctgggactacaggcgtgcaacatcatgcctggctaatttttttattttttgtggagataaggtctcaactatgatggccaggctagtctcaaactcctgtgctcaagcgatcttcctgcctcagcaccccccaaagtgctggaattacaggtgtcagccagcatgcacggcccaagacgctaactttaaatcacttgttgctcaagtccaatatccctgtgattctgcagaaaaatgtaaaacagctacaggtagttttagtatcaaat

SEQ ID NO: 849803 - DNA, 459 bp, Homo sapiens
tggagcaaagtttatgatataataatttaagattagtgcacagagataagtgaagtccttgaagcaacccttgataataagcaatgttttgagaagtaggcartttgctcagttaagtcacctaggtcctgagaaagcagctgtttgctcaaatgaacaaaacgttttcttgagcagagagcagcttaagtaatctgtcagcaaacaatgacattattcactagtttacagagttgtatcttcctaggcaagaaattcctggaataaagagggaactcctgtttagggaagtggcttcctttctaaatcctgatagttaggctacagaaaggcaggacctcttcatactcaaagtggagtttctaatatttcttgtactactattttttatttgacaaaaaaagtatatgtttatggtatacaacataatgttttgaaatatgtatacattgtaggatg

SEQ ID NO: 849804 - DNA, 708 bp, Homo sapiens
aggagagaaatgaatgaagggccaaggtttaggagatgaggatagcagacaagaggaagaagaaactcctcaccaagccagaatcaacaagatccacaggttaggaaggaaattataaagatcaaaacgctgggccacataggaggttcttgctgaaaaaataagatcttcagcgtctctctttagggagagatgacaaaaatggcacaggcacaatatcaataccataggggtgaggatttgtagacagctctgctgacacttggtcaggggttcagaccctaacacccaagttttattagtcacatttgcagagggatgtgttttatgctattttctatgctagtgatacagtctgattaattaattcacatattattccaaccagtggccctgatgactcaggacaccaatttcaagcctgcggtcagcaagaatggcaatctgtgagaatgagctcaacaaatgctaattgggccatccaaattctgaaccgttgaccttagtccttaatcaacaaaagagactgaccgtattcaaagaaacagcaaatttgcctttgtattatgtgaaagaaaagtatagctgttttgttatctaagttagaaataggtccyaaaactgtgagttttaaacaccagcacatagacaacttgaaatattgtttaaagtatttgaaataaatatggtttatatagacagttactt

SEQ ID NO: 849805 - DNA, 333 bp, Homo sapiens
ttacctattgctgtgaaatagaccgcccccaatttggagaattgaactaataagaatttatttttttcctcttgcttctgtgagttaatggggtttggctgggcaaatccagtcttgagtatgcagccagggaagggacactgcaagggaaaaggcactggcagggagaatgaaggacagaggctagagagagcccagtcccacccatgaactatacagtaatctttacatactttttacatacttattcatacagargagacataacatgggctgccttttaataatcatacatcaacattttaataaccaattagtattccactgtataag

SEQ ID NO: 849806 - DNA, 333 bp, Homo sapiens
ttacctattgctgtgaaatagaccgcccccaatttggagaattgaactaataagaatttatttttttcctcttgcttctgtgagttaatggggtttggctgggcaaatccagtcttgagtatgcagccagggaagggacactgcaagggaaaaggcactggcagggagaatgaaggacagaggctagagagagcccagtcccacccatgaactatacagtaatctttacatactttttacatacttattcatacagaagagacatamcatgggctgccttttaataatcatacatcaacattttaataaccaattagtattccactgtataag

SEQ ID NO: 849807 - DNA, 660 bp, Homo sapiens
agaacagccatagaagatgagatgggatagacaggcatccagcctgttggcagagcatggggraagagctagaaaaggcattcaaaagttgagtctgatcctgaggcaccaagcatttaactgcgaacaaagcaagcagccagggtgagcaaatgcaaaggagcgaaatcctgattctttataaagaagccctactattagaaatgcttccattcgtgcattcctttgggtgaaagcatcttattttttcaaaaagacactccttaagttgcagaagggtgggtggtacagttaaattgttaactttatctgatgagttagttgttgaggtcatttcttgtaaaagaggaggtgggaactgatgaagctacacttcatagtcttcacaatattttttccctaagtcaagcactgaattccagtggccccaactatgagcttgtggattgagggtgagactcggttggcctagctcattgctcaacataggattccatttgtagagtagagacaggctgaagaaaccatgaaggaatatttagattaaacaaggctgaatgtatctattcagtctcatggttattcccagtcacacagtacaaataacatactgtaaagacgtttgcaaatacacttctaagacagttgctaaatgttagt

SEQ ID NO: 849808 - DNA, 645 bp, Homo sapiens
gtggatggggttgtgaccaagaagaggaaatcctactgtgttgactttgctgccatccagccccagatcgctttactccaggaaatgcaygttacacattttcgcttctccctggactgggccctgattctccctctgggtaaccagtcccaggtgaaccacaccatcctgcagtactatcgctgcatggccagcgagcttgtccgtgtcaacatcaccccagtggtggccctgtggcagcctatggccccgaaccaaggactgccgcgcctcctggccaggcagggcgcctgggagaacccctacactgccctggcctttgcagagtatgcccgactgtgctttcaagagctcggccatcacgtcaagctttggataacgatgaatgagccgtatacaaggaatatgacatacagtgctggccacaaccttctgaaggcccatgccctggcttggcatgtgtacaatgaaaagtttaggcatgctcagaatgggaaaatatccatagccttgcaggctgattggatagaacctgcctgccctttctcccaaaaggacaaagaggtggctgagagagttttggaatttgacattggctggctggctgagcccattttcggctctggagattatccatgggtgatg

SEQ ID NO: 849809 - DNA, 645 bp, Homo sapiens
gtggatggggttgtgaccaagaagaggaaatcctactgtgttgactttgctgccatccagccccagatcgctttactccaggaaatgcacgttacacattttcgcttctccctggactgggccctgattctccctctgggtaaccagtcccaggtgaaccacaccatcctgcagtactatcgctgcatggccagcgagcttgtccgtgtcaacatcaccccagtggtggccctgtggcagcctatggccccgaaccaaggactgccgcgcctcctggccaggcagggcgcctgggagaacccctacactgccctggcctttgcagagtatgcccgactgtgctttcaagagctcggccatcacgtcaagctttggataacgatgaatgagccgtatacaaggaatatgacatacagtgctggccacaaccttctgaaggcccatgccctggcttggcatgtgtacaatgaaaagtttaggcatgctcagaatgggaaaatatccatagccttgcaggctgattggatagaacctgcctgccctttctcccaaaaggacaaagaggtggcygagagagttttggaatttgacattggctggctggctgagcccattttcggctctggagattatccatgggtgatg

SEQ ID NO: 849810 - DNA, 597 bp, Homo sapiens
tttttgtttttgtttttgagatggagtcacgctctgtcgccctggctggaatgcaatggctggatcttggctcctgggttcaagtgatcctcccaccccactctcctgagtacctgggattacatgtgygcaccaccatgcctggctaatgtttgtatttttagtagagatgggatttcaccatgtggccaggctggtcttgaactcctgacctcaactggtccgcccaccccggcctcccacagtgctgggattacaagcatgagccactgtgcccggcccatagttaaaaaggctcctcatgtacatcttttcataaagttgttaagaatagctgctggatttttatcaaaatggcttttcagcatcaattgctatgtttatttttctgctctaatatgttgatttaatgaatatattgctggatttcctgaaacccatataacctcgcatttttgcaataaactctacttgaccatagcgcattggtctgttaatatattttgagattgctcaagctaaaatcacatttagagtgtttttgcatctagtagatagcattgatctttttgcagtatcctcatagggttttagtaa

SEQ ID NO: 849811 - DNA, 597 bp, Homo sapiens
tttttgtttttgtttttgagatggagtcacgctctgtcgccctggctggaatgcaatggctggatcttggctcctgggttcaagtgatcctcccaccccactctcctgagtacctgggattacatgtgtgcaccaccatgcctggctaatgtttgtatttttagtagagatgggatttcaccatgtggccaggctggtcttgaactcctgacctcaactggtccgcccaccccggcctcccacagtgctgggattacaagcatgagccactgtgcccggcccatagttaaaaaggctcctcatgtacatcttttcataaagttgttaagaatagctgctggatttttatcaaaatggcttttcagcatcaattgctatgtttatttttctgctctaatatgttgatttaatgaatatattgctggatttcctgaaacccatataacctcgcatttttgcaataaactctacttgaccatagcgyattggtctgttaatatattttgagattgctcaagctaaaatcacatttagagtgtttttgcatctagtagatagcattgatctttttgcagtatcctcatagggttttagtaa

SEQ ID NO: 849812 - DNA, 555 bp, Homo sapiens
aatgcttcttttctttttcaggatcccatcggggatatcacataacatttaatcatcatgtctcttgggcttttcttggctctgacagtttctcgtactctgtttgtttttgatgacttcatcatatatgtgcttattttattctgtctaattttatgtttactttatgttcactttggtttactttgttgtctcttctccttccttttgtttttttaactagttttcaaaagcttcttgttattatcattttccttttgataatattgttattctactataatttcctattctataaatgtcccctctctctagaaactcataagaaagcacatattcctgttttataatttaactaaacaatatgtaacttatttccgtcaccaagttcatctatcccaataagatgagtcttttagaatattttcacttctctattcttctccactctacctttatccagatcagaatgaaatcttgtaagtgctttgcttcatttcactttattcttcctccacccctaacttstaggtttttctaaagtagcttagtatt

SEQ ID NO: 849813 - DNA, 473 bp, Homo sapiens
actgatatactgctgtggtctgaatgtttacattcctccaaaatttacgtattgcaatcctcacccccaaggtgatggtattaggaggtgggaatttggggaggagattgggtcaagakggcagagccctcataattggaattagtgctcttataagaaggtccgagggagcttgtttgttccttgcaccatgtgagaacacagctagaagtcactgtctatgaggagtgggccctcatcacacagcactgaatctgccagtgcttttatcttggacttcccagtctctagaactgtgagaattaaatgcttgttgtttataaaccactgagtttatgatatttctttatagctgcctgaaagaacagactaagacagataccaaagttaagaagataacctttgtccttaaggagctccctgtctaccagggaatagaaaggtataaacaaacactgcaattacaaagtaaa

SEQ ID NO: 849814 - DNA, 582 bp, Homo sapiens
aaaaaggatcaggatcagggaagaaaatttgtttattttttaatcccttatttcttagcttgtaaaacatattttctagagaaaaatgtgtctcttcaaggcaactggatattttgatgcaagatccctgactttaaaactttgggattgtcagaggcactgaaaccagagtgactctatcttgaataggtgctgggtaaaatgaggctgagacctgctgggctgcattcccaggtgaggcatttttaggcacaggatgtttacaattcagggaacagattcgtaatatttacccaatagacccaggacttgtaacagacccagcaaaagtcctgatgtcccaatatcttaacagtaaaagcattcatagtttaagaattagttttgctttaaagatagtaacataaattcttgtggaagataatagttacacaaagcttggcaatcctttgtcaggaacctttgtagtagagcacaccttccccatgactttttgctctgttgtcttatasgtaaacaagcttcaaacctaaggtgagtgcgtccctcctcttgctttggggaatgccctgctctgtctat

SEQ ID NO: 849815 - DNA, 629 bp, Homo sapiens
tgcagagggagcagcaatgatgtcaaaatgaagtaactggcattggaaaatttcttaagatggcatgattcagaagtcagagaagaaaaggatggcmttctgggcagatggaatcgcatgagcaaaggcacacttgcagcagaaactgcaagacatactcagaaaacagaaagtcatatggcttgactctatcataggcgtgctggatacagagggaacttttgccttccttagcaatagagatagtacgttatgtagttttcacaaagatatttaatctcatttggaaattcatactatgtaaaatattctcatggttctaatgaattatgtgaatatattttacagcatttcttcaggacatttataaattatttagactaaataatggcattaaattgaattatatttaataacttatgaaatagtcattaaataggagtttagtaaatatgattacatagtttatgctattttttcatctttgaaaatgatcaaaattatctttgtgctctagattaatttttgatcttatctattgtatcaattttggagaaaatcagtacaatttttaaaattttctttccatgccattaaccctgtgttgcaagtgtaattttgctctttat

SEQ ID NO: 849816 - DNA, 601 bp, Homo sapiens
gtcatacctgaaacacaaacttctttgtggttctaagcacctgacttttaagtgagccaattcacaatcctaagtttattccaggaagcctcaactcrgcttcgtagaggaatcacttggagagctttgaaaaatactggtaatcaaggtagaaatttaccctgaagacatatctctagaagtacaaaatactataaggcacaaggaggcattgtttataataggagaagccaggaaacaactcaagggttcatcccgagggtactggtagaataaacagtggcacacccatccactatgcagccagagaagaggatgaacaaagagagcggtgttggaatgatcccaaggataagtcgttttaaaagaaaaaatactgtgtagaatgatatatatggtgtgcaacatttggtaaggacagggaaaaataagaaaaatatgtgtaagtttacgtatgtgtatttgtttattttttcaaaaagaaacagtggcagtataaatcagaagctgacacaaatggttactaagtagaaagaaaaatgggcagagaggctagggaaagaaataattttttgtgtgaacctttttatttaatttcaat

SEQ ID NO: 849817 - DNA, 610 bp, Homo sapiens
tccctctaggcctgaagtttctcactcattaacctggagcaacaaaatggaaagaattctgaygacaaagtagagaacctgtccctttgctggctctgaggatgactgactgttgtgtgggtgaggtctgcagacagaagccagctctgctctctccattggtaaacatgggtgggagcatgggaaactccaagaggccaacccttgtgagtgttagtgaaaaacagcaaagtgttaggaagaaaagtgagtcctaactcagaactgcaaatgcccaccaatattggttgctccctgccttattagacattttcatttgtagcacctttaaaagatatgatttcctaatgtcatggcactttattttctgggtcatgttggcttcgtggttaagcaggtgcaaacattgaattggccaggtgagctgccaggatgactgaaacacagggggtttggatcatctggacaacaggactgagtggaaattaatgggcgagggtttcagagatgagactttgaatccaagctttgcattttactgtaagagtttgggcaagttgtttaacctccgaaaggctttgttttcttcatttgcaatatcccctatctt

SEQ ID NO: 849818 - DNA, 608 bp, Homo sapiens; identical to SEQ ID NO: 846939

SEQ ID NO: 849819 - DNA, 610 bp, Homo sapiens
aggtggaggtattagaaagggcatttcagggagaaaaagcagcatgaactaagggatggggctgtgtgggagacagagccttggaacttagcagtgatcgataaccaacaatagcctcttcactataaatmcatgggggaaaagtccattacttatattgtcaaatcttgctatgttttctccattaatcttgcattaaattattttagaacaagacctcaaaattacacgaacatctgcagaagtaactaatgaataagcagtgggttgttcaaagagctaatgagattagatcggattaatagaaatgtgtcaagaacaaggcaaagtatttgatatactagttattctctggttgcaagcaacagaaaccgattctagctaattcagaccgaaaagaaagaaacagagggaaaaaagaaagggagatgcccctgataacacatgatattcttttcaaggtcagaagtggttttcctgtttttccacagctgaatcagctagaacctccacctagaggttctattttgttctgaaagcactggaccaattccatcatttgtcaggacctctaagtcaatactcagattattcagcaccaaatatgcga

SEQ ID NO: 849820 - DNA, 611 bp, Homo sapiens
tcttctgtcattctgaagtctttgcacattattccagtttattgtaatgtacaaatttcatcagatatgttatatgttccttttccattattagtattcggtgtttttgggtctttgagaggctcaatgccaggaaaatcccaggggaagacaaaacgcatgtgcccagtaggacttgttgaaaatgatttcagatgagtaacattgttttttttttgacatggagtcttgctctgtcacccaggctggagtgcagtggcatgatctctgctcactgcaacctctgcctcccaggttcaagcaattctcctgcctcagcctcctgagtagctgggattacaggtgaccgccaccacgcccggctaatttttgtatttttagtagagatggggtttcaccacatggttcagtctgttctcgaactcctaacctcgtgatccacccacttcggcctcccaaagtgctgggattacaggcgtgagccaccacgcccggctcaaagcaattcttagaggagaaaggaggataaaggcataaggagttgggggtggtggtgtgtgacttgtgagattgasaatcactaaaagctgtaggtgaaggggaaggtccac

SEQ ID NO: 849821 - DNA, 522 bp, Homo sapiens
aggttttattcatagaatcttttcccagagcaatgtcctaagtattttcctttttttttttttttctagtagttttaaagttttggttcttacatttaggtctttgctctcttttgagttgattttygtaaagtgtgagtgattgagatctagtttcatttttcagtttcttaaagtctagactgctctgcagtctagatttctagctccttcagttcctaatgcagtttttttatactctcctgctattagtttgggcaaaatccctcctagtttcagatgctgttttctaatgtacttgtcatgatttccagtgaacatctgttggctattactggtgtcttttgtccttggggccctcagacatcctgttgtttccctttactttcttccgcacatacactgataccatgtagatcttatggttatcggtgaattgtctccacttgttttattatttggggtttgtgtggatgcccttgtcacttagcttgttataaatactatccattttttttcttt

SEQ ID NO: 849822 - DNA, 609 bp, Homo sapiens
atatagaaacaagtttggaacttggaccatgatattaaaaggtatactagaagcatcacaaggccttctacattactttaaaaaaaaaaggcggagggggccattgttttcgcataccaattaatgctgttgggtagcagatttgcattctaaaattattctttggaaaatatttttctaaaattgtgtctttttattgacctactcaaaatcctacaattttggattgtaaatagtatataaatgcataaatgaatattctcttcaacagcatgttacctttacctcttagtagtacttatctttcctccttgtattattgttagtgtaaaaaagaaatctctttcctaatataagaaaggatattatcttattcatcttttatcctcctgatccctaccctaatttctcaggaaatgtttaactgaattaatgtcaaattcaaaaacagtaagaatagaataggtaggaaaaaacacagcctgggaaaagaagaaagaagatctctgactctgcttttaaatgtatttcctttgaytaacggttttaaaatatttttatattttggtatttgttttcattttctcaagtaaagctattttagaaaga

SEQ ID NO: 849823 - DNA, 639 bp, Homo sapiens
ggcaggaggatcgcttgagctcaggtgtttgtggctgcagtgagctatgattgtgccactgcactctagcctgggcatcagagtaagactctgtctctaaaaacaaaaccaccraaaacaagaaattattctcaactctcctccctccctttttacctcccttctctctacctgtcttcctctctcttctccctcttcctttttcctctctcactctattcactctcatatcacacatacctttttacccccttctgcattgcctgttctatctgaaatgtccttatcctctttcatactcttctactcacccctccttttctggtctgtcttgcccattaaactatgatctacctaaggtaaggaccacattttagtcatctttgcattcccagcctctggtgtagtgtccagtacaggagtttagggtaaggtgtagtctatggatttatttctcatgactttaggactaaggtaatgtctgttggtaataatggggcattttctaagaaccgtatttatgtagaggttttgttttgttattgctttaaatttagctaaataagagtgtctgagtcaaaggtgtctaattacattgacagtcatccactgagaaacgcagtcaatacaaaatgctac

SEQ ID NO: 849824 - DNA, 564 bp, Homo sapiens
atacattccagaatattaaaaawttggtataaaaagtaaaaccatttttaaaaaatacaaataaccacaggtaatatggaaggactttctaggcttttgtttcaaagcttttgagaaatgctgttcctcaagatgttgtcaaatacactgtgggagtagggagtggtctgttttcaaataagtttgtgaaatgctaagttcaaacttttaagaagtttcttttaggaattttcagagggttttgtatgctaaattttgtgaatttttcaagagaggaaatagactctattaaaatattctgaaaggtcactcagagcccagtttgggggtgaaaaaatcacaaaggaagtgacttttaaatttgatcttataaaaattatgtctgtttcaaaaacacaaaaattattaaaaggcaaatgaataaaaatatgacaaaactatcagtatcatttatatagctcttttaaaatcagtaagaacattctagtaggaaaattggcaaaggatatgaaaaacaagaagaaataaaaataaatatataaagtatctacttactggtattga

SEQ ID NO: 849825 - DNA, 451 bp, Homo sapiens
gcccttaactatcttccccttcccttaaagtcaagcttctgggggggcagagtggagggggcctttattaatccaattcccagtcatttctgaaccctgtctttctaacctggctcatatgctcaatgaccctataaagctgaaagatcaccatcctaactatactgacttgaaggaaaactacagtagctaaataggatggacaatactaaaggagttaaacgaatgctgcataaaggtcaagtaagataaagacaaatcatcctttggttttaaaaatttgaaaatgaggactttttaaacttttttctctttttcagcctgagttgttacacactccttcgtggattccgacttccatggagtatgaggatctttataacaatttcrccagagctctaatgcaacaagagtgggtgatgagcgtaacaagtggtggtcaaatggctac

SEQ ID NO: 849826 - DNA, 451 bp, Homo sapiens
gcccttaactatcttccccttcccttaaagtcaagcttctgggggggcagagtggagggggcctttattaatccaattcccagtcatttctgaaccctgtctttctaacctggctcatatgctcaatgaccctataaagctgaaagatcaccatcctaactatactgacttgaaggaaaactacagtagctaaataggatggacaatactaaaggagttaaacgaatgctgcataaaggtcaagtaagataaagacaaatcatcctttggttttaaaaatttgaaaatgaggactttttaaacttttttctctttttcagcctgagttgttacacactccttcgtggattccgacttccatggagtatgaggatctttataacaatttcgccagagctctaatgcaacaagagtgggtgatgagmgtaacaagtggtggtcaaatggctac

SEQ ID NO: 849827 - DNA, 500 bp, Homo sapiens
tgccatcacgcccagctaatttttatatttttagtagaggcagggtttcaccatgttggccaggaaggtctcaatctcttgaccttgtgatccacccgcctcggcctaccaaagtgctgggattacaggcgtgagccactatgcctggccaaaacgaatgctagtatttttaaaatttaatctttttttgttgttgtttttgagacaaaatcttgcgctgtcacccaggcttgagtacagtggcaagatctcagcttactgcagccgtgacctcttagactcaagtgatcctcctgcctcagcctcccgggtagctgggactgcaggcgtgcatcactacaaatggctaatttcttttggattatttttttttttragtagaaacaaggtcttgctatgttgcctaggctggtcttgaactcccgagctcaaccaatcctcctgctgcaacctcacaatgtgttgggattacaggtgggagctacttcaccaggtgtaat

SEQ ID NO: 849828 - DNA, 611 bp, Homo sapiens
cagtttcaaaatacaatggtagatccatgtcaaaattatattttaagttatagcaaatgttttcttcctcccttaggttatttttttggttcacataaaaatattttcccaacgaattctactgttggaactattcaggccttacccaaaatatttctctcttcattttctaccaatctcaaacagtaaagaataaaagcgttctacggcctggaagttggcaccaacataagaacatttttaatacttactgtcctttcccacttttggtggggaagtggtaacccttaaacatccatccagaactatttcttttattaatgtagtttgctactctctgaaccctcagctgtaccactgctgtacttaattatcaccttcagcaaacacaaactatcactgatttttaatataaatttctaagcagtaaacaacagatccttataaaattaaaatcccgacaactaagcaaatggtataatatcaccctatactgtarccaaactttatctccaatgggtaaacccattttacttacatatggattttgaattaaacccagaaagcatatcatctcttgagctctgaaagcagtgtttaaccattacttt

SEQ ID NO: 849829 - DNA, 541 bp, Homo sapiens
tgaaatatcttaattacttaaatgcgcatatgtaaaaagccttttttccggcaatggaataagtctggaagagatcttgggagagtttaataggctagaggttgctgccgtttgaccatacacgctggcactttcagaggattcacccactgagcaccttctgtgctacgtgaaaaggcgcgctgggggacacctcattgcttcctttttttgggtgaagccttggagactggccaggacagtggcgggccgggtggattggatggaaacccgggccctgccgcaagactggggcgataatgggaaagtaaacaacgccgtggctttgttcctttcattcaggctttcttcaggtgggtggtgaatgtacaaggtacttctgaatttgttatggggaagtttccattctgcgcttgcaggcaggcacttctgccaagktgagaagctggcgtcttgcgccccccagcggcttcctggcagaggagagctgcaaaagcccggcccttcctggattctaagaatgaagagcttgctctcctag

SEQ ID NO: 849830 - DNA, 568 bp, Homo sapiens
ttaatcattttaggtggtttatttgccaaagttaaggacatgccagggagacaggtcgatwccttgctccgaagacgattttgagggctccaaatttaaaggggaaagggcgggatattgagaagcacacagttttcatgtaagaggcgggtagggaaaaatagtcattcatgactttgtctggctcactgaatctgcattttttacataagatgacattgacaaatgggtcggggaaaaatgcagggaatctgcattttacataagataacttagacaaaatggggcagcaaaacaatcccatatgcatttgtgtctggtgggcggggggtgactgcgtctgtaatgataagctttgaatttacgttgtcatggtgaaatgttaacagaaacaccttaaaagatcttgcagctcactaagaatttccttgtgggcaaaatacaggggaggcatgtagcttttcaccttgtagccatcttatttaggagccaaaagggggagggaggtttgcgtgatccaggccccagcttgacttctccctttggcttaatgagtttggggtctcaa

SEQ ID NO: 849831 - DNA, 568 bp, Homo sapiens
ttaatcattttaggtggtttatttgccaaagttaaggacatgccagggagacaggtcgattccttgctccgaagaygattttgagggctccaaatttaaaggggaaagggcgggatattgagaagcacacagttttcatgtaagaggcgggtagggaaaaatagtcattcatgactttgtctggctcactgaatctgcattttttacataagatgacattgacaaatgggtcggggaaaaatgcagggaatctgcattttacataagataacttagacaaaatggggcagcaaaacaatcccatatgcatttgtgtctggtgggcggggggtgactgcgtctgtaatgataagctttgaatttacgttgtcatggtgaaatgttaacagaaacaccttaaaagatcttgcagctcactaagaatttccttgtgggcaaaatacaggggaggcatgtagcttttcaccttgtagccatcttatttaggagccaaaagggggagggaggtttgcgtgatccaggccccagcttgacttctccctttggcttaatgagtttggggtctcaa

SEQ ID NO: 849832 - DNA, 670 bp, Homo sapiens
ctctaaattcttcagagccccttttgcagatggaaacccttyctccaagattaaagttagtattcctttgccttaaagattgtgataacttctttcaaggtaattgtcttgcaaaggattgccaaccttcctgaaaaccttcagtgcctcttgtttctacatttgtaaccagattcaagtctcaccaggccccagagtgtgagttacaaagtgtgaaccatgagaggatgcaagttacatctaaatattgcaagagtttatcaatttatatagacagaaacccgaggaacatgcatggaaatggatcctaagggtctgatcaggaggaaaggaatataatattggacaaggatgaaatcttgatatagaaacgttaagccaagattctggactcaatgtgtccgtttgagtggctctaagagtttgcttggttaattgactaaaatgtggtggcctagactaaatccaggtgaaatgccagaactccactggtatgttgcagaaggtctacagggcccagggaaattgaaatgctagagtagatttctcatcgaagaaccactcacctacccgctaaactacatccaagaagagtccaaaagaccctttaccaaggcagtgagaaatataattgtaaagggagtcacagcatcctgaaagggatcctcag

SEQ ID NO: 849833 - DNA, 384 bp, Homo sapiens
tttcaacatatcatcaatgtagacattattagtgatatatttyacattctttttttcacaataagtctcaaaatgtgtttattttacatgtaagacacattatggtttagatgttaagttttcattagaaatacttgatgagaggctggatgcagtggactcatgcctgaactcagcattttggccaaggtaggaggatcccttgaactcaggaattcaagaccatcttgggcaatgtagtgagaccttgtctctatttttaaaaaaattacctgggtgtggtgtcatgtacctggagtcccagctacttgggaggctgaggcaggagaattgcttgagcctgggaggtcaaggctgcagtgagctatgatcacacctctgcac

SEQ ID NO: 849834 - DNA, 374 bp, Homo sapiens; identical to SEQ ID NO: 828216

SEQ ID NO: 849835 - DNA, 579 bp, Homo sapiens
atcagggtaattaccatatccatcagtttaaacatttatttctttgtagtaataacactcaaaaatcttctcttctagctatcttgaaatatataatacattgttatttgctrtagttaccctactgtgtaatagaacaccagaaacttgtaaccttgtacctgttaaccagtctctcccattccccatcttctatactctccccagcctctggtaagcactcttctactctgtacttctatgaaatcaagtattttagattccacatatgagtgagaacatgtagtgtttgtctttctgtgcctggcttatttcacttaaaataatgtcctacagattcattcatgatgccacaaatgacaggattttattatgttttatggctgaatactatttatgtgtgtgtgtgtgtgtgtgtgtgtgtgtatgtgtgtgtgtgtgtgtgtcattttctttataaagtcatctgttgttgggcacttaggttgattccatatcttggctattgcaaatagtgctgcaataaacatgggagtgcagatatctctttgacataaccaatttcatttcttttggata

SEQ ID NO: 849836 - DNA, 496 bp, Homo sapiens
aatcagggtaattaccatatccatcagtttaaacatttatttctttgtagtaataacactcaaaaatcttctcttctagctatcttgaaatatataatacattgttatttgctatagttaccctactgtgtaatagaacaccagaaacttgtaaccttgtacctgttaaccagtctctcccattccccatcttctatactctccccagcctctggtaagcactcttctactctgtacttctatgaaatcaagtattttagattccacatatgagtgagaacatgtagtgtttgtctttctgtgcctggcttatttcacttaaaataatgtcctacagattcattcatgatgccacaaatgacaggattttattatgtyttatggctgaatactatttatgtgtgtgtgtgtgtgtgtgtgtgtgtgtatgtgtgtgtgtgtgtgtgtcattttctttataaagtcatctgttgttgggcacttaggttgattccat

SEQ ID NO: 849837 - DNA, 582 bp, Homo sapiens
ccatagcgtatgcacgggatcatctctacctggggatggaaaagctccagcgtttctcctgaaatgcatgggagcatttcaggcatagacagaggcatagagggaaagttgagtgtagaaagttgccatagagacctttgatatggaccccagtgtgtgagtttgagaaagcaagtattattgttatgtttcatttccatgttttcttgatttctaatacttcctctcccccaaggcagcatcgtcttttttttttctttttttcttttttgagacagagtcttgctctgttgcccaggctggggtgcagtggcaagatctcggctcactccaacctctagctcacaagttcaagtgattctcctgcctcagcctcctgagtagctgggattacaggcgcctgccaccacacctggctaatttttgcatttttagagacaggatttcaccatgttggccaggatgatcttgaactcytgacctcaggcagtctgcccacctcggcctccagaagtgctgggattgtaggtgtgagccacctcgcccaacctatttttaattgcaaaacttaccttaacatat

SEQ ID NO: 849838 - DNA, 639 bp, Homo sapiens
ctatagtcaacaaattttgattgagtttccattatgttccagacagtctgcaaggatctgggatacagtygacaattgccctatagaaattacattccattcgtagattaaggccaaaagtaaataaaccaatcaattaaatagctaccaattctgaaaagtacaggaagaattcaaacaaagagctgcaataaatgttgaaggagggctcaagagatcaaggaaggactctctagggagatcacatataatctgagtttcccagcatgagaaggagctaatctcatgaagagctggaggagaaagctttagaagagggaacagcatatgtaaatgtcccgtgacaggaaacaaaactagaagaaataaaagtggttaggcatgatgaattggaaatgtcaagagttgaggttggagagagaggcaggatcaaatttgtcacattatcaaaaacgaggagttcggagtttttcttaactccatggagagaactagatgattttactcataggagtggcttgatctattttaattgtggtgttttcataaaagtaaatacatcatgctctcatctgatctgtagccaacaggtttacttgcaaagaatttaattaaagtacaaagaaaaacatacgcatt

SEQ ID NO: 849839 - DNA, 413 bp, Homo sapiens
tggaattttttacaatttcaaatatcaagttaatgggcaatttcttggaaagtctgcacagaatccatttcttatgattttatctcttggtatgaaaatcagaccacatctcagtttctcaggaaacttagcatttctcaggtgtcaaactatgccatagccaagtttgccgatatttgaataataaaggtcactaagtcaaatcttgtttaggtattattgtcatcaagatatgaagtatttcactttagtgaatgtttcagaagatagaatttataactgtaaagttttgaagcttattttttctaactttaaacatataggtaggaacakttctcaaatatgtgatacgtttctgtcctttctgaagcaaagcaatctgggtgactaggggccatcattacataaacaat

SEQ ID NO: 849840 - DNA, 552 bp, Homo sapiens
tcataattaacaaagccatggatataaaaaagcatttccaataaagcaagcaatgtaagagcacagatgaagggcaggttgtatcaggcattsgcatcagggagataatagggagtggtgagaactgtggtctactagggagtggttacctgtataaataaagtcatcattgctaagttccagctgattcttgccatgttgtaaagtgaatcatctgttgctccttgtttttgtgtgtgaaatcatccaatcttcatatgttgactaaaaaataattttgtttacaggcagtatgtattccaaataaaacacatctccaggtcaaatgtgaccctcaggcctccagtctgcaatacatgctctttatattcaccaacggttggaaacaggactctcaacattgattctacataagaagagactgagaaatgcagccttggaaggcgagagtatgtaggtaaatgttatttatatgcaaaagacaaattatgtgcagaatgtggctatgcaaacagattaagggtagatcaggaaagtcaattgaaaactatg

SEQ ID NO: 849841 - DNA, 621 bp, Homo sapiens
gttttgtagtctaggaagaatgggatagaccaaggatccccaacccctgggccatggacsagtaccagtttgtggcctgttagaactgggacacacagcacaaggtaagtggcatgcaagagagcgaagcttcatctgtatttacagccacctcccatcacttgcattaccacctgagctccacctcctgtcacattagcattggcattaaattctcacaggagcatgaaccctgctgtgaactgtgcatgcgagggatctagattgtgtactccttatgagaatctaatgccttgtgatcggtttttgtctcccaaaacccccagatgggaccttctagttgcaggaaaacaagctcagggctcctactgattctacattatgatgagttgtataattatttcaatatatattacaatgtaatgataatatagagtgcacaataaatgtaatgctctggaatcatcccaaaaccatccctgcccccctaccctggtctatggaaaaattgtctcccactaaacccatccctggtaccaaaaaggttggggacctctgggttacacagcatagcctaggctataccatccaggtttgggtaagtatactctacaatgtttg

SEQ ID NO: 849842 - DNA, 517 bp, Homo sapiens
tattcaattctataactatatcataatttatcattcctcttttgatgaacatttaggttctttccatttctttatattacagacaactttaataaacatccttgcacaccttcctgtgggcacaagtgcaagtctgtctatacaatacacttctggaaggagacgtcctaaataacacttttgcttatgtttaattcttatggtaaatgtcaaattgctttcctgaaagactgcaccaatttatacttctggcagtgctgtgttagagtgcatgctcccccacatccttgataacactggataccatcaagcatcttcatattttccaatgtgagtaggaaaaggaaaatttttatattaaaaatatcaaattggcctaataacagtgcccatttttagagttgccatccataggcagaccacktgcctgtagaggtttatatcactagaatcactgtgtacaagcaattttatatttccccttcttgtttaatctgtggataatattttgatgcta

SEQ ID NO: 849843 - DNA, 543 bp, Homo sapiens
gaaattcctgagaagctggagttcgatcaagtaagtacacattcataggttgtcatgagctgagaacctaaaacatcagcatggtaaattattttcagaccaacagtctcaattccatagkaggcccagtcaatggcaggcaaccacagacaaattaaaaacatctttagtttgctgaaaacatttgtgaaacaaaggcatattatttgagattttgttcttttatctttaagcagcccacgatgacattatatagtcaggaagaataaatgtatttaagaacagataaacaaaactttaatatatactggtgctgttcaagggagcctaataaaaataagtcctgtttgtggtgtaagttctgaattaatttaacaataaggcaaaagagctagtatataagaaactatttcctttatttttgataacactggtattggaggatgcggcttctacctgtaggcatttgagcttcccaatactgaacccaaggattaaacaaacttctccatctggccaatggcattgctggaccactgcagt

SEQ ID NO: 849844 - DNA, 585 bp, Homo sapiens
ggaatggatttggatcaccaggttggggatgggtgggagaagcagggctcccacacagctctgcatactaaaggggtgaggtcttcagggtccttggggagcactgaagggaaaggggaggaacagcaaagaataactgctggcagctcagccagcagggaccctgtagcaggagtgaccggtagcgtctttaggttgctgtggggttaagcagcagcagctggggttaggaaagagagctgggaagagaaaaggaagagagctgggaaccagagggacaccctctcctctgtctctcctactggagttctttgctacatttaccctaagcaaattggttgaggtaagtaaagccaagaaggggttagctctgcatccaggcctgtgtggcccccagagccaggagaagctgaattttcaggaatgtgagatgcctttcagcagggtcagagtccctcccttgtgactgccccttcccccagcccctacctgagactcagtgccgcaggtatcaaagcgggcctggatcctgargttgccgccgacctcctgggcggcacagctccggctgcccaggtagacctt

SEQ ID NO: 849845 - DNA, 665 bp, Homo sapiens
tggctgcatgggccctgcactgtcagtgtggaggcaggagccagggcctttcttgtttcaataaacagtgtttcttcctcccacctgccatgatgagctggccagttccgtgggcatgttaatgagcttctctctggtgaccgagacacagcatacgacacagctcctctggcccctgaaggacaattaagtcccagtagtgtctgagagcctgatggctggcttctgggactccacacactcttgcatacatattctccttctctccatccccacaaatattgtagctgtctcaggttctaaaagcaataatgacttcttagtaaagacattctgaaaaacctaaagaaaatagaaatgattcaaaatcctaccgctcagaaatagctagtactcactttttggtgaacccaaggcccctctctcacacacatctctcatttaatgatctcatccttggagctgttgtgtaacctgctttttcacttaatcacctctcccagacatgttgttatatgtcgataaacacagacagccctgaygctcctcacttccccctcttctcgcttcctgatggttttcctgcttcatgtggattgcctgtctagcccagccagccaaacaggcttccttccctgagacatcaataattgaacaaaagcctc

SEQ ID NO: 849846 - DNA, 421 bp, Homo sapiens
aaatgagtgaataaacaaaagaatgagccgatggtcccttgtccccttcaaagtcactgctgttggtcaggagtgagaaagtaaaacctagacttgaagttcctgaagaataaaaatggagtatccgctcttctgtttgttctctgctatgactgccatattctccaatttacaaacacattgattcaaacaccaaaaatgtatgaggccaatcccttatcctacctcagttccagccaaccgtagctgggaatggtgatcactgcatcagatgagcaatatttactctgctacacttcctcttattaaatcataacaccagaaaaaaagattaagcaacaaaaaagaacaaaaatacttgtrtacaccaatgagaacacatagaatgattctgcctccaccacgaaagcaccgttgtcac

SEQ ID NO: 849847 - DNA, 559 bp, Homo sapiens
caatgtcaggtttcttcttctttttcagctaaaatttactaagaaccctcactgcctattcttcttttttttatgtgtgtgtgtgttttgaaatggccttatgcacctgctggaccatctgccttgggggcaagtctgcctctttgctttcacttcacatgccacatgacttcttaaacacacactccctgttatttgtgtgcccgtggcttttactgtgtttgcatggcagcaaagacacgagctcccttgcagatatcccgagatttatacttgttcttaccctaccagcttccacgactctaaccctttccctgtctgctggcacatggccaggacagacattaattggaactccagctctgccagctccttgacttaccacatgctttttgttcctgttatgtcccagggccaagttttccagtgggttttgaagtagtctgtccacctgcatagggcctcactctgacgctttaaggatcccacctattggcttttttgagttagcactccactgagaggaaargatattcttcctttgccatttgcaagttct

SEQ ID NO: 849848 - DNA, 719 bp, Homo sapiens
aattttaactcaaaaactttgcagagacgtctcaattctcatttaaagccttaatgtcattatgatgttggatttcttagccatcctaaaggctgyaggctctgaggcatttacttgtttcttttacaacattaaaaatggaacacttccatttttcaggcaagcaatttattttattggaatttcttgggtagtctccagctgtgcaggccaagagacttatctgggggtcacagacacattctgaattgtgagctcttcatttctgagtcgatcagagtggaaactctattcagcttgtcaacacacatttagtgagtctctcttacacacctggcccaaatatatataggaactagaagtttgggaatgaaaaacatttgtttctttcctttaagccacctctaaaagctagactagtctttcagaatcaaggactatgtatcaaggactatacttctaagaggatcagctcaactcctgagtgttgcatgggaatggggtcagtcctagagatgactcatggattgaaattggtctaggagggatcagcagtggccctgattgtgtgttggttatgtagtggaaggaagaagaaagagggctctgtaaagaggaaagtcagtcaggaagtggaaggaccacagacttctgggctggcccttcctggagtgaccttgagcccctaatccggcctggggatgacccctttgaatata

SEQ ID NO: 849849 - DNA, 582 bp, Homo sapiens
gtttgttgggttcttggcacaaatatcaagacacttgggtttttttactgggatcttgagtgttagttgccatgactggttgtatagcaggaggtacctttgtgacccacctgctacaaagccctcagattctgagactcatatataccagatagctctaccagagagaaagtgctcctgtgtggctgtgaatgaggaaggaaatcagaggcctatgctgggcctcccaggaccctccctggactcctctgtttgcacattccctgctatttttgctcagtatgctttgctgcaatgaatcttaggaccctgtcactgagtctcgtgcatccatctggtgaaccaccaaaaaacaagacaaaatcttcggaaatagtccttacgctattttctgcatttttcgtgattagaatccatgtgggttttttttaatcacacacacacacacacaaatatgacaaaaacttggatctcagggaagaaaagtattcattaatgaactacaaaamtaagccatggcaaggatgggcgctgtggctcacgcctgtaatcccagcactttgggaggccgaggctggcaga

SEQ ID NO: 849850 - DNA, 510 bp, Homo sapiens
agaacaattgaaaatggaaagtctcaatcttgggctttaccccagctttgcccttgacttgtggtgtaactttacatggaacagcttatccctcactgakttagattggtaaatcccagtgcattgtattattcttatgtatagttggtaaatgagaagtcccaatgcattgtattattctcatttcttttcccaccatttggccaaaaatgttacaaccatcccaccttcagcaggaagactgttagaagtgactataaatcaggacagcctcctgactagcaatagtaaaagtcagttacacgaagcagaatcacacagtcactaatcggtgtcagaaaaacacagatgtccttggaaataaaaccatgaaaaacaaccaccacccatgagtctgtctgagtcacagcactatggacaattccatattcttgtttacttgaatttttctaatttttttctatagaaaccaatgttacttgaatagtaagaaaactggaaataattctt

SEQ ID NO: 849851 - DNA, 360 bp, Homo sapiens
gctcttcctcttctgtgtttctatagaaattctatgtgtgtacaattgcataaagaaactgatcccattgctgagattacagctttcttacatgttctgcactagcctgcaagttccctaagggaagaggctctgtttccttcctttttgtatcctctcatgttagcattgagttttacagttagtagttacagaatgcattttttaaaaaatgaattgaatgaagtgattaggatactagttaataacaccttaagtgtattttctctgagccacataaatrtttcaaaagataacaaaggaccacaaaatctttaggatccaaagagtaagatgtcaatcagtgggaaaaggagactg

SEQ ID NO: 849852 - DNA, 485 bp, Homo sapiens
aggaatagttaatggcgtgtgttagagcaaaacagccataacttgcaggcagcgtttctctccagattaaacaggtgcataatccctctttagccaagctaaagaggccgcagcagctgggggctycccatctctgtgggcccttgcaggggcactttcctcctgtctctgatgctccccaaatgttcctctgtgcggggcctccctggcacccccagttgtcctgggccactgcaaacaccgtactcccttaccacactgagcaaacccactttggttgtgagagcctgaggttaaaataaaaagtatttccctgttggtattgctttggctgcatgcacatgatttcatgggggaatgtgttaagcccagtggaagccgggccgggacaggtgcgtggagccatctaggtgagctctccctcttctccctcccctccgaggtggctcccgggttagggaatgttcctgcatctccacagggac

SEQ ID NO: 849853 - DNA, 518 bp, Homo sapiens
aatgcagagagaccctgggctcacagagaggccatgggccaggaatgactgcacccaggaacccactgccttttgtggtaggggacccaaaggtgactgcagctcaggcaggaggaccygagtggcattgcctcagcccctggggcagtggctgcatgtttgtcccatggcttctcagggctgagtcatgctgtacaaggaagctataggttataccaggtgacaggagcagggaaggctgcacccagggaaggccagtgtactctggggcagtgggtgggagccctgaaccctagatgctctctggggctctttatttctgtcctgcctgctctgctccagcaatttaaatccaccagccctagcaatagttgccaagataaacaaacagtagaggaagcctggatcgcagctccctcccttttgggggtggccctgagggagatgttgggctccacagaatgctctctcagggatgagtggagatgaggggtgcccatggtgaactcttgggattg

SEQ ID NO: 849854 - DNA, 557 bp, Homo sapiens
tacctgagactgggtaatttatgaagaaaagaggtttaattggctcacagttctgcagactttacaggaagcatgttgcttggcttctgggaggccttgggaagcctgcaatcatgacggaaggtgaaggggaagcaggcacgtcacatggtgaaagcagaagcaaatgagagacacacttctaaataaccagatctcacgagaacacattcactatctcaaggacagtgctaaggggatggtgctaaaccattcatgagaaatccacccccatgtttcaatcacctcccaccaggccccatctccaacactggggattacaattcaatgtgagatttgggtggggaaaatatccaaactatatcaggtgctatttcttaacttctcatatacaggaacatcctaacaatagtgtgtgtgtgtgtgtgtgtgtgtgtgtayatatatatgtatcaataggaaaaatagtacctgatatagttcagatacttaccctgcccaaatctcatgttgaaatgtaatctccaatgttagaggtggggtctgacaggagatga

SEQ ID NO: 849855 - DNA, 512 bp, Homo sapiens
cagccattttggaagtcaatttggcagtttcttaacaaaactaaacatagccttaccatatgatctagcaatcacgctccatggtatttatccaaatgaactgaaaacttacatgcacacaaaaacctgcaaatagctgtttataataggtttattcataattgccaaaacttgcaaacaaccaaaatgtccttcagtaggtgaataggtaaataaactatggtacatccacacatggagtattattcagtgctaagaagaaacgagctaccaagccatgaaaagatatggaggaaacttaaatgcatattactaactgaaaaagccaatctgaaaaggctacacactatttttctaaccatatgacattcctggaaaggacaacaccataaaaayaatgaaaagatcagtggttgccaggggttggggaaagagagaaataaatacagctcaaacgacttttagagcagagaaaatattctgactttataatggtagatacatgccagtgt

SEQ ID NO: 849856 - DNA, 512 bp, Homo sapiens
cagccattttggaagtcaatttggcagtttcttaacaaaactaaacatagccttaccatatgatctagcaatcacgctccatggtatttatccaaatgaactgaaaacttacatgcacacaaaaacctgcaaatagctgtttataataggtttattcataattgccaaaacttgcaaacaaccaaaatgtccttcagtaggtgaataggtaaataaactatggtacatccacacatggagtattattcagtgctaagaagaaacgagctaccaagccatgaaaagatatggaggaaacttaaatgcatattactaactgaaaaagccaatctgaaaaggctacacactatttttctaaccatatgacattcctggaaaggacaacaccataaaaacaatgaaaagatcagtgrttgccaggggttggggaaagagagaaataaatacagctcaaacgacttttagagcagagaaaatattctgactttataatggtagatacatgccagtgt

SEQ ID NO: 849857 - DNA, 632 bp, Homo sapiens
attatgagccaatatgaattaaagaatacagtcaattttttgacacccccgccccactatcccaagcaaatggacaaaatttaatgtgtaaacctcttagacaatgagataacaagctcacgtatttggagaaaaaggaaattattcagcaaatcagtggctattacggaggctgtcaagggttctttagccagggagctcagaccagcaacactagcatcacctggaggcttggaaggcacacacatccatagcgcaccccatacctgctgaatcagagtctttgtagcagggcccgggagtgtgcccttggcaagatctccaagtaatgatgcacactaaagttttagcagcactctactgcagcaatggttctcaaattttagtgtccatcagaatcacctggaggattgttagaacagattgctgggcttcacctccagagtttgtggtgcatggatttggaggagggccagaaaagtctgcatttctcacagccttccaggtgaygatgatgccattcaagatccataattggaaatagttgtacgtacccatccagagataaatgtattggtttatttttttctttgcagatgaatccttaaatagggattttttttaaattaaag

SEQ ID NO: 849858 - DNA, 875 bp, Homo sapiens
ctaccacggagtggaattgctggacctcgtggtaagggtagctttattagaagcagatctcatgcttttaaacaggatggtcagataaggygtcaccggctcggtgatatttcaggagaggccagaaggaggtaaggggtgtctgcagggaagagtgttctgggctgaggaaacagagtcagtatgtgcctggagtgtttgaggaacagcatggaggccatcaaggagggagtgaaggacgtgaggggagagggctaggaggtgtgctccatgtggaatgaggctagatggtatagggtcacatacatcatggtgaggacattggtatttttttcttttgacatggagtctcgctctgtcacccaggctggagtgcagtgacacaatctcggctcactgcaacctccgcctcctgcattaaagtaattccccggcttagcctcccaagtagctgggactacaggcacgtgcccccacgcccattttatatttttgtagagatggggttttgccatgttgtccaggctggtctcaaatgcctgacgtcaggtgatccgcccacctcagcctcctgaagtgttgggattacaggtgagagccactgcacctggctgaggacattggtttttcctctgagaacccgtgggaggaatctgagcagaggtgggacaggatcagacttgcattttaacaccttcccccatctccagctaccaagtggagaatgggctgcagggctgcagggaggaggctactgtaatagtcctggcaggagatgaaggagttggactggggtggaggcggtgggggctgaggggtgtgggattctggatctttctggatctaccccgaatgtggagccaacaggggatgta

SEQ ID NO: 849859 - DNA, 592 bp, Homo sapiens
agatcctgtctctctcttaaaaaaaaaaaaaaagaaagaaagaaaaatagtctcaactactcaggaagctgaggtgagaggattcattgagcccagaaggtcaaggctgcagtgatccgtgattgcaccactgcactccagcctgggatacagagcaagaccctgtctcgttaattaatgaacaaataaataaataaatattgtcatggggacaggcaagagagactagttaggaggccattacagtaaaccacaaaccaggggctcaaggctggtccaggaaagcaagatgtgagaggagggaaaggcccaagagctaaggcagtgagcagaagaatgaacctcaattgaaaacctctgtgaagtacggaacatcaacgaaagaagcctttgcatatttgttttgtccccaaagcagacatatacaagagtaccttgactatcaccaaaaagatcgccagtatagaaaatacgtttggctgaygcaactgatggagaaaacccttcaagatgctcatgaactttgctccaaatcttacaacacaactgaagggaaccacaactcaaatggagttatgtaagatttcactgt

SEQ ID NO: 849860 - DNA, 643 bp, Homo sapiens
taatcttattgaggatcctttgtatgtgatgaatcacttttctctggatgctytcaaggttctctctttgtctttgggttttcaccatttaattatggtgtgtctaggcatggctatttgagtttatcctacttggagttcactgagcttcttggatgtgtagatgaattttttttgtaacattttggaagtttttgcccattatttcttcaaatattcttatcgccttctcttctctacttctgagactcccatggtgtgtgtgttggtacacttgatggtgtcttacacgtccctaaggctctgttcatttttcttaattcttttgaaaaatttttctcagactggaaaacctcaatggattaatcttaaaggctgccttattttttatctttcctgctcaaatctgctgttaaaattctctagtgaagttgtcattccacttcttatacttttcaattccagaatttccattttatcgatattttctatttggtgagacattattcttatactttactttagttctttagacatgattcttttgttttttgaatatatttaaaagagctaatttaaaggctttgtctattaagtgcaatgtctgtgcttcctcaggcacagtttctgttgaccacttctt

SEQ ID NO: 849861 - DNA, 447 bp, Homo sapiens
catatacatgtatatactgtatacacacacacacatatatgtgcatactgtattttattttttataggagggaaacctcagcatggtttgacttttttcttagaaacaagcaatccaatctaggatttatgctctaaactatgccgtcacatacagtagccactggtcaattgtaactatttacatttaatgtaattgaaattaaatacagtattcgattcctctgttgcactagcttctttgcaagtgttcaatagccacaagtggtgcagggctaccacactgaacagtgcagctgcagaccacatccagtgttgcagaaaagaaagtcctactgaatggcactgctctagaacctggattctagaaatgtggyccaaagaccagcagcactggcatgaggtgcagttttgttcagaaacacagtctctagttccccacccccag

SEQ ID NO: 849862 - DNA, 555 bp, Homo sapiens
ggatcccccttgctgtagcatctcctttgaactccaagggccttcagaggagaggtggcatctgctttgttagacttggtagcattcccaagtcagtgttaatttagttgattcgtgaaaattgttccctttgcataaggctaggacatcttcttttctggagttattctgtttttagctttttggacaggtatcctgggaaattcttctagggtagcaagatctgccccctccccacagtcaaatcatgtttatgcattatgacagactgttccacctcctgctgggaggcaatgagaaagggtcaggaacctggaagaggctgcagctggatttaagggcaccagtgcttgaggacgaaggagagtatttcaggtaattctatagatgtattgtttacttctggatgtccatgttgctgaaaactaaagtagaaaatagagyaaaacactatgtgttcagggagtatcttagttcattctggctgccgtaaggaaataccagagactgggtggcctataaacaacagaaatttgtttctcatagctttagggg

SEQ ID NO: 849863 - DNA, 531 bp, Homo sapiens
catttctgccatgaggcagatttcccccgtcttaacatgcacgctggggcatttggaataaagagggaaaaaaaggcacattttactagttctctccaaacacagtacagactgctaggctgtttcttcagagggggagaatcaaattggctccagatccctgctaggctgccagaccgtgggaagtgagagagaatgtcaaagctggcagttgacaaacaaggagatcgttccaaaaggaggaggattggcctaaacaatatccttcacaaatgtttttctcagcttttgatagagaaggagaaagggggaaaaaatcccacaaatcctcataagatattctagagcactggggtcactatttgcaaaggtttcaagtctgggaacgtaccagctttaagtgtgyaggaaaattgcaagttatagatgtaactaaagtacgttccttctaaaaagaaatgaacaatatgaatagtagtaaaggcccctttgataccatcctcactttagttctccttccttcccctaagg

SEQ ID NO: 849864 - DNA, 646 bp, Homo sapiens
  misc_feature 459, 479: n = A,T,C or G
aggtgtgtatattataatcatcatatacttacaaatttttaatgtaatctgaagcctgtattttaattgtgagtttaacctatttacatttgttatggttagtaacatatgtggatttatttttaccttcatgcttttttttttacctctttcgtttttctccttttacttattttgttggattgatcaatttttctacatttcttttattttctactactggttcagacattatgcattctatgattctagtgtttagccttaaattttattgttgtttattttgcattgcatcccactctggattttttttggtttagattcttcatttaataattatatttggaagcattcatacattatacatttagcatctattctatgttctgctttatccaaaaatgtcttatgttatccttgctcttaaattatagtttgattaggtatagaattgtagantcacaattattttctctcancctcaaagatactatatcattttttcttgcatattgtgttgttcttgagaagttggctaacaatcttatttctgttgtkctgaagagaacccatgtcttattcgctggcctttaggattttctctctatccttgagagtctacagtgccactgaaaaacatctaaac

SEQ ID NO: 849865 - DNA, 537 bp, Homo sapiens
acctcccacagataccaaaacctgcagatgtttaagtctctgatataaaatggcatagtattttcatataacttatgcacattctccwgtacactttaaatcatctctagattacatgtcatacctaataaatacagtgtaaattctatgtaaattattgttattctgtattgtttaggaaataatgacaagaaaaactaagtcaatacatgttcagtacagatgcgatttttttaaaaatattttcaagccaatctatgattcaaccaatctataattggttgaatccatgggtgtaaacccacagatacacaggctaactgtatttggaaactaaacactcttctaatgctccacggggcaaaggagcaatcaaaataaaaatgagaaaatattttaaactgagtaaaaatgaaaacacatcaaaatttatagaatgctgctagagcagcacttagggagaaatttatggcattacggaataagaaatgtctcaagtcaattatttcagctttcagctttagaaactagctaaag

SEQ ID NO: 849866 - DNA, 581 bp, Homo sapiens
cctggtgattgatgaaaatgagagagaaatagtaaagtgtgactttttgaagggagggagtaaagattcttctacycttcctcttttttctctccttggttccacacccatttcttatgcacagtggcaggcctcgctttctgttgacattccattgttaatgatccagagaaagttcctctggatttcaaggatggattgaaaacaaattttggaagtttgaagacaaacatcacagataaaaaaggatctgtgtgcaggtaggttttgttttagtattaatgttttgtatatgcctccgtgtattaaaaagagggaatttgcctgatttgagcttatgagcaaaccccccaaaggatgtagactctgggagaagataccgggaagatgaggagaggccaatttcaccaacagaagggagatggctgcctgccgaaaagaaagcggttagcatgaacgtgcgtcaggagttgcctgttattgttgcaaaatgaaattgtttgctcactgcagatatagcaggtttgtaagcatgctgtcagtgctaaggttttttttttttttaagtaccaccaaagaca

SEQ ID NO: 849867 - DNA, 515 bp, Homo sapiens
aggacacctctactctggggatctcgagccaacataggtggtggtcaggagaaagaatggatggaaggtcccattgttgtgcctgatgcaggtactcactctgcagtctcagcccctcacatgcccctctcacccccgagggtggtcctgcaagtgaagcacacacagacccccttccttcagccctgtgatttgagtgcggctctggtggtcgcctccatgcgctttgtcaataccccaccaccagtacccacagttgggtctcactgctcctctgaagccacagaagactgcgttgcccaagagcaggtgcaacccggagcatgggatgtggcattccccaaaacagtaatcacccaagagatcgggagcccctgcctcccatccttcaagggaacacccaaaggcctgccctgcacacttcatcggaatccccagagacctggagccccggctgcctgcagtggtgaccagcrgggcaactcctttttatcagcttctccccttccctacct

SEQ ID NO: 849868 - DNA, 645 bp, Homo sapiens
gaagctccagcatcagacaccaaagcaacagatttacagggactgctccagcagccccgcagctatgaggttgcggtcaaaacccaggtgtagatccctttctgtctgtactcacatgtaccttctagtggttctgcttctttgacccaaccctgactgatacaagaagacacgcccccagctggctaacctcctggactcaaacataacaagtgctctgagttgtggatgctgacacatcatggagcaggggagcaaggggaagctaccgaggggtgacgcttgagccagcctggacgagcctgccaggcggaggggaggagggtggcccagggtgagggtgcagacccaagtgaggttcagcagtcccaccaggctccatcaggagccagcgcccccccccccccacagtaaaggagcacacccgaggatctgccgctcccgccacaggcccgaggggttgttcaaacccagaccaggtctgttcagccttgacgcctccccataagccctatcacrgaggatgaagaccaaccaagggagcaaatggtctgagccaaagagaaagtcagaagggcgggtatgggcattttctatggagaaaagggtggcagaggaggagtttggcccatctaagaatagagt

SEQ ID NO: 849869 - DNA, 535 bp, Homo sapiens
aaattgacatataggttttaagaaaagctttattttaaaccattttaagcttgctttgtgaacaatcttgcttcttttgggttgcagagggctcacagctcctgatgctgaaatgctgtacatgcaggaggtagagagaatggatggctatggagaagagagctaccctgctaaggtaagtgtggcttggcggctggggctctttaaagttaggcttacaaatttgagaaaatcatggggaaatccaaggatgtccttatgtgcaaaggctgaggacgtgcaaaactctggaaacttaaaagctgaggtcctggtgaccaaagttttgtggtaaaacacattcccattttgtggttcatactttgaaatggtcttgaaatagagttcctaaggagggccaaactttttcaatttttatacttacctataagatcatagatctcattcagacttttgtcttcctkaatagttactctgtaggtcttcggaactttctacatctgggaaaccagtccagggaactctagcagcagtt

SEQ ID NO: 849870 - DNA, 635 bp, Homo sapiens
tagactcttcagaggataagaacagagtccctggaccaagagacaccagccatgatgaaagaagtactggactgacaatggttgggggagggttaaatmaacattacataataattaatggtgaggtgcctcccccagccttctttccccacttaagctcgcagaactctgactaccaggctattacttgaaaaactttgttttggagaagctgaccagcctgagaggaaagtcttgaaggcagtgacatcagggtgcccacaaaccagacaggcaggacaaatcactttccaccacagggtctagtttcaaacagaaagtcaaagtgccccatgccccaactcatgaacccagaataccagtgaccttctgagtgctccactcttaaatgtaagaccacctaggatccccagacatcagaggggaacctccagcataaaagacagccaaaacagaccacttagagaaaacaagacgaagcagggaggggaaaaatgtcaaaaccacctttcagaccacagagaaataacaaagagtattgtgtacacaaaatcagtatgtttttagaaaattaatagaatatgcagaaacaaagggatcttagaataaaaaatgtgataggagctaaggactgc

SEQ ID NO: 849871 - DNA, 337 bp, Homo sapiens
cacaaagtaagatactatgaaaaatagaacaagaaaaagtttgtggaaattaaaaaatatgcttgcctacatttttaaaatgttcagtaaggagactaaagatcaagtcaagcaagtattcaagagtagaccaacaagatcaagtcaaaaatcaagagagaaaaaatatacaactgacagattaaagtaagggcttatcatccaactaacagaatttccaccagagaacaatgaaaacaaggacarcaaattttaaaacaaataatgcaagagtatttcccacacggaagagaatgaattttcaaattaaaagggtacctaatgtacctaactagca

SEQ ID NO: 849872 - DNA, 334 bp, Homo sapiens
tttaaattgaaaacaataatcacaggatccaggatctcaaagcataagaaaggaggccagatgaggtggctcatgcctgtaatctcagcactttgggaggctgaggtagaaggaccacttgagcccaggattttgagaccagcctgggcaacatagtgagaccctgtctctacaaaaaaatttaaaaattagccaggcatggtggcrtgtacctgtggtcccagctacttgggaggctgaggcaggaggatcacttgagcctgagaggttgaggttgcagtcagccatgattgtgctcctgcactctagcctgggcaacagagcaagatggatg

SEQ ID NO: 849873 - DNA, 590 bp, Homo sapiens
tagagataaaaactcacttacaaggccatggaatttccatctgttttacttctctgcaggcaagtctactcacaactccaccacactcaatcaaccttacaccacacccagcaattaaaggctgcctttctcaatctttgcccactagatttcgtgcattcaaacaagtgtagaaaatgctgggttatattggatttatccacaatcaggcatggcaaacaccaccaggaagcacttctctcttgagctgacctgcctcgcctatgacatccaagaagactggcagttatggtatccatgacaactttcctatctcatttgggcttgagaatcaggcttcctctagtctctgacagaggcacttcaaagtaacaagcctgcaaatattctcatggcacaatacaagccatatatgaaatacaaaactatctacctccctgccctggctagtcccttgctgtgggacaaaaatgcttaagccatgatggtagggstctcctggtaagtatttagcaaaggaaaggaagctttacaacatgacaaatggcaaaaggtgaattcactcttttccccagaatcatcagaggctc

SEQ ID NO: 849874 - DNA, 590 bp, Homo sapiens
tagagataaaaactcacttacaaggccatggaatttccatctgttttacttctctgcaggcaagtctactcacaactccaccacactcaatcaaccttacaccacacccagcaattaaaggctgcctttctcaatctttgcccactagatttcgtgcattcaaacaagtgtagaaaatgctgggttatattggatttatccacaatcaggcatggcaaacaccaccaggaagcacttctctcttgagctgacctgcctcgcctatgacatccaagaagactggcagttatggtatccatgacaactttcctatctcatttgggcttgagaatcaggcttcctctagtctctgacagaggcacttcaaagtaacaagcctgcaaatattctcatggcacaatacaagccatatatgaaatacaaaactatctacctccctgccctggctagtcccttgctgtgggacaaaaatgcttaagccatgatggtagggctctcctggtaagtatttagcaaaggaaaggaagctttacaacatgacaaayggcaaaaggtgaattcactcttttccccagaatcatcagaggctc

SEQ ID NO: 849875 - DNA, 553 bp, Homo sapiens
ctcccattccgtaggttgtctgttgacttgattgatagtttcttttgctgtaagcatatgttattttaaaattacatcacatctgtacactgagtcatctaaacaatgaacgaaatgaaatgatcaatatactaaaaagtaatgctggattaaactaagttcaaggtcttgcaataaaatttagcttgtcccacttattctacatttttaactacaacgaaactcatcttttaaaaaaactcatctttataaaattttcaagtgcttaacagaggcttttattcactattccttacaacaaccttatggaaaaaagtcagcatgctcctaatgatgtaaccagagaaacaaacagagaaggcaagatcattgtccagacttcccaaacaaataggaaaatggggattaaaactgtctgtctaggccagacctggtggctcatacctgtratcccagcattctgggagcctggggtgggtagatcacttgaggccaggagttcaagaccagcctgggcatcatggcgaaaccctgtctctacaaaaaatacaaa

SEQ ID NO: 849876 - DNA, 571 bp, Homo sapiens
cgtgtaattagttggccaaggccacccgcataaattatttcctgagtttgggccctactggctggcctcacttgaaggagtgcccaatggaacagccccatgcaacaggacatgaacctggctgttgctccagttttgatctgctgtgacctttcagacagagaaggcaaaataactgtttggaggaaactcaatgaaattaaagataacactgacaagtaagttagaattctggccggtcatggtggctcatgcctgtaatcccagcactttgggaggccgaggcaggtggatcacgaggtcaggagatcgagaccatcctggccaacatggttaaatcccatctctactaaaaatacaaaaattagctgggcatggtggcacgcacctgtagtcccagctacttgggaggctgaggcaggagaatcacttgaacccgggaggcagaggttgcggtgagccgagatcgcaccactgcactccagcctggtgacaaaaygaaacctagtaaaaaaataataatcatcatcatcatcatcaaacttccaaaggtcaaggataaataaaggat

SEQ ID NO: 849877 - DNA, 602 bp, Homo sapiens
agaaatgaatgcatctttgagctggagaacgagtggaggccagagtgatataaatggcccaccagcaggcagcatcctccatcagyaggaggagtgaaatgcacttttatcacaggagaaggttgaaggagaatggatgagcaaatgtgattgggaccacaagcaacaagaggagggggaatgttccacacaaagggaaccacatatacaaagactctgaggacaggcgagaagcacgtaacaggaactgaaaggcagccacaaagggagagcagagagcaagaggagggcggtgtcagatgcaacgaaaggggcagaagccagatcatggggattattagcatgtggagggggaggatgatgcgcgggagtgctgagttttctctttcaaaagctcactttgttttcgtgtggagaacaggttgacatgaaagaaggaaggagctgggaagacagttattagtcctcttgccagtcctccacctgagtcttggcgagagatcggaccaggagtctaatactaactagctctgtgaccctggataatttgcttcacccctttaagcctcaaattccccacccgtaaaatggcaataatcatg

SEQ ID NO: 849878 - DNA, 654 bp, Homo sapiens
tgcatccaggggtgagtcaagtggtccaactgagtttgggggacttgtaacatctctagtcagtgtttctctatgccatctccctcaaataccccctacacacatatgcgcacacacacacacacacacacttattcttcatccctccctggagcttgtccacttctctgagcagcaccaatttccttgcagccagtagcaagagcacagatgtggagaatgcatggctcccacatttcttgatatagacttgaggtcttgccttatcctctccaaggaagagctgaggccactgggaacatggagtgggcccataggccatggcaaagcctcccaactctaagtcctttctgtgtaagtccagaaaatgaaatattgacatggaaacatctttcaaaaagaaaaaacatgtggctctttaatacatgaaaatttaaaagtataaggaaaagaggaggaacaaataaatggagagcaaggcagaaaaggaggcaggaaaagaagaggggatagagggctataaatttcatgagggcaaagaacrtgtctgtgtcccagtgccaagcacagtgctgggcacataatggcactcaactcagattcagtttgttgagtgaataaagaaaagaaggaaaaattgacacaggagcaagg

SEQ ID NO: 849879 - DNA, 593 bp, Homo sapiens
cagtggctcacacctgtaatcccaacactttgggaggctgaggcgggcagatcacctgaggttgggagttcgagatcagcctgaccaacatggagaaacccccatctctactaaaaatacaaaattagccaggtatggtggtgcatgcctgtaatcccagctacttggggggctgaggcaggagaatcatttgaacccaggaggcagaggttgtggtgagccgagatcatgccattgtactccagcctgggcaacaaaagcaaaactccatcttaaaaaaaaaaaagaattttcctctattactgagtttgaaggggtcatcaataataccctccattttcctattggatttcagaacaaactgaaagatgaagacatgggattcagacacataaaaattaagtatcactttcattactggttaaggtgatttgggagaatatagtttaggtgtgaaagccaaatgagattgctaagaagatgcccaccaccaccacaatttaacttagactccaaaactgcaggcytcctcacaaggacagagctcaccctacaaacaagagcaaatgaaaccactacctctgaaggcaggt

SEQ ID NO: 849880 - DNA, 545 bp, Homo sapiens
cacatctctgtaataaaataagagaacacagtatagggatcctcatttcatagatgaggaaaactgaggaatggagaggtcaaaagctggctcaatgtcacaggaaaggcagttgcagagttaggataagacccagggttcttgactccagccctttactttatccacaaagtcaacacaagcagtctagatttgttatctcgcccccttctgtctcaaagactgagtgacaaagagcccttagtgtgatactgagtgtaaatgacagcacaggaagtccattctcagggcaagctgtgagactggcagctgaacaggaggccacaaagcaagtctgtacagagcactttcagtctacactcactatctcatccctactaaggcccagagtccacagaagccaagggagggagtgacggaggctgcaggagggtccacttagttcatcaattcctgagtatcctttarcaccacaaaaggcttagacttaatgagaaagaaatgaatcatctatagaactgaatatttattttaaagatggtatt

SEQ ID NO: 849881 - DNA, 629 bp, Homo sapiens
tctgacacattcattcttaattttagatgtccacaagtygtgaaaaactcatctctaagatgcacaatttttaagatcaaaatttctttgatttaaaaaattgtcatttaaaatggtttctgttcaaaacattagtcatctataaaaataaagatacatagtaatcatcacagaaggaaattattttacattgtttatttatgcctctattttaattatttgtaaagtcaaagagaagatgcttttttccagaatctagagtgcaacatgtttaaagagagaaagagacacacaaagtaagacacaaacagagatccaaagagacagaaaaattgcaaaatgctcttacttaaagcaccagactacttcagttacagcatatgcactcctaggtcagggttcctaaatcaatagactaaagaaaaactgccttgtcatcagaactccaaaatatatgggtctcaggagaaacaaatatgtggagctgtagatctaaatccaaactcaactctgtggaagaaaacaaattttacctgtaaaataagttgagctacttgaccagtacattagaaattacacagcaaaatactctaaagacaggatcctaaactcattttcctttcaaaagt

SEQ ID NO: 849882 - DNA, 627 bp, Homo sapiens
tgtgactacgaaaggataaagtaaaggatcctgtggtaatcagaaagttatgtatcttaacttcatcaatgtcaatatcctatttgtgaaaaggaaacaaggcacgtagattggaaaataattttttaaactgtccctagttgcagatgaggcagaaaatcagagggggtcggacatatgtggttcccacatataatcccagcactttgggaggctgaggtaagtggattgcttgaatctaggaattcaagagcagcttgagcaggatggcaaaaccccatctctacaaaaaatacaaaatatagccaggtgtagtgacacacagctatagtcccagctacttgggaggctgaggtgggagtattatttgatcctgggaaatagaggctgcagtgagctgtgatcaagctactgcactcaagcctgggcaacagagcaagactcatcctcaaaaaaaaaaaaaaaggaaatttaagaaatttaaaaaatcagaggaaaatatttcttaattctagaataagagaattagcaagattacaggatagaagataaacttagaaaaacaaaacacttctacatcttagcaatgaatacatggaarctaaaatgaaaaaaatatcatttaca

SEQ ID NO: 849883 - DNA, 526 bp, Homo sapiens
ttgcttttaaatgtcagctctttttaatctccttcattctggaatagttactcagtttttgcttaattttcaaaattttggcacttttgaaaattatgggccagttattttgcagaatattcctcagtttcagggttttctgtttgggttttgattggattcaagttattaatctgtaacaggtgtatcacaaagatgatgctgtgttctcactgcatcatatccagaggcatacatttatgttcactttaatctcttgattaaggcggcatctacagatttctctgctatgaagttatttttgttcttttttaattaaaataattctaggagaggttatttgaagatatgaaatatcctttcttaattaaacttttagtttattcatttattatttatatcagtattatctcatagatttctactttaagacttaaaatccgccaggcrcgggggctcacgcctgtaatcccagcactttgggaggccgaggcagggggatcacgaggtcaggagatcgagaccg

SEQ ID NO: 849884 - DNA, 526 bp, Homo sapiens
ttgcttttaaatgtcagctctttttaatctccttcattctggaatagttactcagtttttgcttaattttcaaaattttggcacttttgaaaattatgggccagttattttgcagaatattcctcagtttcagggttttctgtttgggttttgattggattcaagttattaatctgtaacaggtgtatcacaaagatgatgctgtgttctcactgcatcatatccagaggcatacatttatgttcactttaatctcttgattaaggcggcatctacagatttctctgctatgaagttatttttgttcttttttaattaaaataattctaggagaggttatttgaagatatgaaatatcctttcttaattaaacttttagtttattcatttattatttatatcagtattatctcatagatttctactttaagacttaaaatccgccaggcaygggggctcacgcctgtaatcccagcactttgggaggccgaggcagggggatcacgaggtcaggagatcgagaccg

SEQ ID NO: 849885 - DNA, 556 bp, Homo sapiens
tgtgtgggtgcatttccagttttgcctttcctktctctctgtctctctctgtgcccctatgcctgccttccctgctgatcttgatctctggctagttgggggcctgtaacagtgatgagatgcgggtctgccccggctaagagctccctgagagagggggcttagaccatgatgaagagttgcttttaggcggtgctgtgagccctggtaggggctgtgtgcgtgtgtgactgcgtgagtgtatgaatatgtgtaagtgtgtctgagtctgaggcggtgtggctgtgcccgtgtgactgtgagtgaccgcatgtgagagtgtatgagtctgagggtaactgtgggtcttgtgtatctggcaccaagggaccaaaggcatttcctggtgctggggcccaaagaatggagggggaggtgagaaatggctggaacttccaggggagggggaactggactctttggcctctccttatatcccccaacctggggcctcccttcccctggaagcacagccagctgtaccctaaggaaacatttggtgaggagtgaaaagagg

SEQ ID NO: 849886 - DNA, 439 bp, Homo sapiens
tttttctatgggtatatacccagtaatgggattgctgggccaaatggtagttctatttttagttgagaactctcttcttttcacagtgtttgaactaatttacactcccaccaacagtgaataagctttccctcttctccacggccttgccaacatctgtcatttttgactttttaacaatagccattctgactggtgtgagatggtatctcactgtggtttagatttatatttcactaatgattagtggtgttgagcattttttcatgtttgttggccacctgtatatcttcttttgagaagtrtctgtatgtccattgcccactttttaatgagcttatttgatttttcttgttgatgtgtttaattaagttctttatagattctggatattagtcctttgtaagacatactttaaaaaaaagcctttccaatagac

SEQ ID NO: 849887 - DNA, 530 bp, Homo sapiens
tgggagagatggctagaatgccatccccaactggaataggcatgttttacactcttcctatgtccataaagctggcttcttgcagtagaccgttttacatattaaaacaaggcatacattttagccttgagaaagaacactaaatataggcctcagcaataatatgcagcattagtatgcgctctcttgataaaattctcctaagcttaaaaaatacatttttcacatagctgctggaagaaatttctaagatttttcatatagatgctaagaaagagatgttttctcttttcactggggctgctaaactggtatgacatgactctgaaactgtctccagctatgttcttagtctcccagcttgtcaaaacccaagcttggtggaagtaaaaggggccagagagagacccaaggttgcaaagaaatgacatttttaactatttgractcagcttcacccctggacttcccaacttcctattatgtgaataataaattcctttatcctctcaaatttgtttgaattgggtt

SEQ ID NO: 849888 - DNA, 519 bp, Homo sapiens
cagcctcctgaatagctgggactacaggcatgcgccaccatgcctggctaattttaatttttttttgtagagtcagggtctcactatattgcccaggctgatctcgagctcctagcctcaggcgatcctccaccttcacctcccaaagcactggaattacaggtgtgagccattgcacccagccaagacaagagtttttaaatgaaaaatcaggaggtttacataattgttttgggataattatccttagctgcaaagatcaataacaagagtgatgccagtctgaggttgaacaggcagttattaggcagatgtcctcacagaagcatttctcgtgtaaggttgggatggcctttgtgcaagactgcagtttctgcagaatcttttgtgattgtttttgtcatcaggcatttatgcaagaaagctttctcttcatagccttctctggctctatttgttagaatgtgttttatttttwaaaaaaaatgactccattttgattctgacaactttcacaaa

SEQ ID NO: 849889 - DNA, 407 bp, Homo sapiens
aaacataatgtttaagatatacgtagaagaaaatataggtgaatgtggttataacttcgaggtataaaataacttttttttaaaataaaatggagaccaggtctcactatattgcccaagctggtcttgaactcctgggctcaagcgctccacccgcctcagcctcccaaagtgctgggattacagccatgagccactctgcttggccaaaaagagtttcttaaacaagtcataaaaccataaaacgtaaatcattaaagatcaacaccattaaatttaaaaacaaatcggagttcagggtagggatggaaaattaattacatgcctttattttcacttytcactgagccccgactaaaactacagtaaatttttttggtgcatgtatgcgtgtaaaggcataaagc

SEQ ID NO: 849890 - DNA, 578 bp, Homo sapiens
ttgacatttatatctttgctgaggcttttattctttatttcttatgctctaaatctctatttctggctcctattggaaaaaatgacctagaagaaccccaaatatttcgaagtcaacagttcaaaagtgaactcacattcttactctaacaatttttcttccagacctccatttggcaagttataccaccgtttaaccaatcactcaagccagacctgatatatgtgactccttctttttcactgaataatcactaaatcagatcaattctaagccctatcatgggcatttcttgaatctatgccattttgtggccttaattccaaccctcatcattgcttgcctacactatttcaagttcctctaatctaatctatcgttattctcgttgtccttccaaattgggtacagtaaatctttcttttggctttgaatatatatttagaatagtttcccaatgtgaattktgagttctatttctagatattattagtaggtataaaatgaaagatgggatttttggccaaataaatttggggagacccttggtaataaaaaagattatttactcttaggct

SEQ ID NO: 849891 - DNA, 607 bp, Homo sapiens
aagtgaaaggaatcaagattaaaagtcatatattcagaatacgggcagtataccatagaattcatccttgctccgaaacttacygcctggggcagatgccttactctgctgtgtctaatcagataagccagtgatgtatctttttgcttcagtttcttcatctgggaaatgggaagaccgtgcctacatcatagattgtaatgaggatgaaatgagttaatatcggtgaagtatttagaacagggactaacacataataatcactcaataactgttagctctttatcatctccactacaaaaatacaattaaaaaactagggagaatatatccaaacattattatctacctctgaaaagggctttcttcctctttatagtgtcctgtgctttctccaaattttgtctaacgcccatatactactcagataataaaaaaaataaactttttcaaaaaattagctcagttggtaacttttaacctgaaataatgtttgccaaaagcccctttaatgatgccactctagattcataactgcatcacttttctactgctgccgtaactacttaccacaaacacagtggcttaaaatgatacaaacgcatca

SEQ ID NO: 849892 - DNA, 502 bp, Homo sapiens
agtcgtttaggggtagaagctattataaagtaagtttgcatttcttacaaatttccaaaagacatcaatgctgctgatccatgggccataattagaacaacaagaccttgagaacagagtccaggtcttattctatgtactataataatttattagcaatctactttggcaaccaagattatgtcatgttgaaggtgatatggtggtaagtagttggaacactgtgtgaaatactgcacattttatttcaggcaagtccatatccttcatgtttatgcacgtcaatttagatagcaagtgctactgtaaaatgtatttgaatacttttaggtattatttcactcatatgatactactcagtttctaaataatagcttggtacatagaggtctgtggttctaatcacacakagtgctcaacattggtcaagtcaatcacttttcctttaccagagttccttacctgccaaatgaaggcatttgcatcaactaatccacaaggc

SEQ ID NO: 849893 - DNA, 636 bp, Homo sapiens
agaggggagagaatgcaattgccccaaataaagactcactttggaactcagtgattatrtgtgtgcatatatgtgtatatatgtatattatacatgtgtatgcatgtatatatgtaatattatacatatatatgcatgtatatatatgaatatatataaaactgaaaactgcacacattccatatacaccatatacatgaaagtgaacacacacacatacataaacatatatattcagtttcaaacaattgttagggaacctgaggaagaaactaaatggaatataatggttgcatctatgatagccatggtactagaactagtagtagttctactaaggtgagaattgacatagtaaaagaaataagatacaaagcagtaagagagagctacattttccttaaggccaggctgaatattcactaacaaggaaatttctacagtcattattttaatctgattcattctcttggtgggatattccagagttaccacctacagaaattccacttttccttactgaggttttcttttttttcttttcagtccaaatattagtcattttggtagagaaggtagaaacaattaacaattgagtaattcctcaagaatcatgttaaaaggtttccaaatcat

SEQ ID NO: 849894 - DNA, 603 bp, Homo sapiens
gcatcgtgggaacgctctatgttcccaggatgtgggacatggtttcaaagsagattattttggaacatcgagttttaatgactgccctgctgggatttgaacttgtgtggggcctgtagcccctttcttttggccaatttctccttttgtaatgggaatgtttacccaatgcctgtaccccaattttatcttagaagtaaataacttgttttgattttacaggctcatcagtggaagggacttgccttgtctcagaagaaactgcactttcgagtgatgccgaaacaggttgagacttttgggggactattgagaagggatgattgtattttgcaatgtgagaagaacatgagatttgaagggccagggatggaatgaaatagtttggatgttgtaccctttaagtctcatgtcgaattgtaatttccagtgttggagtcggggtctggtgggaggtgatggggtcatgaaggctgatttctcatgtttaacaccatcctcttggcactgtccttgcaagagtgagtgagttctcattacatctggctgttaaaagtgtgtgacacctctccctgcttgctgctgctctggccatgtgacata

SEQ ID NO: 849895 - DNA, 512 bp, Homo sapiens
atgaagtcgatctttttgtactgtggtggaaagattttctgaacatagttcaggtaaaaaaatgaccactgttgaataatgcttctggtataacacatagtgtttgaaaatgtacacaatacactgtaatatccaatgcatacatcaaagtaaatatattttattctaggataattattaaaacattaagaaatactctttaatcatatatgttaaaacttgtagaaaatcaataacatacaagtaaagaagatcaagaagtcaaaaaaagtaattccaagtgtagaaagcatggtgaaaagtgatggaagaaaactgcagaaatttaaaatgtgaaattaaaatatataattattaatcaaaatacataattcttaattaaaatacataattcttcattgaaccccraatctgtcaggacatatgtgtgatcttggataacgcattcaacctcctgaacactgaatttccttgactgtaaaatgttttagagatgttcctcacccggttgc

SEQ ID NO: 849896 - DNA, 512 bp, Homo sapiens
atgaagtcgatctttttgtactgtggtggaaagattttctgaacatagttcaggtaaaaaaatgaccactgttgaataatgcttctggtataacacatagtgtttgaaaatgtacacaatacactgtaatatccaatgcatacatcaaagtaaatatattttattctaggataattattaaaacattaagaaatactctttaatcatatatgttaaaacttgtagaaaatcaataacatacaagtaaagaagatcaagaagtcaaaaaaagtaattccaagtgtagaaagcatggtgaaaagtgatggaagaaaactgcagaaatttaaaatgtgaaattaaaatatataattattaatcaaaatacataattcttaattaaaatacataattcttcattgaaccccgaatctgtcaggacatatgtgtgatcttggataacgcattcaacctcctgaacactgaatttycttgactgtaaaatgttttagagatgttcctcacccggttgc

SEQ ID NO: 849897 - DNA, 622 bp, Homo sapiens
caccaattagtcttaggtttcattgtcttaggccccaccactggggccgctacacgtgacatgggatgtgggccatcgggcaaagggtgcggagatggggcgctgccaggggagccaaggaggaaagagagcgctttccaaattgtcttccagggtttcaatgtgcattttattaactcagaatctgtcgggaataatactagggcgctacctttccctggagataggtcttgtcagtggagtgagataggctggggggaggaagaggaatgagagactcagtttataaatattaagatcagcaagggtgtgctgctggcaggagcagagggagcctagagatttgggtggctgccgttggtaagtggttgcaatccagagagtgggattgagttcctcccttgtcatgttagcatcccgtttcctgggcgcgggtctaatgccctgcaggtggtcatttcactcatggtggctttgtctctcttctgccatctccagactcagcttcacactccagggctgtgtaccaccagycactgtcatgttaaccccttcccaggccagtgtgtccttggcctggagcccaatctgctggacagcctgggaccgtccattttcgggg

SEQ ID NO: 849898 - DNA, 620 bp, Homo sapiens
tatttataatgtgcttgcacagtaccacatggagtggctgctcactattaaatggckgccttgattatttcacttcctcttgctttttttttttttttttgaggcagagtctttctctgttgcccagggtggagtgcagtggcgcaatctgggctcactgcaacttccgcctcccaggttcaagcaattcttgtgcctcagtctcccgagtagctgggattacaggtgcacaccaccacacccagctaatttttatatttttagtaaaggcagagtttcaccatgttggccaggctggtcacaaactcctgacctcaagtgatctgcccaccttggcctcccaaagtgctgagattacaggcatgagcctccgctcctggcccctcttgcattctttaatatagaagctagtagcctacagtacatggcagagatggcccacagtagaacatggaaggccaaccagcactgctaaggagctcccacctcctcctatctgtcatcatgattggaggccaatgcttgttgtcttatctttctctgcagtttgaacatctctggacaacaagccattagtatctcttactaggctccttgtctggggtaccatgcaggaggaa

SEQ ID NO: 849899 - DNA, 605 bp, Homo sapiens
gctctccctccccttgtcccctaacccccaacaggccccggyggacactacttactgtaagcctgcagtaattaagatagtgtggcattgacaaaagaacagaaaaatagatcaatataacagaataaagagcccagaaatagacccacataagtagagtcaactgatttttgacaaaggatgaaagacaatgcaatggagaaaacagtctcttcaacaaatagtgctgaaacaactagacatccacatgaaaaaaaaaaaagaatctagacacagacattacacctttccctgaatattgcatacaatgaaatattactcagtctcagaaagaaatgaactatcaagctatgaaaagacatggagaaatcttaaacacactctaagtgaaagaagccaatctgaaaaggcaatatactgtatgattccaactacataacattctgggaaaaggtaaaactatggagacagtaaaaagatcagtggttaccacagggttatggggagaggggaataactagatgaagcacagaggatttgtagggcagtgaaactattctgtatgatactataatgatgaatacatgctattaagcatttgtcaa

SEQ ID NO: 849900 - DNA, 417 bp, Homo sapiens
tccccttgtcccctaacccccaacaggccccggtggacactacttactgtaagcctgcagtaattaagatagtgtggcattgacaaaagaacagaaaaatagatcaatataacagaataaagagmccagaaatagacccacataagtagagtcaactgatttttgacaaaggatgaaagacaatgcaatggagaaaacagtctcttcaacaaatagtgctgaaacaactagacatccacatgaaaaaaaaaaaagaatctagacacagacattacacctttccctgaatattgcatacaatgaaatattactcagtctcagaaagaaatgaactatcaagctatgaaaagacatggagaaatcttaaacacactctaagtgaaagaagccaatctgaaaaggcaatatactgtatga

SEQ ID NO: 849901 - DNA, 417 bp, Homo sapiens
tccccttgtcccctaacccccaacaggccccggtggacactacttactgtaagcctgcagtaattaagatagtgtggcattgacaaaagaacagaaaaatagatcaatataacagaataaagagcccagaaatagacccacataagtagagtcaactgatttttgacaaaggatgaaagacaatgcaatggagaaaacagtctcttcaacaaatagtgctgaaacaactagacatccacatgaaaaaaaaaaaagaatctagacacagacattacacctttccctgaatattgcrtacaatgaaatattactcagtctcagaaagaaatgaactatcaagctatgaaaagacatggagaaatcttaaacacactctaagtgaaagaagccaatctgaaaaggcaatatactgtatga

SEQ ID NO: 849902 - DNA, 594 bp, Homo sapiens
ttgtctacatctactaaagctaaatattacttaccctattgcccagaaatattactgctattctaggtgtacactctaagcgaaatgtccyacaaaatgtttgagcatatttctgtcagctttactcataatagccaaaatattggaagcaatccatttgcccaccattattcaacagagaattgaataaactatgggttatttgtataataaaatgttacacagcaataaaaagaacaaacttctggtatatgcaacaaacatgattgagtctgacagatgtaatgttgagctaaagaagccaaatacaagagttctgcagtgtaattccttttacctgaacttcaaaaacagacaaaactaatcttatagtgatatgaatcacaaagcaattacctctgagaggacagtgcctcagaaggggcaagagggagtgttctggctttatggaagtgttatgtatattgatctgtggggtgtttacattggtgtatacatatgaaaaaattattgagctgtgctcttcagattcatggactttgctgatatatgccgtaaccaaataacatttgtggaaactgatgggaagctctg

SEQ ID NO: 849903 - DNA, 347 bp, Homo sapiens
agactattctaagaaggccatatgcagcaggaggatgaatgcagattcaggctctggacacttgatggttccttaaaatggatgtgtaaatttaacatttaagatagggtcggatattaattaccaaaaaaagggtaattatttaaagaaactttgtggtgattacatctgtgaaaatgaagaatcattctgtaatgtgaatcctgactctaattcagaggtccttcactcaytaattaaaactgatggactggtcagaacccagtagatcccatgtattccaacttaacacgtatggtttataagtataaatttttgcatattgagctggattaaaataggggcct

SEQ ID NO: 849904 - DNA, 487 bp, Homo sapiens
gtactcagatcctaaaccatatggtatcattattattagtgttggattgccctaaaaggggaacacccrggggcctacctcaatgatttgcccaggtgggctcagtttcatttctttctctgacattctcaagcatcagtgctggattaccctaaggggcttcctcagatcgcctgtgctgtgcattttcccaaaagttcacaggcaagagagggaaaaaaaaaagaacaactcaaagctactaaagcaaccgcagaaatgcaggtcaaaatgaaaaggctctgaaattgctgagaaaggaaagaagtgaaagcagcaaaaagatggcagtcaaatgccaagagagattcaagggcaactcaggtgtgtaaagaaagaggtttctgttcctaccaatttgtgtttatgctcacaaatgtgtgcctgcgggatcaattatactctacactgttggccagcttttcttttctctttggagaaacgttcc

SEQ ID NO: 849905 - DNA, 487 bp, Homo sapiens
gtactcagatcctaaaccatatggtatcattattattagtgttggattgccctaaaaggggaacacccgggkgcctacctcaatgatttgcccaggtgggctcagtttcatttctttctctgacattctcaagcatcagtgctggattaccctaaggggcttcctcagatcgcctgtgctgtgcattttcccaaaagttcacaggcaagagagggaaaaaaaaaagaacaactcaaagctactaaagcaaccgcagaaatgcaggtcaaaatgaaaaggctctgaaattgctgagaaaggaaagaagtgaaagcagcaaaaagatggcagtcaaatgccaagagagattcaagggcaactcaggtgtgtaaagaaagaggtttctgttcctaccaatttgtgtttatgctcacaaatgtgtgcctgcgggatcaattatactctacactgttggccagcttttcttttctctttggagaaacgttcc

SEQ ID NO: 849906 - DNA, 582 bp, Homo sapiens
caaaagaggggtcccctctcagcaaatagaggggtcctgcaaacaggtttccacctcacaattgaataccagggctcccacatatgcactgaagagtcaggctccttcccttgcataaggtrtgaattcctggtggctccaccccgacctttcggtgtgcatgggggcccttagtctgagccactccacattgatttatttcccttactgtgcatgtgttaagggatggaatttttcaccgtgcacatgtttaggcaagcccctgtgcacaatgacctgggcgggttggaagttctccaaggacacttccctatctgcctaggcatttggctggccgttgcctctatcacaactatcaccagaccctcagctgatagaaattggaagttagctcactgcaaccttggcattgtcggtactgctgtgccgatgtaaccatccgtacacagaaaagagccatcctataaaatccccagcaagcctttgtttccttgcagtcagctcctctcttgctgactctgccagttgctcttttgcaacatattcatactttctctaataaatctgcctatctttacctac

SEQ ID NO: 849907 - DNA, 591 bp, Homo sapiens
gtaataacgctgccaaacaaactaccccccaaacgcagcttcccatgaatctcctggttgcctgtgattcggctgctctaggccaggctgggttgttcagctttgcttcargctgtggcagctggggaggtgctgctccaggcatctctcatcctccttctggggcatgttcttctcatgggcaatggaggaagcccaagagaacaagtggaaatgcagagtctcttaaggcctaagcctagaactggtacacagtcattttctgcctcatcttgttggtcaaagcatggcgaaacccaaagccaggaggtggagacatttatttgtctcctttagtgggaagaactgcaaagtcaaatgataacagatgggcagcagggaggggtcaagcactggggttggtaatgcaagggactacaagaagcacgaaagccaccctcaaaacacagcagaccaggaagccagcggagtttgatgacttccttaagctgctgtcgtctgtctatatcttgttaggggaggaaaaataggttcctttttggttaagctgacttagttggatttccagtaaaagacaatttcaaagctaca

SEQ ID NO: 849908 - DNA, 187 bp, Homo sapiens
ccccctctcctccttcatatccaattcaggcctccaccgtctccygtccatccctgtgcctcatcctcctagctgcacactctgcctccagtgtctccccatgaaatccattatctaacacctcagggaaccacaccagtgttggctgaatctgaaatcacagtctgcacaagaagccaatcatgaa

SEQ ID NO: 849909 - DNA, 351 bp, Homo sapiens
cttgagactattctaagaaggccatatgcagcaggaggatgaatgcagattcaggctctggacacttgatggttccttaaaatggatgtgtaaatttaacatttaagatagggtcggatattaattaccaaaaaaagggtaattatttaaagaaactttgtggtgattacatctgtgaaaatgaagaatcattctgtaatgtgaatcctgactctaattcagaggtccttcactcaytaattaaaactgatggactggtcagaacccagtagatcccatgtattccaacttaacacgtatggtttataagtataaatttttgcatattgagctggattaaaataggggcct

SEQ ID NO: 849910 - DNA, 602 bp, Homo sapiens
tgtaattccagctactcaagaggccgaggcaggagaatcgcttgaaccccggagagggaggttgcagtgagccgagattgcaccactggactccagcctgggcaacagagcacagaattaaaagtctggttttagaacaagctcacttgagactattctaagaaggccatatgcagcaggaggatgaatgcagattcaggctctggacacttgatggttccttaaaatggatgtgtaaatttaacatttaagatagggtcggatattaattaccaaaaaaagggtaattatttaaagaaactttgtggtgattacatctgtgaaaatgaagaatcattctgtaatgtgaatcctgactctaattcagaggtccttcactcactaattaaaactgatggactggtcagaacccagtagatcccatgtattccaacttaacacgtatggtttataagtataaatttttgcatattgagctggattaaaataggggcctatccataccttttcttgatgctgcctgcagagtttacaaattgagactgagaaatatatatttcaaaactccacacatgacagtrtagattccctggacagcaaaa

SEQ ID NO: 849911 - DNA, 588 bp, Homo sapiens
ctggggctagtgaagtgattggttcagggacttgcttggctagttaggcacacagctagggctccatctcctgactcttatcccagtgttctttctgcttctacacaactaagtagttctgtgtttagttttttytggttaaaaaatgttcctggaagcattgcttacaaataacttgaaatgccaaggaacgttatagtacagtggttaagagtgcagactggccaaacaagcctgtgtttgcatctcagctttatcattctactactatatagccttgagcaggttgtctaatttcttaaaacttcatattcctcaacagtgaaatcgggataacagagcacctaccacagaacagccctgaggacttaaataagtgaaagcattctgaaaaattaatagtgttaggtacatagtaagtgttcaataaataggaggtgttattattcatcataacactctaaaatttatcagaattcaaatttccattcttgtttcttaggtaaaatgaagcaaaaataaagtaacaacagacaaacctctttaacttgacatctttccaattcacaaccaagaggatgtttactg

SEQ ID NO: 849912 - DNA, 573 bp, Homo sapiens
agacaaatatcctcccccagaaaggatcctctattttgaaaatatcccacttcatgtcatcacagtactttaatgtccggctattcatcattctgccttcaagttagtttgagtgcaagactcaayctatgttctattttgggtgatgcagacagccacaaccactgattggaaacttgagtccgtccagatctcgtggcttacagcccaaggcacctgtgacctgcctggttcatcaccgggtcccactgctttggcctcattattgccctccacaccctgattcttaccagtgttgtttcagatctgggctcatcccattttgccccaacactgtggcagcttctagatgctgtctccaccatacagccgccagagtgaactcatgctgtctttaatggccaatctgaaagatccctgctatgctgaaaaccttcgtaagagagccttaccacggattgcctcactgatgtgtttctgtgagttgtgaggtgggtcacaggccatttgctactaataataaaaccccaaagactccatagactcactcctgtatctagatgccttcccccg

SEQ ID NO: 849913 - DNA, 572 bp, Homo sapiens
tgtttcagatctgggctcatcccattttgccccaacactgtggcagcttctagatgctgtctccaccatacagccgccagagtgaactcatgctgtctttaatggccaatctgaaagatccctgctatgctgaaaaccttcgtaagagagccttaccacggattgcctcactgatgtgtttctgtgagttgtgaggtgggtcacaggccatttgctactaataataaaaccccaaagactccatagactcactcctgtatctagatgccttcccccgtcgctgagtcaccagctgtgctgcctggcaaattccttctcctccagcaggtctcggctcagatgctctctctgtgaatccataatccgcagtgcccactcctaccccatccggctcacgtccttctcctacaggcttgctgtgctttgtatagacttccatttaagaattgtcttgtttcattgcaattgtttatacaaacgtctcccatttctttgtaagctccttaaggacagaggccaagtcttagctcttyttacatctccagtaaatagcagtttgtggcacattttag

SEQ ID NO: 849914 - DNA, 754 bp, Homo sapiens
aaaattctgccacagattttgaagtcagaaggctgtctggttaaatggatccagaaaaattactaacagatatggtgacaaaggacatggaaatrtaagtgtcctgtatgtgctacaggaaaaagtgctgcccatctttccctcatttcagcaacactttcagtgagccccagctcatggaaagagagacgaggagagaaaaaggcttattcctgaagctaatagctttccttctctctctaatactatatgtttgcagtgacaatgatccctcagcttctgaatcatctcctcattctgtgatgtacccctgggttctgagtttcatttctttggcagtcagtcacatgctgaatatagagcacctctaatttgttcagtgtctcatggatcactgagaaagaatagggccttatgacaaactccactggtcagagcgcccggatctaggtgtgtgatcacagcctttaacacttgaccaggaactcatatttcatggagtgagaattgtgagaccttgcactagggttttgtgattctgagaaagatgctgggtttggctgtatttatcaaggaatgtggataccaagagaaggggctgagttgggaagaagggggtaaagagaattctaggcaaattaaacctctcagcaacgagtatcccataggccagaaagagtgtgaagggattcagtcatatgtgaaagaagttctgtggtttttgtcttgtctttcttgaaaacctctggccctg

SEQ ID NO: 849915 - DNA, 504 bp, Homo sapiens
gagacctcccaggaggcttgttgtagaggcagtggtcggatcctgagagatgagatttttttttaattatgtagcagaatggggagagaaagggagaagcgcaygaaagacagaaaagcacgaaaatctgcggacgtccaacaataaagcagataaaatagtgtgagtgtttttacattcaaaaaatagaagaagtgcaatgcttgtcagcaggctttgtggtcgtgtagtggttaatacttgtagttgtggttgccacaacctgggttctaatctgagtcacagtagtgttttctaacctgcaactgtggctaatagacctgtcgtttgctttgcctttaatcctagcagcctccagagagcagagtaaacctctggccccgaagggcgccagcttctggagtttagcccacagcgcagaaactagggggcggcctggccgataggaaaacttggacatgctctttgtctcacaattgagcaggaaaaattcccgtaggtgaa

SEQ ID NO: 849916 - DNA, 538 bp, Homo sapiens
tatgaactgttaaaataagaaaatctctaaaatcttttttttttttaattcaggtgtctaatttaagggatccatcttcaggccattggcaagtmgaatttccaatggtgtaattattgcaatagcaattcaaccaaatagcccctttgtggaaagcccaggatgtcattttccaggttaacctcctgggaagggcaaagaagaagcaatcccaaagattcccctgcaagaaaaaagttcaatgcaaggagtagaccacagatgggtaaggatgatgttggcctccagtaacccagatatttatgggggcttccagtcacagacctctgaatctataataccaggtaggccctcttgggattgagctttcctaggactaaccaggcaacaagaattgagatgacaaaagcctcaaagggatgggacttcttaagacaaaccccaagagcttgacatggtcagaacaaaaagtgtgctggggttcccagccattttcagacaggccacctagtatgacctgatagttactgcctctttc

SEQ ID NO: 849917 - DNA, 529 bp, Homo sapiens
ccttcattattataactaggcatgtttagttctttatcttctctcttttattcaggtatacactagtgttttattcattggtttcagagtaacatagtggaaagaatatagactttggagaccaaaagatctaggttcaactcctagctttagctatgtggcctttggcaagtcttttaacttctgtgagtccagtgtctccatttttaaaatatccaagtatgatagttgactcaggaaaaagcatttgtgcaattgtttgagttgtaagctcaactagctacttttttcatggaatattatctttgcttgaaaaaaacagcggacttggatatttagcagacattttctccaaaatgaaatgatctgatcacttcaaggaaggcaacctataagcattttctgtgaattataaatttaagggtttcaaatgaaaattaaaaattttgaaaaaatgtgtatatccaccagaatgagytttacatcttatcaataaatacagacttcagagttactctttaccatttct

SEQ ID NO: 849918 - DNA, 597 bp, Homo sapiens
agaaactccacattgttttttataatggctgtactactttacattcccaccaacaatgtctaagagttccctgttctctgcagccttgctggcatttgytattttttgtcttttgatagtagcgattctaactggaataagatcatatcacttggtggttttgatgtgcacttccctgatgattagtgatgttgagcattttttccgtataccttttggtcattcgtatgtcttcttatgagaaatgtctgtttcagattttttgcctacttttgaattagaatattctttttgctgtcgagttgagttccttgtatattctggatattagtcccttgtcagatgaatagtttgttatttttttgactttttaataatagccattctggctagtatgagatggtatcttgttgtggttttgatttgcatttctctaatgatcaatgatgttgagctttttatcatgtttgttgggttgcatgtatgtcttcttttgagaaatgtctattcatctcctttgcccactttttaatggggttgttttttccttgtaaatttgtgtaagttccttatagatgccggatataagacctttgt

SEQ ID NO: 849919 - DNA, 559 bp, Homo sapiens
cttttgttttttttttcctttatcatagcacaggataattggtcagctaagttaactagttccttagttctgaccayggcccaatttgttatgtggtgttttacaagagtggctaaatcatcatctggtctgttttgaaagtttgcatttaataagcgccatttttattgttctcaaggcaatcagctgacatcccataatattgtctcaaagttttatcaaaacatgaaaaataatctcaaactaattcctttgggttctggtggcattgctggattttattccaatccacaaacctttggaatgctgaaggaattataattaacagagcagtggctcatgccttggcatctttgagcctgtcttctgaacttttggggacttgttgtcatcctattggacctttggaaattgactctgctaaatggtctgaccactgtgctttttccagccattccttagctttagcatccaaaaccaacatgtggaacagctggtaagggtctgaatgacacgggccatatgacgagtgacctgacaatgagctcaaattcttggg

SEQ ID NO: 849920 - DNA, 544 bp, Homo sapiens
ctggaaagtacaacattttattgacattcactaataaagtcctaaatgaaagcttagaccaggttcataggcttgaacagtttaataatgaaagtcagctcaaaataatctatgagataaatatagcacattatccaaaacaggtgtttatctttttaagaaaattggacaagctgattttttaattactgaaattgtacagagccaatacaagttaagacaaatttgaataagaaaaagaaagctggaaagctaaacttaccagacattagaagtattatacaaaatcctaatgtttaaaatactgtgcttttgacatcagaaagaaatcagatatatcgaccaatgaggcaaaatgaacagaagtcagaattagatccatacatatatagccaccttttatgacaccctaatgggcaagtgaaaaaaatatttttaaagcaaatgtggtacatacatgtcatgggatactatgcagccataaaaaagaataaatcttgtccttcrctgcaacatggatgcagctggaggccattatcataag

SEQ ID NO: 849921 - DNA, 432 bp, Homo sapiens
tgaaggataactgataataattgtcaaggccaggcatggtggctcattcytgtaatccatgcactttggtaggccaaggaaggtggatagcttgagttcaggagtttgagagcagcctgggcaacatggtgaaatctcgtctctgcaagaagtgcaaaaattagctgggtttgtggcgtgcatctgtagtcccaggtactagggaggctgaggtgggaggatctcttgagtctcggaggtggaggttgcagtgagctatgtcagcccactgcactccagtggcggcaacagagtgagactgtcaaaataataatttttgagaagccagaaccctcagtgctagacaggtactaattgctgaacttgtatataaaacttagaaaagaataaagtaatgagtcaaagaaataggatttgctcatctggatttat

SEQ ID NO: 849922 - DNA, 540 bp, Homo sapiens
agccaggggtgtggccaactccacaagtccccagaccttacctagctggaaagcaggcaagtccaacaattttcaaaacccaaagaaacagtttatgaccttaaagcatttagcaaacctaatatttgaacatattttagaccatacgtttacattttgaagacatttgtattttaccaataatctttaaaaccatttttatttcccaaagattgctaaagtcacatgaactaaagggcattacactttctacttttctgacaaaatattggatttaagctcttattattattaaaccaattaatttaaaacttcacagaggagattcaccagtttgcagagagagaaagaggccagagactgacgtaagaaattcttccccttttgccggcgtgccaggtttctgggttctctctccctgagcggccctggcggccctgcctgactgtatgcaaacaaacacaaggccatgaattcagaatattcacagrtatagttgacactttttgaagaaactcagcagagaaagaaagataactc

SEQ ID NO: 849923 - DNA, 615 bp, Homo sapiens
aggaggtaataaaacaacttatttcccagtcatcatctgaaggctgaagaagtgctttgggttgacctctggtaaagtygttttatggcaggaggtttctgtgtggaagacaaagctttacagctgatggatgtctttccaccgccggtgaatcaccacagtgaacctcagtgtcgctgacgaggaggctggcccccttagagctttgctccactctgtccctgtcgggctgtttactcagtgttgagcctctggatttgggcttcaataccaccacgcgatgcagaggacaccgagaagtcaatcagacctgtccacacccgagcagccttcagagccacctcctgtgattcgggggcatcctggggtgggacggtccatgtctctgcagctcctgtgacctcaccaggctgtaaacatttgacttgcattctttctgggctaaattgtttacctacagagaagtccaaggttcgggtcccaaacccaggtgagtgtaagaacaccctgaggaggcttactgagtatggcctgtctctccaggaggaaggaggacccaggacttcacccccggctcctgatcacgagaccagtgtcgtaaatccagctctgaga

SEQ ID NO: 849924 - DNA, 618 bp, Homo sapiens
gtacagtaaccaccaccccgtgttaaggaaayagccgtcggctccagggctcaagggcatggccatcttcaaaggagacacatgttgtatgagtcactctccggtggttttcagtctgcctgggttactactggcaggaaggcttaggtcacattaataactagaagtcccttttgagatataagaattggcagcaacgatcactctataaaataaaccactgagcatgttatgttttccaagtggtagtaccagtgttttaaaaatatcagaactaaaaacaaaattgtgcatgatttacacacagcttagcttctgcccagaccaattgtctactgctcccaatgtaaaaagggaggtttctggcacaggaagaaatgtcaggatcacctggccagatcccccagctcttcaggtgaggaaaccaggatccagaggaagacccccccaagaccacagcacctgcttcccaagagagctggatccctcctgctctccctaacagcagcatgggacagtatgccggcggattctaccatgggtggaagcctgagctgtaatactcagggcattgggcagagcacccagacaggcactgtctctgtggtgggccactcc

SEQ ID NO: 849925 - DNA, 535 bp, Homo sapiens
aatattttaaaacttctcttgtgatattttttttgacccatgtgatatttggaaacatactgtttaatctcaaaatatttgaggatttttaagctgtatttctgtaactgatttctagtttaattctattgtagttcaagagtatactttgtatgatttctattcttttaaatttgttaaggtgtattttatggcacagaatgtggtctgtctcagtgaatgttccacgtgagtttaagaggaatgtgtagtctactgttgatggataaagtagtttatggatatctgtaatatccagttgattgatggtcctgtttaattcaactgtgtccttactgcttttctgcctgctagatctgtccatttctgataaggggatgttgaagtctccaactgttatagtagatttatctgtttctccttgcatttctatcagtttctacctcatgcattttgattctctgttgttaggtctatatacattaagaattattatgtstttgcaatatacatttacaactaatctaagtcctct

SEQ ID NO: 849926 - DNA, 578 bp, Homo sapiens
tgcacaggataaccccccactagaaagaattttctggcccaaaatgtcaactgtggtaaaattgagaaacatgatgtataggaggtgagctatttcaacatggaagttatactatcattgaattytcatacagtgtatttacattaggattacctatcttttatttatttatttatttatttatttatttattgacactctgtcatgaggctggagtacagtggcacaatcttgactcactgcagcctccacttccctgggctcagatgattgtcctacctccgcttcccaagcagctgggactacaggcatgcactaccacacctaatttttgtatttttttttttatagagataggatttcaccatgttgcccaggctggtcttgaactcctggactcaagcaactcacccacctgggcctcccaatgtgctggaattacaggcatgagccactgcacccagccaggattaactactatttatagccagtgaaactattatagttcgaataaaagatttctcttttaaataaaaatgttagtttaaaaagtcaatttaaagaaaaatgttaactaa

SEQ ID NO: 849927 - DNA, 578 bp, Homo sapiens
tgcacaggataaccccccactagaaagaattttctggcccaaaatgtcaactgtggtaaaattgagaaacatgatgtataggaggtgagctatttcaacatggaagttatactatcattgaattctcatacagtgtatttacattaggattacctatcttttatttatttatttatttatttatttatttattgacactctgtcatgaggctggagtacagtggcacaatcttgactcactgcagcctccacttccctgggctcagatgattgtcctacctccgcttcccaagcagctgggactacaggcatgcactaccacacctaatttttgtatttttttttttatagagataggatttcaccatgttgcccaggctggtcttgaactcctggactcaagcaactcacccacctgggcctcccaatgtgctggaattacaggcatgagccactgcacccagccaggattaactactatttatagccagtgaaactattatagttcgaataaaagatttytcttttaaataaaaatgttagtttaaaaagtcaatttaaagaaaaatgttaactaa

SEQ ID NO: 849928 - DNA, 652 bp, Homo sapiens
ggcaatctaccataatgatgcataggtggaaatatgtttgctatagtaatatttttgttcatttttcactgaaagactttgactcaaaaacttcttaatgaattttccagaaatataacagaaatatggtgactgtatctgcagggatgaaaattaggttaatcagccaagcagtttatgtagaataattttggttgcattttagcaatcatccaaatatgcaatgaatatttctttccactatttggctaaaggaagttctttgttgaaactagttcaaatatatgcattggcattttcccaaattgttggccagttaagtgcatagtattactgtggcattttgtttaaatgattgaaatacagttttattcatttagttatagaaattacaagttgatcaatataactttaataacatggaaccatgacataattgttttgcacctgcatcttttgtgagcacaaaagtgtggatctagttaatgtgttcttggcaggaaaaaaaaattgcttttaatggttgtattgctttagtcttttattggcatayacatttttattatgcaaatttaaaaattctaaaaatggtcttcgctcatgtaaatagtgcttagtgtatgttgacaggctgtatcattattatgttatt

SEQ ID NO: 849929 - DNA, 589 bp, Homo sapiens
tctcacgcatcattctgtgctggtcattgttaaattagagtagaacttaagtaccataaaatctcaagtgcacagtttggtggatttttgcttaggtatacactcacagaacacccacctagatcaggatgtagaacctttctagcatcttagaagggatccttcataatggaccccttctagtcaataccatccccctcccaagggaaacaattattctcatttctatgaccatagtttaaagttgcctagttttgaacttcatattcatggactcgttcagaatgacctcttgtgtctggcttctctcactcaacacaaaatctggagtcatcatgttgctgcatggagcagtagcttgttttttaaatgccacatagtattccagtgtatgaatatatcacaatttgtttatatccattctgttgatgggcacttgagccgtttccaggttttgtcaattatgaataaagcttctgtgaacattcttttggtagacataggcacgtatttctcttgggcatatacccaggactgaagtggttgggtcaytcagtgggcatgtggttagctttcctaaatactgcca

SEQ ID NO: 849930 - DNA, 591 bp, Homo sapiens
tcctcagcctctcagaatgctgggattacaggcatgagccactgcacttggcctctcctttctaatagagccaccattttgggggaggtggtaatctatccttctacaaagagccatgggctttaccaagccattcatgaggttctaattcccttgtgagtggctggtttggaaacaggaatgagaacaattctgctgaatgaaataagaggaatgtttgctcaggggcttctggaaaagactttttgtttgtttgttttctttttttttaaacaggatctcactctgtcacccagtgctgcagaggcacaatcactgttcactgcagcctcaactcccggatgcaggtgatgctcccccctcagcctcctgagtagctgggactaaaggtgtgcacctccacacccagcaaatttattgtatttttttttgtggggggtggggtttgtcatattgcccaggctggtctcaaaatcctagtctgaagcaatctgcctacctcagcctcccgaagtgctgggattacaggcatgagcaattgtgcccagcttttttggtttgttttctgaaaragaaagcccctcctctttt

SEQ ID NO: 849931 - DNA, 615 bp, Homo sapiens
aaagataaatacaaaaatgcatacctaaatgttcttttttaaaaaactgtattattattagctttaaggtagaaaagctgaaggcagcaaatttaggaagtgcctaaagacaaagcaagttgactgctgtgattattatgattcagaatgctatgaaatgagacccaagcctttttttaaaattctagaaaggagactccttaagaactcaaatacatttggtgtttgccttttttttttttttaattttgaaaatagatctggtcgacaaaattaaattgttttctacctaaatgtattcattcatgcctattcatcttaaaatgtcctgccatatatatattttttaaaaaatacatcgtatcagcgagactccatctcaaaaaaaaaagtatgtcatatgatggtcagcacttaattggtggtttccatcttttctcagtccatttcctaaaactctttacaattctttcttcatacakaattcaccatagagaacatagagaagttagaattcatttctttctctttctgtctcttcctttttctctaagtacacatttttgtaagtctctgtagtaattttggtacttatgggctttccatgacttggca

SEQ ID NO: 849932 - DNA, 567 bp, Homo sapiens
atactgtagactaaactcaagttgttttatttaccactgacacctacaaaaccatattttgttaccacagaagtttactactctgagaattaaatcctacactactggagaatgaaagatgattaacaatattttcaaaaggtcacaaccagataaaacttagaaggctatacaaatagttatataaactttatttaagcctagacatattactaggacttttaaaaggcagttttcaagttacactgtgttgttgttgttgtttgttgttgttgttgttagagagacaaggtctcactctgttgcccagcctggagtacaatggtgtggtgaaatgataccttgctgcagcctcaaactcttgggctcaagcgatcctcctgcccaagcagctaggactataagcacacacctccacacctggctaatttttttattttttgtagagacagggtcttgccaagttgtccaagctagtcttgaactyctggcctcacccaatcctgcctcagcttcccaaagtgctggaattacagatgtcagccactgcacccagccctagattat

SEQ ID NO: 849933 - DNA, 567 bp, Homo sapiens
atactgtagactaaactcaagttgttttatttaccactgacacctacaaaaccatattttgttaccacagaagtttactactctgagaattaaatcctacactactggagaatgaaagatgattaacaatattttcaaaaggtcacaaccagataaaacttagaaggctatacaaatagttatataaactttatttaagcctagacatattactaggacttttaaaaggcagttttcaagttacactgtgttgttgttgttgtttgttgttgttgttgttagagagacaaggtctcactctgttgcccagcctggagtacaatggtgtggtgaaatgataccttgctgcagcctcaaactcttgggctcaagcgatcctcctgcccaagcagctaggactataagcacacacctccacacctggctaatttttttattttttgtagagacagggtcttgccaagttgtccaagctagtcttgaactcctggcctcacccaatcctscctcagcttcccaaagtgctggaattacagatgtcagccactgcacccagccctagattat

SEQ ID NO: 849934 - DNA, 538 bp, Homo sapiens
tgcatgctgttctctctgcttacttccttttgcttgttcccttgcctttagtaaagtcttatgaaatattccagctttatctatattgtgctgcaaaactcggaaaatatcagagaaaaagggagagcagtycccctccacaagaccgtggtagcagctataaatagatccaatctccccaaccaaagatgactctaaatacagagctggagtgataagccttttgctgttaaggatatgaacatttaattggtgtattctcttttcttcctattgacaaattaggccaagcagaaattcttttaaaaatccactaatcattctttattattttttaaaaagccacaatgaaactgaaatgtttgaagcattgaaggcatctctaaaaatatcagaagtatactttaaactgccatgaatccattctcattcttatttctctttctttttcttggaaagttctctcccttttctccagcttctcaagacactcaaaaacctcccctgaatggaaaatgaagccctaatggaacagcta

SEQ ID NO: 849935 - DNA, 480 bp, Homo sapiens
cccagcctgtaccttgtcttttcatactctcacagtgttttttgaagagcagaagttttaaattttgatgaagtctaatttatcargtttttattttgtagactgtgcttttgtttttgtacctaagaaatctttgcctaagccatggtcacaaaaattttctcatatattttcctagcagttttattaattatgtgttttacattagatctctaatccatctttatttaatttgtatctacaatacaaggtattgatcaaatttcatttttttgcatataggtatctaatttttccagaagcatttgttaaaaagttttctccactgatttttctcaaaaatcagttatctatgaaagtatgtgtatgtttctgaactctattctgttcctttgatctatttatctatctttatccaaagccatattgtcttgattactacagctttataataagccttgaacaaagttcatattagcc

SEQ ID NO: 849936 - DNA, 548 bp, Homo sapiens
tgttttgaaaaactggattagattyttttattactcttcacaaaattgaaaacagatggtatgtgctatagacttaagaaaacacagcaaaagtggaaaaaggtcagcttcagtgtaacttggaggtgagaggacctgaaacctgaccccttggccatgaagacccctattcagatctgatttgtgacgctggctcacagttgcataccctgaagtggtggggtgtgacctggaagtcggcgactagacagcagagagctgggcccctacaggcgcttcgatgtgccctcttcacctctccacgctaatcctgtgcatccttccaaagaaagttcctacaataagctctcctatccagcccacagagtcatctgcctgctctgaactccctccttgctaactggaccatcattgtgtcacatatcttgccttctctgagtgggagctccttgagggacagttgagtggcagccattcagagcatacatagtcccctttcctgactccaaaactatttcttgcttcatcgatgagcctgaggttggttt

SEQ ID NO: 849937 - DNA, 564 bp, Homo sapiens
tgagtatgctgaattgtacagctcaaatgatatgtgttgaaggagttgagagcaggagagccattaaggaaactttcatgttggttcaaacagtctagcatagaattcttggagaacatattccattagtttaagctaattataagcttgctgcctgctatttgagattgcatttgaaatttgtccatacttttgtgtgtatcagtagtctactcctttttaccgatgagtaatattccactgtatggatgtttcaccgattgttaatttatgtaccattgagggacatttgagttgtttccagtttttgatgatgacgattaaagctgctataaacctttttgcacagggtttttgtatataagtttttattttatttatgtaaatacccgggaataggatttctggatcatatggtaaatttgtgtttaattttttgagaccctgccaatctactttccaaagtgactgtaacattttgcattttcagtagcaataaatgagagttccagttgttttacatacttgtcagcacttgataytggcaggtttcttttttgtttt

SEQ ID NO: 849938 - DNA, 597 bp, Homo sapiens
gttattgctattatttaaaagaattctcttcttttggtgacttctccatgctaagcctcattcccaagccacttcggtgatttttctaatataacccaacaatggctaataccaaagktgagtaagctaaaagctttccatggctacactgggatggaggagcaggaaagctctttgctcatctgtcagctcttcaacctttgagggaagctgcctccaagttctaattgcctgctccaaactccacagcgtcgggggaagggggcacgtgatcaacggcagccccgccactgtgctgtgttgctatagtaaggatgccctttattgatcagactggcctggagtcatgtaactccccagcttactgctgagctccccaaggggcagttggcaggcagtggtatctctctggactaacgccgatccccagctctgccctctctcctcccctggacacacaaaggatgcctgcagaaacacctaatgtttctttgtagtgtcttgtcattcacacactaatttgaagtcacagatcaaaactggtgagagacatcaggggaaagatatttgaagactccccccttccctaaagcaatg

SEQ ID NO: 849939 - DNA, 551 bp, Homo sapiens
caggtaaaaaacaaaaaggaggtcaggttycaaatgagagattagattccatgtccttccaattctaacattctgtgattctatgatgtcaccttttgaaaattgatacagaacccaatggcccacagtcctggatttctggatctaaccatggttgttctgaaaagagtgaaaggagacagtagagactttctgatactgtttatgtgtctgtatctccatctccaatttctcctacaatgcaaataaactcctataagtacaaagggtttaaaagaactgggtatggtatttttaaagatgttgtgactttttaaaattcagaggcttctaatatcctcaagcattagaccagaaaacttaagacctggttttataataacaaaccaaagccctccatttcttgaaggcttcctgcataccaggcaccatgttaattttttttttacatattgtctcatttaatcctcataagaccctgtgagataggcatagacttcctcaacagtaaaaaaggtgagtcatgtcccatgtctgagcctcagattcaa

SEQ ID NO: 849940 - DNA, 629 bp, Homo sapiens
aacttttgattgttatgatgatgatacttcttataattttgttatagtgttatgaataaattactctcttaaatactcttggaaataaactcaatataaataaataataaaagtaattayaaacaatttctaaaaaattaattctgccaacttttccgataagagttcatagatacaaagaacatatggatgctagaacgtgcttgtttgtttgcttatttgtttcatgcaataataaattgttttcatcaagcctaattttaacactgcattttaaataagcttattttctgatatatgtttatatttctaatggaaaattgtattctaaaaaatcgaagtaaaattaaatcatattgttaagaataatgtcatttcctgcattatatttacataatagattaagcacaattaggccatttgaagtacttgcaaattatctctttctcttgtctattttatacctatccatctctctattttgtaactgcctctctctccatccctgcttccactgtttttttctttaaaatcttattatttttccttggaaatggtctctgaatcactctgattgtattcaataaatttttattaaatgttcaatgactaaatcagaactgggtcac

SEQ ID NO: 849941 - DNA, 586 bp, Homo sapiens
aggaaaataggataaaaatggaagtattgatagccaaggtgtaattcaaggsttgagaaataaagtccagatgtttgattaaggccatgggacaggaacagagagacatgcacagaaggggcaaatgacaatatctagtatcgtcagagtcacgggaagcagatagaaagaaatagacccaaacactggtgacttgaagtccaagggagcagtaaggaacctagagaaaaatataggactgaagtaggaaaaaggtcttcagagaacaaatttgaggtgccagaacctggaaagatccctgtaactgaggccagtttctgtctcattctcatagtctttgtgcttgctgcggtggcaggaactgatgagagtatgactcacttggacactactagtgtcactggtacaattttactgtctttacaggggtgggagataaggagtggtagctcttttttgggcatcagctttgactctgagggactagctgtggagaggggaagtatgtgatcacggctgggggaggtggtcccaggggcagggttggagtggaatccagaagccctgagcgcttgggagagacact

SEQ ID NO: 849942 - DNA, 563 bp, Homo sapiens
atctcccctactacatataatgtctatgttgtattttggatacaaaaagattagattactattaaggggaaaaaaagattcacagaaataaatgaaaatggtagaaattttctatgaatttgtacggtactttctgccaaaaattcactgcattttttttaacattagtttatctacttttaaatatgccaaaaataactaacacattataaaatgtctccttttttgttttgtttgtttgtttcagacaatgtctcattctactgtccaaactggagtgcactagtatgatcctagttcactgcagcctcaaaactcctgacctcaagcgatactcctacctcagccttcaaaagcgctgggattacaggcaaaagctacctaacccggccaaaatcagtcttaaaaataaaggctattctcactgggtacggtggctcacacctgtaatcccagcactttgggaggtcgaggcagatggatcacctaaggtcaggagttcacgaccagcctgatcaacatggtgaaamcccgtctctactaaaaatacaaaaattaggctg

SEQ ID NO: 849943 - DNA, 531 bp, Homo sapiens
caggacggtctcgatctcctgacctcgtgatccccctgcctcggcctcccaaagtgctgggattacaggcgtgagcccccrtgcctggcggattttaagtcttaaagtagaaatctatgagataatactgatataaataataaatgaataaactaaaagtttaattaagaaaggatatttcatatcttcaaataacctctcctagaattattttaattaaaaaagaacaaaaataacttcatagcagagaaatctgtagatgccgccttaatcaagagattaaagtgaacataaatgtatgcctctggatatgatgcagtgagaacacagcatcatctttgtgatacacctgttacagattaataacttgaatccaatcaaaacccaaacagaaaaccctgaaactgaggaatattctgcaaaataactggcccataattttcaaaagtgccaaaattttgaaaattaagcaaaaactgagtaactattccagaatgaaggagattaaaaagagctgacatttaaaagcaa

SEQ ID NO: 849944 - DNA, 531 bp, Homo sapiens
caggacggtctcgatctcctgacctcgtgatccccctgcctcggcctcccaaagtgctgggattacaggcgtgagcccccgygcctggcggattttaagtcttaaagtagaaatctatgagataatactgatataaataataaatgaataaactaaaagtttaattaagaaaggatatttcatatcttcaaataacctctcctagaattattttaattaaaaaagaacaaaaataacttcatagcagagaaatctgtagatgccgccttaatcaagagattaaagtgaacataaatgtatgcctctggatatgatgcagtgagaacacagcatcatctttgtgatacacctgttacagattaataacttgaatccaatcaaaacccaaacagaaaaccctgaaactgaggaatattctgcaaaataactggcccataattttcaaaagtgccaaaattttgaaaattaagcaaaaactgagtaactattccagaatgaaggagattaaaaagagctgacatttaaaagcaa

SEQ ID NO: 849945 - DNA, 511 bp, Homo sapiens
tctgggtgccacagcacattttacctgtcatattcatggaaacccagcygccaaccatacttggttttatattgcacagcctattcatccttccccatgacatctaactgcaggaaattgactgaaagtcagtggggttatcatggaagatactgggctgtatcagtgtttaacagataatgggactggatttatgcagtctactggaagacttgaaattggaaaaagacaatggattcaagccagttataatcatggcaccaataagtgcaaaggtggtatgtggagtctttgtcactgtgtcctgcaatgccactgggctgccagtgccagtctttccttggttatgacagctatggattaatagccagccatctgtcttaagtccttagatctaagtccccaaagtcacacttatcaagacctggaatcttggacctgaagcctgtctacttcatcatgtcccaagttggctctagctgtctccatattcaggatgtgactcagaaac

SEQ ID NO: 849946 - DNA, 509 bp, Homo sapiens
catggggatccttggcatttacagcaacgtgctgcatacaatgttttggtaaaggacagactgcacatatgatggtggtcccttaagattaacatgaagctgaaaaattcctagggcctattgatgtcgtagctgtcttaacattgtagcccaatgcattactcacatgtctgtggtgatactggtataaacaaacataccacactgccaatcatagaaaagtatagtacatacaattctgtatagtacataatgcttggtaatgataataaatgactgtcactagtttatgcacttactatattataccatttatcattattttagattgtattccttctacttattaaaaaaatgttaactgtaaaacggccacaggcaggtccttcaggatatattccaggagaaggcactgttatcatggagatgacagcaccatgtaygttattgcccctgaagacctttaagtgagacaagatgtggaagcgtagacaaatgtattaatgatc

SEQ ID NO: 849947 - DNA, 592 bp, Homo sapiens
cttaaggatacagggcctcttcaaaccctgcaacagcccttgtaatactctgataccaggggtacaaaaaccctatgggraatggagactggtcccggacctcaacctcattaatcatgaggccaaaatcagaggccattactacgtgtgctattaaggatagtactgataagtttaaatgtgttttatggtccctggattgttgagataaagattaaaaaatttttaaatgtggatgataaaatttaaaataaatccacttaaggattataagtaaagcttatgaatttcaaccttagagaggaaaaatttggttgaattttttctcattattttcttatatctttgcatgtctggtaaaattttattaaatgctcagcattttgaattttaccttgctaggcatttgatgttttaaaattcttataaatactttatccactattctagggtatattcagataacttgagaaaattttgattatctggaatcatgtttttaagatatgttagatgagactggaatagtgctcagtgtaccatcactaaacagaaatgaatactgagtaatatctaccattaccacacttac

SEQ ID NO: 849948 - DNA, 577 bp, Homo sapiens
taattcaaatatcttaaataaaacaattgtaacctcactccagtagtattaaaaaaaaatctcaacgaagctgcgtttattctggtaaagatggagtacctaattttwggtaaattgtataaataaactctattaaatccttaattaaagaaaaaatgttattttaattgatgtaaaatagagccattttctgaatttcaaaatctttttattataaaaaataaattagaggaaactaaaattaaaatgtaaatgaagttatgtacaataaattgtactaggccccattcttcattgtgaaatgatagaagtttccctgtaaacttgggtagaatacagtaatatcagtaattgctaattttattcagcattatactgaaaataatggttgacaaatgaaaatacctatagttttaaggcaaaaggattgttaaaaataatcttgttaaaattcaaaagagatagaattgtctacataaaaaaatttaaaatatacatataaaacaagaaagaatatgagggattggagcattttctaattcagaaggtaattacatagctgccaaagaacaacaaa

SEQ ID NO: 849949 - DNA, 574 bp, Homo sapiens
gaacacctattggggccagctaaattctaagtgagctcgttggcattacagagttaatatcttgtattacaactggtgctggtgaattctaaatttgtctagcatgagttgaatccactgatctcaatttcatgatctttatgtgggctgcgagttgttgagattattctgacaccaatccataaatgaaatgatttaatgtcatttgtttattactacatctctggtcattgtacaattatacaaagagtatattatcaaatatttgtttaaagagtgaataggtaaaattatgccgaagttccctcaatcaaggtgactcgaaatggttgtctgacaacataatattctttaggcatttttacttttagctaattaagttaggaggctttgtctaaatacacaaaactagaattcacattcagttacattccataacakgaataaaggtcataataatgaacaattttttctaccatattttatataacaatgtaaaatttaatatttttgttcttaagtgtagagtgctaatatttgtagtatgaacagcaataaaaaagaccagaataaa

SEQ ID NO: 849950 - DNA, 682 bp, Homo sapiens
aggatcatttattgtccttctatttattgtctatcattcaatttggtgcctgtctaaataatccaggatgatatcttcatttttaagacccttaacttaattacatctacaaagaccctttctcaaaatatggtaacattcacatgttccagggatttaatgtggacatatcttttgtggaggagggccaccattcaacccactacaccatgttttttgagacagggtctcactttgtcacccaggctggatggagtgcagtggtagaaacatgcctcactgcagccttgacctcccaggctcaatcaatcccccgacctcagcctcctgagtagctgggactacatgccaccatgcctagctaatgttttcagtttttgtagagatggggtctccttatgttgcccaggcaggtctcggactctagggctcaaccaatcttcctgctttggtctcccaaagtgctgggattacaggcgtgaaccactgcacccagcctacactatgtttttaaaaagaaagaaaaatctatagaaaaataaatggtttctacttcaataagtttacagcataattggaaataaggcttatatatagataacaaytacctagatcagggtttcttaactggcactattgattgacacttggggcccgataattctttgttgtggggtgctgt

SEQ ID NO: 849951 - DNA, 520 bp, Homo sapiens
cttactgataatgaatgagaagaaagaaatacctgagactatggagaaagacaaatataagagaaggcagaatttagatcagttgtagtttaggagtgtggactgcattttgaaaaacctgttacctaatcagtctttgtacctgaaggtacaaaccacagtagactgtggaaaatatttccttggccttaaacggcagggggaccctatgtaacagtttgcccctttccaaaaggattgagttgaaatgatgattaggctcacttctatatgtgaagttctgtgatatttgatgttcaggcaggtattttcatgcaagaattcagacactattggatatcagaaagaacattaggaatagaggaatcagaaaccataactgtgtgrcttatgacaaggcatttgacttctcaggttgttttagaactaccatttgacccagcaatcccattactgggtatatacccgaaagaataggaatcattctatcataaagacacatgcacgcatatgttaatca

SEQ ID NO: 849952 - DNA, 528 bp, Homo sapiens
gggtttctcttttttttggttgcctgtttatatcctttgtccattttttattggatcatttatttttcttacacattttaaggcattgtttatatatattctgtatactaattctttgttgtttacatgacttgcaaatatctagcaaatgtgcagattttataacctgtgatccagcattctatgcttaggcatataccctggagaaaaactctctcacacatgcccaaggagctatttaggagggtgtttcctgtggtgctatttgtaaaagcacaaaaagtgaactagcctaaatgtacattcagtgagtgaatgactcatcaaattatggtatattcacataatggaaataagaggttaaatgaataaactggctctacatgttattaacagagatgatgscagaaaatattatattggccaaaaatgcaaataaaaaatcaatacatacagtattggatatatacaagttttaaacgtcccacaaaataattctaaataatatttatgggtaaatacatataa

SEQ ID NO: 849953 - DNA, 436 bp, Homo sapiens
cagacaattataaatccatctctcttgttcttcttttgccactgttatcttctgcattgagttcattctcaggcagagaatgaagagcaggcgggttgcattgtttgtaaagaggactcccagggaaaaaaaagagagcctttcccctatgaatcccgtgcagcttctggagttcctcaccagccctgtttgggccacatacccatgctagggtccattcttgtagccatagtagtgaaaaactttggccaatctaaggagtatgttcacctggtggaggtaaggaaggattcccacaacaaagaagaatttgttagcagaaagatgaagaaggagaatatgtgcaggcagacaaaagcctttgctaccatgattctgtgccaaagaaatactgggcayccgggacaatcaatcatcagcgttggttctgaccaag

SEQ ID NO: 849954 - DNA, 526 bp, Homo sapiens
aaaaggaaatgatttaaacctaattgtattggtggtaaattatgtatgtactattaagagatttttatactggtgtttcttcaggaagcttccagattttctcaaatgcttaaaggctctatctttttgtggkatagtaaggcctctttcataataagcataatctctttcatcaaaatggcctcataaaattccctcaagaccagcactatatggttttcatctcctccatttcatagaccctaatacagaaatttcaaacatttaaataattaaaaaaattaaatcgatcagaatattttacctttttctcatgaagcttgtttaggtgacaatagttttaatattttaatgaattaaagctttaattcgctggttttcaagctgaatttctatgatcataagttccataagagccatattttcattggtacttgtcatcattattaagaattcaagatgctgctcatagtgcctagaatttagtcaaagtatagttcttcttttgcagcagaatgtgagggga

SEQ ID NO: 849955 - DNA, 640 bp, Homo sapiens
acatctgcatttctacagcagcaggagactggtatgttagatgtggacccaaatagcacacaggtaggccatataacaacctgatacacacattgcccrggagcctgtgtgctcctgactaactctgcccatccccgctagcagccccaacagctgaggcaccctggtccaagttcatggctctgcagagctgcccatataaagctgaccacggaaaggaaaaaaagcagaaacaaagaagaacaatggacttttccagtccagtattcataaccatttagaccaaagatgacatttatatatttttaattcagaaaatatattctcttcccaaaggaaagaaataggggggtgcctagagaagacaggaggtgccctttcacagtctctttacagaattagaatctgagcacagcacaagcaaatacaacctcaaataaggcccctcaaagtccttcctagctggaacaagtttggagggcaagctgtccaaaaccgtcatcttatacttgtcttagagttgaaaatgtggtcattgaactccagtaccaagttaggtgacatatttacacatctgcagtttttaacaaccattctggcttcaaatattctgtgtagttgcttccaaaaacaaatattt

SEQ ID NO: 849956 - DNA, 639 bp, Homo sapiens
acagtgaaaacagataagttacagagtttgagaagatatttgtaacatatataagcaaccaaagacttgtatcaagaatatttaaggaatttytaaaaatcagcaagaaaaagtcagactacccaatagccagcgtgcctggcaatgcacagtggccggaccctggtgcttgcttgctcatgcacccctcaccactctgtgcctggcttgcccttggccggcgtgggatcagggccagtagctccagccgagctcagcctgccaggcccagtggtcagaacgctgggctcaagcaaaactccagcaaaggtgccaccaaggatcctgcaacacaagcactttggaaaacatattgaattcatctattaatactgcagctgtgcggcactacctagcaattcactcctaggatggaatgctccattctggcattcttaccactatacatgtatgaaaatgttcacagtagcactgttcataatagcctaaaacaagaaataattaaaatgtccaccaaacaatatgatggatacattttgatataatcacataatagatggtatgggttaaaccatgtccctcaaaatttttaggcaactcctaacccccagtacttcagaatgtgactgtatttagaga

SEQ ID NO: 849957 - DNA, 616 bp, Homo sapiens
atatgtcatgcaactttacatttttaaaaaattattcctgagctttacctatgtagcaaacacaatgcttatagatagtacttccttcaatcttcacagcaaccaggtgaggaaacttgtttttaatccgattttattaatgaggcaactgaagccagagaacttgaatatcttgccgaaggccacacacaagctcagcagtgagtgctcttcacaatggcatctgctgcccctcatgagatcaactgcacctcacagcaagaagctcttattttccaagtttgtgcattttgcataccaatcacaatttgaaccaaaatacttcatgcttcatttttgccaaagagtttaacacagtgcatgtcaactcctaaagagatgctgcacagactcatgcaaccaattacactaagagtaacaggtttgtgtaggatggtaaggcttagaactccttttaaatggtttatttttcaaacctgtakccctgatttagagcaagcattttgtaccacttgaaagtttttgattatacaacaaccaaagagttataaaatttgagctatagtagcatgacaggttaactccagccaagaggctcaggtgaaagaaagacatg

SEQ ID NO: 849958 - DNA, 586 bp, Homo sapiens
ttctattttaatagttcttgacacactgatgagaattgggrtgatgggttttgtggggtagttggtgtatcttcagtgtatctttttctttaaggtaaagcaaggccttttggcatcctgtccactcagggtggaagaagagactttggtcgtatatgtgggttgactggtatttctggatctctagggagctgatggaacagaagaatattttcatatgtattttaaaaatcagagtctgacccgtcattaaagtttattcctttttcatatgggatttgcagtaacttaagaatgtatatttgaggattgaggttgatttatttttgaaaaatttttccattatggaaatttccagatatgaaagtagaaagcatagtacaatgaacccctatgtatctatcacccagcttcaccagccatataacctttatttttagaaatttcttttttctcatgggaatgattgatttagcctttgccataaccagatgatggcattaaaacagtgagaagtttctgctctcttttgccattgttttaaaagatttttttaaatactccaattgttttatgagattattga

SEQ ID NO: 849959 - DNA, 506 bp, Homo sapiens
tttggatactccccttgaaaaatgcatrtatatatatatgtgcacatacacacacaattccactaaggcatggacctaatccatggatttcagttaagtctttgatttctagctatttcctaatgattggttttcgtatataggtcagtatgctaattccagtaggttttctgggaaaataaaatgaaaatgcttgctttcaaacaaacatttgatgttgacatttaccttgccccctttctcagatccaaaaccctttggcatccaaagatgccaggtgggaatcccataacctcttcagccttcaaccaacactgtacactgtagccaagctaggcttttctcctaaaattctgctttcacaaccattaccaaatccctgacacttcagctctgtcagcctgcccagttgttgtctgcgtgaccctgggctatagccgtgtttgtaccttgtccgtaatacccctccacggcacctttgctggccatttctttttaaacgcttg

SEQ ID NO: 849960 - DNA, 542 bp, Homo sapiens
ttctacaccctgcagagggtagaaatgattgaccttsaaatacccacgcccaaataccccaccttacaaattactgtattgtagtcaaatttgtagtgatgatttctacatatctcatttctaatttagagcacttggagaggtaactgaaataatcggtcaacttcttttaaggagaattatcaaataatgaaatgtttgttgaactgatatggtttggctgtgtccccacctaaatctcatcttgaattataagccccacaatccccacatgttgtgggggggtaattcaataatgggggctgtttcccatatgctgttctcaagatagtgagtgagttctcacaagctctgatggttttatgcactgtttttgtttgcgggaggtttgacaatttataccaggagtagggaaaggagttgaaggttaattgctcacccttctaagcttttaaagctaaaaacacttatttaggaactcagatgaggaggaatggggagctcttattatagaagtcctagcctgcactgactcatccatt

SEQ ID NO: 849961 - DNA, 388 bp, Homo sapiens
atataacaaatgggcaaatggataaataaattgtatccattcatgcaaaggaaacttattygggaaacaatatgaatgactcccaagggcattatgccaaatgaaacgctcaagtctcaaaaggttgtaggcagcatgattctatttataggacattctagaaaaggcaaaactttaggaccaagttcagtgatttccagtggctaggaggagggggaggattttattacaaagggacaacatgaaggaattttggggggtgtggaagtgctgtgtaccttcatttttaggttgggtacacttgtctacacttatattaaaactcatggaactgtacaccaaagaaagccaagtggactgcaggaagattaagaataaataaataaag

SEQ ID NO: 849962 - DNA, 469 bp, Homo sapiens
tactaaaaatacaaaaattaggtgggcatagtggcctgtaaccctattagggaggccaaggcaggaaaattgcttgaacctgggaggcagagcttkcaatgagctgagatctagccactgcactccagcatgggtgacagagagagatttcgtctcaaaataaataaataaatacataaaataaaataagaaaaaaaaagtcagattatcgattaactgtgacatggtggggaaaaggtcttggacattgggaagacagcagtatgtctaaaattttaaaaccaagagagtcctttttggatgctgcctcaatttaaaagggatttattatccaaacttaatatcagaataaccattttccctctgttgtttttagtaacagttgtattagggtataattcatataacataaaattatccttttaaagagtacaattcagtggtttttagtgttcagttgtgcatccat

SEQ ID NO: 849963 - DNA, 469 bp, Homo sapiens
tactaaaaatacaaaaattaggtgggcatagtggcctgtaaccctattagggaggccaaggcaggaaaattgcttgaacctgggaggcagagctttcaatgagctgagatctagccactgcactccagcatgggtgacagagagagatttcgtctcaaaataaataaataaatacataaaataaaataagaaaaaaaaagtcagattatcgattaactgtgacatggtggggaaaaggtcttggacattgggaagacagcagtatgtctaaaattttaaaaccaagagagtcctttttggatgctgcctcaatttaaaagggatttattatccaaacttartatcagaataaccattttccctctgttgtttttagtaacagttgtattagggtataattcatataacataaaattatccttttaaagagtacaattcagtggtttttagtgttcagttgtgcatccat

SEQ ID NO: 849964 - DNA, 664 bp, Homo sapiens
cgctttttgcttccacaagatatcacactggtccattacattgatgacatgctgactagatccagtgagtaagaagtagcaaacacactggaatcattggtgagacatttgcgtgccagaggatgggaaataaatctgactttcagggaccttctacctcggcaaaatttctaggggtccagtggtgtggagcctgttgagatattccttctaaggtgaaggataagttgctgcatttggcccctcctacaaccaagaaagaggtacaaagcctagtgggtctcattggattttggaggcaacacattcctcctttgggtgtgttactccaggccatttgtcaagtgacctgaaaggctgccagttttgagtggggtccaggagaaggctctgcaacaggtcctgtctgctgtgcaagctgctctgccacttgggccatatgacccagcagatcagatggtacttgaggtgtcactcgcagatagggatgttgtttggagcctttggcaggctcccataggtgagtcacagtggaggcctctaggattttggagcaaggccctgccatcttctgcagataactactmtccttttgagagacagctcttggcctattactgggctttggtggaaaccgaacgttagactatgggtcatcaagtta

SEQ ID NO: 849965 - DNA, 660 bp, Homo sapiens
gagttgagtatcaggtggctccggagagagaagaagccaaaagrgggttaagctggggccctggatggagaatcaggcaggaagaggcagaccaaaaaaaaagctggagaaaggcccaggaaagcagcgaggtgagcagtgccctgcagagctaagaggaggacggggcatgctctctggccacagtccctgctggccctacccgctgccttctaacctcctgacgggtctgtgctcacaacacactggtggttaaatattttgaacgtcgcccctggagatgggtatctcaagaaacataacatcaaccaattgttcccttctcttcttcaaacataagcaggcttctaggtgtgggcttactgctaaagcagattcctattggggggattggagttatcctcatgggcttcactttaactcagcccccagtaccttagggagtcaaagaagtttatagctgcaaggatgcttatagatcatcagtgcacacactctcccattaggggaactgaggcacagagcaaggaaagatttgcccaaggaatttcaggacagatctagaacaaaaaccagcgttcttcttcagatttacgagaggaggatgaccatttctaatcgttgtgtgctccctgttccctgcatttgcagagctagagg

SEQ ID NO: 849966 - DNA, 618 bp, Homo sapiens
aaaagtaatattctatgtaatcattttttttttttttgagacggagtcttgctctgtcacccatgctggagtgcagtggmgcaatctcggctcactgcaagctctgcctcccaggttcacgccattctcctgccttagcctccccagcagctgggagtacaggcgcctgccaccatgcccggctaatttttttgtatttttagtagagacggggtttcatcgcgttagccaggatggtctcgatctcctgacctcgtgatccactcacctcggcctcccaaaatgctggaattacaagcatgagccactgtgcccagccaatcatttatttaaatatttaattttttaaagtcaaaagtttgtttacatgaacatggtaaaaaccaaagtggtgcaaaaaggttataaaattaaaagtgcattttgctctcacctttggtccctatccatttgattgttcatctcagaggaaactcctgctcttggtcctatgtacctttctagaaataggtaagaagatatgcatatttaaacaaatatttatgatcattttgcataaatgctaacatgctttatacacttttttatcttgctttttggttgatgaaatagtcaatt

SEQ ID NO: 849967 - DNA, 643 bp, Homo sapiens
aataccacaacacacctgctagaatggccagaatctcaaacacygacaatgccagatgctggagaggatgtggagcaacaggaactcatattcattgttggagggaatgcaaaatgctacagtgactttggaagatagtttggcagtttttaaaaaaactaaacatattcttaccatacaatccagcagttatactcttctgtattttcccacatgaactaaaaacttaggtccacaaaaaaacctcacacaaatgtgtacagtagctttatttataattgccaaaacttggaaggcactaagatgtctttcagtaggtgagtaaataaactgtgacacatccagacaatggaatgttactcagcaataaaaaggaatgtgccagcaagccatgaaaagacatggagggaacttacatgcattttgctaagtgaaataagccagtctgaaaaggctgcatactatctgattccaactatataacatgctagaaaaggcaaagctaaggagacaataaaaggatcagtggttgacaggggttagggggagggaaagataaaaggcagcgtgcagaggatttttagggcattggaaccattctgtatgatactacgatggtggatacatgtcattgtacatttgt

SEQ ID NO: 849968 - DNA, 486 bp, Homo sapiens
aatagcttttatctatgaaaagacagtacaccaatagactgaatgctatgctctagagaagtaaaaggtgttctgaaaatggcagtttgtagagaaatgatcttaaggagggaaaaggatcaagatgtttccattggaagagatatcatatatttcaaattcaattatcagaaaacataaatacatagacaacactggaataatgctgtagttattttaatttggtggtgaaatcagattcttggatctgacagtatctttgagtctcaatagtttcttttcaattccatagatagacctaagggtagcgggaatggggtacatcctctgatcctgaggtttgctctccttgtttgttaaataatttcccccataaaagcaaaatgkaaaaggcgagggggaaaagggtgatccttatcctcttccattttttgaacaggatccataaatctacaggtttttattattttttttgagggtgcttaa

SEQ ID NO: 849969 - DNA, 551 bp, Homo sapiens
gcaaaataaaaacagtaaacagcttgtaaagaaaaatagaaaatatttctcttttgctgctcctttgaawccaccattattattagtgttcaggtaaagaaagtaacactttaattttgggaatggtggaatccttcataagtaaaataataaactttatctcagttgtatgacatcttatttagaaaagaagatttcttcagttcaaagtattataaaaaggttcatttttgcatgaaaagtgaaatttaaagttaaaaaattagcaatttgaactaacaaatcaccaattagctcattttagtatctttaacaaatccataatgatggaaaaatagaaaagatgttatttttccaaaaattgttcagattagctatgaattactatgcaaaccataaagcactctgagccttagagtcttcacctataaaatgagggaacatgattaaatgccctttaacctcccttccaatctaccaatttaggtagtagcattaccattttaaataatcctttaaagagtgagggtttcacctcaaagtattttcta

SEQ ID NO: 849970 - DNA, 523 bp, Homo sapiens
agtaccagttttggggagaaatgaattaattttgttctttccatcagtaatgcaactgaactggaattttccagaccatgctatcctcagtgttggatgttccatctcacaagaagatgaactattattatactcattagtgaactcagtagttctcttttacacaaatctcccttttgaatgaaatgtttcaacatgttataaatatatgggtaattaggtggatatgaatacatatatctatgaaaaaatatttaataagtaactctaaactgcaacatattttaagatattacatttttaaaactttagatccacaatggcaaaccactgggttctattcggttggtactggcactaatgggagtttatggaaattaaggaactgaagtaacttctaccaatggcaacagacactgaaacactaagtttttgtatgtggtttatagtcttaatataagactgatcytgcctaggatcattgtatttttcaaacattttaaggatactcttcacctactcc

SEQ ID NO: 849971 - DNA, 550 bp, Homo sapiens
caatccctaagcaatctgcatacaccattcctcctcttcctcccaaggacaatctatggggaaactctcatgggcagaatgtcacactgtagggcagaatgtcacactgtatggcagaatatcagcttaaaaggycaataaacttcacagtaaagcattctactcatccatggaaaataaattgctatttctgcttagtaaacaaaagaaagctaatttatgatgtttacattttgggtaaattttctcagaacctaaaagttaataatatataaatcatagcagtctgaccagttatcatgttttctaaaaaggttttttaaatgatgttaacaagaaatgagagctttaagcactaagggaaaccaaataaatatgaatcaaatgaaggaaatacaaagaagtcaaactaaggtgatgaggacacaaatgagttatgctatgaggagaatatctaagaataaagggtgctgccgtaaaaacccaaggaatgagccagtctgcaaaggctagaagcaatcaataattagcatgatgtaagaaagactga

SEQ ID NO: 849972 - DNA, 563 bp, Homo sapiens
aatttacttagaacaagatggccctgatttatctaytaaaacacaggaaatagattctaatgctatgatttggcaatgctcattgaagagcaggtagacagcagaaccacagtaatcagaggttgacatgaattaaaagcctacagcctcagcaaataaactaccggaaccagttcagcaatcaggcaactgcaattaactttgtaaaggagccaatgagaccttttaaaaagacacctccaaaattatcgtgatggccacaaatcttggagatctttctacacatccagctcctatgtgaagatcagaatatgccttatgaatttgtagcctccaaacaggctctgaggcagacctgtagcatctctgggaagatcatagcattctctgtaactaccaaagaaggaaagtgacttgaagctgaaaagcagatccattctgtcagcagttcattaagaggttcttggtcgaaacctgtggtctatgtgtagtttttcaaattgacccttccccatggagaatcatgggtgagtgtgtgtgtgtgtgtgtgtgtgtgtgtgtgt

SEQ ID NO: 849973 - DNA, 650 bp, Homo sapiens
ggctagcaagacacacaaacagttgaccaaagcctgaaaggaagcatgggacttagacagcagagatggggcaaaggccattggatgtctgtgaagtggcacctgttgctgggatagagcactctaggaaagtcatgaagaactagttggaacactcagctgaggttattaaatctgaggaaacatctgggtgatgattttctttggaaggtattttgtgctaaaaacttcatccttgattcctgtgctaatgtgtcattcatttctgtgagcaacctaataaaaatatattcatgttccaacttacaagagtactggaaatatatacatatgtatgtgtatttttccccaaaattaggattcacttacacttaaaatatcatactaaattgaggtaatcaaatctgtaatgtgactaacacttactgtgagaatgtttatcttcatattgaataaaatcttgcctactatcaactgtcagccactaattcttgttctgtcctctgctgatacactggaaaatatcaacaatttttctacacaacatcttttcatcatttcacaaatatctaccacatttatttttcatctcttytgtaaactaactaaacaaacaattatttcactatgttgttttatttctttctatg

SEQ ID NO: 849974 - DNA, 586 bp, Homo sapiens
tgagcatcatcagtaatgggacgaactgggattccacaccctgcgatgggaggcaacgagaacagtgccgcttctgcactatccctgcccaagatgcataactggaaaagtatcatgaagacacatcggataaactcacactgtgaggtgttctacaaaatagctgctcatgatcttccaaagtgtcaaggtcatgaaaatagtcaaggactgagaaactgtttcatgctacaggagactgaagagacatgacaactaagcacaatgattctaagcaggagtctttcaggactgaaaaaacgttatgaggctgttggtgaaacttgaatggggtttgagaattaaataatcatattgtatagatgttaacttcctgattttgatggttgcgttatggttatataggagaatatccttgcttgtaggaaatactcactaagtattcagggatcctaagccatcagactggtaacttatttccaaatatyttaaaaggaaaaaaatttctttgaattgtacttgcaactcttctttaagtttgtgaatattgcaaagtaaaatttaatttttaaatataagtacccaa

SEQ ID NO: 849975 - DNA, 644 bp, Homo sapiens
ggcagaacagggttgcgacatctttgcaaccratattagctatctaatgctacgatacaaattactccaaacctagtggcttcaaaaagcaatcattatttgtgatctcactgtgaatttgttttttaaaaaatatatttaccagtttattataaagaatattacagagaatacagatgaagagatgtacgaaagaagaggcacagagctttcctgcctttctcaggcacaccaccttccaggcatttccgcatgttcgactatcaagaagctctttaaaccttgtccttttgggtttttatggaggcttcaatatgtaggcatgactgattaaactatcggtcattggtaatcaaattaatcttcagcccccctttcctctccagaggttggagatggatagaaaattcagacaaggcctatgggaatcaatgctcactttctcatcatgtttgaagcctcaactggaagactcaaaggctggaggctggaattatctgaagactcattcactcacacattgatattgactgttgcctgggtttagctgaggctgtcagaatggtttctccacatggcttctccatgtgcactgagactcatcacaacatggtggataaatttttagaacaagcatcctcact

SEQ ID NO: 849976 - DNA, 601 bp, Homo sapiens
atacaagattaatatacacacatcagtagctcttctacacaccaacagggaccaagcagaaaatcaaatcaagaactcaatctcttttacaatagctgcaaaaaawaataaaataaaatacttaggaatatatctaaccaaggagttgaaagacctctacaaggaaaactacaaaacactgctgaaagaaatcatagatgacacgaccaaatggaaacacatcccatgctcatggatgggcataatcgatattgtgaaaatgaccatactgccaaaagcaatcaacaaattcaatacaattcccatcaaaataccaccattatcttcataaaattagaaaaaaaaattctaaatttcatatggaagcaaaaaagagcctgcatagccaaagcaagactaagcaaaaagaacaaatctggaggcatcacactatctgatttcaaactatactatgagaccatagtcaccaaaatggtgtggtactggtgtaaaaatagacacattggccaatggaaaagaatagagaacccagaaataatcccaaatgcttacagctaactgatctttgacaaagcaaacaaaaacatgaattggggaaagc

SEQ ID NO: 849977 - DNA, 639 bp, Homo sapiens
tacaatatctgtcagatttgagtagaggtgaacacagtggaggagaataaagagagagctgagttctgtctcagtgagcacgacaaaaggccgatgaacctgtcagagggcagaagtggaccccaaaggcttgttcccgcggactttgctggttgactgttctttgcattaatctggaatcatggcgcaccattactcttttcatgttgtgatattctcttcacattctcttccttgctcctcaatgccaaatgtgtgacttttcagaaacaaaatattgaggaatttaaagtgagcatgctgtagcaaccagtgagatgcatggaaaatcataagctgttgaaaaactgggattgggatttgttgctgggggcataaattttgtgtgtacatccaaagaatactccatgctctgagacttagaatatagtcatgttgtgtgaatttatgaattatattgagtagaaaatatatatatatagtcatttgacattaagagacaatgaatatataagtgtttgactggactggccaacatagtgaaacccgtctctgctaaaaatgcaagaattggccaggcrtggtggttggtgcctgtaagcccagctactcgggaggctgaggtgggagaatcgcttg

SEQ ID NO: 849978 - DNA, 453 bp, Homo sapiens
tgcctcatgttgaacttcccttatattcctgtcatgaattttaattgatgttttaatatactgctgtattcaactataaaattttgtatttaggattttttgaactgtgtgagattggcctatacttttattttttgttctttcttaactggttttgttttcaggcttatgcagacctggtaaataatttaatactcttggatcagtttcaatcatttatatttcttctcttcctatcactgatatttgtgtatccattttttcccccttatcatatttgccagggcttgtcactttgtaagtcttttcaactaattttttttaaaaatcaactttattttttgttgactatttaataatttcctctttcttaattcrtttttctgctttgagtattttttaacgttcttgaattgtaaaaagtgtgtttcttttatttttcatctttcctaa

SEQ ID NO: 849979 - DNA, 320 bp, Homo sapiens
cacacctggctaattttttattattattattattgtagagacagggtctcactttgtttcctgggctggtctcaaacttctggcttccagtgttatcctctcatcttggcctcccaaagtgttggggttatcagtgctaccacgcctggcccagttaatgtttttaaaatagatcaataggtcgggcrcagtgactcatgcttataatcctagcactttgggaggccaaggcaagccgatcacttgaggtcaggagttcgagaccagcctggccaacatgattaaaccctgtctctactaaaaatacaaaaattagctgg

SEQ ID NO: 849980 - DNA, 615 bp, Homo sapiens
tccatacatttaattccattccaattaaatcycaaatgtattttcttacttgcaatgttagctcactgggaattataaatagtcaagaatgcctaagaacatcttgataaatgcaattgattggggcaaaagcaaatttttttttttttttttttttttttttttgagacagagtattgctctgttgcccaggctggagtgcagtggtgtgatttcggctcactgcaacatttgcctcctggattcaagcaattctcctgcctcagcctcttgagtagttgggaatacaggcgtgtgccaccatgcccagctaaatttttttttttttggtattttttaaataaagacaggcttttgccatgttggccaggatggtctcaaactcctgagctcaagtgatctgcctgcctgggcctctcaaagtgctgggattacaggcataagctaccacacccggcagaggcaaaagcaacttctaaggtcagatattaaaatgcaagaagcaagagggtgatgcggtgttgtcactgctccattgcccacggtggaatcttggtttctagaacagtacctggtccacagaactactcgatacatattcattgaatgagcaag

SEQ ID NO: 849981 - DNA, 556 bp, Homo sapiens
acctgagaatgatggctgttatttaatgtgtttaaggtattttgattttgtaaaattctgattttagaatacrccccccttggggagaatcttctaagcgagaagttataaagagcccgtgggacatggtctgatctggtagagagagcctgaggaagacttgctcattccgagatttcatgttgatcagttaccttggtctgaaaatagcaaagtgctagaaatacctttcagagagagaagttacatgtccactgaggagggaaaacatgggaaaaggaagatgccaggtttctctatgagctctgtaatggggacagctaatataaattgtggattggtagggaagtaagaaaaaggaaaacacatgcaggttagagtgttttcaaagaaaaatctccacaagtcacagtgactgaataccatgtgtaatgaaagacagggactgtcaatgctgatggagtttcaagcctgcctaattggggaaatgctggtgttattgatgaaggaaaggtacagcatgctgagcccagtgtagatggaaggaaaaggatga

SEQ ID NO: 849982 - DNA, 646 bp, Homo sapiens
ctgtctgttctgtttattgtgatctacttgtttattctttcaccaacactacactgtcttgtttactgtacctttatagtaagtctcgaagctgggtagtgtcaatcctccaactttattgttgttctttggrattgtattggctattctgggtcttttgcctttcagtatatacactttagaatcagtttgttgatatgcacagaacaacttctggacttgtgattgggattgtatcaaatctttagataaagttggaaagaaatgaaatcttaacaatacggagtcttccctccatgaacatggaatatctctttatttatttagatcttctttgatttttttcatcagagttttgtagttttccgtggatatcctgtacatgttttgttaagtatttatacctacgtttttatttttttggcactaataaaaatggcattgtgtttttaatttcagatcccagttcttcattgctgggatatgtgaaagcaattgactctagtatcctgcaagcttcctataatcacttattagttccagtttttaaaatggattatttgggattttctatatggacaatcatattatctgtgaataaagaaattttttttgttttgttttgtttttacaatctgtatacctt

SEQ ID NO: 849983 - DNA, 561 bp, Homo sapiens
tatagctgtgggacttttgataaatacattctttgacctgtgttcttgcctgtaaagtggggatattatggggtggaggggggagracctatggtgaggattaaatgagagaaggcattaatgtccacatcctagcgcctaatgggaagttctccctggggagcaagtgtggatgcccgctgggaccagacgggctgggtgattataaggcaagagtggaggatggaggctgtggagagccaagtatgtcagctctagctgcctgtcaccatgtaggactaggtatcatggggttatccagtttaataagagaaggtggagatctcgccttttttcagtgcaattcttttatttttatacattgccgatttgtttgaatcgaagtccgccatctgattttgccagtttgcaacttctcgtaagcactcatcaaaaggtgttttatttcaggtcctcagtccttcatccgcaatcctgaaattcaaaaaaactcaaaaagtttttataactgatgaggcagcagaacttgacctgaagggagaaaaggctagtgacagtcct

SEQ ID NO: 849984 - DNA, 605 bp, Homo sapiens
aggggtcccattacaatcagaagcatatctctggtaaacacataaatggtggtaggttccctgaagagttaactggtagagtcccactgatcacctttcacttcctccttgatagtgaggtctccaggcttttcaccaaagcctctaatgcaatcccacagcaaccggctgtgctccctggtgaaggcaatgcattagtagtgtgaaaaaattgcagctcacaagccattccttgagcaactgtgctgacagcaacaggccccttctactgccacagggacaggtctcctagaagaatatccaattcctgaaaattagaataacccagttcacctcaaatgaatgaaaattgtcattctgtttggatttctgtggtcataagcccgaatattgtctgcagtcttgctgtttcaggcagttactgaggctaatagagctaggagagaggactgaatagcatctcagctactctgcaaaatgraacctgaaagagaggtgaaaaactgcacatgattttttctcttcctctggttgataatgacaacaaatcactatttatggtggacatcacaaagttgccttcctggatggtgggataaaagaca

SEQ ID NO: 849985 - DNA, 657 bp, Homo sapiens
gcatgcatgaactttgaaaacataatgctaagtgaatgaagcctgtcacaaaagactgcctatcacatattatatcactccatttatatgaaatgtccagaataggcaaatctacagagaaaggaagtataaattaatgatgtcttagggttggtggtatagaagatagggtgtgatagctaaagggtctggagatgtttggtgaggtgatgaaaatgctctaaaatgaactgtggtgttggttgcacacatccacaaacatactaaaatacattgaattgtgcagtttaaatgagtgaactgtgtagtatatgaattacatatcaatggaattattacaaaaatgaaaaaaatcattgaaaccagacatttttccatattgcgatgtgataactcagtcaacaaagatcctttatttttccaggatttttcttttttttggaggggagggttctttgtttttgctatgggttgtaattgtttgtttgcttagtaataactctgacgatttttaagacagtattttttggtcaygtgtggttgtgaatattctgtaactttttgtagcttttaaaaaatttatgttattaaaaatgttttggatatataatagttgtgcctattatagcatacatgtgatattttgatatgagcata

SEQ ID NO: 849986 - DNA, 619 bp, Homo sapiens
agtattaatgactgtggtcctggaacatgcatagtgagcaaacatacatgtaacagatgacccatgttcatcttggggtggagagttaacatttaaatgtacacaattaggccctatmcttcaaaaggtaaaacagggacacaaaggcatttgagtgtgcagcctctgtaaactggccagaaccagtccatggtcagtggtctcattatgaggaggaagtttctgaaatcagtctcttgtccaatcaaagctatagttatagctggtagaacaggagctgggagtcagttcagtgtctggtgaagcgacaaattgttttaatattgtttatctggaggccagtgattgtttagctgctagagaaaaagaaaaatattgtggcaattagaacatagtttcttctttaagtgtagggggagtgtgacctaacgcttgcctggcatagccataggttccatttataatttggcattttattgacagagtctgttttgttaatcttataatcactttaatgctgatcagttgtggctaaactcagaaagggaaggggtataaacaggcatgtctgacctcctttcccatcatggttggtaatttagtttttaagggtttattg

SEQ ID NO: 849987 - DNA, 619 bp, Homo sapiens
agtattaatgactgtggtcctggaacatgcatagtgagcaaacatacatgtaacagatgacccatgttcatcttggggtggagagttaacatttaaatgtacacaattaggccctatccttcaaaaggtaaaacagggacacaaaggcatttgagtgtgcagcctctgtaaactggccagaaccagtccatggtcagtggtctcattatgaggaggaagtttctgaaatcagtctcttgtccaatcaaagctatagttatagctggtagaacaggagctgggagtcagttcagtgtctggtgaagcgacaaattgttttaatattgtttatctggaggccagtgattgtttagctgctagagaaaaagaaaaatattgtggcaattagaacatagtttcttctttaagtgtagggggagtgtgacctaacgcttgcctggcatagccataggttccatttataatttggcattttattgacagagtctgttttgttaatcttataatcactttaatgctgatcagttgtgkctaaactcagaaagggaaggggtataaacaggcatgtctgacctcctttcccatcatggttggtaatttagtttttaagggtttattg

SEQ ID NO: 849988 - DNA, 613 bp, Homo sapiens
tgttgaatgaatgatggaaagagtctattcagggtattggtcctttcttttgttttagttatatacacatctccagttctgtcttgaggatagatcagtctcatatttctcaaagcatttcatgtgagaccttgaaaattgtaggcacataataagcgtattttttgaataaagaacttagaggtaagaaagcaggtaaagcatgaattggtcagtttgtggaaaaaatattttcggagttcccaccattccaaattttgtccaaataaatttttaaaatatttgtcccaagtaaacacagattctgaaatttttgcaggactcccacatcattagtttatatgaggagttctgcaaggaacacactgcctgctttttattttgttcctcagtatttgaaatggctaggcaggaatcatgcgacagagaaatgggaattaatatttgagaacttaaaactcacaagcaaggagaagaatcctgggagttatgaaatacaccacatcctcaygggtcatgaacaaaacaaaataaaacaaaataaaactacctttggtttgggttgagcaaagtctaaaaataaaaactcagacctaaaatttgattttttatt

SEQ ID NO: 849989 - DNA, 524 bp, Homo sapiens
ctggcaccacagggatccactgggagcgtggccagaggagcagggggtaaaacttcacagggagaaggaattctctagctgaactttgtaacartttgaatggggtgagaagcctcctggccagaactcaggtgtgggtgtgaattgggcatgaggacttcacaggtgggggaagaactaaagcccttttctcttgcagcagaagcagatagcctcaggcaagttttcaagcccattgccctctgcctggaaacagacttggggctgtcgggggtgggcacagcgggagtgagaccggcccttcaaattgcatgggagctgggtgagggctgtgaccgccagctttctctcacttccctgacaacctgcatgactcagcagaggcagccataatcctcctaggttcacagctccagtgacctgagaatctcacccccattccctatagcagcctcagcaagacccacccgaagtgtgagctcagacatgcctagccccacccccacctggtggtccttccttat

SEQ ID NO: 849990 - DNA, 542 bp, Homo sapiens
aatttgaaaatcataatgagaattatttgaaaattataaccagaaaatcaaagggtctcttaacaatccaaacatacttctctgatatatttgctcactcatcaaaatagggttttaatttcttcactcccctcaaatctccaacaccactattctcccccaacaaacacagacactcatgttctcagctaataatgttgcctcatagttgattgagaaagtggaaggtactaacaggaaactgcctccatttaccaccaccacagctgctgccatccctatatctgttcgcacagcttctggctttccctccattacaatgaagtgtccttccctatctagccctccaccgggccaaagaccccacctccctccaactttttataatatccattcatttcctggtgtgatggttaatattaggtgtcaacttgactrgggtgaggtacgcctagatggctggtgaagcattgtttccgggtgtgtctgtgagggtatagccagaggagactgacatttgagtcagtggactggaagaggaa

SEQ ID NO: 849991 - DNA, 592 bp, Homo sapiens
gtgcctcaaaagtgcaagtgaatggatttgagaaggagtctcgctctgtcacctaggctggagtgtggtggcgtgatctaggctcactgcaacctccccctcctgggttcaagtgattcccctgcctcagcctgccaagtagctgggattacagacgcctgccaccacgctcgggtaatttctgtatttttagtagagatggggcgaggctggtcttgaactcctgacctcaggtgatctgccggcctcaacctctcaaagtactggaattacaagtgtgagccactgagcccagccaagcggatggatttcaagggttttcatatatatgcttataatcatatttaaatgtattgatggggttacaaacttaaaaatgtcctatggcctcctatggccattttttttaagcaaatgaaacaccatattcaattttatgcatttggaagttatttttttttgtgaatgagttggttcaagccaaattcattcataggaaataattcctgagcccaggaagtccagtaggtctcrggtgaaatgttggcaggtggaggtgtttctagctagtatagaaccgctgatgagtgtg

SEQ ID NO: 849992 - DNA, 619 bp, Homo sapiens
tgtatatagtggggaggcgtgggaatrtgatcagggagagggaatttcagaggtattggtatttatgaaatcaggttaagacaagttaagctaaagtaacaaatagccctaataagtcaattgtttaaaataaagatttggttttcactcgtttcatgtttaatgtgggtttggcaggtgactgtgttgcacagtcactccgttttttggtgctgtcttgtaggagtttaccatagtaggaagaaaagaagattgaaaattgaacattggcaattaaatcctttcaccagtaaatgacatgtgacactcctacttttatttaccaaaagcaagtcatataacttgggagacaggaaataaattctctcttctaaaaggaggattatgtctatccttaaagagtagttacttctactactgtcatattttatttcttaaactttctttttaatcatataggttggaagactgagtgtgtgtgtttatgagtgtaacacatgcatatatttgatgtatggtctatttcataatgaaaaattggaagaaaacagtacagccacatgctgtcaatttttagttaaattatttattcagaagagttattcttcatactgattct

SEQ ID NO: 849993 - DNA, 635 bp, Homo sapiens
ctaagctgctccagctatggctgaagggtccaacatagagctctggctgtggcttcagagggtgmaagccccaaaccatggcagcttccatgtggtgttgagcctgtgagtacacacaagtcaagaactggggtttggtaaccttttcctagagttcagaagatgtatggaaacacctggatgaccaggcagaagcttgctgcaggagcaggttcctcatggagaacctctgctagggcagcacagaagggaaatgtggggttggaacccccaagcacagtccctactggagtaccacccagtggagctgtgagaagaaggccaccatcctccagaccccagaatggtagatccactgacagcttgcaccatgcacctggaaaagccacaagcactcaatgccagcccctgaaagcagctatgagggaggcggtaccctgcaaagccacagaggcagagctgcccaagaccatgggaacccacctcttgcatcagcatgacctggatgtgagacctggagtcaaaggaaatcattttggagctttaaaatttgactgccccgctggatttcagacttgcataggccctgtaacccctttgttttggccaatttcccccatttggaatggctgtat

SEQ ID NO: 849994 - DNA, 658 bp, Homo sapiens
ctttggaatcaggaagacttgggtgagtctccttgttcagtcatttaccatctgtgtgatcctggagaaggtatttaacctcttcaaatcttaagttgctagygtacagaataagaataatgctacttagctcacggggttgttgtgaggctaagtgagatcataggtatgaaagtcttaacacagtatgtgacacagctgatttttaaataaatttccttcattgtatgctcttaaatgtcagtagtctctatcaagcctggtggagctcacttcttaatgatactacgtaatctaaaaattcagctgtgatatttttaaaaaattatattccatggttatgatatcaccagtgttaaatttaaacttgcgatgacagcacagctgtgaactctttgcgtgtcgtatcctttggaagcagggcactgtgacagtcctgaagaaaatgctatgtttgccattctttgggtgcactcgttagattcttgaatttccagacagaaaaagctgattgtatttagctcatttactctgaagagcctacttcaaatcctttctttgaaagtagacagattatatataaatgtgtagtgttatttctctatattcctataagtgaactcagtagtctgatgttaataataatctgttttaaaac

SEQ ID NO: 849995 - DNA, 643 bp, Homo sapiens
gaagccttccctagcaagcaacatttgagccagggcttaaagaatgaggtagaatttgcctgttggaggatgagggctggatatggacatccaaacagaaaggacgtcttgaaaacgtgcaggaagttacaaaaatttacgctgtgtttggggaacattctaggtagggccgttgtggcagtgccctgtgtattggagtaaagacaagacaagaagtgaagcaggttgtgaagggaaacactcatttcctagaagcagaaagcaacagtatctcatttctttggtcacaagcaacagaaatggattttggccctttgagagaatggagactttgtaggaactatttggggcaccaacaggagggaagggaagaccgtcttcctcaggcactatcccactgtgtttgctacctttgctttgattcaaggtctcaggagacagaaactctgattgcctgaactcaggtgaaatgctcacatcttggctgtactaggtggtgaaaagaatgtctggtgggcagagcctccacctttcaacttctaaggtggacagtcagcacactagagggcaccaagactacaccaaaycaggaaaggtaattccccagaaggaaatcagggagcagctacttgatggacagacc

SEQ ID NO: 849996 - DNA, 512 bp, Homo sapiens
ttcaatggctcccaattacctttaatagaaaatccacattcacacggaatgtgagacccctcatgatccagcccttgctacctcttctgtctcatcttccaaaacatcccctgagtgctcatttcactctagccatacaactctcccaacaaccttgaaggcaccagcacacctctgttcacttgttcttctctttagaacccctttcccttttatatctgctcagctaactcctattcaaccttcaaaactcagttcaagtatccccttctccagaaagttcccaccagagtgactgtgtccatcctctgtgctttttttttgaagatttttgtagcataccaggggtactctcactctctaatagtagggatgacagtcaggaagtttttggtctgcataggacagaaagtccacccaaagaagactaaacaaaaagaaaatagtagattgatctcatataaaggccatttggatgtagactgggmtccagatgtgatacgatcagggtt

SEQ ID NO: 849997 - DNA, 645 bp, Homo sapiens
cttggggtaagtctccaggacattggactgggcaaagatttctttaataataccacacaaggacacgcaactaaagcaaaaccggacaaatagaataacatcaagtgaaaaagcttctgcaaagcaaaggacacaatcaagaaagtgaagaaacaacccacagaatgggagaaaatatttgaaaattacccatctgacaagggacaaaaaaccagaatatataaggagctcaaacaactctatgggaaaaatatctaataatctgatttaaaactggacagaacatcttaaccggtatttctcagaagaagagatacaaatggcaaacagacatatgaaaaggtgcttaacataattgaccatcagcgaaatgcaaatcaaaactgcaataagatatcatcacattcccgttaaactggcatttatacaaaattcaagcaataacaaatgttggagaggatgtagagaaaaggaaattcttgtatactgttggtgggaatgtaaattagtacaaccactatgaagaatagtttagagkttcctcacaagactaaaaatagacctaccacatgattcagtaattccactactaggcatataaccccccaaaaaggaaaacggtatatcaaagagatgtctgcactc

SEQ ID NO: 849998 - DNA, 642 bp, Homo sapiens
gactactcctacatgatttgtgtatcttatatttttacctctaagcataaatttccaggaaagctatgtatgaggagacaagccctttttrcatgctaatttttaatatatcatttgaaaagccccatttgtgtcattgggaaaaaattgctatttgactttaataattgacattttctaacaggaaagacaaagtcctattcataaaaccattatattttgtaatagtttaataaaatacatgcatacacaaaatattttagaaacactatgcgatcaagttctaagaggttaagtttattttcatatgctttttatgaatctactaatttaaggtatacttggaattgttgaaaataaccctgtgaatctacaaattatgttagttaaactaggtcaggcaatacaattccatttggacataaatagacataacagaaattatgctgaagtcacttaaatggtattctctttatctttagtgcagcagggaattcaatacaagtagagatgattgacatttttttctaacctctctgtcctttcctcatgaaaatgcttagctgctcttgggaagcacagctgttggacaaagcacagggtccaaggctgtgcctttgggagggctaactgagaaattta

SEQ ID NO: 849999 - DNA, 521 bp, Homo sapiens
ctctcatgtctctgcctgataagaccttgtccatccttcaagccaatcttaactcttccacgaagcctttgctgaacscttccaccagatgtgcccctacctgcctgtgaatgcctctcctagcatagaggttgtatttctctttgggcaggtatctttcctatacctcaaactgcagttctgttattttccctacaggcttggagctctttgaaggtaacatatgcattcaacattgttttattctctgcatcacctagcaccatgtaatatgttggggtaacaaaaaagatggagttggaggtgtcagagccacagccattactgtggcacagtagggtaagttcaaactaagaaaagtacacactctgcccaggctgaagtcctcatcgtatttcaaatgtcaatcccaactcacaatataaattggatggattctccagcaagtctttccttataagataccagaaaaacagtagactataagaggaatatgatttgtaggcctatcccaaaatacc

SEQ ID NO: 850000 - DNA, 521 bp, Homo sapiens
ctctcatgtctctgcctgataagaccttgtccatccttcaagccaatcttaactcttccacgaagcctttgctgaacgcttccaccagatgtgcccctacctgcctgtgaatgcctctcctagcatagaggttgtatttctctttgggcaggtatctttcctatacctcaaactgcagttctgttattttccctacaggcttggagctctttgaaggtaacatatgcattcaacattgttttattctctgcatcacctagcaccatgtaatatgttggggtaacaaaaaagatggagttggaggtgtcagagccacagccattactgtggcacagtagggtaagttcaaactaagaaaagtacacactctgcccaggctgaagtcctcatcgtatttcaaatgtcaatcccaactcacaatataaattggatggwttctccagcaagtctttccttataagataccagaaaaacagtagactataagaggaatatgatttgtaggcctatcccaaaatacc

SEQ ID NO: 850001 - DNA, 502 bp, Homo sapiens
ctcaaaacattttatagacttaaccaacgtgagctttgaaccagcaatgggtgtaacagatacggaaacactgggtcccctcacttttgcagttgcggtggccaggaaktaattttgcttccttaaacttgaggctttggagtggtgtaatgaacactaccagacagctccaggagaatgcttcttctaatagttcttccaatattcaaattgccacaggaggcgtacttccataactgctccaggtggtgaggacatgcccacatacttgcattctgaggactgcttgaccccagtcctatggcagtcccattatttccagttccataatccaccaacatgtaaagaaggcagaccaagcagcatccagattacattttagtttgctgtacaaattctaatccaaacaaagtcttgaagcatcataacttcagtgttcaacaatattgactcctgctcttgacccaatgtgacttgctgagagacaggaggcctaacaaac

SEQ ID NO: 850002 - DNA, 645 bp, Homo sapiens
tttttcctgcagggttttgtgatgctttgtaagcgtgttattwgtggatcctttctcataaaggattgccatcaagaagaggtcatttgccactcttcgcacgtctttcttttttttttttgtgaggaccaaatgatttttattcatattcgtctggtttatctacccaaagtgttcaggacagtgttcagcacatattaagcttgatatagcagttatctatgatgatgatggtaacgatgactctgtatagtcactgtgtttctgaggtcttgtttggtaatcaagaatgtgtttagaactatctctttattagacaaggtaataaaccaaaagtttccaacttcctgtacatgttgaaagttttgaataaagatccttggatacaaaacatggcccacatggctcaaaattaattctgtgacataatattattctgaagtcatacttattttgaaagcctaaaggtttttcttttttatggctataaaaatatcaccaagctagacattttaattctgttgagatatacaaatagaattaccgcagcagcccacacattctatgatttctaaacatttaaacatcaatggttttgggaagttgctgttgtccttaacagttcattaaaagttcagatgcctt

SEQ ID NO: 850003 - DNA, 611 bp, Homo sapiens
ttcagatcctgtttcactgttcacccgagtctttagctgatttagctgagccagagcattcctgtgtgctaagkagtgatcttaatccccccgacagagatagaaagggtctgatagataaactagatactgtgagaataaccacatccactggtccggtacacacctgcttattaaactatgcaaacgtttgagctacagaacgcacagaaagcccagatgccttcaggaaacaggaactcattctgcccaaggggctgaagcaggaaaagctctctacttccagggcacttttgagttgggctttgaagaattagtaggagttccccattgagtcggccacgaggcttaggaaataaaccatggtcagaggaaattgaaatgaggaggctgagagtcacacagagagtacactcccagcccctacaggaaccacagcaagaatgttcgttaaaaagaaggaggagctaggtttggtggtgctgtacctgtagtaccagctactcaggagactgaggcagggagactgctgcttaagcccaggagttcaaggccagcccggacaacatagcgagaccctgtctctaaaagataaaaataaaaaaagaagg

SEQ ID NO: 850004 - DNA, 626 bp, Homo sapiens
tgcttatctgtattttgcttgtttgttcatatttctgtggagtctgcttccaccycaggcctctgtttgttttatgtaaatggtaacattacatcctcactcccagggccagcaccatgccttgtaagatacatgcactcaataaatacttgttggatggaaagatggatggatggatggatgggtggtggatgaatgaatagtaaaaatatttccaaataaggtactaagatcttccaaagaacagtgctattttatgttatttctgttattttctattatttctgcctgttacaggttgagcatccctgatccaaaaatctgaaatccaaaataatccaaaatctgaaacgttttgagtgccaacatgacattcaaaggaaatgctcattggaggattttggaatagggatgttcaaccaacacaatattctgcaaatattccaaaatctgaaaaaatccaaactgaaacatttctggtcccaagcattttggatcggagatacttaacctttatttctatttcagcactgtgtctcctcttttcaggactgcctaaaggagagcctttgattgggaaaaaaaaatgtaagtaaatatgagaaatagactcaaagaggacatca

SEQ ID NO: 850005 - DNA, 633 bp, Homo sapiens
agatccttgctgagaacctcttacaaaaaacttaaatgttaatattaccctgatactctgggtgcagaatttctgtctggcaattttatatactgccagaggaacrggcacattcaacaaaatgtgaaattaacataagctaggaaaatgtgcttaacaaggaaagatttcacaatagccacttaggagttattaataattccaattccaaagaaagcatagactaagaaacaaataaactctatttgcaaagttttatataggcaagttcaccaaagtatgaagccatatgctataccaattacacatttctacatcggagagagaatttataaatcctggaaaatctccattgagttattgttagtgtttaacctgaatgtaacgtccaatgtagcaaatctatggatcttgatcacattttcctgctttgattttaaggtttatgcttttggtactttgatacacacaagcccatgggtaaggctgcctttttgcacactcaatgtcttcttcttcctatttctgcagtgcacaatctcaccagattaagcaggactggctgctctctcctcccactgccatcgctactgggactgacagcccagctccccacatttcctattataaatc

SEQ ID NO: 850006 - DNA, 404 bp, Homo sapiens
gctaatgcacccccatagcaactgccttttctttttactctgtccctttttgcttgctgctgaatttgggctctttgactattatttacaattctaagacaaagttccgtatagtatcctccaataatctttctcgaggaggagtaaagttggcctgatttaagcttggcgtctgtccaccaggccaatgctgttaacaagcttcccccatgtatgaccatcaatatcccatctgctattttaacttctgcttgttcatgtctacctggactctaaaaaacaaacaacaaaaatacccacaatggatctgacttgtttttccttctgaataattcaagagagasttaaactaatgttcttaattggtattttctcacactaaaaaagtatgctgatatatcatt

SEQ ID NO: 850007 - DNA, 577 bp, Homo sapiens
aggcgtgtatgtaccggcttttatggccccttaccaggatccggacttaagggacaactgtaggattcgtgtggctcatctcacttccagrcacaaagaagccacaccagatatcccagataatgccctcccagtgactcctctcagaaggccccgtgcctcctccccagtgccgagcctcctcagttccccaattctgaagtggctcccatccaaggttaccaaacacccttctcccttatccaactaaacccagcctgtaaccactgctgcccaaggaagtaagtccaaccaataccaccaagagtaggtccccatatcagcccctaaaactgagcctgtgtccattttgagaggtagctgatggagatgtggggacaaccagtatatgtgcctttttctaagtctgatttgactttacgcaaagagaaatttggtgagttttcagaggactcagggaagtttgtagaatagtttgttaagttgaccatgtcctttgacttaacttgacatgagttacaaatattattgtccacctgtactctactttagaggagaaaaagggttctgggaactg

SEQ ID NO: 850008 - DNA, 577 bp, Homo sapiens
aggcgtgtatgtaccggcttttatggccccttaccaggatccggacttaagggacaactgtaggattcgtgtggctcatctcacttccaggcacaaagaagccacaccagatatcccagataatgccctcccagtgactcctctcagaaggccccgtgcctcctccccagtgccgagcctcctcagttccccaattctgaagtggctcccatccaaggttaccaaacacccttctcccttatccaactaaacccagcctgtaaccactgctgcccaaggaagtaagtccaaccaataccaccaagagtaggtccccatatcagcccctaaaactgagcctgtgtccattttgagaggtagctgatggagatgtggggacaaccagtatatgtgcctttttctaagtctgatttgactttacgcaaagagaaatttggtgagttttcagaggactcagggaagtttgtagaatagtttrttaagttgaccatgtcctttgacttaacttgacatgagttacaaatattattgtccacctgtactctactttagaggagaaaaagggttctgggaactg

SEQ ID NO: 850009 - DNA, 215 bp, Homo sapiens
atggcacaatcattctataacgatcagttttcagaaaaagaatttgactggaatttcataaaagaaaacagcrctggaagaaaaatgtagtcagggcaaaaggaggctgagtctcctggatttcatcttgaaaaataaaaaatatagtgctttccccaaaaaactactatatccagaagcatttgtaggtaatgtgcgtatgttgaggaatgaga

SEQ ID NO: 850010 - DNA, 538 bp, Homo sapiens
ctgttgtgaaagcaaattcctataaatcaaagtgggtgattattttgcccatgttctgaatgcgttgagaacaaatattaaaacgtttgatagccctgcctatgaaaaatgtggctcaaaaaagtgctgcctaaaattttcttcaagttaattagatactggttgtacagttttcatgatattataataacaggtacatttcctgctggagggaagtataaaccagtacaaattaattctgtgaaaatgtgaacaagctagctgacaacaaagttgtagcactcatcaaaagaaatagcactgacatgtaaagaaagtgtagaatattaaaatagtagtacaaggcaaatgaatccattaccatatgaagtcttttttctattatgttctagaagtttcttagatatgatttttcataagaatatattcaaaggtatttataccaatgcagcatgctgctttatgtggctraaacttaatcatgatctctgctcacatacttatcaatctcaagtgagttggtttccattttgaaagt

SEQ ID NO: 850011 - DNA, 650 bp, Homo sapiens
gtcatcctctcctcccccggatattaggaacaatatcacagaagggttgtacactctctgcgatattgggagtaatatcattttcgcctcctmtgaatactaggagcaatatccccgggcagatgtacacccactgttatattgggagtcaggtcatactctatcccctggatattaagagcaatatcacaaagtgggtgtacacccacggagatactgagagcaatatcatgctctcccaccctggatattaggaacaatatcacaggtgggtgtacatcccctgcagggcaaagaataatattatcttcccttcctttagctattgagaacaatatcacatgcaggggggctacaccccctgcactattgtgagtaatatcgttctctcttattctggatagtaggaaaaatatcacaggcagagtgtacaacctctgtgatattgagagtaatatcatcctctcccaacgtggattttaggaaccatatcacaagaggcgtgtacacttcttcgatattggtagcaatatcatgctctcctccctggatataagaaacaatatgacgggtgggtggacacccccgcgatatggggagtaatatccctacctggatattaggatccacggtggacacacagcgtgatt

SEQ ID NO: 850012 - DNA, 624 bp, Homo sapiens
cagccagtaaaggagctgtgacgcgttctcaacgccacgactgccttgagcaaaaggagggaggtcttgcgggaaagtgttttcagctcacttctcctacagggaatgagccctctcgtttatcgcrgacaccgaggaaacgcagcgatgggcttcggggctgcagtcagcctccctgcccacccagatcctctggcagcctcgggcgctcacccacttcgtttctcctccgcctttgccgccgctacagcaggtgcacaccccaccacgtccctgcttccctctcgagctcttttcgtaggtggtcctcgttcttctctccgtctgtcgtttcttgagtgtcagaactggaaccacagcatccccaagatgaaatccatgctgggttttgcgaccacagtgctggcccagtcaccggcgagggtaaggatgggcagcgacccacgctcctgggtcttcatttctaagagttcggaattccactttctcacctcctcacctggacctaaatcccctgaggcggtactgacccttctgttttagtatccatctacgttactcttgatggagagtacagtccttgaagaagaggaaaataaatttgagaagggagaattaaaaaac

SEQ ID NO: 850013 - DNA, 531 bp, Homo sapiens
aacatttcaaaataattttaacggagtttggatggttttaggtttgcatgcctcagtgattttgaggagtgtattcagtaacaaggccagatgctattttgaaaaggtatcttcrtgtcacgtgatactgattattatttgttcttattcaagtattgtcatatcaagtgtgtactcttaatagataataatattgcatttgctgtcaagtatgcttgctctctttttaaaatctccttttttatagatgtctatatgaagttaatagcttcagcaaagcaaatttgttatgcagatagagttagcaacattaacgtaaatggtaaatccaaatatctttgtattttttacaataaattagatcatttaatatatgcatcacactgttagatgttagtttaataatttgcaaataattgtaaacagtgtcttagggtattttacatgggcttgtgattcatattgaaggccaaattaaatggggcttttgaactttcaattttagtttgtctcagcaaggcagttaagcat

SEQ ID NO: 850014 - DNA, 577 bp, Homo sapiens
gtgatagttctactggagcaaattaacacatttcctggcatttttagatgaaactattgacctggaaaatggattttgttcaattctaattctaatgcgtaattacaattattagcaaatttatttwttttttatttttttattttttagactgagtattgctctgtcacccaggctggagtgcaatggcgccatcttagctcactgcaacctgcgtttcccgggttcaagtgattctcctttctcagcctcctgagtaactggtggtatctgccaccatgcccggctaattttttttgtgtgtttttagtagaggtggggtttccccatgttggccaggctggatttgaactcctgacctcaagtgatccacctgccttagcctcccaatggtagggagaatagtatcccttcactgccttgactttgtgctatgctgactctcctgatatctattatcttacagtctggcagagcttggggatcttgatatatcacagaacatcatgctggtttgttatatacgtgaccttatgctaatttgatttggtaagcaggatgtaaaaagtggcctaca

SEQ ID NO: 850015 - DNA, 577 bp, Homo sapiens
gtgatagttctactggagcaaattaacacatttcctggcatttttagatgaaactattgacctggaaaatggattttgttcaattctaattctaatgcgtaattacaattattagcaaatttatttattttttatttttttattttttagactgagtattgctctgtcacccaggctggagtgcaatggcgccatcttagctcactgcaacctgcgtttcccgggttcaagtgattctcctttctcagcctcctgagtaactggtggtatctgccaccatgcccggctaattttttttgtgtgtttttagtagaggtggggtttccccatgttggccaggctggatttgaactcctgacctcaagtgatccacctgccttagcctcccaatggtagggagaatagtatcccttcactgccttgactttgtgctatgctgactctcctgatatctattatcttacagtytggcagagcttggggatcttgatatatcacagaacatcatgctggtttgttatatacgtgaccttatgctaatttgatttggtaagcaggatgtaaaaagtggcctaca

SEQ ID NO: 850016 - DNA, 323 bp, Homo sapiens
ttaatgtagtttcctatgagaaacaagtgaattaaagagttaaaaattaatcgtgttacagatgagcttgtttaattgctgcattccttctttttctgtagtgactttatatgagcactgagaggcagaaatggtgatgagggttgagaatttgcggttgttttcttcccaactaacttgtaaatttagaatgacctaaatttaacgacaacagcwgcaaactctaatctgagtactatattataatattaactgctgaatgaaactagacattatgtcaacgtaagagcaacattttcagggaagggtgaggaatttggact

SEQ ID NO: 850017 - DNA, 584 bp, Homo sapiens
cagagcagtttttcctcaagacaggaaattccggtctacctgagtcagtgcaaaaaggaacttttctctgctttaacccttacaacaaattaacctggattaaccctgatcttaaccaatcagctttttgtctattgttttgtttaattgttctcattttacagaagctactgttcttccattgtctgtggaagctctcatcctattttgtagaatgcaggctgccctgattcatgacttacaaatagaagccaattacatctataactaaatttgttctaattttgtcttttaaaaaagttatcgtcataggccaggcacagtggctcacacctaaaatcccagcactttggaaggtcaaggcaggcagattgctttaacccaggagtttgagaccagcctgggcaacatggtgaaacaaagcttctacaaaaaataaccagatatgttggcatgygcctgtaatcccagctactccaaagactgaggtggaagaatcacttgagcccaggaggtcaaggctgcagtgagccatgatcactacagcctgggcaacagggcaagactctgtctcaataaaacaa

SEQ ID NO: 850018 - DNA, 608 bp, Homo sapiens
gcagatattgaataagctattgcaatgaaaaaaataaaagtatgccctagtgagtaaaaaatgtaagctgatgaaatataatacaattaatatgaaaactaaatatcaagatggaaggtttgctagttcactgtggacaatagatcatgtacatttttctagtaaatagaaatacttggcttccattcactagaagtccaacatcatctctttaaatttaagttcgattaagcaatctattactaccaatatttaaagtagtaattcacaaagtgtatctgcttattaaagtcccatgattatctacatttaagagttaatgctgcatatcacaccccttggggacgccatacattaacatatttagttctgataggactgtttacttgtctcaatcctgattttccaaagtcatttaatcacaaaattatgtaggcaatgtcatatgatcaggaaaaaaaatgttctgtgaacccyaccctgcaaagggtgatctaaaaaatgtcagagattcgaaaatgtttcaactgtctttagaacaaagcaataatctcctgtggattgcaatacttcctttactgagaatttggaaagttttttgtagattt

SEQ ID NO: 850019 - DNA, 600 bp, Homo sapiens
aagaaaataataaacaagaccttgcttgcatggaaaattcattgcctattgtaggaaaagtcagggatgtcattacayagagcaaagaaaataacagaggttaatcaatgttactgctagcttgctcttatatatacttattttcatttctgatgcttttttcctctcaagggtaaaaaaacaaacatcaaacctctataaatctctcatgcagggcacccagctttctgcagctctgtccttctttggtttgtaatccacacttttgaagcccttctaagtgcattcatagacaaggccatctctccccttggcctctgactgtggggcagggggtaaaaagtgggaggtgggttatatgcttctagttgggtaaatgctaagcgtttttatgtgggttgcattttatttttgctttctaacaaacataattgaacattcagaaagggtaagtaactttccaaaagtttcacagatactgaaagataagtcagggttcatactttggtctgtctgatcacaagccagactaagatttgaacttctatgagactgtttcctcaaatttaaaatcagaatcatgttatctaattcactggc

SEQ ID NO: 850020 - DNA, 583 bp, Homo sapiens
ctaaagtagagcttaaattagtgatamttttcaatatcagttttgaggtatgatccatcaatgaataacattgaatcagagttcacaatgagagccagtctctcatcaatctgagtgaggtacagaaactcccctgacttataaccatcatgaggttcccttcttctggcagggggagaagagtggcagtttaaggaattgcatcagtgaatagtaaagcgagagagagggagtaaaactctcataacaagttgatcagctggttgaaaagtattgcatgctctttgtcagtggttatgtctacactggccagggaatcatgatgtgaggtggggagcctagaaatagtttaaaagaagcaccaacaaatgttgcagtggaagctgttgccttaagacaagggctataagcctttgcagctgggtcaagggtaaggatatggaaaatgatgaatttttgatggtttccatgacattgagttaaaaacaaaaaagcttgtacaagttatccatgcacaattagacaaaatggcatattgtagtcaggggtgcctaattatgaaagagagtgcctaactaccaaa

SEQ ID NO: 850021 - DNA, 648 bp, Homo sapiens
atactgttttattaaaagcataaaggttacagttttgcaaargcttcactttacatgaattttcagtgaaataaaaatgtttttaaccacttatactataaatctgtaatatgcttgcattctgcaagagctaataaatctattaatccattgacctgaaaaaggtttaaatgccccaaaattatcagcattaatggttctgattattttctccatgaatttgcactgtgtacaattattatccaaagtatgtgaagtgatgattctttatcgagcttatattaaacatgatacattaaaatatattaaatgctagagtatctgtatcataaaatacattaaaatactgtaccagaatatctagaaagaaaggacttatgaagtagacctgcatgcccttctctctcatggcagagtttgggtgatgcatcaaaggaagaaagaaagcatattatcttgtctaattgccttgtaaacattataatggcagctctcctggcaaacaaagtatgtgaccttggctagcaagagagaactatgaaatacatatagtaaaatatagctgcctatctagaatcacctgtggtaaacagacctggaatctttaggtttacaggggatggctccaaggaaaatgtcacataaact

SEQ ID NO: 850022 - DNA, 296 bp, Homo sapiens
tctcataccaaggtctgcttttaacatggcagagatattccatatgtcagggttactkagatttaataccagctcatcattcttttgacttttccagatggcaggcttttatcatagatattttttctagatatctacaattgtagctacatggagtaaagtgcaattaactgaaattactagcaattttgtgtttctgatttaaaggcattttgtttattctttttaagtactccaggcccctgctcacactcatttgttgaattcagtaactaaccaactcttctgaaaatggg

SEQ ID NO: 850023 - DNA, 621 bp, Homo sapiens
aaaatcctgcgtcactttggaagcagtcttcctatcctagaatgccagagggcaagcatctgaaagatctggaaggatgaggcagcaaaggccaagatgtgaatgtacactgcccctgtcagaggtgatcgaaccagagtgattccatcttgaataggggctgggtaaaataaggctgagacctgtgaggctgcattcccactagcttaggcattctaagtcaggatgagatagaaagtccgcacaagatacaggtcacaaagaccttgctgataaaacaggatgcagtaaaggagccagccaaaaccaagatggtgacgaaagtgacctctggtcatcctcactgctcattatatgctaattataatgtatttccatgctaaatgacactcctgccagtgccaggacagtctacaaatgccatggcaacatcaggaagttaccctatagggtctaaaaagggtaggaaccctcagttgcaggaattgcccacccctttcccggaaaactcatgaataatccacsctttgtttagcatatgatcaagaaataactgtaagtatagtcagtcgagcagctcctgccgctgctctgcctatggagtaaccattctttcattcc

SEQ ID NO: 850024 - DNA, 518 bp, Homo sapiens
agtgtggcatgtcatcattgccactcactgacccacacactcatggttcatagcctgagaaatagtttgcaaaggcatatttaccttcattgaaaccttagaaaacatttataaaggcagttcaaaaatcaaccttaaaatatgccataaaaagacatagagaggtaagaagatactcatgaaatcagtcattgtctcaaacatgaataattttagagaaagtggattgggtccttctttccctggttctcttccttttttctattctcttctgtgagcaataatccttttgtctggcttcttcattatttcaaaggagaaagtacaatacgagcatgcattcacctatactgtcaattccagaaaaaaatagcagagttaaatataaatggaccttagtcatatttaaccattgctctccttgacaatccaaagcttaataaagtacatctctttccayttagaaattaatatattcatactcatactattaacctactaaaataaaaaagtagatg

SEQ ID NO: 850025 - DNA, 602 bp, Homo sapiens
acataggtataaaatgttgaacagcattagagattaaccctgtgaggtaggggagataaagaaaggtttagtggtggtacaattagctgaggagtcaagagaaatagaaaacaagaaatcttctattttgccttctttggatcatgaatccattgttatgttttatttttattaaacaattatttcccatgctggaaatgtgaaagagttgagccatcctaaggaacttaaggtgtgacaatttacagagaagaatagttgtaacattgctcatttactctgagtataaacatgaaaaatatttttaaaaactacagtgaaataatttattccacagagaagtcatggagctctgttacacatcatattgtatactaatagctttgggtgggtggtcttcagttgatagcacagaaatggagtacgaatttgcagggaaatgacaccaattgaattaggcttcagtttaccagctactgattcctattaacagggcattttgatgtgagtctccactaagcaygtgagttagaaaatagctctaaagaccatccttgatggatcattactttgagatgcaaaccccagattgcattattaaa

SEQ ID NO: 850026 - DNA, 602 bp, Homo sapiens
acataggtataaaatgttgaacagcattagagattaaccctgtgaggtaggggagataaagaaaggtttagtggtggtacaattagctgaggagtcaagagaaatagaaaacaagaaatcttctattttgccttctttggatcatgaatccattgttatgttttatttttattaaacaattatttcccatgctggaaatgtgaaagagttgagccatcctaaggaacttaaggtgtgacaatttacagagaagaatagttgtaacattgctcatttactctgagtataaacatgaaaaatatttttaaaaactacagtgaaataatttattccacagagaagtcatggagctctgttacacatcatattgtatactaatagctttgggtgggtggtcttcagttgatagcacagaaatggagtacgaatttgcagggaaatgacaccaattgaattaggcttcagtttaccagctactgattcctattaacagggcattttgatgtgagtctccactaagcacgtgagttagaaaatagctctaaagaccatccttgatggatcattactttgagatrcaaaccccagattgcattattaaa

SEQ ID NO: 850027 - DNA, 524 bp, Homo sapiens
acctgggcctcccaaagtgctgggattataggcgtgaagccactgtgcctggccaagaatcaacttactgataaacacaacaagacagctgaatcgcaaataatagtatgctgagggaaagaagcttttaacaaatgcctacctgcctgccctccttccttttcttcttttatgtttttaacctggcttaattttcttggcttcattattttaagcaatttttgcagtgttgaaaaatttgcaagtaagttttcagaaacagttaacttcaaaatcctatacatgctatacatgaagacagtaaaaacatggatggaaagaaataatcagtttatttacattttctgtttatatgataagtagtaatttagctgaggttgacaattcatttaaatgagataaaagtcatttacattgtctctgtggctgttttcacgatacaaagggatgcaaakgtagggtgttactgagcaaacaatgggcttgctgcctaatgtacatggaggccaagaccatggcactgg

SEQ ID NO: 850028 - DNA, 688 bp, Homo sapiens
aaacacaacaagacagctgaatcgcaaataatagtatgctgagggaaagaagcttttaacaaatgcctacctgcctgccctccttccttttcttcttttatgtttttaacctggcttaattttcttggcttcattattttaagcaatttttgcagtgttgaaaaatttgcaagtaagttttcagaaacagttaacttcaaaatcctatacatgctatacatgaagacagtaaaaacatggatggaaagaaataatcagtttatttacattttctgtttatatgataagtagtaatttagctgaggttgacaattcatttaaatgagataaaagtcatttacattgtctctgtggctgttttcacgatacaaagggatgcaaatgtagggtgttactgagcaaacaatgggcttgctgcctaatgtacatggaggccaagaccatggcactggcttttgaggaaaaaaaagcttcattgcaagtggactggtaaggagacaggaggaagtgctccaatatatcacccccagctggtgtttgggtagggttttataagcatagggtaatgaggtgtgatctgattgaattctgcaatgagatgatkccaggaggcatgatctgattcgatcccacaatgggctgatgccagagctcaatttgattggatcctggatccttccatactgcg

SEQ ID NO: 850029 - DNA, 562 bp, Homo sapiens
aacaagtagtctctttcaaaaagacaagatacaaacgagtagaaaaaaatccattctcttatctcatgatggttagattatttaagagttgaagtgattgctatgtcatttgcataaattcaaggacttttatttatttattttttcatttttgagatggagtctcgctctgtcacctaggctggagtgcagtggcgcgatctcggctcactgcaagctctgcctaccgggctcacgccattctcctgcctcagcctcctgagtagtgggactacaggtgcccgccaccacacctggccaattttttgtattttcagtagagacggagtttcatcctgttagccaggatggtctcgatctcctgacctcgtgatccgctcacctcagcctcccaaagtgctgggattagaggtgtgagacaccgcgcttggccaaattcgaggacttttctctctcaattgcttacaattaaaaattttgtagtagcamatgctcacagatttggggctttcagaaatgtcttttcaaactaaaaacttttaaaataaataatattgcagat

SEQ ID NO: 850030 - DNA, 518 bp, Homo sapiens
ctaggtaggtatttaccttctgctcctcctttctaagctggggtgcctgcgagcctccatgcagcattcgctggacrgtgctgaggagtcagttatcagtgccgctggtggacgtgaacgtagctctgagaagctgtgtggccaagggtgacatttcctccaggcaggaaagtccatgagtgttgtttctttgtctttgaatgaacagtcaagccatgcctccagacatctttgacataagcacatgcctccgcaagacttttaaaatactctaggggagaaaagtcctatcttttcttcacccgccacaaggtttacagcccaaaacccccaaaacaaaagacaggttaacaagagaaaagcataacaaaggtatttaatcaaagttttacttgacacaggaggcttcagaaatgaagacccaaacacccagggggaaactgtatttttatgttaaatctgatgaaagaagtgaatagttgtggagcaacgtaactggacaaaatggatatgatcta

SEQ ID NO: 850031 - DNA, 606 bp, Homo sapiens
gtgcctgcgagcctccatgcagcattcgctggacggtgctgaggagtcagttatcagtgccgctggtggmcgtgaacgtagctctgagaagctgtgtggccaagggtgacatttcctccaggcaggaaagtccatgagtgttgtttctttgtctttgaatgaacagtcaagccatgcctccagacatctttgacataagcacatgcctccgcaagacttttaaaatactctaggggagaaaagtcctatcttttcttcacccgccacaaggtttacagcccaaaacccccaaaacaaaagacaggttaacaagagaaaagcataacaaaggtatttaatcaaagttttacttgacacaggaggcttcagaaatgaagacccaaacacccagggggaaactgtatttttatgttaaatctgatgaaagaagtgaatagttgtggagcaacgtaactggacaaaatggatatgatctaatggtaataaactgagcagagcccagcaaggcctgtttgttctgattcttcttggtctctctgtgtgtaaccgcccaatgggttcatcttgccccctgcctagacagagctgatttatcaagacagggga

SEQ ID NO: 850032 - DNA, 707 bp, Homo sapiens
gcattaaaagcactagtgtaaactaattttattactcctatcctcctgcaagcctggaggacattgcctgtgtcccccacattgacttcttcaagcagtttttgattcaattgtttccaccctgacataacataaaagacaatatggaacacacaggtaacatttatatcctggaaggctttctctacctcagagagatgacagatgtctccatgtataaacttgattccttccagaaaggtttgagcagggatacttatgtcaaacagaatcatatggactcccttctgattcagaaacagcctaggcagaacccaaaatatctaccacttcctgtaatgacaacaatttctttttaaaaaaataattttgattttattttatattcaggggacatagctgcaagtttttacacaggtatgtggaataatgctgatgtttaggatatggattccatcacccaggtagtgagcatattacctaacaggcagtttttcaacccatctctcctccctcctgccccttccagtagttcacagtgcctagtgttaccatatttatgtcaatgtgtactcagtgtttrgctcccacttacaagtgagaacaagctgtatttggttttccattcctatattataacaatttacttagggttatggcctccagttgcatccatgtttctgaaaaggacatgatttcattatttt

SEQ ID NO: 850033 - DNA, 265 bp, Homo sapiens
ttacattcccctcaacagtttataagcattcccttttatgcacacacagcctcaccagcatctgttgttttttgaccttttcataatagccattctgactggggtgagatggtatcttattgtggttttgatttgcrttgctctgatgatagtgatgttggacattttttcatatgtttgttggccgcttgtatgccttcttttgagaagtatctgtccatgtcctttgcccattttttaatggggttatttgtttgttttttct

SEQ ID NO: 850034 - DNA, 309 bp, Homo sapiens
aatatgctcaagaactcaagaatcctaaattacaataggaagacctcatttgttgctactataaagtacattatttacagatggctcctgtccagtggggggaatacatttagcatgacggctggctgcaatttctggcagtcaccccaaattcatctctgcccaaatgcagacaggaagccaaacacaaaggyttggtgtcaaacagtcaacttgggatcacatttttgcttctttgtccaactctcatgaacataaattcatgttgaaattaatgtagcattctttcaaatgttgaaacattaagtt

SEQ ID NO: 850035 - DNA, 597 bp, Homo sapiens
  misc_feature 51: n = A,T,C or G
atctataaattactttgggcagtatggccattttaacaaaattgattcttnccatgtatgagcattgaatgtttttccatttgtgtgtgtcctctctgatttccttgagcagtagtttgtagttctccatgaagaggtcctttcacttcccttgttagctgcattcttaagtattttattatctttgtagcaattgtagatgtgagttcattcatgatttggctctctgcttgcctgttgttggtgtataagaatgcgagcaattttgcacattgatatatcctgagactgctgaagttgcttatccgcttaagaagcttttgggccggggtaatggggttttctagatataggatcatgtcatctgcaaacaaagataatttgactccctcttttcctattttgatacccttcatttctttctcttgcctgattgccctggccagaacttcaaatactatgttgaataggagtggtgagagagggcatccttgtctcgtgctggttttcaaggggaatgctttcarcttttgtccgttcattatgattttggctgtgggtttgtcatagaaggctcttattattttgaggtatgtt

SEQ ID NO: 850036 - DNA, 621 bp, Homo sapiens
  misc_feature 2, 12, 20, 21, 31, 37, 43, 57, 63, 64, 99, 100, 115, 116,125, 148, 176, 205: n = A,T,C or G
tnctagttcttnattttttnnacagtgtggncctggnacaagnagcataggttgatntcactnncaaggtaattccgatgcctactcggcttcactcgnnccctgttattcaganncagtatttnaataaggtccaggttgatttgtncattaagatttttaaagtatacaaacantaactcacagacatagtaagatgaaaagnaatccaacaagatgtttggggctatgtcgtagatatagtataggcataggaatcctaaggagcaggacatatttcagcctgaatatgacaaaaatcccacttattactctcctgagagcttcaagtgcctatatgacccaaaatacaatggaaagcctattggcgaaagtcatgggttgattgatctaaccctgagataaaatacttattaaaatattatcttttaatgggtttcagacaactgaggctaagccctttaattactttaaggaccatgctcactgaagcttttaaaaggtattttcaaaagcttaattgcccaagaaaataatcagtgtaagagtattaggttacccagcagaaaatgatgtcttctacataccygtctacatcacaagaagggaggggtaaaaaag

SEQ ID NO: 850037 - DNA, 504 bp, Homo sapiens
gccactgtgcagagctggccaaagaggaagtgccayggccagcattgatgttgccatcccaacaactgccttggagggaaaaagagaagggcagggccttctgagaaagttcaatgacaggatgccccacaaatgcccttcaccctggggtgtccctctgccagctcagcctgcaaaccatgatcccttgtacgactgcagcccagctgtgttgcagaagtaaaggtgtctgcccccatgaagccagcccagaggagggaggagctgggatgccattcctgggaggggggcctcctctggggaggcctgggtggacttgaaggcagctcagcctcatctgccctagagaccttgccaggagaaatcctgggtctccaagccaggagatctgctaggctgggagacctgccctgggagccacttgtcagcaggggaccctgtgattgtggggatgaggctgggggtaggaaggggcggtcactaggcttcctctgctggtggagg

SEQ ID NO: 850038 - DNA, 503 bp, Homo sapiens
tgggtcacttgaggtcaggagttcaaaaccagcctggccaayatggtaaaaccctgtctctaccaaaaacacacaaaaaaattagccaggtgtggtggtagacacctgtaatcccagctactcaggaggctgaggcaggacaattgcttgaacctgggaggtggagtttgcagtgagctgagattgcatcactgcactccagcctaagcgacagagtgagattccacctcaaaataaaataaaatttgtctctacaggctgggcatagtggctcacacctgtaatcctagcactttgggaggccaaggcggacaggtcacctgaggtcaggagtttgagaccagcctggccaacgtggcaaaaccctgtctctactaaaaatacaaaattagctgggtgtgatagtgggtgcctataatcccagctacttgggagacttgcccaggggtcaagtggcagtgagccaagatcgtgccacttcactccagcgtgggtgaagagtg

SEQ ID NO: 850039 - DNA, 548 bp, Homo sapiens
gcctgtaatcctagcactttgggaggccaaagtgggtgggtcacttgaggtcaggagttcaaaaccagcctggccaatatggtaaaaccctgtctctaccaaaaacacacaaaaaaattagccaggtgtggtggtagacacctgtaatcccagctactcaggaggctgaggcaggacaattgcttgaacctgggaggtggagtttgcagtgagctgagattgcatcactgcactccagcctaagcgacagagtgagattccacctcaaaataaaataaaatttgtctctacaggctgggcatagtggctcacacctgtaatcctagcactttgggaggccaaggcggacaggtcacctgaggtcaggagtttgagaccagcctggccaacgtggcaaaaccctgtctctactaaaaatacaaaattagctgggtgtgatagtgggtgcctataatcccagctacttgggagacttgcccaggggkcaagtggcagtgagccaagatcgtgccacttcactccagcgtgggtgaagagtgaaacaccat

SEQ ID NO: 850040 - DNA, 628 bp, Homo sapiens
attttctcttgtgatgagttaaaatctggccaattacctctgaccatgcctcattgtaatcagtatttattttaaggtatgactcctagaatttaaataaagtattggcgatgtggtgtaattagtgtagagtagaatgagaccttgccctgttgtacacttcataggtttgttgtgtttacttttttgagccatatgctctagaatgttttaaatatgtagcatcacatcatctaccatttagaggaccagaatatctattctgagtacacaaagtagactcatgaactaatatgtgaatgttttcccctctgaaggagaaatattgggagtttaacagcttgagtagaaatttccttttgaatggttaaccaaactggtatcacttttaaggtcctaaatcccaatctgtttttctagggaaacatgttggcagctgttcgaaataactagtggtttaaagacaattgttagtgtggttttctacacacttaaagcttagacctgctctgtyacttgtctttgatgctaaggagttgtctaagtagttgagttaaataatttcagattagttttatgcattaaatggtttggttttatttttaaaaacctctgttattatttaact

SEQ ID NO: 850041 - DNA, 459 bp, Homo sapiens
atacaatatctgtgagagttcctctcatatgattttttttgccagcatctttcctctgttacatcttcatccttttcatcacaaccacttcataactgactttgataagttagttatctttcactaagtgctcctagctaaatatatagagcctctagaacactggctgagttgacattcccttggtaagctttttttttttttttttttaagaatgctgtttacaattagctaaaattttaatccaattttaacacttcatttatttgatgcactttgatctttgacaattctcccctttaattatccatttttatgaaatgctacatgggtctrtcactgggagacaagaaggcaacacgactacatgctttgctgtccgctgatgaacaaaataacaggaagtgctagtgtatgggattttatacaattatagatttttttttttcttttgagatg

SEQ ID NO: 850042 - DNA, 459 bp, Homo sapiens
atacaatatctgtgagagttcctctcatatgattttttttgccagcatctttcctctgttacatcttcatccttttcatcacaaccacttcataactgactttgataagttagttatctttcactaagtgctcctagctaaatatatagagcctctagaacactggctgagttgacattcccttggtaagctttttttttttttttttttaagaatgctgtttacaattagctaaaattttaatccaattttaacacttcatttatttgatgcactttgatctttgacaattctcccctttaattatccatttttatgaaatgctacatgggtctatcactggsagacaagaaggcaacacgactacatgctttgctgtccgctgatgaacaaaataacaggaagtgctagtgtatgggattttatacaattatagatttttttttttcttttgagatg

SEQ ID NO: 850043 - DNA, 521 bp, Homo sapiens
cctatttgaatctgtaaagacccttaagagcactttgaatttgttcatctataagctgttaacccaaattcatgtcccaggtttttaagagaataagcaatagaatataggcgtttccaaagaggaagacgtacagaagcagataggtgtatagttcattcattcacagataggcactaggttagatccagtagttggcgtgcatgcatcaacatgttaatcggaattaaaggctgctacatttaggcttggctagatcatctataaattgaaacccaaaagagaattgttaactaggaaagtagctgtccaggttccttaaagtttaaatacagggatccaactagtattctccaaaatttttcaggaatatcagactttactgctgtggaacacttggctgttgtaagaggagtgtttcatctctcataaggatgtaaygaaaggaaattaggagccagtgggagagtgcagggacttaggtgtaaatcataggtgaatctttttttttttttcagatg

SEQ ID NO: 850044 - DNA, 521 bp, Homo sapiens
cctatttgaatctgtaaagacccttaagagcactttgaatttgttcatctataagctgttaacccaaattcatgtcccaggtttttaagagaataagcaatagaatataggcgtttccaaagaggaagacgtacagaagcagataggtgtatagttcattcattcacagataggcactaggttagatccagtagttggcgtgcatgcatcaacatgttaatcggaattaaaggctgctacatttaggcttggctagatcatctataaattgaaacccaaaagagaattgttaactaggaaagtagctgtccaggttccttaaagtttaaatacagggatccaactagtattctccaaaatttttcaggaatatcagactttactgctgtggaacacttggctgttgtaagaggagtgtttcatctctcataaggatgtaatgaaaggaaattaggagccagtgggagagtgcagggacttaggtgtaaatsataggtgaatctttttttttttttcagatg

SEQ ID NO: 850045 - DNA, 568 bp, Homo sapiens
  misc_feature 133: n = A,T,C or G
taggaccctttactggcagctacatgcatgtcaccataagactgtccgggagcaaacaggcccatcttgccctgagccatctgtatttgtttctaaggctgcataacaaattagcataaactgcatgatttanaacaacagaaatgtattctgttacagttctagaagctgtaagtctcaagttgtcagcaggcccacactccccctgaaagctctagagatgaatcctttgttcttccagcttctaaaggtcacaggcactccttggcttgtggcagcataattctcatctctgcttccatcttcacagggccttcttttgtgcgtgtgtgtctctgagtcctctccttgtctcgtgacatcaatcattggttttagggcacacttttatccactacaacctcatcttaactaattccatctagaccctattccaaataaggtcacatccaaggttctgggtacacatgaatttyggggggacactattcaacccactgtaccacccaagctaccatcactcaacttccctttctctcccatttcaacagctcatgacactgattgg

SEQ ID NO: 850046 - DNA, 625 bp, Homo sapiens
gggaagttggccttattaaacaacggcaggaaagttagaagattgatgacttggggatcacagggrtactacccacaaaatgtagtgtaatttgttgtctgattgctgtaagctgtgtgaatcagggagagtttgagtttggacatttggctcgatattatgacaccaggctggttaatttatattataaaatgtagagggcaatttagacatgaggtcataatatagtttaatatagtgctacgcaaaggctgaaaattatgttgtgcttgcatttgaattcccagtgccgtatataccttaaaggaattagatatccagtgggtttggcaatacattctataatcattattgacacttagtaagagtagagtggaaatattagccattgtctgttataatcctaacaaatatggccatgatggaaacaaaatagcttggtcacccatgaatgccttctagtataaagagaaagtatgataaattgcttcagcaaaaactatttcttgaataagtacactaggcctggtactgaggataatgcagtcaacagaacagagtccagttactaaagagatgatttgccaaagatgattccatacttaccattttaagagagggaatc

SEQ ID NO: 850047 - DNA, 655 bp, Homo sapiens
cccagctaatttttgtattttttgatagagaaggggtttcaccatgttggccaggctggttttgaattcctgacctcaagcgatctgccagcctcagccctccaacgtgctgggattacaagtgtgaaccaacaagcccagccttccttaaaagagaaaattttcttaaatctggaaaacaaaacatttaaagaactaacaatatttcaaataaaagtcatgcaaacattacctttatcagttacttaatttcatgtaattaattttgttctgcttcatcttgattagtagtttcatgaattcatcagtttcttcattagagctctgaaacattttcatttagtccatcgaccttaaagttatttaaacctatatttaagaatatttgttagtcttttccatgaatctgattgcaaatgcttttagaaaagtatcataatggtggatgacagagacttagaatatctatagttaaaaatctgatggaagtttattataatttgcaattgacaaggaatttggttatttctgtagcatataagattttaacataataaccaaaattatgactgataccataytagacttctatgaatttacatactttttaacatttgtatatataacatacccataaatgtaatttaaggaaggt

SEQ ID NO: 850048 - DNA, 365 bp, Homo sapiens
gcatgtgcgtgtgtgtatgtgtgtgtgtgtaagaggaaacttggtaagaagcatatcaaacccctatagtttgtcagctcattaatccaagagtttgccamcttcaacattccagactaaggcaacttgatattctgcaagcagatattcctaggactgcaactaaatttcccaggggaaaatttctagcatagtctcccagaccatagtcacagtagagacggtcgaatatccaacaatacccattctcatattttattttcagtaatccaacattcatttcttatttcctgatcaggatttggctgagaatgtggctgtccaccagatattttatttcccagactccactgcaccttgctgag

SEQ ID NO: 850049 - DNA, 566 bp, Homo sapiens
tgaggctgagcattttttcatatacctgtttgtcatttgcatggcctcttttaagaatgtctattcaggggtcctttgtccattttttaacttgttatatgttttctcactatggagctttttgaattcctyatatatttttaaaatcaacttatcaatatcaacttatatatattccttatatatttttgaaatcatttatcagatggatgttttgcagatatattctcattttgtaggttgtctcttcactctgttgattgtttcctttgctgtacagagccttttagtttgatgtaatcctgtttatctatttttgctttttagtgcatatctaaaagatcgttgttcagatcaatgtcatggaacttttcccctatgttttcttctagtacttttatagcttcaagtctcatgtttaacactttagtccatttttagttgatttttgcatattgtgtgagataagggtttaatttcatttttctgcaaggggatattaagttttctcagcaccatttatgaaagataatgtcctttattcattgtgtttttgagcagctttg

SEQ ID NO: 850050 - DNA, 656 bp, Homo sapiens
ctatacaaagtgattattttactttataagaacaagcctaataaattactgaccaattatgtagtttaggtaataggaatgtcaacaagattaacacaactctcaacattaagatattatcaattkctctacaacagttatttttaacagcttttcaaaactaaaaagaaacattgtattgtaaaatgatagtttcagaaaggcatgtgaaaaaatgccttttgtatatacaagaaagaaactgaaaagaaggaataaatggtttacagtctgctcactgaccaccccctcaagctcccatcaaggagaagtaaactgtaattatacacacatctcccctcaatgcacacactcacatgcacatgtattccgctacagatcagcattattgcagccaagatcatacatagccagtccctgaaggcctccaattgagagtattcaggttagcagaaaagtctaaataagcttcttgggttttgtattaaagaattcggagaatgaaatgtgtgagatatttccaaacgcaagtctccagctacacaaagagcacaatagatcatttctcagtgaaatagaaatctttagctttgtattaataacctgtttctccacttggtttactaagtgattttctagtcagacacaatcaagag

SEQ ID NO: 850051 - DNA, 617 bp, Homo sapiens
gttcttttttatggctgcatagtattccaaggtgtatatgtaccaaatttgatttatccagtccaccactgatagacatctaagttgattctatgtctttgctattgtgaatagtgctgcaataaacatatgagtgcatgtgtttttaaaaattttttttctgtgatctgggtttacttctgttatcatttgattttatcttgcagagtttccgtagatatttcttgtactttagatctgtttgcaatacattatctcagctttgtctgaaaaacgtatttatttttgcctttacatttgaaaacattttttctggatgaaaattctagattgaactttcttcctccagcactatattaattcatttcattgtctcctggtttgcattgtttctgataagaagagaaatgactaatgcttcttattattgttcccagtttataatatgcctttacctactttggctgcttttaaaattttctcattamcattttttttagttaaaaataaactttttattatagaaacatttgaatatattcaaaaaaataaagacaccagtataatgaactcccacttacctatcacccagcagtaataattactgctattatata

SEQ ID NO: 850052 - DNA, 657 bp, Homo sapiens
cttgtttcacatcttactcattttcttggttgcactataaatatttcagctctcttccacctccccctaagtttcattcttcagcaacggaattgttcaataattgctttgagtgacaagaaaaattattttttagtataaagctatttttcatttgtaataaactagcagtttagaaacaaacatctcccaataaaatatcactcaattagataactcaagaagattaaatactatgacattaatttttcactcattagattgaaacattgctcctttttattttagtcttcaggattttggtgattaaaagtctggtatcaacctgactcttgtaaattaatgtttttcttttttctctctccattttctttctcttactctatagaggtttataactttttatcctggggcttctgaaattttaccaggatgtatctctacatagatttgtttatattaattcactgcggtattcaaaaattgtagattttctttagataatagatatcacctcctctgaggaatgagtccttgggtagtggtggaaataaggattttttatttctgcttctgtgatgatgrttatcagtacaattttaaatactataattttatatgtagctttttatttgttggttataaacaaagtctatt

SEQ ID NO: 850053 - DNA, 709 bp, Homo sapiens
tttgagagctatagttagagagaatatgttgcctgccctgaaccccaaagcctggcacacagtagatgttcaaagaattttgatacatagaaggatggatttaaattctcacagcaaaggtgactcttctgctggtggcccagcccgtgacctgctgtacaataagcattcccagctctgacccacccaggtggtatatgcttcataatagcagtggctgaggcccctgtgtttactctgggatggcctcagtcacccatctgaggcccagaggcccagcagcctgcgccttcaggatgccaacaggaagcactgtttgtgggggtagattggaatgcagcagaaagaggtccctggggaaaacagaagagggacagaagcctgaatcagtccctcacagggtgaggtgagtcaggggtaatgactaggtggccacaaacagagactcctttttagtggttttcaggacactccaaacttcatctgtcctataatatcaggaccaaaatactccttggctacctttctcctccatcatagactcttacttaaggttggaagggccctagaaattatccagttcaactctctcattttaaagatgaagagaaaggggcccagagagggaaggcattggcccagggtcatccagcaggcagcctgagagctggggccaggaccaggatccsaggtcacctatcccatcacc

SEQ ID NO: 850054 - DNA, 563 bp, Homo sapiens
ttctagaccggtgatgcacccagatagaggcctagagcgaggagaggaagtgcggggcacagaataagtagagagagaacagagggagaaagagacaccgggaggrgaagggagacagagacggggagtcggaggagggagcggagagaaccgagggaaggggttgccaggaggaggggtagggagaactttcttggcctccctgctcgcgccctcccgggcaatcaggccggcaggaggcaggtggtccggggcagacaatggcgcggaggagtgcggaacctgggactaaatttggcgttgcctttgcagggcgcggggcgcccgttcatctcgatgcaaaggagagacgaaatgaatatgcagcgcgggctgtaattgggccgccgcggccgccgccgccgccgccgcactataattttccaaacaggatcttgcaatcagggccttattcattagcgcataaacaattttgtttctcggcactcgagcctgtcaatcacgcggagagggaacatcttggccggaggcgcgggccaccgtgcgcgctcccacgcgcgccc

SEQ ID NO: 850055 - DNA, 479 bp, Homo sapiens
gctgttcctgtgaaagccccttgtacactcttgycacattgataagaatccctaaatgtttgttgaatctgaattattattattattttgagacaagatctcactctgttgcctagggtggagtgcagtggccagtacggctcactgtaacctctacctcttgggtttgagcaatcctcccacctcagcctcattgctgagtagctcatcttccaggcacatgccaccatacctgctaattaaaaaaaaatgtttttgtagagatgtggtcttgctgttttgcgcaggttggtctcaaactactgccctcaagcattcctcccacttcactcccaaagctctgggataacaggcatgagccactgcatccaacctgaatctgaattagataggacttagatttggggctactaaggttctttggaattctaaaactctgtaatttttcttttaggatcccttgacaagattgctgtggt

SEQ ID NO: 850056 - DNA, 539 bp, Homo sapiens
actaaccacgttcaaagtgttcattagccatacagccagtggctatgtatttgatgatgcagctgtaagtcatttccatcagggaagaaagttctattggacattattgttttggatcatttaatgcaatkactgacatacttagattcagatctatcacttcatttttatttcctgtttggcccaactatactttgattattttcctaacagccttgtgaattattattttttaaattccattttgtgtagatgttttcactatacttttaaaaactgtttttggtggttgctttaggaaaaacaatgttttagttaccttttttttttcacaaggtatttaagaattaatgctgtgctacttcacaaattgcaggtctattgcctacacccccccccccattctttatgttatagctgtcatatgcattatgtgtacataccttataaactcacacaaaaatttcataatttttgctttcaagtcatatgtatttttaaaaaattaagagggaaataatctcttatatgtactcaaa

SEQ ID NO: 850057 - DNA, 588 bp, Homo sapiens
cctcccaatattccctgagaattatcttaaaacactaaacccataatagtgaggaaaatgagagggtatcactgacagattcatgattccaataaatttctggacaacaaaaagcagacggaacaaagctaaagaatttgcaggccaaaatatttgcaagagtaaattacattccagacttagaatcagcaggaaggcaaatgtacgaatgagaatggaaaccaaaaaaaaaaaaaaaaaaaaaaaaacagagcataaatcaaaactctgtccagagaacaaccaggtaagagggcaagtgcaccctcctaaaagcagcagacagcacagctgtaatcctagaaagggaaaatgtgtctgttgtcttaaaaaagaataaatagacaaattgcctaggaagagctagaccagttagcattaaaatgttagaacactactcattttcacatatataagactccaagtactgtcacttactcccactcatcaraatctggtaaaatctacctgcacatgtagggcttcttgtcttcctttctatttaggggacaagtacaaaacaaaggaaaccttatctattgcctagaa

SEQ ID NO: 850058 - DNA, 620 bp, Homo sapiens
aactaccaacaacattcttcacagaactagaacaaattattttaaaattcatatggaagcaaaaaaaaagaacccaaataaccaaggcaattcaagcaaaaagaacaaagctggaggcatcatgccactcgacttcaaactacactgcagggccacagtaaccaaaacagtatggtactggtacaaaaacaggcacataaaccaatggaatagaataagagcccaaaaatgaggacacacacctatgtccatctaatcttcaacaaagctgacaaaaacaagcaatgaggaaaagactccctactgagtaaatggtgctgggataactggctagccatatgcagaagattgaaactggacgtgttataccacagacaaaaatcaactcaagatggattaaatgtaaaacccaaaactaaaaatcctggaagacaacctaggcaataccattctggacataggaatgagcacagatttcatgatgaatacaccaaaagcaattgcaaccaaagcaaaaattgacaagtygaatcgaatttaaagagttcctacacagcaaaagaaactcaatagagtgaacaagaaacctacagaatgggagaaaatttttgcaaactatg

SEQ ID NO: 850059 - DNA, 512 bp, Homo sapiens
attataacatgggatactgcattgcacaattttatgggcattatttatgctgtaattgtgctctgtaggtgtcaatcacataggatacatatgaacagcacaatmtcctgagtttatgtctggagtaagactactcaattgataaatcctaatggctaaattggttaggaggaggaatgagagaaaggagataatattgaaatgatagggaaaaccagactttctgaattaaaccatataatatttgtggttaatattagcgaagtatacatttagtgctgggtgtctactcatcctcagtttcagataatttagcacatgagactgaaatacattataatctgaaggatctgtatttattaatacagttacttctgtaatcacccaatgggttcacccatctgctgcagtcattgagactgcaatattgtagtagagaaagagtttcattaatgcagagctatccaagaagactcactttaaatctaaagacacatacagaataaaagtaa

SEQ ID NO: 850060 - DNA, 478 bp, Homo sapiens
cctatcaagtttacagatttaggcaacattatgagttcaaattataatagtggattcctatcatctctttatgtcagtcctagtgaaacaaattatactaattatatttctcaatgaaagttttatgtgggattttattctttcttgagttatataattaagatgtgttttttccctttccaagtcataatatcactttattttgtccacgagttggtctgccagccttatactctttatgctttcctcttccctctcagcttccactatgtcctctttatgctgtgtaataaaacatagtgaaaaataacacaggtttttcccaatcccaaataacacatagattgattactagctatatggwctttataaaatattttagtacctaagtgttctcatccataaaatgagagtgaaaacatgattgattttgtccgtatattataatgattcaaagaggtaatgcatttacgaagct

SEQ ID NO: 850061 - DNA, 607 bp, Homo sapiens
attcaatttctcagcaagtcgtttgtttcatcttcaaaatatttcccgaaactgtgttttctcattaccatgattgattctgcccttttccaaatgaccgtcatctttcctaaaccaggtaatgtcttcttaatgacacagtttcaactcctttccacctactgacacttttccactcagcagccagactgatcattcataattgtacatcagattacaccactcctccactcagatctcctgagccttcttatctactcacagcaaaaggcaaatttttccacaccaaggaagctctgcatgacccaacacatgcctgcccttccaaccttgtctctcatatggttctaggttattcacttcatttgccacacctatttctgacttaacttttgataagctaagattgttctgatttcagattttgcactttatttcttctttgccaggaatgttcattccccataaagctcattttcttactgtattcagagttctattsaactgtcctctgtggatcatcccatgaaaaattctctagcctttgctctgctttgttttctataaacaatttattgtcctattatcatatttttctatatttgtt

SEQ ID NO: 850062 - DNA, 617 bp, Homo sapiens; identical to SEQ ID NO: 846677

SEQ ID NO: 850063 - DNA, 633 bp, Homo sapiens
gtctttttctgcttgacttatttcacttaatatgatgtcctccaggtacatccaagtatccaagttgttgcaaatgacagcatttcattctgtttcatggatgaatagtattctattttatatatatatatatatactttttattgattcatctgtagatgggcattttggtcgattccatatcttggctattgtgaatagcactgcaataaacatgagtaagcagatgtctctttggtacactgatttcacatagaccaatgaacaaaatataggccctgaaaatatatccatacatttacagccaactgatttttaacaaaggtgtcaagaatacacactggggaaaggagaatctctttaataaatggttctgggaaaactggatattcacatgcagaaaatgacactagacccctctctctcaccgtgtataaaaatcaactctaaatggattaaagaaataagtgcaagactcaaaactgtaaagctactagaagtaaacataggaaaaagcttgatatttgtctgggcaagaatttttttagtaagwtctcaaaagcacagacaacaaaacagagtagacaaacggtattacatcaaactaaaaagcccctgcacaacacacaatta

SEQ ID NO: 850064 - DNA, 456 bp, Homo sapiens
ctctgagtcacagagttctgataggtatgtggtattgtaattcagttgaattttgctgttggaatatttaggtaaattgtcagaygtaattaagatttgcagcatgaaatgggcccaaatatatatggagtcttgctctgttgcccaggatggagtgcagtggcacgatctcagctcactgcaacctccacctcccaggttcaagtgattctcctgcctcagcctcccaccacgccctgtctgtgataagatttttttttttttttcttgagacggagtcttgctctgttgcccaggctggagtgcagtggcacgatctcagcttactgcaagctcgtcctcccgggttcacaccattctcctgcctcagcctccggagtagctgggactacaggcacctgccaccacgctcagcctgtgataagatttttaaataaaaatttcacggctcgttgc

SEQ ID NO: 850065 - DNA, 456 bp, Homo sapiens
ctctgagtcacagagttctgataggtatgtggtattgtaattcagttgaattttgctgttggaatatttaggtaaattgtcagacgtaattaagatttgcagcaygaaatgggcccaaatatatatggagtcttgctctgttgcccaggatggagtgcagtggcacgatctcagctcactgcaacctccacctcccaggttcaagtgattctcctgcctcagcctcccaccacgccctgtctgtgataagatttttttttttttttcttgagacggagtcttgctctgttgcccaggctggagtgcagtggcacgatctcagcttactgcaagctcgtcctcccgggttcacaccattctcctgcctcagcctccggagtagctgggactacaggcacctgccaccacgctcagcctgtgataagatttttaaataaaaatttcacggctcgttgc

SEQ ID NO: 850066 - DNA, 624 bp, Homo sapiens
ttattactgcccgagctctctatggctcccagtcaaataactgtgatttcttagggacattacctccgaacataaattcactcagcaaacatttactaagtgyctgttgggcactaggtataccagagaaataagaaaaaaatgaagatatctctttctgtctttaaggagagcctcaaagagaagatttttgtaaatggaaaattacagaactgtgaacaggagccatgggagcacaaaggaaggaggagtcaactgcaggctgtggagttgatgaaagcaacacactgaaagtgatattggagttatgttgacatttcctggagtaatgacccacaaccctgcagtatctcttccccgtgtttccccatctattactggtatatagctcccactcagggctagcactaggcataaatatcaagtagactgagtcttctttcataatctcatatccttttccagccaatatccctcaaagcccaggaatgttcagttagggtcctagcaggaaacagccttcaagccagatgggtcatgtgaggagaccttaatgaagggactccttgcagagatatggtcaaggttaacggaacaaacaaggatgatgggcatctgcaggct

SEQ ID NO: 850067 - DNA, 636 bp, Homo sapiens
ttggatccctttgtggcctatttttgtaaaggaaatatcttcaaataaaaactacacggaagcattctgagaaacttctgtgtgacgtgtgcattcatctcacagaattgaacatttcttttgattgagccgttttgaaacactctttttgaagaatctgcaagtagatatttgaagtgctttgaggcctattgtggaaaaggaaatatctttgcataaaaactacacagaagcattctgagaaacttctttttgatgtatgcattcatctcacagagttgaacttttgttttgattgagctgttttgaaacactcttttgtagcatctgcaagtggatatttggagcactttgaggccaatcgtggaaaaggaaatatctccatataaaaactacaaagaagcattctgagaaacttctttgtgatgtgtgcattcaactcacagagttgaatctttcttttgatggagaagttttgaaactctctttttgtagcatctgtaggtggatatttggagccctttgcagsctatggtggaaaaggaaatatcttcacataaaaactacacagaagcattctgagaaactattttctgatgtgtgaattcatctcacagagttgaaactttcttttga

SEQ ID NO: 850068 - DNA, 407 bp, Homo sapiens
tctataagctttgaaattaagaggtaaaaatctaaaataaatcggacttcatgttatttatacattcattgggtttgttaattattccacaggaaaacagatgaaagacttttgtagaattcaattctgcttcaccatatttagggttacaagaagggaattatattgacgtaattgacagactgaattaacctcagtcatcgcatgtgatttttctagagttttttttttaatggtgctgacattctcctcaatatgtccatgcttagttgggtttctgggggagagatgagtagytagtactacccatctaaaacataatgttcattagttggaatgatggtgtgatatgatagtcttcgagatgatgccctcaattcctttcctccctgcatgcacatgctgct

SEQ ID NO: 850069 - DNA, 620 bp, Homo sapiens
  misc_feature 47, 48: n = A,T,C or G
gaggcttgctcagaaacggagctgtccttggctttccaggccccctnnccttcctctccctgccccccacccccgccttctcccgccttctcaggtgagttccctgcagggtgctgaccttgctggctgcgtgtctctgctccgcctggtggcagaggccgctcagccatcttctggggcatccgctagtgaacagggctgatgggacccttgagacggagacgtctaatgccctgctcacctgcgagagctccatgatgggaaatacatggcggggaaatgggcccaggaggccctggaagccggccctggcgtgcaggcggctcttctgggaagccctgaaggccagcgtggacaagggctctttccagagaagtaggagtgttttccaatttataaaatgcttttaagttggcctgagacttgaaacaaacaaacaaacaacagattctggtgctgcaaactctgctagcgcagaactaagaaaacgtccctagagacgggccccgaaaggacgcctctgagtgccgcagcccccactcccrtgccctcccggcccctccttcactgcgcggcccctcggctccctgtgttttgctcacagaagctcctttttcatc

SEQ ID NO: 850070 - DNA, 556 bp, Homo sapiens
atggaaacctgtttatgtttgcgctaggtcactgacttcatacaacatagaggtttgtcctgacactaatctctgctctaaagacagtttccctttctctttgggatgctgtttgagacgacatagagatcatagtgaagtctgagtaattcctgtgtcccagagatgctgtttcctcaaaaatcttcaattccacccttgaaaaagcctcagttaggaccctctaaattttaattcaagctgacgagcacattcactctatattcagctttgcccattatgaataagctctggtctttatggtttaagctccacagtaaatgtatcaaatggtagcaatgacacataagatgcagtttaaaaactaatatataactcatgtaaatatataatctcagaaaaatctcacttcaagttattttgtcatagttgttatgtactcttgagtaagagaggcctttctagtatcttcattcttaaaatacaataaatgcacacttgaaagataaagccartattacgtgatgtagcagcaatcacggtcaatgtaaatcgt

SEQ ID NO: 850071 - DNA, 643 bp, Homo sapiens
tctggttccacttttgtttttgaccactccaacttacgctgatcttagccactaaatctgagttaatcttttttaactgacctatacaattacttaactcccttgtcaaacatatcttatttgtctaccagtaggcaagctccacgttagggatcctatgaagtgctttttgcacagcactaaacacagtgaatatttaatggtcaagattatgtgttgaatgaaagaaagaatgattaaatggccgaataactgacagtgaaggaataaatctgagtggttgcccagaagtcatgaaagcacataagtcattaaagcacatttttacgtctgggaaacactggtgttgataaactagaagatgggtattggagattaaaagcaaagctatatatctgggatgtatgtatatatatgtgtgtgtatatatatatatatatatatatatatttatatataatatttttatatatcccaaatctgctgtgtccagaaatgttaaagtgtagtgttcactgcagaaacttctttcactccaagcaatgcttgctttsctcttcctggggctcacctgggcttgcccttcctaagctgtgctctgtgacatctgtcctgcctaatcccactctttcttacataaaac

SEQ ID NO: 850072 - DNA, 769 bp, Homo sapiens
cagagaacgttacaaagttacaaataagcaaggcattgaggctagaatgaacactaggatattggattagcttcagacagtatgaattcatgtttagtttaatatatatatattgaaccatatgtttatacaaacacggatggatacagagataattgcaagtattacatatgcatgggtgactaaacactcatacatttcctagctctgtccactgagagggcctagcagcagtgacaccccattagcaatgaatatacccagagtacagatcttgactccaagtaatcattgtccagtaaaacaaaccaaggctgcttggaaaaatgtcaagcctaacgtttttaggcctacattggccctaaattatattatgccatttaaatgtggaaaattagcttccaatataatttaggtgtttgttaccaatgtgcctagatagcatatgttaagaagcagggaaagaaggctactcattacgtctgcaagtctttttcaccacaattcttttgtccactattaattgcaaacacctatcactgcaaataaataattacatttaaattgctttctagggtcctggcaatgacttaaataaaacctggggaaatgaaaacccaaagggaaaaagagacaggacttctcaccagtgcaccccacaccagctctactcacattctatttccaccatcaaggtaagaaacgaamttgcatcaccattagattaaatccaaaagattgttccaggattctcaaggtcgtggctaat

SEQ ID NO: 850073 - DNA, 638 bp, Homo sapiens
gctcagggcaggcatgtctccttatcttactgaaggggcacagtgatgcgcagagaggcaagcataaccttccgacactttagatcacctaatacaacctttttgttttacagaagatgtaaaataasgtccagaaggatgaagtaactcgaccagtaaagaggtcagagggtgctgccacagtcaggaaggggctgatttttagaccagagttcttttcactgttttccaatagttctctactttgtgctcatataccaatgtgaaattaaagagacaacatgagataatgaaattcatcaaaagacagcgcagagtaaaccagctgcaataaaagcaaaacctttcaagggtaaatgacaccaggtgccagaaatgggcttaaaataagagctttaaacattttgttgggagagaattaggttctgagcttcctgttatttgcccgtcctatctacattcagtggctgtcttctcatttggataaaatcagggtttataatattttctgtagttaacaattagatatgaatattttcttttttttttttttacatatacaactccaggtacttgaagatttcactaaattcacactgtccaaaattatacatacttttgtctgcattttgaaatga

SEQ ID NO: 850074 - DNA, 553 bp, Homo sapiens
cagtaacagcctatttatgaacatgcagcagtccacgaaccaagctttgcacaccttgttctagaatgtgtaggggaagataagttaacttcccaaccaattaaaccactcaagtcaacctgcgcttgctaaagtcattaacatcctaatggccacatcctaaggtctgttttctctgccctttccacttaactatctgccacagttgatgctattgattagtctatttcttgaattctctctctctttactttcaggagggcgtgctttgctggttctcatcatttgtctttgttttcagaactctctttaaatgtgcacagtctctgacatttcatctgatcctgattcttctttctctagataaatgttgctatcctttgccaacaaacatttatatgttggtgatattcaaatcagtcagcaggcagacaactgttcccaaacagttccatccctgactctggggacagggccctaaactatgcatcgtggctgttgagctggagggtctctgyggtctttccagatgtgctccccaatctgctccatg

SEQ ID NO: 850075 - DNA, 593 bp, Homo sapiens
gtggtagagatgcagatagcaggtcccactccagaccctctggacacattgcatgaggctctctgcagggtggacgagctccctgggaatcctgaactgagcaccggctccgcagtgccgtagccattgcgtgaaaatgcctcccagaggcacagatgccagagcagtcctcttgaatagatgggctgagatggggtggacctgatcaaaaccccagcgtggtgcagatggaagaggggaacagggcctgggttccctgagcatgggttattagttgtggggggccatctgatgctcctgccaagttcagtgaggaagagcgagcatcccttgtcctagtcgaagtcattaccctcaagagatggcaaaaacatggaaattgcttcaaattccctgacaccagatccgtggtatatttctaagggaagccggcagccccgacctttggcgataggtcacagatggcggtggtggcatccctcacttgtcatcccgcccagcggccaggtcctgcactgrtcctgctggacatgtccttagcatctgaagtgccccacagtgttgagaaaatggcatggcacaagtccacctga

SEQ ID NO: 850076 - DNA, 520 bp, Homo sapiens
ttactgagacatgggaggaacttgcaagaaggaagacgcccgctcacccatgagcatggtgcaaagtggtaactgcggtgcttaaactctgggagggagcacaccgcaatgtcttatcaccttttctgctgttcacaaaagcaaggtgcttccccaccagccgcgccttcatctcaacagtcagggctgcaaggtttatcttaatttaaaaaacaattacaagcgaaacagaaactgccaggaattatccactcttcagaaggaaagaacaaaaggaagtgacgagagacagggccccatcttgtcgtatgatattaacacggctgctcggaaacacctcgagagagacaccagctttccccacgctcttcctttggtttctcttctggggggacattggatcgcacagctttgcaggtgagcacagcctaaacatagctccatgcgttttrcatccataactctaaaggcttttgtgatttaaagcggcaattatacagaggaacgagataaagactcc

SEQ ID NO: 850077 - DNA, 554 bp, Homo sapiens
ctcatccccttgcaaggctgcagtggccattgtatgtgcaaggcttctaactgcgtatcatcccrtttggttgcctaccagacccctcgtactcaaagtgtccctactggtttcatggatgtcacctcaaacctgtttttcagtgcatggcaccaccatctaccattctcaagtctcatgttatctattccttctccctccctcattcttccaatgcatccttctctttatctctaaaatgtcccttaagtccctctattttccctgccacctcctatcctggttatggacactcttgcctggattattcaacagcctcttccttggcacctctgcctccaagtaaactatcaccccaaacctataccattcttttcactgaagccctgagactcaaagcatagtaaatcaattatgctagttaccttcttcatttttttcttagtttctcatcttccttgggggtaaatttaatgctttttaacataactggaagctcttccagtatctagctaccacctacttaaccctccatctgtatttctcatgacaac

SEQ ID NO: 850078 - DNA, 552 bp, Homo sapiens
  misc_feature 167: n = A,T,C or G
ctcctgcacagcaaagggcattattaagagagtgaatagacaacccatgggttcggagaaaatacttgccaaccacatctgaacaaggactaatattcacactatataaggaactcagataatagggagagcacagataccccattaaatatgagcaagggacttgnagagatatttctcaaaaaaagacatacaggcagccaacagacatatagaaaaatgctcatcatcagtaatcatcagagaaatgcaaattaaaaccgcaatgagatatcacctcacacctgtgagaatcactgttactaaaaagatgaaagataaaaagtgttggcaaggttgtggagaaaagggaaccctcatacattataggtgggaatgcatattagtatagccattatggaacacagtattgaggtccctcaaaraactaaaaatagaattaccatatatgatccagcaatcccacttctgggtgtatatccaaaggaaatgaaataggtatattgaagagataactgcactcccatgttaatcatagcattattcacagta

SEQ ID NO: 850079 - DNA, 487 bp, Homo sapiens
aatttgtaagaaactaggctatatatacattgggaaaaacagccttcatttgtcaatgcactagtgttccaaaggtttctggtaaytgtgtgctattgctttttgttgacttgcaaaaaaaaaaaaaaaaaattactatgacttgtggtagccctacaaccttcggaagtgcttagcccagtctgaccatacatttatatttagaatgcttaggtaaataaataatatgcctaaacccaatgctataagatactatataatatctcataattttaaaaatcactgttttgtataataataaaacaaggcaggcaagctgttctacaatgactgttggtaagggtgctgaggaagaaaaacaaacaatcttgattcagggatagtgaatagacaaaaaatgtcctaatcaatgaagctgtgtgatgattctgattgacagagagtgctgccacaagattcttaggctacactcaaatcagcagaaaaa

SEQ ID NO: 850080 - DNA, 600 bp, Homo sapiens
actctctagctcttttcctctggaagcctgataaggatagaatgtcaactatattgctaggcaacactgcttatgatacaaatgatccttgcctggtaaattatatctcgactggggagaaccataaatgaactataaatgcctgatggggataccatggtttggctttcttgagttcagtgactcttataattggcatgtcacttgcaggaccccagaagttcatggaattgttataagagagactggcttctgtgaggtgtaagactttaagcctggaccactcccacacctacccaacatggatctcaccttcttgcacctgattttccatctccttctttctcagtgcaatattccattatttctatgcatttttttctagttcactaattctatcttcaactgtttaatctgctgactaccttttttttttattttggcaagtataaactttcatttctaaaagtttccttttcttccccatcacatgtatttattcctaataatcttattgttatggacagcttgtgactacatccttactttctttatagrtagcagttacatatcctgtaggtgaaagtccattatctgtgt

SEQ ID NO: 850081 - DNA, 549 bp, Homo sapiens
actgctattctgtactgcctctgtcttttgaaaaagacaatgagaaccctggaaaagtgacaaggaagataaagacmactatcaaaggaatgggaaaacagcataacatttaaaagaaaagatttttgtttctaatttggaaaacaactatatatatgtgtttctaaaaagcatataagggtttctgagcagttattttctggaataattccactcaagatgaccccagtcatccatcttccccattcctgctccagtgcatctgaacagcattggagaaaaattacagaatcagattagtacccactgcacttagactccatagccttgcctggcccttccaccctgctggcaatctgagcattttcacttgtcaactcactccttctgccccttttttgacccttcaaactttatccatgcaaacatttaaccaaccctaacctcttggaatatgacttttggtgctgcttctccaagaaaatagaagacatcagatacacatttcttcatattttagccaccaaacctaactcaactagatttgta

SEQ ID NO: 850082 - DNA, 574 bp, Homo sapiens
ctttgagaaaaatgtgtctttattgcaacatagatcacatattaaaatataatatgattgaagttaccataaaataaacaatcattttgatatatattttagaatgctattttaataaagaaattactaaaagcatatcaagtaaaattattatatatctatatcttgaaataatatatatatataatagagacagagtcttgccatgttggtcctgaactcctgagctcaagcaatcctcccacctcagcctcctaaagagctgggattacaggagtgagccaccacacctggccttatttggatatattgattgtaaggcacatgtataaaataaaaaggcttgaaataaataaataatgttagatatttttaaactaaaaataatttatacaatttttagtcataaacttgaaaaacagtgcatattatcagtttttaaggaaatacaatttgccaaaattgatacaaagaataagataataaacaagaataatgtaatattgctagagaatacattaatatraaaacttttaaaaaattacttaaaaacattgccaagtattcaattata

SEQ ID NO: 850083 - DNA, 681 bp, Homo sapiens
ttatttatatattgtatccagttatttatatcatagactcatctcttctatgtatataaatatatatatgtatatataaatcaatgagatgagcctataatgacatatatatatatatatayacacacacacacacacacacatagtatattttggagtttaatctcaaagtaatttagtttgttgctcaaattgttctagtcttggcagttggtatctctttcatttggctcctgtgtctctgtttatgacataatccatccccacagtgtttccttgagtattatctttctttctgagactgcaaggtgtgcccagatcaccttatatatttcatgtctcagtcctagtatcagacatttctccaatgaccttgattttctttattgaggagtggtattagaaaccatctgctaagtgtgaggtgtgcttgttgcccttggggtgtcaatgcttttatacccatcagctgacagaacaatgtatgtatactattccatctccacatatctataaatatattacatgttgccatcagcatctatattaagctaaacatgagttcatactgatgtctccacctctaatccattactacatagatcattttaacctcctccatttgctgatctataacacacaccacttcgacagtgagaatcctgattgcactatccacca

SEQ ID NO: 850084 - DNA, 651 bp, Homo sapiens
caaaaaccatgcagaacagatacacttgacttagcatgcactgtattttatttgttatagccaaagggctttctttctaaaaagaattaaaatgttcagtaaaagatttataaatcagcttttgatgttgctaattcaaaatcaagcaggacatttgccatgcatttaactaatgtatcagtgaggcataattataaattgtggatactatgcaaaactatttcttagcataatagctgagtaagtgtaaattagagacacatggtttttacgtgctatttataccttttgtaaatatttgctctttgaaaataagtggcttttttgctactcatttttgtttgctatacattttttcagcatctttatatcaatatttcctcataggagggattaatcaggtttactgcagatgtccaaattaattgttattgctcttccttaatttaataagaagtctaaaatatgcttcattgttaaagagtggtttcatattattagaaaatgtatacttttgaatactgtgtgcagaattgactttattagttgttaatcactatgtgtagaataacatttcatggaaaataggaggtataaaagttcttatgtatatttgtgtggggatatgtgcrtgtgtgtgtgtgtgtgcat

SEQ ID NO: 850085 - DNA, 639 bp, Homo sapiens
gctactttttgtattgtcttgtatacatcttgacattttctattttaaaaacttagtttaagaagaatattagcctgtttggtacaccatagagacacagtttaaaagtgaatttaaatgtaaggccttatttaaaaagtaatattgtattttatttttgatgaattattctgttagtagaaaacatctctaagctacacattaacaaatttttatgatgaaaaaaaatcacttccttgcttgtgaactgcctcatttgttttttggaatactatttttacgaaacaaatcacaatctagccattagaagttcgtattttacaagatggctgtaagcatatctattgttccacaggtttttctggaacctccctcttccctttttaaaagtagagtttaatccctcttctctttaatcttagcaggttactactatgccagaagtgagttatgagacttcctaggcttagtcatgaaaggggatggcttctatctttcttactgggaagttttcctacaggwcagaggctggcaaacttctctgcaaggataagatagttaaaaaaaaaaaaaaaaaaaaaagctttgccagacatgtgatctcttttgcaactactcaactctgctgttgcagagcta

SEQ ID NO: 850086 - DNA, 635 bp, Homo sapiens
actatccattatagttatagtctctcaagggtaaatttctgatttctgcttgcatttagtcactttacatttccttccaatagtttcattttaattgacacataataattatacatgtttatggggtagaatgtgaggttttgatacttgttacaacgtgtaatgatcaaattagggcaattagcctatccgttacttcaacaatttataatttctttgtgttgagatcttctagctattttaaactatacaatgtattattgttaactgtattctccctactgtgtaatggaacactagaacttattcctcttatctaactatcatttgatacccattgactaatagattgatttccctttcctcctatgctttctagcctctagtaactgatattctactctctacatctatgagatcaacttttttggatttcacatatgaataagatcatgtggaatttttcattctgttcctggctttcacttaacatacaggaaatcagtttttgaaaatcatattttattcagtttttataatgattatccttgggagggttcacaggacatttcattcygccattaccaaaagccagaaccctatctctaatatttgaaatgatatcttatcagatg

SEQ ID NO: 850087 - DNA, 540 bp, Homo sapiens
agggagtataatatctctaccattgttcttctggctcaaaatttttttggttatgccagttttctgtttctaagagaattttatgatttttttctacttgtgtaaaatatgccattggattttttattgggtctacattgaacctgtagttaacttcgtgtagtatgaacatttaaacaatattaatagtcccaattgataattttttaaaagtatctttttatgtatttgtgtcatcttcaatttcttttatcaatatcttgtagtttttactgtacagatttttcaacaccttcattgaatttatccctaagtattttttaatgctattgtaaatgaaatttttaacttttttcagattgtttgttgttagtgtatggaaatgtaactgattttgtatgttgattttgtatccggcaactttactgaattcatgtattggttttaagatttttttttggttgagttgttagggtttctttatataagattgtgtcatctgcaracagaaacaaggtaacttcttctcttctgattggg

SEQ ID NO: 850088 - DNA, 550 bp, Homo sapiens
ttaggagatatacctaatgttaaatgacgagttaatgggtgcagcataccaacatggcacgtgtatacatatgtaacaaacctgcatgwtgtgcacatgtaccctagaacttaaagtataataaaaaataaataaataaaataaaataatgaaaaaaaagaagtatttatacagaacttcacccgacaaagcagcatagacatttactttcaagtgtatatagaatatttacaaagatcatattgtgggctacaaaacgtatctcaataaatttaaaaagaaaaaaaaagaaagtgatgtttgagcaaatactgagatggtcatatgcatgtctgggtaaagagtagtcatacagaggaaatagttaagacaaagtctctaaggcagatgcaagcttggtatgttccaagagtatcaaggaagcctaagtttgtatactgagatagtgtggtatgggtggtaagagatgaggtcagaaaggtaattgagttcttgttagctagggccttgtagcaacataactctaagttaagtgcatagccactttagg

SEQ ID NO: 850089 - DNA, 478 bp, Homo sapiens
taaagaaacaagtagagggctgggcrcggtggctcacgcctgtaatcccagaactttgggaggccaaggcgggcagatcacctgaggttgggagtttgagaccagcctgaccaatatggagaaaccccatctctactaaaaatacaaaattagccaggcgtggtggtgcatgcctgtaatcccagctacttgggaggctgaggcaggagaattgcttgaacccaggaggcagaggttgcagggagctgagattgtgccattgcactccagcctgggcaacaagagtgaaactccgtctcaaaaaaaagaaaagaaacaagtagaataaccagagaagaaaatatatcgttattggaactgaaaactcaattgttaaaataaatagctgaaaaccacattggtgacccagcaatacaattgaatacattatcttcagtagaaaggataaaaaaattaaaatgtctttgtactcctataa

SEQ ID NO: 850090 - DNA, 589 bp, Homo sapiens
agagtttcaagaaaataaagacttaaattgctctgcagaacaatgtaaaaagttttcttcattgcagaaggaatgtggttttggcaatgtatacattatttgtccagtgttatccagagaaaagctggagtagccaccggacaatcgcagttagctagctcattcctgatgagaatcgaaagggaaacgcaattgtgtaaaactcaaaaaactcagtctgtggggctattcatgctgactgcttcaggctctctaaataagacccaaaagaaagatgatacatatattttcagagttgtaaagtatgccccagctggcagacaaaatgaactcttgtgatttacggagacacctaaacttaaaagcagaatcaggcagccacagcaagataggagagtggtcacatgccctgcgtgcttcgaaaatgcttttgtgttctcagaaaggtgttgtaaaagtaacacaagactgccttttctacagtcgagccaaaccagtttctgtggttgctgagatagactgyagctggaaattccccagctgaacaacagaccacctgccataaactaactggccacctgaagccagc

SEQ ID NO: 850091 - DNA, 545 bp, Homo sapiens
actgttctatcatcaatgccacacttttaaatcattggagctttctgatgcacccagaaatctggctcagcattatcttccaaatgtttttgtttcaaagtatatcattktacctcatttatatcaggttatgtgtttttttcaatgtccactaatgcacttacatgtattttaactgaagttccattaaatctagagattaatatggcagaattgctatcttctctatagagaatctttctgtctataaatatttatgtcttttaaagtgtggtttgataaatatacttattttttaaatatttatttgatatctttgtacatttattcttttaaaatatttcatatgtctactattaaaaacacttcaagttttattttataatgtttcctgcatttagaaatgcaattactcctgtatctggatcttatatctgacatgaggaaacatgataaaatttcttattaattttacaaaaaactgtatatttgggaaaattcctatatgaattatcacatctaatttaaccaatttttttctttct

SEQ ID NO: 850092 - DNA, 617 bp, Homo sapiens
aatactgattactttccctgtttctttctttacctgtgagatcatttttctggcccaacattactayattattacaaagctataacagttaaggtccaaggtttatttgaaggcttctttccaactcattgcctcatgtaagctcaagatcttaacttctgttcaattattgttattaaaatccaggcttctggattactgcagtccacattaatgacaatgcacacgcacacacacaaacacaggagcgcaaacacgtgtgcacacacacacatacatatatataaggaagctgcatatggctcatacactaaccatcctgtttttcagtttaggttacatttgcttttctggcattttggattttcctttctctttcagcgtttgtcatttttttttaccagtatcgcttgttgttagatgcacaagtaattctgtttatattttttatcatattgccacaacaaacaagaaccttatttatagtttgtcttatttcaaacatgatttcctctacagggtcacctttatttttaaacattcttgtgtgatcaactggaaaaaaaagaaaaacctatttggacaggaatcatatttagatggtgaaactgattagt

SEQ ID NO: 850093 - DNA, 583 bp, Homo sapiens
tccattctgtgtttaggaaaggtgcatggggatcaactatatcttttgaaattctgtcttctatttccaactgaatagttcttaatatacaatcatcctgatcttaaaatttggtgagatgtgtgtgtactttcctatggatagaaatgtcaacatcttcccttggaggatggaagagtttcgaaatgtattactggctgagcgtatcttccctgtctctgactttggttggggattgaacaaaagagataagaaggagaggaacaggcaagtatgttgttgagcctataccaagtgacaagtaccatattagtcactttgcatcatgaatcagaaaagaaaattcactatgtaataccatgataaagaatatttaaatatcttaggtgttaagaattaataaataaaatacatattaattttttaatgccaagcctcacagtatctcaccacccctcaacaaggraggcttcctggcctttttgcagaaggaagcagaccccacttagtttgtttccatgaagcagtcagcccggccaggaacagagtatattccctgccgatgcacacttgtgtctgtcct

SEQ ID NO: 850094 - DNA, 604 bp, Homo sapiens
agtttgagcgtgggccagatgccaggccagcagatggccgaaacgataagcatatgtccagtagcaggtatgtgcagctcatttgatcattaatcaaaaactgtcccttgcaggtcacaggcgtgattcttacagcttatcctcacgtgaggggtaagggctgtgccatcttaacctgtgctgagcactggcttaaccctgcaaaggttcagaacaaaaactccttccagctgcaactcttgtggctctgacagatcgaggttggatgaaggggctcatcatggtttcccttcctgagagcactcttccagcaaaagtctgtggatagcagtggattccgtggctctgccctatctcctggcaattgctgctactctccatggtgaaagacccataggctgtgcagggtggtaaccgcccacacatgtgttcctttaagaaacctaggggccctcctgggatgctgcagcccaatcgcatgaggctggcctrtcattacaggttctcaccatctgcagtttgtgtgtttggaatcttctctcactatgagacataaaccggccaaaatggcagattcacttctcatattggtactgctcattcc

SEQ ID NO: 850095 - DNA, 646 bp, Homo sapiens
ttaatgcccggtctagtctctgtccactctgtgrgtgagagtagctaactcacttctctgcgttggcttgcagagagaaagcagacgctcacttgatgttccatggtggcaggggccacggtaaggcttgcacccgcacgtgctccaccgctcgcccacgccccgcctccagcttgctgagtgcaccgacgatgctagagtgtgaaattccaaatgctctcagtgtatgcaggtttgcagatcctgacgcactgattgctttttttctccaacgttgtggtagctccttgggagcagtaatgaagaatggaagctttctggaaagtgttcactgggtgcctattagacctgacacaaagctgtgcttgctgtggttttgtgtgcagaggtctataatttgggtttatactgtatttttgcaatatatagacattagcatgcagaaacttggcacctgagaccatgtgtcagggcgcatggagaagatgcttccgacctcaggcaggcagtgtgggcctctagtaagatgcacagggcagcagcattcacattatgaagctgtcaggggacagcgcatttagtactcacagcttagcactgaaatcagaatcccaccccccagggtgtgccatggaggatcctggag

SEQ ID NO: 850096 - DNA, 606 bp, Homo sapiens
agctgcaggatgctgcggtctttgcccctgtctcgggggcgccaagtctgcagggctgctggggacagctttcctctaaggtccgtatcaatggcaaatggtttttttttttttttacctcattttgagggagaaggcactttctgcttagagtagcataaaaccagctccctccaaggcagaagcccaggcctggtggcacctcctgtgggacctggatcatcatcctgaaagaacaatcccaaatgctgtaatcccggaaaatcaaaatccttaaaatctaaatccccacagtctaaaatcctgacatttaaaatcctgaaaccacagtcgcaggacagttgcatcatgtcaggtgggacgatgaccttgttacggtcttcactggaaattaagcatggtttaaggagatgcatttggcggaaattcagatgagtgatgggccctgccatacagcactgacagaatcctyggtttaaaaattcgtcacgtgcctgcagtgacattccttctggctgatgacgtgccaggagatgttaatgaattaaagccacacttgcctgaagaagctggcgaagttaccgactggttcaaaaataattatgt

SEQ ID NO: 850097 - DNA, 663 bp, Homo sapiens
ctttcacgccatgtgttttctcagcccgttgcctcggcttgtaccatcctcttccacctggaatcctgtcctccacctgaccaactctgcagagacttcaggacccagctgagaacggttcctccaggtcctggggtcctccactccctcatcccccggcccacaatcccctgggcacccacactgggacgctgattccatctcgaaggcactgtggtgtcagctgtgaaggcttgcattccctgacacccgggaaggggcctcgttctcccccagcagggccctagaaataagcggattcatcaccttagcctcagcgtgagcttcgaagcacacgctctgaacagaacctcctggacacaatgcgtgggggaggcccatcgcccggccaaggcgtccttgagaccccaggagggagtcagattcctgctccgaagggcctgcaggccctggagcacccggacctcggctcctgacagcaagcagtggatgtacccgtgcaggggatccgctgccattccaaggatcccgctggcgtgccactcggtttttctctgcagataacctggaaactrggagatttgtacagatttgaatgttgacttcatcagccccgcctctcaaaaactgcatgtacttgaaataagagtgaaaaacaatggc

SEQ ID NO: 850098 - DNA, 633 bp, Homo sapiens
acccagtcaccagctccaggcagcaatgccacccagtcatcagctccagacagcaatgccacccagtcaccagctccagrcagcaatgccacccagtcaccagctccaggcagcaatgccacccagtcatcagctctgaagcagcccccccagctacaaactgtgtcgttaaactctaactcgtcagttctctgatgtgacctgggtgcctggaactgtagtattcatggtactatttaccatatgatactggcagaggggttgatggacaagacagatggagcaatggctgggacggatcgtggatctatcacagtctccaacagggacacagtctcccggagcagccatggggcggctgggtctgggctgccctccctgcttcttgccagtgtgcccaggtcccgcacacctggctgacaggagccatcctgctggcggaacatggtggccggggagctgccccagcctctggcagtatgggaagcagtggggggctggcctgtgctatagtctgaatgtaggtgcctctcaaatacgtacagtgaaacctaagccccgtgtgatgttaacaggtggggccttctgagaggaggctgagtgatgcgggctcctccctcgtgaacaggatcc

SEQ ID NO: 850099 - DNA, 647 bp, Homo sapiens
ggagggaagaaatattttcagcaagtctgctaccacactcctcaaattcaactaagagtggtgatttaatgtaagatttatatttttattaactggtgctttgttttcatgttgatattaaaagtgcctgtcttctgcattactttttatttttagggaggagaaatttattttgcattttccgggttcttgggagctgcttcagcactctagagtctttatggataagatcctgggtcgctggcacctgagtgaattagtagtgggttccctgatcttccctcaggtcagaaaagctccgcatccagccctattagcaggggcagaaacagacgccaggagacactgcccacctcctgggaatcggaatcagccttcacagcaccaggagcctggggtgggctgctgtttctgtaaggttttaaaaagtcagagagcacagagttcttccggagcctattctgactcctcctgagttttgttcacgtgagataatatcctcctgggaaaaaatcttgatggaaagccaaggcccccctgctggctgcaagaaaccggaattcggccttttcggcgcgcacccggacacggygctgggatgaaggcgcccagttcatgcccagccagggcctgcagggacaacgggg

SEQ ID NO: 850100 - DNA, 573 bp, Homo sapiens
gtgtgagggagacaaacacctgcggggcttcagagaagggtgctgaccacatctgygggagtctacaggtgctcgtaccaaggggggtgcctgtctcaccactgtgctactgggctcgagtcttcggggctacagcccgggaacccgcatcactaacaagctggcgggcttgtgaggacctcagggttcacggcctcttctttgttattttcccaccacaaacagaaatttgcaaacaccctcactagactctaagctccttgaggacaacagtcaccttctattcctctttgcactggagaggaatgtaggaaatgtaggaaatggagtcaccttctagtcctctttgccctggagcacacctcccagcagagctgtgggcttgtggaagaggatcattaaacactgctgagctccggctcttaaaggtggccccgggatctgagcaggcccattggcttgttttgtttggcttgtctgctactcaaaaaagacaagatttcacacaaaaattcatcttcccatccattctcaaaaaatctgaagagcaatcatgcagagcccactcacctg

SEQ ID NO: 850101 - DNA, 415 bp, Homo sapiens
ttgataggagaactacataatgaatatggttgtttagttctcagcatgtgaaaagaatacaaaactgtattgtgtatctctgaagctgatattctasaaacatcacagtgttagctacagagcgtgtgggacccttagtgtacctgataggcattgactctgaaccgtgctctgaactcctgcccctcgactgcagccttgggggtcccaggcagggaacagaggtttgtgtagctgcattatccaaatgtcaaaacttaaaagtctagcctatgagtgacatgggattgatcccacacacagaagcaaatagttctagcaagtcctaaacttgctggggagacagcaacctgattgaatgaggacatgaacttttgtacgggaggccagcagcagtagtcatgaaagaagaact

SEQ ID NO: 850102 - DNA, 603 bp, Homo sapiens
gctgttggagattgccccggtgcttggcttaaaactgaaattccttccctcaaagttctggggtcagaagtcagaaatccaggcgtctcarggccccactccctccggggggccagggagggtccttcctgccccttccagcctcctgtggcgcgggagctccttggcttgctctgcatcgcgctggtctctgcctcgtttttctcgcggccacactgtgctgtgctttcacttcccgtgtctcttagaaggacacctggcgttggatgcggggcccgccctaatctaggacaatctcctttccaggtccttagctacatctgcagagaagccttccccagacacggtctccttcttagggtctggggcttaggaccactgcccaaccccctcctctagtttaatcctgatcacaccaggaaagggtgggactgttcccattttgcagcgaggaaagtgagacctcatgaggtcaggacactttcgtggtagcgagaattgatgaggacagggctgggtctgtggcaggggccagcgcggcgccgtggggctctgtcccttgcttttcttttggttttcacagcgacatttcaaatgggtttt

SEQ ID NO: 850103 - DNA, 635 bp, Homo sapiens
ttctggaaaaagtttatttttcttctcagtcaactgtactatttgtctccatttttttttgtctcgtcacccttaaggcacacatgagaggccctaagataacttctggtagccggggactccttgggaaaaacagaggaggcaccacagactctgttttgcaaacaaacaccaaaaaacaaacaaaaaaagactctgttttcctcatgaaaccccaggaattaaaagtggataaatccctctcaaaataaaaggctatgttctgttttgcattgtgtcatctgacagttttgagttttgggggtatcagaaactacttcgcagtataaaaaagctttggtgtgtaataactaggtaggaaatctactttaaggggtggctaatagtagttaaggaggaatacttgactctttgcctacttggatcagagatgcatgctcttgggcatctggaagatagggaaacatccccacccccactgacagatgggactcccatgggggatggtctaattacaacatgggctgactggctttgggttgcctcgcaataaaatgcrcagtagaagcattgcactgtcttctcccgtagtacttttctccttttggggatccagtgttcagtataaaatggca

SEQ ID NO: 850104 - DNA, 641 bp, Homo sapiens
tgcatccaacaaaggtttaatattcaaaatttatgaggaacttaagcaattaggcaagcaaaaaagcaacaaccccacttaaaaatgtacacaatatatgaacaaacatttctcaaaagaagggcataacatgggccaataacatatgaaaaagtgttcacatcacttatcatcagagaaatgcatattaaaaccacagtaagataccatctcataccagtcagaatggctattactaaaaagtcaaaaaacaacaaatgctggtgaggctgtggagaaaagggaacacttacatacgttggtgggaatgtaaattagttcagcaactgtggaaaaaaatttggagatttctcaaagaacttaaaagagaactaccattcaacctagcaatcccattactgggtagatatccaaaagaaatctaatcattctaccaaaaagacacatgcacttgtgtgttcatcatggcagtattcgcaatagcaaagacatggaatcgaccttggtgcttatcagtagtggattgaataaagaaaatatggtatatatatatacacacatatacatacacaccatggaatactatgcagccataaaaartaatgaaatcatgtcctttgtagcaccatggacgcagttgg

SEQ ID NO: 850105 - DNA, 520 bp, Homo sapiens
ctggaattacaggcatgagccgctgtacctggctggtttttaacactcttaattactgtaatacaatgtgttaatagagtaagtgacacagaccacatgatcatctccgtagacaccctccaaaatggcatttggccaaatccaacacgttttcttgatgtaaaaacaaacacaacaaactagcaatagaagagaactttctaaatctgaactacaaaaacactcagctaaaagatggaacagcttcccccgagatcagaaacaaggcaggatgtccactctcaccatgtacatccaccgttgtacatgaggttctagccagggaaattagacaataaaaagaaaccaaagtcattcaaattgcaaaagaagaggtaaaactgtcttggttttacagatgacatgatgatgtatatagaaaatcccaagaaatttacaaaacactattagagtttaacaagttcagcawggttcagaatacccgtcattaaaaaaaaataataattgtattgctatacac

SEQ ID NO: 850106 - DNA, 272 bp, Homo sapiens
ggattttgatccctataaagaaacagtccagaaagggaacctcrtgttcacctggctgcccttattgtacagaagaggaaactgtaagctaagagaggcaagacctcagaaaccggagaggatgtaaatgtgtagcatctgctgctaaactttgtcatagctcacccaagggagtgttttaccctgttgtggtccagccccttctctgcagtcacacactttccagaaggaaggtccctctggtgcaggctcactactaggtggcactgtgc

SEQ ID NO: 850107 - DNA, 528 bp, Homo sapiens
taatgcagtggtgaccaaagttgaagccagtgctcatttacgattccccaaattcgagggcccttaagaattatgctaactctacattgcctgtactctataaacagaacaacaaagcctggatgacaacacatgtgtttatattatggtttactgaatattttaagtccccagttaagacatactgctcagaaagaaaaaaataaagattcctttaaaaatattactgctcactgacaatccacctggtcattcaagagctctgatggagatgtacaaggagattaatgttgttttcatgcctactaacacaatacccattctgcagcccatgtatccaagagtaatactgactttcaagtcttgttacttaagaaatacatttcgcaaggttatagctgccatagctggtgattcctctgaaggatctaggcaaagtaaattaaaaactttcyggaaaagatttgccattctagatgccattaagaacattcgtgattcaagagagaagaacaaaatataaatatt

SEQ ID NO: 850108 - DNA, 575 bp, Homo sapiens
agtgcaaatcaaaaccacagtgagttagaatggataagcctcactccagctagaatggatattatcaacaagacaaaaacaaacaaacaaacaaaaatccccaagtgttgtcaaggatgtgaagaaaagaaaacacacactgttggtgggattgtaaactaatacagccgctgtggaaaacagtgtagaggttcctcaaaaaattaaaaatagatccataaactttaatgctccactgacagcactagacagctcatctagacagaaagttaacaaagaaacaatggacttgaactataccccagaacaaatggatttaacagacatttacagaacattctactcaacaactgcagagtatacattctattcatcagcacatagaacgtttttcaagatagtgcatatgataagccacaaaacaggcctcaataaatttamgaaaattgaaattatatacagtactttctcagaccacagtggaagaaaactagaaatcaactccaaaaggaaccctcaaaaccatgcaaatatgtggaagttaagtaacctgttcctgaatgattgtggggtca

SEQ ID NO: 850109 - DNA, 617 bp, Homo sapiens
gagtagtggctcatgcctgtaatcctagcattttgggagaccaaggcaggtggatcacttgaggtcaggagttcgagaccagcttggctaacatggtaaaaccccatctctactaaaaatacaaaaattaactgggcgtggtggtgggcacctgtaatcccaggctgaggcaggagaattgcttgaaccgctcgggaggtggaggttgcagtgagctgagattgccccactgcactccagcctgggaaacagagtgagactctgtctcaaaaaaaaaaaaaggaaaaaaaaataataaagagctgtagggcaggaattgtacaaggctaatatccaagatattatgtaattttccttgttttcctttctttccattcaggcagatgtgattctccttgtcacgtgctctatcaggtgcgaatttgttcttttcctaggagtgaatgtattttatgtaataatgccagagctaacagtgcctggcctggctrtctatggagatgagccagtggccccatggcagtaggacttgcagttttcccacagtggagatagtctttatacaactggctgacattggctgggcatgtaccgtggtgtcaggttctgagtgagta

SEQ ID NO: 850110 - DNA, 531 bp, Homo sapiens
aattaaaaagttaattactgttctcttaaagctacttttaatcaaacaaaaacatttctgccacttccactgtagcatgtaaaattcaacttacttcactcctaaaacctaaatctgaccaaaaaacaaacaggccagacatggtggctcacaccaataatcccagcacttgaggaggcctttgggaaaccagcccagccaatatagcaagactgcatctctacaataaataaaaattaaaaaaaaaaattatccaggcatggtggtacgcacctatagtcccagctactcaggatgctgaggtgggaggattgcttgagcctaggagtttgaggctgaagtaagctgtgatcatgccattgcactccagcctgagtgacagacaaagactgtcttctaccaaaaaaaaaaaaacayaaaaaacaaaaaaaaccttacttcgctgtcaccctacaaagtattttgatgcactgcttccaaattaactatacaatcaaccaattattttagggacctataatacatttatgg

SEQ ID NO: 850111 - DNA, 637 bp, Homo sapiens
gacaatgaaagtaaagtgcttagtacactgcatggcatgtggtaaatgctccataaacattcatgttattgttttcagtataagcagtcaaaaataccaaaatttttcttcatgcaacaaatatttattgtgcgtttactatatgccaaacttgccaaatactggagaatatttgaaaaataccttattcagtgaccaaagtaagaatctgcatctctgttgttggctgtagatggcaatttctgcttcctggccttacttctttaaagaaaaaaatttcccatgcattagtcacttagatcaacccattgccacatttttttagtgttgaaagctaatatattttagtaatgcttcaatgaactgtggtagcaacaaataaagaaattgacttctgtcccaaaatatggggagtagagttgtaatcaggattacaaaaaaaaaggggccagtattacaagctgctaaaatgcttttgcgtggattattgttttatttggaccccctccaccctttaaatctgatacatgctaagattttcatgggcacagccacctcctaatatgtggtttygcttctctgcaagcatggaatcccctctgcagttatgtttgcctgtgcatctccggcagctgga

SEQ ID NO: 850112 - DNA, 624 bp, Homo sapiens
cagccactgaagtgtagtgcattttaaaaaactctttctgggaaatgaaaacatgattttgaagtagtctgtagtattgaaatgcagcactctgctkctttgcgaagcaagacttactggaggctcactggtacagaagggccctcaaggcaaagaggctcagaaacagcaggaatgggatcttgagaaaggtaccgctcatcctatgaaacaaattgctctaattaaaaaaaaaatgtgtcatgttagcaagaggaactcagctggcaatgtgacggtggaagtaagttgtaaaaagcctccatagaaatatctactctaccgacttcataatctctgctgctttctgaggtgtgatgaaaaggatcggaaattgttggccggtggcctccaacacttctggccattcccttctcccctcaccctcttctcccaggaaaaagaatctctctttgaaaacatttcccttttattttccttttcatcatcctgtctgagtacatggcttcaatagagaaagatgctttaagacattaacattttatcaacttaaggctctttcagccatcgcccacaaatccctatggaattttgaacacttaaggttaattagttgtgcatttg

SEQ ID NO: 850113 - DNA, 244 bp, Homo sapiens
cccattttctggtagcattggaagccacatgctccagatggkgtagtcacaagatgaaagctgtttaggtccctgagcttggaggatagtcacccaagagagccacataacccatatgggactgtactgtgaaagagcaaaaaaaaaaaaaccaaaaaaccttgatatgtgaagccactgagatttttgtggttacagtggctagcattaataatcattaataattctaattaatatgcctctt

SEQ ID NO: 850114 - DNA, 493 bp, Homo sapiens
tttactataaaattattttataagcagaaatgtttgtcctgaatatcaagatgaacacttgaatgtttgtttcaaagaattaaatcatttcagtgctgtcctaaagctagtttcraaattatggaaaggtttctgaaaccaaatgcatttcttctttggaggatatagatacacacatgcacatgcacacacacactcttaaaagaacttggctcatttttcgaaatgcagaatacatttttccaactccattattcctctccctctggcttgttgagatgaacactttactaggataaaggatttcttctgtaaggaagtcttatttcagattaattggaaccaatggagaatgcaaacaccattcactttctagcatgatatgctggtgggttggaacccatctgctgctgttgcagaaagtacttggccaaagttgcagtttggaaagagatggaggaaaatggacaagggagcacttctcagagtgcaa

SEQ ID NO: 850115 - DNA, 657 bp, Homo sapiens
attttcaggtgaatttttgtgaaagaattttttgtgggagatartgaaagtgtatatataacagcgtggatgctgttaaactgatgtcactcaattgttagtaattctctgtgtacttgggcaactaagtccttttatactgagaagttcaatgttatgaatagcttatagaaataggtaacatcattctcttccccattccctggcccctactttatatatatatatatggatagacagttatataatatatttatatatgattatgtaattatataattatatataatataaatatatttatttataaatataaatttataatatattataaatttgtaattatatatattataaatacaataattacacatatagagagagtgggaaccaggactatatttttatatatagtaggagccaagaactgtatttatatatggtatataaatataaataaatataaatatatatctatcttctgattttcatggaagttgaaatgcctcataagagaatgacatgtttagacatattaggtgtatggattggcatgtaaaaatggagacaattggcaggaggttgagctatcagagaaaatgtcaccaaggaacttgtgaagtgtggcatgatgagacagctttaacgacagggcct

SEQ ID NO: 850116 - DNA, 688 bp, Homo sapiens
atattttagtgatcctatcaaggatcactgtatccaaaatcccttctggagaattcactggagaatgattagaatttaatgacagaaaggctagcatctctttcctcagagaatttccacactgcaatcaagcaagaaggccagggatttccattttgttaatgtgtttgactagataccctgaatatctttctattgtaaagcacctaaaattatggataaaacattgaaaaacaaatattacaaatggacagctaaactctcaataaagtaaataaaatatttatgtttcagattgatgatgagatggaaaattagagcgataaatttaggaggtgatgctgcagctttactctcagggaagaaagaaattttagtagcttggttccaatgttcacattagaatagaagatgaagtagagagtgctgatagtgaattggaactgagtttttcaggtaaagcagaaagtgctagatctgcaaaagtgctagaccttcactggaatgacagaataagaaaacataattttcctgctggcacagtaagacaacttaagccagtcgtggtggctcacacctgtaatcccaacactttggaagactgaggcagggggatcacttgaggccagaaatttgagaccarcctgggcaacatgtagataccttgtccttacaaaaaatacaataa

SEQ ID NO: 850117 - DNA, 667 bp, Homo sapiens
caaatttaatccaacaatatataaaaagatttatacatcagaaccaagtgggatttatctcagatatgcaatgctggttcaayatcaaaaatcaattaatgcaatccattgcatcaagaggcttaaaaagtcgtgaaattgtatcaatagatgcggaaaaggtatttgagaaaatccaacactgacatatgacaaaaactctcagtaaactgggaagagaagaaatcttcctcaaattgaaatggaatatctacgaaaagcctacagcttaacatcatctttaatgatgaggacctggaagctgtcccaccaaaatagaaagaggcaagaatatttcctgtcactactgcttttcaccattgtactcaaagtcctagttaatgacataaaacagaaaaagaaataaaaggtatacagattggaaaggaaaaaataaaactttgttcacagatgacgtaatcatttatgtagaaaagcctaaagaattgaccaaaaaaccctcctagagctaataagcaattatagcaaggttgtgggacaaaaggttaaaatacaaaagtcaatcactttcctatataccagcaataaaaatttgaatttgaaattaaaaacacaatatcatttatattagaacctacaaaaataaaaacttaggtgtaaatccaag

SEQ ID NO: 850118 - DNA, 667 bp, Homo sapiens
caaatttaatccaacaatatataaaaagatttatacatcagaaccaagtgggatttatctcagatatgcaatgctggttcaatatcaaaaatcaattaatgcaatccattgcatcaagaggcttaaaaagtcgtgaaattgtatcaatagatgcggaaaaggtatttgagaaaatccaacactgacatatgacaaaaactctcagtaaactgggaagagaagaaatcttcctcaaattgaaatggaatatctacgaaaagcctacagcttaacatcatctttaatgatgaggacctggaagctgtcccaccaaaatagaaagaggcaagaatatttcctgtcactactgcttttcaccattgtactcaaagtcctagttaatgacataaaacagaaaaagaaataaaaggtatacagattggaaaggaaaaaataaaactttgttcacagatgacgtaatcatttatgtagaaaagcctaaagaattgaccaaaaaaccctcctagagctaataagcaattatagcaaggttgtgggacaaaaggttaawatacaaaagtcaatcactttcctatataccagcaataaaaatttgaatttgaaattaaaaacacaatatcatttatattagaacctacaaaaataaaaacttaggtgtaaatccaag

SEQ ID NO: 850119 - DNA, 603 bp, Homo sapiens
gaaaaggctaaattataattctgccactttcctcattgtgttaagtttctgttgttctttagcatattatataaatgtagtatcttaaaaacagcacacgtttttgatttgacagttctgtagaagtccgacatggatcttcctgggctaaagtcagagtgttatcagaaatgtgttcttttttgtaggttctaggggagaatatgtttccttgcttttccagtgtctagaggccatgcatgcatatttcttggcttatgggcacctttctagatcctcaaagccaacaacattgctgctttctgatcacttttctataataccatctccctcttacttagactatagctgggaaaatgtctcttctttttaagggcccatgtgattagatttgaaccacttgaatgtgattaaatggggaaatctaatagtcattttcacatctcgaggtccttagcttaatcacacctatgaaacattcctaaatcccagggattaggaagagaatatctttgtggagccattattytgcctaccacacccattttacgcttttcatctcctttttgaaactcggtaagaatcacttagagatttccctga

SEQ ID NO: 850120 - DNA, 603 bp, Homo sapiens
gaaaaggctaaattataattctgccactttcctcattgtgttaagtttctgttgttctttagcatattatataaatgtagtatcttaaaaacagcacacgtttttgatttgacagttctgtagaagtccgacatggatcttcctgggctaaagtcagagtgttatcagaaatgtgttcttttttgtaggttctaggggagaatatgtttccttgcttttccagtgtctagaggccatgcatgcatatttcttggcttatgggcacctttctagatcctcaaagccaacaacattgctgctttctgatcacttttctataataccatctccctcttacttagactatagctgggaaaatgtctcttctttttaagggcccatgtgattagatttgaaccacttgaatgtgattaaatggggaaatctaatagtcattttcacatctcgaggtccttagcttaatcacacctatgaaacattcctaaatcccagggattaggaagagaatatctttgtggagccattattttgcctaccacacccattttacgcttttcatctcctttttgaaactyggtaagaatcacttagagatttccctga

SEQ ID NO: 850121 - DNA, 387 bp, Homo sapiens
actgtgtaatttacttataaattgtctctagtacaaggcatgtttggattagccatataaacagtggttatcattattacatatatataagcagcaaaaactaaatcttcgagagtttaagcaactttctcggggttacatacccataagaggtatggggacaggttataaactcaggtctttaagagatagacacttcaactttaaattagtgaacctccagggagtcataccatgtgcagaaagaattctgaaaaatggtgtgggagatttttggttktgctataaactgggagatgttgctaacatttagtgagcagtggcctgggatgtgaatctatttcaatatgccaagagatctttcaaagagaaattgtaccaggcagt

SEQ ID NO: 850122 - DNA, 537 bp, Homo sapiens
caaatattttatggcttaagacctcaaaagtaaaagcaacgatagcaaagatagacatgaaattacgtcaagctaaaaaagcttttgcagagcaaagaagacaagagtaaagagacatcctgcagaatgggagaaaatatttacaaaccattcatttgacaaggggttaatatcgagaatatttacaaggaacttaaacacatccacatcaaaaataacaaataatctcattaaaaagtggacaaagtatctgaatagacattcttagaataagacatacaaaaggaaaaaaaagtttatgaaaaaatgctgaacatcactaatcaaggaaatgcaaatcaaaaccacagcaaataacaaataacaaatgctcatggatttgaagtcatattattactaaaatgtctwtactaccatagcaatctacagcttcaatgtaattcttatcaaaatatcaatgacatttttcacagaaatagaaagaaaccctgaaatttgtgtaaattctcaaaagaccccaaatggctagagcaaaat

SEQ ID NO: 850123 - DNA, 593 bp, Homo sapiens
catttgaacaaaaatgaatgaaatgagaaacaggccacatgatattttgagacagcatttaaagagataaagcatcaagtacaaagacactgagtacctcttagtgtgcttcaaaatttgaataaagctgaagtagaaagggagtgaaaaagatttgcagaaaatgagatcagagagggggcatggagacaattcattcagcatcttacagtcatgtaattaagtgtgcattttagcataaatgtgataggaatggaaaaaagactttgagtaaaattggaaacacttttagtatttttataaaaaaaataaccattaataagaatggtctttaagaaggaaaaggtgagagtcaggtgaatggttacagaattcaggtctggttactttactagataaagcagctatatatggagaaagtgtgaaatataatgtccatgcaaaggaatttttgtttgraaggaagagtgacacccaattgagtgatttaaagcatagggaaggaagggtagatttaggcatgttatctgctttttgggtttgaagagtgactaaattttccagtttcacattcttttttcactacaataatt

SEQ ID NO: 850124 - DNA, 431 bp, Homo sapiens
gaataacagcaacaaattatgaaaagagacagtgactgccactatcctaaactgtattttaaagatatttatatagtaagcaatgagtgaagatagrtaattgcacactctggaacaaagggcaggcttattcacagtatagtaagatacttttcctcaaaagcaaacattagctgtgcttgctctttattataaatgattccacttacataaactagggtttttactgtgaaacaacctgacatatgtatatgtgtcactaatcttccttgaatcattctatgggaattggggctcaggaattgggcacaaatatgaaaaactgggcactggtattgttataagtaataatttatgctttttctgtgacccaggagtcacatgttttctgccaacaatcatgaaactgtggcaaacaacctagtttctaa

SEQ ID NO: 850125 - DNA, 431 bp, Homo sapiens
gaataacagcaacaaattatgaaaagagacagtgactgccactatcctaaactgtattttaaagatatttatatagtaagcaatgagtgaagatagataaytgcacactctggaacaaagggcaggcttattcacagtatagtaagatacttttcctcaaaagcaaacattagctgtgcttgctctttattataaatgattccacttacataaactagggtttttactgtgaaacaacctgacatatgtatatgtgtcactaatcttccttgaatcattctatgggaattggggctcaggaattgggcacaaatatgaaaaactgggcactggtattgttataagtaataatttatgctttttctgtgacccaggagtcacatgttttctgccaacaatcatgaaactgtggcaaacaacctagtttctaa

SEQ ID NO: 850126 - DNA, 431 bp, Homo sapiens
gaataacagcaacaaattatgaaaagagacagtgactgccactatcctaaactgtattttaaagatatttatatagtaagcaatgagtgaagatagataattgcacactctggaacaaagggcaggcttattcacagtatagtaagatacttttcctcaaaagcaaacattagctgtgcttgctctttattataaatgattccacttacataaactagggtttttactgtgaaacaacctgacatatgtatatgtgtcactaatcttccttgaatcattctatgggaattggggctcaggaattgggcacaaatatgaaaaactgggcactgstattgttataagtaataatttatgctttttctgtgacccaggagtcacatgttttctgccaacaatcatgaaactgtggcaaacaacctagtttctaa

SEQ ID NO: 850127 - DNA, 611 bp, Homo sapiens
aggtgcagtacgcctggctaatgttttctattttttgtagagatggggtttcaccatgttgctcaggctaatcttgaattcctgacttcaagtgattcacctgcctcaggcttccaaggtgattatagatgtgagtctctacactggtctcaacttcatttatttaattgaatgtttagagggagcaacttaactctcagcaaattaagatctgccaaatatgtatgtacacacatacacacataatttcacatataatagtctgctatatatgtttctggttcaaacttctttgtggatcccttttggatggtcaagaagtattttaaaccctcaattaaattaaacagtgtctttgttttaaattagcttcttcttggtcaattcagtctcttttgtctaaatgctcaggtttgtctttttaattgaaaaaaattattattttagtgtatctacacaatcattcctctcaagatagcatttgagtacaaagaaaaacaatgtgtgctstgttaatgactgagtctcaagtccaggcttaagttttttgctgtttcctgcaccctttaatcatccacgccatgcctggactatcccttaccacacttgat

SEQ ID NO: 850128 - DNA, 563 bp, Homo sapiens
ccttgaatgcctcaagtaaaaggagactcgataccttctaaggtaattcattctttcattggagaagtctggctattataatgttctccttyacctcaagtaaatatctatccccctgaaatatctatttattattcctagaaaggtttcttggggccatttaaaataaatctaattttacttttatttgagagtccttttaatatttgagcatagtcagcatgcctgtttctttttcatattgcatttcctcatgagctgaacagtcaggtatctctaattggtcctcttacaatatggtttaagtccctttaccatctgggcatgggaggtcatgtaagctatcacaactgcagcaagatcctgttatcctgacaacaaatggattagggacaactatgtttcttaaaatcagactagaagcatcctttagctctttggaaattatagtccacatgcaagcatggtaattctccttttatccaatgtcacatagaaatcaggtgctctacagttgagagttttccaaataatattaaccctttaagcaccaaatttttggg

SEQ ID NO: 850129 - DNA, 535 bp, Homo sapiens
ccttctctggattggccgaggccggagccggctccctccgcttgcggggaggtgtggagggagaggcacgggccgggaaacggggctgcgggcggcgcttgcgggccagcgcgagttccgggtgggcgtgtgcttggcgggccctgcactcagagcggccggccggccctgctgccccgggcagaggggcttagcacccgggccagcagctgcggaggatgcgacgggtcccccagcaattccggcccacaggcgctgcgctcgatttctcacggggccttagctgcctcccagtggggcagggctagggacctgcagactgccatgcctgagtctccacccacccccagccgtgggctcctgcgcagcctgagcctcccagtggagcgccgccccctgctccactgcgccgggtcccatcgaccgcccaagggctgaggagygctaaaacaaggcgcgagcagctccccctgcagccccagtgagggatccactgggtgaagcccatctgggctcctgagtctagcagggactt

SEQ ID NO: 850130 - DNA, 591 bp, Homo sapiens
gatattgttttatatgcttttaawctttgtataaatggtagcaggtcatttgtatcattcttcagattgcttttgacttcagcattgtatttttgagaattatttacgatgattaatgaagacatagtctacattttaattgttctagaacatagcctatatgactatatccattcatctgctgataatatttaggttgtttccatttttttctattacaaaaaagcacagcaatgttattcatatcaaattatgcaaaagtgcaagagttcctcaagcgctctgtttagaagtagaatttctggctgatgggatatgtgtcactccagtgattagtttcctattgatgcagtaacaagttaccatacatttagtgacttgaaatgacaaatatttatgatattacaatagatatatagatctaagtactagatcacaactgtcacacaggtctcacttagctaaccagcatgttggcagtgctgtatttctttctggagactgtaggggataatttgttttcttccctttcttagtcctagaggctgctcacaatccttggttacgacccttccttcatcttcaatgcca

SEQ ID NO: 850131 - DNA, 540 bp, Homo sapiens
agacaaaaaagtagagagacatacaggaatcgaaagtgaggtacagaaacagctggattggttacaggttggcatttgccttatttgaacacagtttgaacactcggcagtctatgagtggttgaaatatggctgctaggattggccaaaactcagatattgttataggcacatactcctaagttaggttttcaatcttgtctacctattaagttaggtcacagttcatccacaagggctcaaatatagaagtacagagtctttctcaggacatatttagtttgctttaacaaaagtcagcaccaagatgagtctgtaggaacaaaccttactaaagcaacccttactttccattagtttcccttgcatattaccatcccacaatttactgtctcttgaagctcaaacctattttcctttgccttgtcactttcccgtaatttatcaccctctgttaaaatggtacgtgagtccttgggtcaaactgcttcaytggttcttccattcttttctatgaaggcctctgtgcacataaaaatt

SEQ ID NO: 850132 - DNA, 656 bp, Homo sapiens
agattcagagagactccagaggtgccttgtggtcagaacaaatttatagacaaaaaagtagagagacatacaggaatcgaaagtgaggtacagaaacagctggattggttacaggttggcatttgccttatttgaacacagtttgaacactcggcagtctatgagtggttgaaatatggctgctaggattggccaaaactcagatattgttataggcacatactcctaagttaggttttcaatcttgtctacctattaagttaggtcacagttcatccacaagggctcaaatatagaagtacagagtctttctcaggacatatttagtttgctttaacaaaagtcagcaccaagatgagtctgtaggaacaaaccttactaaagcaacccttactttccattagtttcccttgcatattaccatcccacaatttactgtctcttgaagctcaaacctattttcctttgccttgtcactttcccgtaatttatcaccctctgttaaaatggtacgtgagtccttgggtcaaactgcttcactggttcttccattcttttctatgaaggcctctgtgcacataaaaattagaatattaacacaaaaattttcgtatgtcttwtcttctgttaatctgtattttgcccattcaattcaa

SEQ ID NO: 850133 - DNA, 585 bp, Homo sapiens
ataacaatgaaattgccctaccgtaattgtgataatgataaagaattgatttctggatctctagaattatcttctctagctattattgtcttcatggctttgtaaacttaaatcctctcttatgccccccagtttgtaaacttgtattacaattttgaatttttttcagaaactatagtatgctttattagtataaaataaagtgattttaccttgtaagaatttaattaattagaaagagcagaattctgtaacataaaattttaatttaaaagaaatgtcaaacttgacttgtgataatagatcatgagagatactatgagatataagacattggagagaagattaattcataatgatttagcttgatacatagtataatatagtcagactccatcacttggaatttttttttgcttgtactggacagaagcagatcattttaaaaagtgatctcwaagaaagcagttattttgagtttaaaaactcaaattgttttgagtttttaagagcaatttatcctccacaacaagttaaagaatttagtatattgcaatgtatttgaggaaattatgctaattacaa

SEQ ID NO: 850134 - DNA, 582 bp, Homo sapiens
ctataggaaacccagaagcaaaamcttttattcctttgtaggatagtatcaatatatgaaccattgtgtttataatgataataatattaccatggtacatatttacagtgtttgttatttgcctgacatcatgctaagtactttcctttccttatttcattttatcctcaaaattattctatatggtggtttcttctattatctccaccttacagatgaggaaacaatattagagtgctgagtacttacttgaccccaggctgtattagaagtcagtgggggaggggctatcccagatgtgattcctctccaaagtcctcatcttgaccacggtaggaggtgggggctgcctcaccatcactacacctgtattctacttgtaattctcactagcaagggagactctttttaacttcgagaccgggaatgaatataaccaatgcatacagcaaagattcccagagacataaatttcaaagggatatgatatatcacagtgactcttacaggggaagtggtcattgggtatagcataaaaggagaaataggaattcactgtggaggaaactttagtatagaggg

SEQ ID NO: 850135 - DNA, 624 bp, Homo sapiens
ctctttgaagagagaaagcctcaaaatgcttrttgtcaaggatgtttcactggaattacagagcgcttcaacaacagtgaatgtgactgtatcaacttcagactcccaccttaagtacaaaacagtatctgtcagaaccataaactatctgaaaagagaaaggagttttcgtgggtaggctttaaagtctcaaaaaataataataatttccttctgtatctctctgttgcttattcaagctaaccttcttcctgatcctctcccacatcaccactaatctttattgaacacccctgctgcctctaaaaagcatattccaggagcatgctaaacttgtgactgcaaagaacaactgcccagacagagttcaaaaagtttacacggatctacaccctccacaggaaattagcaattcccaatattaaattgcttgcttgttattgtatattgtcagtttggttttgactctgtttgcttttgtgaggaatgctgaaaattctcttgtataatttaggaaggtaagaaagaaaatgccaaacttaatttccaacctaactctccattttgatattgtggccaaccaaaattgagacttagcatccccacacactgactaccacccta

SEQ ID NO: 850136 - DNA, 436 bp, Homo sapiens
cagaaaaaactattataaacattttggtgcatttctacaagtctttttgtatgcacatatgcatacacacacatacatgtaaatatatatccagatatatactggaatatactgtagatactgctttatattctgctttattcactcaagagtggatcattagccatgtctttaaaagtttttcacaaatactttgaatgactgctgaattagtctgttttcacactgctgatagagacataaccaagactgggccatttacaaaagaaggaagtttaatgcactcacagttccatgtggctgggaggcctcacaatcatggcaraaggtgaaaggcacatctcacatggtggcagacaagagaagagggcttgtgcagggaacctcccatttttaaaatcatcagatctcatgagacttattcactatcatgaga

SEQ ID NO: 850137 - DNA, 611 bp, Homo sapiens
cccagttccctatcaaaacccagaaatttctgttttggtcgtggtttaaattaagaaggggacaaktggccaggcgtggtggctcatgcctgtaatcccagcactgtgggaggccgaggtgggcagatcacgaggtcagtagttcgagaccagcctgacctacacggtgaaaccccgtctctactaaaaatacaaaaattagctgggcatggtggtgcgtgcctgtaatcccagctactcaggaggctgaagcaggagaatcgcttgaatctgggaggcggaggttgcaatgagccaagatcgcgccattgcactccagccagggcgacagagtgagactctgtctcgagaaaaaaaaaaaaaaaaaaaagaagctgacaatcttcagacaatactgaattaaaatttcaccagcacacaggtgcagctgcacagcaaaccagagagagcagcctggtgtgcagacctcccgcctgccaccacggatcgaaaggcagcaggggatggtggacatattttttatttacttacccgggagagatggggaagaatctgtatttttaaaactggtcatatatttaaaaaggactctgactcaaatgatgtagtca

SEQ ID NO: 850138 - DNA, 650 bp, Homo sapiens
ttataagaatgtaaaatggttcagtcatttggaaaacagtgtggcagtttcttcaaatgttacacaaaaatcacacacccccagcagattccacttctaagtatctactgaagagaactgaaaatatgtctacagaaagacctacacatgactgttcctggcagaactattcaaaatagctgaaaagtggaaagaacccaaatggccatcaaatggtagataaaataaatatgtgtagtggtgtttataaaatattgagatactgaatgtatgacaacaacagcaaaaaggcagagaagggagagacagtgtgtgctgctgtaaagttcatatactgcatgtgaaggatgtaatggaacttgaaagtaagttctgataagtgaaagcatatattttagtagcagctaaaacaatttaacaaacagctaataaattctattgttccatgtgatgcttctcactgagttaaaacaactctgccagtatctaagaaaaagtaaagatttttctatgcctacacttggatttttaattatctgaatttcattaatataaaatatgtcttgtgtgaagaagatgtcagagagtacatrtgggggtttttggttctgcgttatgttttcaaggaacaatttaacctttctcttctt

SEQ ID NO: 850139 - DNA, 519 bp, Homo sapiens; identical to SEQ ID NO: 843697

SEQ ID NO: 850140 - DNA, 634 bp, Homo sapiens
tctgcggaacagatgaacctggaaaatgatagtggattatcgtaagcttaacaaagtggtgactccaatttcagctgctgtaccagatgtggtttcattgcttgagcaaattaacacatstcctagtatctgttatgcagccattgacttggaaaatgcctttttctccattcctgtccataaggcccaccagaagcaatttgtcttcagctggcaaggccagccacgtaactgtaaggtcctacctcaggagtatatcaactctccggctttgtgtcataatcttatttggagacattgttttttgcttccacaagatatcacaccattccattacattgatggcattatgctgattggatccagtgagcaagaggtagcaagcacactggacttattggtgaaacatttgtgtgacagaagatgggaaataaatctgactaaaagtcagggaacttctacctcagtaaaatacctaggggtccaatggtgtggggcctgttgagatattccttccaaggtaaaggataagtttctgcatctgactctttctacaaccaagagagaggtacaatacctagtggacctatttgaatttggggggcaacatattcctcatttgggtgtgttactt

SEQ ID NO: 850141 - DNA, 612 bp, Homo sapiens
tacaaagaaattatctaaagtaatcataacataaattcattttataactccagagaagacaataaaatcatttgctatctgaaattaaatgtaatgaatttacttaataagaagttgtctatgaaaatttagaataatcaaagaaatatgcttccttataaaacaagcccttttgttaaagaaagcacaagtgctatttgtctcaatgttcttgaataaagaacaatgattttcaataatcttcatattttaagtttgctaatggaaacacatttaagaacataaagtgcatttcaaagtacatacactctacttaaattctttttttcctaatactttaacttctgtaatttgaaatatttatagctattcttcactttccatatacatgaactcttccacaaaaacaaagagatatgagatttcaaaatactattaaaatggcttgggctattttagaaaataaagctagatatatgtgttagcytttctcttgatttggcacataaggaaaaggatgtctctgctctaaacttgtacatttctataaggcttcttgaacctaaaggaattattttttgtgagagttggatctgattttacattcaaatc

SEQ ID NO: 850142 - DNA, 640 bp, Homo sapiens
agtagctcttctaagctctttaatgagtaatttcacattaggacatcagcctgagagaatgattgcagattccccccaactcataaaacatggatatgaaatcctcttaaacaaaaggcttgatacrggaccaattaaggtactttccctaggagttcagtaaatctagttaggtagatttatatactctatttgtgaaaggtagaggaaagagttttctaaactactgtagctattttgtattccctgaacatttataatcaaacctttaaactcatttctaatatccattatgctaataaataagacacttgtttaaccgatatcaaatattttatctaacatgctaatgagaaaactgttgattgttgaatgaaatacatttagcataaggatatttaacatctcaatataaattatgctctctcttataaagctcgttgactaacttcaaatggtgcttgtttgatagaatttgttacttcaacaaagagttgaacttaacgtaactgacatatatataatgaacatttcacatcaaaagtttataccaaagtttatgaagtgtattgtctctaaaagaaattgggattactattggagggaataaacccatattcgtgattatgctattaaaatg

SEQ ID NO: 850143 - DNA, 594 bp, Homo sapiens
tctactctttccttcgagatactatggaagaactgccccttgcttcaaacaaagcccaaccgtttcatctgcaacctagatcccatactttgttatccactcaaaagacactgatccagaagttttatctactttatcgtgcatatcgtttacctctccttttttaccactgcatgcagacatagggttatttctttccctttgttttctaaaaatgttctttgacataattttagctacatctatgggtctatttcttctttttcctcaagaagtagtacacaatgaaaatagcatttatattagcttgctccaaattattcctgatattttttcttgagccccacctaacaagggtttaatcccctctcctctgaaattatttttgccaaagtcacagataatgtttaaattgtaaaatctgtagtcaacttttcattttttgccttacttgaaacactgaaccttaacagttccaggacacagaattctactagtttaccttcagtctctcggtttcttttgctaattcctccttttcttcctgaygtattaatttaagagaactggagagctcacacttataataacatc

SEQ ID NO: 850144 - DNA, 555 bp, Homo sapiens
gtgtctccttgttttaatttcccttattttttatttattctcagtaaagcagccagaaaagcatcccatatatacactaggctttctctttttaatgtccttgattgaatttccatatccttctgagtaaaatcaaagtttgcagtcgtaggcaagtaaccgcatggactgacctttcattatctctctggcctctttcctacttctctacctctcacttgttctaacttcctactacatcagtctctggtttctactgaaaaactgtttaaattaacccaactcagtattagtgtttgctcttctctttaatgaaatagtcattccctagctatctacatggcttaatccctcatttaattttttgtgttaattcaaatattaacatttattggcaaaggttcttctaacaatactatttataagtgaaactktccaattttacctacactcttctctgcccttttccccaattatcatcaacatactcttatatgtattttaatcattactttttactatctgcttgacttaaatataaaatgtctgaatgca

SEQ ID NO: 850145 - DNA, 408 bp, Homo sapiens
aaatagccaagacaatgtttaaaaaggaagaaaattggaggactcacactttccagtttcaaaacttactacaaatttacagtatttgaaacaatgtgatactggcatatggataaatgtgtagaacaatggactagcaccgaaagtccagaaataagtttatatgcctatggtcaattgatttttgtcaagggttccaagaccatttgaagatggaaataataatcctttcaacgaatgatgctgaatatctacatgcaaaagaataaatgtggatcccygctttacaccgtatacaaaaatcaatgcaaagtgggtcaaagacccaaatattagagctgaaactataaattcttagaagaaaacataggtacaagttttagtgacctcacacatgcaacaacatgc

SEQ ID NO: 850146 - DNA, 408 bp, Homo sapiens
aaatagccaagacaatgtttaaaaaggaagaaaattggaggactcacactttccagtttcaaaacttactacaaatttacagtatttgaaacaatgtgatactggcatatggataaatgtgtagaacaatggactagcaccgaaagtccagaaataagtttatatgcctatggtcaattgatttttgtcaagggttccaagaccatttgaagatggaaataataatcctttcaacgaatgatgctgaatatctacatgcaaaagaataaatgtggatccctgctttacaccgtayacaaaaatcaatgcaaagtgggtcaaagacccaaatattagagctgaaactataaattcttagaagaaaacataggtacaagttttagtgacctcacacatgcaacaacatgc

SEQ ID NO: 850147 - DNA, 598 bp, Homo sapiens
aaatggtcagacattatattttttttattgttctctcatttaatgtgggctgcccaaggaaggagtgggcaagacgcctttctgaagctaacataattactgaagggtctgacagtagaagacatcagccaacaacagtccctgctgctaggtcaacaagtctttccttagagggatctagaaggcacaactcagtgttcatcagttccttcactggattttcagctgcatgtctgtcattattcttctagttgttcctgtagggattgcaatataaatccttatcactgtctacttagaattaaagttgtgccacttctcataaaatataaggactttgaagtattatagttccacttattaccatccttagttatattattgtcatatttatcatatctaaatacattataaatccccaatacagtattgtctttttaaaaattaagagaaataaaaaactgtgtaatcttcatatgtgccatatacttactatttctgatgctccttgcttkttcctgtacttctacaattacatttggagtcgatttttttcagcctgaataactttttttgctattccttataatgtgaatct

SEQ ID NO: 850148 - DNA, 545 bp, Homo sapiens
gtcccccatcttctgcataaatgatcctcagccatctgggggacttagctgcagtggagcctgagggagtcgagctgcatttttcatcccaggatgttactctcatacgattttcaagccacaacagaagcaaagatgaggtgagcagggacagagttatttccgactggttgcagatggggagaaaggtctatggtatctgttgctgatctctgggctcacatcagacactttgcaaatctggctctctccaggggatttgggtaacagccctgcctttcagagcaaataacagtatacactcgcagagctcgttatagcagttttggtgggtttagggacgcaagttcccagccgggactattcctgtggagttccctgagttacaccctccaggccacgccccctggccaaacgtgagtctagagcagagagtttccatgtaraggcttcatctgtttgtattggctcattacagacactccttgagatttgaccaatgcaacatgtggccccatgctagcgtgctatgtgctgagacaaca

SEQ ID NO: 850149 - DNA, 567 bp, Homo sapiens
gccacattgtcattggttctcacagtcaggtgccccatcttcagggctcagtagcacaatagaaattgttttccaraaggcatagagttctccactgcagatggcatgactaagccccagaaacataggagtcctcattatgattctcccacaaggcatgtgttttaaactgtacctggcacattttcccaccactaacacctcctgtatcataggatctgtcaggctgtatggcccaagtggcagggctgcttacatcctatactttcctactctgggccccactccaagctggaagtctctcatgccttccactataggaactaacattgtgatcccttttttcaccatgggagacgtaagatgcaatactttgccctattctttggatgggatatttcaacatatccttggccactgaatccctaaacattttactaagatggcgggcccctgaatgttcatggaggttatctcatactctctggaatgcgtgtgacttaccaaggcttccaattcttggatttcttgtcatccagccccattctcacgataccactgataaaa

SEQ ID NO: 850150 - DNA, 618 bp, Homo sapiens
cattaaaattgtttaaattctccctccgtcccacctaatacctactgaacactatgctgggcactatgtacacagggaagtgggggagagaggcacgggaagagacaaatttgtactctaaagagacgattgttgtggaagtacagaggaggaggccactctcagatgaggcaaggaaatgttacagaagaggtgacgtctgagttggctcttaagagaacacctaggaattttccaggagaaagaagtttacatggcagcagatacagtatctggtttctaatacaaaagacctgaatcagaatttataggtttctaggaaggacagacagctgcatggaaggttatgatgaggagggcagtgagaggcttatttctccttctggggagatatacttgaacacagacaggcgcatgggggcagaatcctcaaggcaggcagtgaaaaactcagtcaaagattccagccaggttctcctcacccttcaaagctggacatagtactcgctaacttctcctactaagacctcagtmtaggcatgactcctttgtacttccaaatcatcctgtccttagatcatcacgttctgtttatccctttttttttgagacggagtc

SEQ ID NO: 850151 - DNA, 586 bp, Homo sapiens
ggaatcatctaaaacataaaacaatccatcaacataatagaaagtaattaacttatttaaaaaaacggtgaccgaaggattaaaagtattcattacacatcaaggcaagcaatattccatagatgtctaaatatgaaaaagcaactagcaataaacaaagatcatatcatacagtttcactgcatggcaatttacgtgttccaccatacaggactggggaaatggaggcatatttagagcacagggaagcgggcaacacagagaaagtgttgccacagggaaactggcttagctttatgttctcattctctcatgcattcaacaaacaccagctgaaacatgatgctgggctccgaagacaaagtccactgacatacaatgcagaccagaccctcatcaaactgttttgctgaaggtctcactgtacaatgtcacgaaagttttaagaaggggaaagtccagtctgtcaagagagcccagaagcaacccaggctaaagggggctagtgaaggcctcttagatataaaaatgtacccttccaygcaacagaaccttaaccaagaaaaagatgcttattgtatttacc

SEQ ID NO: 850152 - DNA, 638 bp, Homo sapiens
attactacacttttcgtaatagttttttaaattaccaagcagatttttacaagatcaaaatcagacttctagaaattaaaaatacaacaactaaaattggaaatgcaacatatgggttccacagctgaggagagaatctgttaggaagatatgagttgaagaaattacctagaatgcaacccaaagagacacagagataggaaataagaaagagaaattaagagatgagaaggataaaataacacattctgataggtgtagctagagtttcagaagaagagaaaagaataactggttcggaggcaatgtctgaaaagacagtggctgagaattttccagaatgatgaaagacactaatatgcagattcagaaagcccaatgaatgcaaaagaagaaaaataggaaagaagatctgtatcttaaaacatcaaaatgaaattgcatctataccagacaaatatcaaccaaatggagcaggtgtaactatttgaaagggaggaaaacttcactagagwtaatcacaaatgacaaatggttcaattcaccaggaaaaaatagcaattctgaaattgtgtgaacataaaagcataacatcacaatatacaaagaaaaaatagtcacaattaacaagaaaaaat

SEQ ID NO: 850153 - DNA, 569 bp, Homo sapiens
gccttgcttcctgcccaggctcccccgacttcactcctgggcctttgccctcattctctccaatggggtccattgctatattgctccctgccagagcggggccagaactacagaaggytggggtattcgaattctggagttccccgaagctccaccccaaccctcatgactctggggttccacattccaacccacagaggagcaactcagagggaggaggggtgtgccaggggtcactcagccaggaaggcaggtaggtacggcttcaggagggttcacaatggaagtgggagtgggggtgctatttcattccccttaggcctcatattccgtgcctcccaccctcaggacctcaaggctggttggaggctccaccctcatcaaaccagtgccacccgcctcactggcatcagggtctggtctagggcaaccggctcttgacacagcgcccgcggacattttctattttccaggttctggggccctccactacccctgattcctgcctctcccccaaatccaggcacttggatccccaatcttctgaatcctggacagcccacccccag

SEQ ID NO: 850154 - DNA, 634 bp, Homo sapiens
catctgtaaaatgggggcattaattatctttacctcatggaggtattttaataatttaatayaataatctgtgtgaaaggcttagaacactccctggcacaaaacaaatatcaccaccaattttacttggagtcaacctggacaggcatctcttaacaccatcttttaacacctgcctgtcattaacacactctgaaccccttcagacccacgagaactcttgctcattgatcatcaggaattgcccatctctactaaaaatacaaaaattagccaggcgtggtggcgggtgcctgtaatcccagctactcgagaggctgaggcaggagaatcgcttgaacccagtaggtggagaatatgacaaaagaaatatgtcaaaattttaacaatggtcttctttgccttctactttttgcatttccaaagtgtctaccatagagccgggagtgtcgactcacacctatattcccagcactttgggaggctgaggcagaagtatcacttgaagccaggagtttgagaccaacctgggcaacttagtgaaatcttggctctacaaaacttaaaaaaataaataaataacctgggcatgatggcacatgcctgtagtcctcactacttgggaggctgaggc

SEQ ID NO: 850155 - DNA, 634 bp, Homo sapiens
catctgtaaaatgggggcattaattatctttacctcatggaggtattttaataatttaatacaataatctgtgtgaaaggcttagaacactccctggcacaaaacaaatatcmccaccaattttacttggagtcaacctggacaggcatctcttaacaccatcttttaacacctgcctgtcattaacacactctgaaccccttcagacccacgagaactcttgctcattgatcatcaggaattgcccatctctactaaaaatacaaaaattagccaggcgtggtggcgggtgcctgtaatcccagctactcgagaggctgaggcaggagaatcgcttgaacccagtaggtggagaatatgacaaaagaaatatgtcaaaattttaacaatggtcttctttgccttctactttttgcatttccaaagtgtctaccatagagccgggagtgtcgactcacacctatattcccagcactttgggaggctgaggcagaagtatcacttgaagccaggagtttgagaccaacctgggcaacttagtgaaatcttggctctacaaaacttaaaaaaataaataaataacctgggcatgatggcacatgcctgtagtcctcactacttgggaggctgaggc

SEQ ID NO: 850156 - DNA, 605 bp, Homo sapiens
aatgaaagtagaattttgttagaagttactacagtaagagatagtcgaccagacacagtggctcacccctataatcccagcactttgggaggccgaggcaggcagawcacttgagtccaggaattcaagaccagcctggacaacacagaaagaccccatctctacaaaaatgtacaaaaattagccaggagtgaaggtgtgtgtctgtagtcccagctactcagtaggcttaggtgggaggatcacctgaccctggggaagttgaggctgcagtgagctgtgatagcgccactgcactccagtctgagcgacagagaccctatatttaaaaaaaaaaaaaaaaaaaaagtcttacctctcaatatgatggtggcttggtttcactacaggaacaatcctgccctctgaagtaagattacaagctacaaatggctgtgttcagagtgatctctgatgggatggtacagtcctgcctggaatacctcagtcatgaggggattctgcagggggcgatggactcacttgctgtgatagacaacaaaggaatgaacagctccctgtttcccatggagaggatcctatctgctcataaaaatgcctatcac

SEQ ID NO: 850157 - DNA, 605 bp, Homo sapiens
aatgaaagtagaattttgttagaagttactacagtaagagatagtcgaccagacacagtggctcacccctataatcccagcactttgggaggccgaggcaggcagatcacttgagkccaggaattcaagaccagcctggacaacacagaaagaccccatctctacaaaaatgtacaaaaattagccaggagtgaaggtgtgtgtctgtagtcccagctactcagtaggcttaggtgggaggatcacctgaccctggggaagttgaggctgcagtgagctgtgatagcgccactgcactccagtctgagcgacagagaccctatatttaaaaaaaaaaaaaaaaaaaaagtcttacctctcaatatgatggtggcttggtttcactacaggaacaatcctgccctctgaagtaagattacaagctacaaatggctgtgttcagagtgatctctgatgggatggtacagtcctgcctggaatacctcagtcatgaggggattctgcagggggcgatggactcacttgctgtgatagacaacaaaggaatgaacagctccctgtttcccatggagaggatcctatctgctcataaaaatgcctatcac

SEQ ID NO: 850158 - DNA, 634 bp, Homo sapiens
agtgtataaagttatccatcaaggatggaaatgatygggacatttctcaatggcctgggctgcatgcacagtgccacaaaactcctaagcaagcagtgagatctaaccacacaattgatgtcccatttcttcccttactagggcaaaccactgtcatgtgtgatttggaaggtgtctctccagaattagggtgacacttatggtttcatctacaaatctccgcttggcctgccacttttaaggtatcaccaagttcaaaacagttatgagtaaacccccaaaagacaagataaacaattacattcctttgattattctggttggagaaaatgagaaaggaatgccattgcctcttctaggggatttccactgctttctagaaggccccagcagcctgcagctgggaagctctggccccgcggggacaactccaggatattacctagagagaaacttgcctcacaaaagcactgtttatcaaaaaatggagggaggcaaataaccctggaactaaatgcagaatcaactaaactgagcagtagtgtctggatgcctgtcccccattttccctccaagaagctgcctttttctgacagactgcaggctctggtagctgccattcctccataactca

SEQ ID NO: 850159 - DNA, 619 bp, Homo sapiens
agtagatgactagagaaggacaaaggagtggggttcgcagaagaaacacatcagggaaaggaaaggagagccggtcatctgggacgtcatgcacggacccaaaagtcatggtgcccagtgaaatcagccaggcccatccgacccgtattgcgtgatctccttgggatgtgggatggaaagcggtgaggatcgcgaaagtagagaggagaaaggtggttggccgggcctggggccggggtaggggcagggaaaagatgccaatgcgagatgtgggtcaaagggcacaaagtttccgagaggcaggtggagtgcttcctggatatccgtggcagggcaacgtgagtacggtggagcagaatgtaaggttctcgtgaatatacccacgggagtagagctgaaaattctcccgacagggacaggggacgcatgtggggcgataagtgtgtgaattcggccgattctagtgaattccctaatgaagacgtcacacacggtaagtgtgtatcatatttattgtcattcatacttgaaggcaccggcgggggaaggaaataattaaatcrcaagacaaaacctccaagagagatcacctcgaagagagtctaacgtccgtaggaac

SEQ ID NO: 850160 - DNA, 594 bp, Homo sapiens
aatgtggtatatacatataatggaatattattcagccttattaacaatgaaatcctgtcatttatgacaccatggatgaaactggaggatattatgctaagtgaaagaagttaggcacagaaagacaaatattgcatgatctcacttatatgtggaatcaaaaatagggaaatacatagaaacagaaagtaaaatggtgaaggggctggtgagggagaaataggcaggttttggtcaaagagtacaaagtttcagtatttatttatacacaataaataagatctggatgtcttcttaccataaagagcctatgattcacaatagtgtattatatacttaaaaataagtaaagagggtagatctcacattaagtgttcttaccacaaaaggtgggggaagcccaaaggggtggaaacttttggaagtgatagatgaatttatgggattgatggcatgatggcttaatggtttcacaggtatatatacttacctccaaacacatcaagttgtgtatattaactgtgtacagttatatcartcatagctcaataaagcaattttttaaagtatgtatagttttatacttgagaatat

SEQ ID NO: 850161 - DNA, 599 bp, Homo sapiens
ccacctgagtcattgtgaaaactgactgcttcccttcactgtggagctgtgagctttatgagaccacattggtattgtattcatttccctctctagcactcagaacaggcctgtacatagtaggtttttgccacccaagatttgcatgtgtgtgtgattagctcaatttggaaaaaaaaatacaaaagaatgacacaaatgattttatttctgtttagctgtatctgtctaaaatacagtcagctaaatcttattgagaatcaaatgtgtgatgagccctttggtagacacgaaggatggggagttacaaagaagaaaagcatataatgcctgtcctccagggtgactcttggagggtcagaagagttggaataatgataataataataaattttttaaataacaaaagcaaatattttattaaagttaaaattatttaaataataaaacaataattttattgttataataaaagtgattattttattgagtattttctgtgtgctagctaccatgtatcttactatagctastactactactaatagctagctactatttcattgttaaataaggccacagtgttggcactatgactg

SEQ ID NO: 850162 - DNA, 610 bp, Homo sapiens
aaaatatgcgtcagaagatcccttctagtctgtgagtttataattgtttaaacaagcctttgaaactataggacacaattcaagggccctatgatgtgggtagtttgttcatagcttttaaatataagtgacaatgatagtgccagaccagagagtatctaggaagtacctacatggaggcctttactctgctacaagccagaaatttatttcaggaaatgtattggtaacaagataagattatccaaatatatcctctgagataacatagatggatggaaacttgtggataagacagttccatttcaaattcatcctcagtatctccattcacatgactgtcctttctctcatgtctcagcaaccaaagttatcgcttcattttgtaggggaacacaatgaggtcatgacataggaaatagggaggacttctaaataccatcaggttcagagatggcaaacacatgacccttctgttacaactcctcctccaacactgaaggtgggcaaatgagttcatcatgatgctttccccagctkagtctgtttgtagtctcagaaaccttcccagcataatatcttaggcagcccctaaccatgtatctgagtt

SEQ ID NO: 850163 - DNA, 607 bp, Homo sapiens
cttctgtcatcctccattccctcccatttccgcccatccttcaccacctccaccacattttgttttctagctcaaatggtaatgatcttgctcttacatagcccctttctgccaaatagatccctgagcacggtacaggtgttggtaacggatattacccgccatccatctttcttaatcacactctgctcctgaaatgcagccacttctagagtgaaatatagcccccatttagccttgcttaacaccaatgggagagcccatgaaggcaggtctgcctttccagacaaaggtgcagcacactccgaaacagaggtcagaagcttttcctggatctgggatttgagcaagctgtcacttcttggagcctgcctcggacacttccctgaggggttgtctcatactctctgatgtgcctcagggccagtactgaaaactgaggtgtcttggcttctgaggaaagcctgagacacaggcttctaagctgcagtgagagaaattcactacccagctctgctgctgcaggccagggaaaagggaacgggtcccccacattactgactctacaacctactcttcttaawcaatcagtaaacacacactgtgg

SEQ ID NO: 850164 - DNA, 526 bp, Homo sapiens
atgaggtcagttactttagaaggccaggaattacgggcagagcagacgccccaaggatccttctctcatgggccataaaattgtcagaaacacaaaatactaaagcacaatattaacatgatcatraataaagattcaagatgattgtgataaagaacagaatgccttataggaacttttgcagtctctataaaccagagcatcataaaatcataatctggcaataaacgtgagaggccacattcactctgaggttagaagtcacatgtcccttgtgatatcaaacctgcctataatttttatttttaaaatgttactataaatcagagcatcataaacctggcaataaacttgaggagccagttttcatgtgcgactaggagtcagaattccccagcaatagaaaaaagttatttttttataatttatattttttaaacataatacccaagtaattattatactgaatgtatttgacaaatgtctacatgaaacattagagttaaattactcatcagccttacat

SEQ ID NO: 850165 - DNA, 709 bp, Homo sapiens
cttggtacctgtataaaagtcaggatccggccgggtgcggtggctcatgcctgcctgtaatcccagtgctttaggaggcygaggcaggcggatcacctgaggtcgggagttcgaggtcagccttaccaacatggagaaaccccgtctctactaaaaatacaaaattagccgcgcgtggtggcacacgcctgtaatcccagctactcgggaggctgaggcaggagaatcgcttgaacctgggaagcggagtttgtggggtgagcagagattgagccattgcactccagcctgggcaacaggagtgaaactctgtctcaaaaataaataaatgaaataaataaatagctgggcatggtggtataatcctcgctactcaggaggctgagatggaaggcttgaatgagtcccccccctatataaaaaatggaaagaaaagtcagaatccatccttccacatacaatgcaaatggttttccactgggtttgcagccaaccagtggctacagtaatgtggcatctgaacaagggccaccaggtcccaaggtctgtgatgcctatggccttgaatgaggaaaagagtaagattacagctgtatcctcttattccaacctaatggtacttaatgaaatcattagcatgcattaccagtaaggtggctcatccatatggctcctgataaaatacatacctttcatttatagctaagta

SEQ ID NO: 850166 - DNA, 660 bp, Homo sapiens
ttaaacatatgtacaggctgttgaagaaagggaaatgtcgttcattttggtcacaattttgtgaatgtagagtaaggactgtcgatttcttgcaaggctctcatttgaaaaaatggatgctgaaacccatctatattaggcaatcaatttcttcttttatttcaatgcaataggtgtttgtgaaagtcatctctattattatgatgtcaatatttgaccatgtttgacctgtgaaagagtggaaggttgaagtggttcagtgtcatattaacgtataaagaagaacgacatttgttccaaactaaaatggcttttaagctcccactttgctgagagtgggtgcttctggatgttgaagacagtaggtgacttaggggaagttgtgagaaatttcctgtgtgtttgctcttcagtcttgagtgatgggacaccatttccttagatttagccacaagatttcctggagtttcagagaaaatagaatttttttcatccttctctactttataggctcaagaatgtcaacccacccaggtggtgaaggaataaaytctgtaaatgatcatcacagactttttccagcttgacagacatttatcgagagtctcctaaaagcctcaccttaagaatataagcatcatgaatgtcataaggattatg

SEQ ID NO: 850167 - DNA, 581 bp, Homo sapiens
tcccttgttcccacccccaccctggtgcttgacttgaagtaccaaagcctgaaacatttgcattgttttctcacagccacagaaccctgagctcaaggctagtggaggggaggtacacatccgaggagtctagctctttgttaattgcaaatcttaagcctcaagggacactcacctccccagcccagattgttccagagggaagtctgggcagcacagcagctaacatgccccactggctggagagccagagcaaaccgggcctgcagggcagtcggaggcctcgtgcattgcatggaattaagaaactcaggcctaggatggaaattttgggagttcactgcacccattccagccctgggaagcactgccctgctgtttcccccatctctccttctgcctggcttgcccaagggcccctgatagtctcctgggcattcccagaggtttgccactgtctctccaaccagagcttcaattggctaagatcaccatgctcttccctcctagcrtcttctgcccccagtctcattatttctaaataaagctgtagatttatcattataatagagctgccgtca

SEQ ID NO: 850168 - DNA, 612 bp, Homo sapiens
gtgaggacctggccaccatcaaggatcctgagaactgagtctcaccccagcccacacacatgctcctggcgaagacacctgctgtcctcctgcccctacacagggtaagtcactctccttacctgctgagaggcagccgtgtgacaggcctgggcaagggacagaggctggcggtggcagcagctgtcagtcgtcagatgagaggtgaattcagagcttctgctttgaggtcacctgaaagcacaaccagagacatgtctagaggtgtggggactccctggcattgctcccagagtccccatccaccctgtcccatggttcccctctcctcaagctcagcagccttccccaaaagcctggggactccatatcagaccttggggagatggggagctcgaggcagacagagaaccctcagatctgacccagagcagactggaaacacaacttcagggccacaggccaccccgggcctcaccagactgctcccctggaccctgcaaaccttcatgcccagtcgctctgccccccaacacaaggarccccagctccagccaaacctatgccaaatggaaacaggtcacgtgttttcttcttataaaaatatacact

SEQ ID NO: 850169 - DNA, 541 bp, Homo sapiens
atttcaatggctaaagtttgtagtaagtttgagaaatataaagagaggagtatggggaggagagctggcgggaggtgggtgctggaaatgattaagaccactggaagggaaaaaaatggggtatgatatcaccatggaaacgaagtttacgtattgcaaaaatttgcccaagttggatagcattcattcattcattcattcattcattcattcaacaaacatttactcggtgtctttgcatgcctagaaccatcaaagttacaaatgagaaccaaacaagcttggttcttgtcttcacggagcttccattctagtgggggaaggtacacaaagaacaaacacaagtaggtttccccctggaaagaataactggcaggtttgcaggcattaccacctaatttctttttaaaaagaaacctaaagacttctttrggtgtccaaaggtctaaaattttagaagttcaaaatggcaaagtgaaagagcacacattattcaggcaatcttggcagtatctaatgtcataacatttaaaaatcagaa

SEQ ID NO: 850170 - DNA, 423 bp, Homo sapiens
gggataagagaaaggaatgcctcattcgagtaagaggagcaagacatgatgcttttgtttggaaaaactttctcagtcccggggacagtgagaagagaacagaaggttccagaatgacttttccatcacccycaccactgccaccaccatcaccaccacgaccataagtaatgcttggacattcgtatagtgctttgagtcatcattcactttcacacacgtttgctcattcattgctctagcagcccatacagttggtgggacaatattaatttctattttgcaaaggaagaaagtgcaaaaatcagagaaattaaaccaatagccaaagatcctacagccaacatttgtggatccagaactcaaactcaaagctttgaagcctagccgagtgtctcaaatggcctctcctaacaatctatg

SEQ ID NO: 850171 - DNA, 616 bp, Homo sapiens
ccagtctattctttcctatgcttcttttttctccttccttccttccctccctccttcccttcctccctccctctggtcttccttccttcccatcacgttggactccagactattctttcctatgcttctttttccttttcctttcctttcctttccttccccttcccttcttccttccttccttctttttgagatagggtctctgtcatccaagctgtaatgcagtggtgcaatcacagctcactgcagcctcaaactcctgggctcaagcgatcctcctgcctcagcctcctgagtagctgagactacaggtgtgtgccgccatgcctggctaattaaaaaatttttttttgctatgtttcccaggctggtcctgtgtttattttcttagaaagtaagcagttacatatatgttttctcatttctccttctttcttacacaaaaagataacgtgtgtgtgcttttgaactttgtttttatatttarcaatacattttagaaagcaccacatattagttcactgatatgcaaaaaagatcatactcattctttcttagaactacatactacagtactccactgtgtggatatactgtatatttttcaatccatata

SEQ ID NO: 850172 - DNA, 636 bp, Homo sapiens
aatgctcaacatcactaatcatcagagaagtgcagatcaaaaccacagggagataccttctcataccagtcaggatgactgttattaaaatgtcagaaaataacagatgttggcgaggttgtggagaaaacggaacacttatacactgctgtccagccactgtggaaagcaggaggtttctcacagaatttaaaacagaactaccattcaacccagcaatcccatttactgggtgtatacccaaaggaatataaattattctaccaaaaagacacaagcgcaaatatgttcattgcagcactatccacaatagcaaagacatggaatcaatcacctagatgtccataacagtggtctgaatgaagaaaatttggtacatatataccttcgaatactatgcaaccataaaaaaaacatgaaatcatgtcctttgcagcaacatggatgcagctggaggctattaccctaagcaaattaacacaggaacagaaaaccaaatactgcatgttctcacctataatggtaactaaacattgaatacacayggacacaaaggtgggaacaatagacacccggtctacttgagtggggaaggtagcaggagggtgaaggcggaaaaactgcctatcaggtcct

SEQ ID NO: 850173 - DNA, 636 bp, Homo sapiens
ggaagagtcatagcccctgaattcattaagccatgaaaaaatgtgaatctgtgaatttaagaaatcttaaggaatttttaattctactcctagtttttagcacttyggaataaaatgattgtttgatattaaattttagctgatttgattacttaaagcaaaataaataaaccaaagtattctccaatatttcttaaattcttggggtattttctaaactttggtagtgtattgaaaaacactgcaatttctatttatgtctgaagttgtgggaaaatgttttatttctgtaattttaattttgaaatgtgtatttgagctatttgtagtaaatcattacttaataaagtttgttgaggtttatataatttttggcccgagtgatttaaatttaaatttttttgcatgtatgtagtctcttttgtttattaatttaagcaagttaacttttttggatgctgttatatatgttatatgtaaaagttctatatttggcatattgtgtttagcaatctcaggtactgaatttctatttcaaaaattaggttttactttttaaattgtaacaatattgcagatttattttgtgggcatattatttgatgaggaaataaccatctagcttgagtatatatt

SEQ ID NO: 850174 - DNA, 585 bp, Homo sapiens
ttgttttgaaatcctttcctttttttttttggagacagagtctcactctatcacccaggctggagtgcaatggcatggtctcagctcactgcaaccttcccctcccgggtccaagcgattctcccacctcagcctcccaagtagctgggactacaggcacgtgccaccacactccgctaatttttgtatttttagcggagacggggtttcactatgttggccaggctggtctcgaactcctgacctcgtgatccgcccaccttggcctctgaaagtgctgggattacaggtgtgagccgccatgcctagcgtgtccttcccttttaagcagaaaatgtgacacttgtgaaaaagcttgtaagacagcacttccctttttttccctttaaacctttaaatggcaaatctaggtaattaaagttgtgaatttttatttttgctttgtttttaatgaacacttgtctttcagaataggattgtgtgataatgtctaaatggcaaaaacaaaacrtgattttgcacaattaacaaaactactgcaagaaaaataaaacatttcttggtaacaaaaaaaattaatacatt

SEQ ID NO: 850175 - DNA, 481 bp, Homo sapiens
aaatatttgcctcataactgtatttttccagcstgcttttcagctcaaaggaagtatatgcactgagttgacttatcagtgtgcatagcagaaagggacccagtaagagaaagccccctgagaggccctgggacagctgagtgatccaccctggctgcctcctctccacctcattctcacacactaacctttcccaacccttttcattccaaggctcctagccagcgccccccacctgccttaggagataaccccagttccttcctcggattctttcatctgcaaggcctcagtgttcttgtccggccagtgataaggacattcaacgtcattttcctgtccctgacctttgaaagaaccctacccatctggggcctgtgatgtagactcagactgagatgttccatcttggggatataatcagtgggaaagagagagattcctgagaggtcatcattcattcattcattcattcaagaaa

SEQ ID NO: 850176 - DNA, 640 bp, Homo sapiens
tatacaaaagcatatattcccttcataaaattcaatgaagtacaattgaaaaattgaggtgattacttgagacccttactgattccataaataggagactagagtcatttgtaaaactattaaaatgaatttgcctttgaaataaactcactactacattacatcatgtcattactataaaaatgtaacacaaaattaactgaatctctacattcttgcagcttaaatgaggccttggccaaggatgcatggccagtggttgtgtgggggctgaaatccatttgccaggctgagcactgggcatggaactcatcaggccagcatcagcctggtggaaagggaggcttttttaaattcttacaaatgctctgtaggtccaaccgatgaccctacttctccccataactctggacaagccaaaattaagtgataaattatatagttaaagcccatactgtctttcctggtctacttgttagcatcactgcttagaaggaaacaccaagtacctgsaatcccccactggggagaagggggctattaaccagcttactcctgtgtaaggattccaaataacctgggcagatagatgtttggtttgcccagcctgtccttccaacctccaagggaggatggggag

SEQ ID NO: 850177 - DNA, 504 bp, Homo sapiens
tgaataaccacaattcgaattaggatggagaagtatcctgtaaggcaactgamatgtttcaaaagttccaaagaaaagatcactttcaaccccactgagcaaaagcattcaaaggaggtggtggtgtctcagccatgctgggaaaaattagaattccaggatactaaactaaacagagaaaagacctcccagaagaggaagaataaaacccagtccacatattcagatgtataagaaaaatacatttcttttctacaacaacttttatcccaagcccccaggatatggagtaatagaaaatacttgatgctagtcttaccctttcccaaatttatatgaagtgccaaggcactggagtttgtgggggaagtgattaataaggaatggcccagtccacacgggtggtttgttactgtgacattcattatctctgatgacttggcctcttcagtttttatggctctctgccatttccataaacaactttgggagagaaatgttata

SEQ ID NO: 850178 - DNA, 602 bp, Homo sapiens
acacagagacccaggagttttatatactctggccccaggttcctcarcaaggtgggagatccatatgtagatatacttaggaagggggctgaatccagagagccaagcagcatcattctgcaggccctacttccatggcacctcacaagttaagacccactgacttggaattccagccagccaatggcaacaggctggagtctgcctgagatgggactgatatcctgggggaaggggtggccaccatctctgtggtttggtagccgcagtcattgcagtctgtgggctctagagaataaaaatggtctggaagaagaagggcaccccacagtgcagcacagatgccttgccagattgtggccagactgtttctttaagtggaaccctgatccattcctcctcacaaggcaggacctccatgtgtgggcttcagccactccagcaagggttctacagacagaactctgatctctccctaagatggagctctctgggggaggggcggctgccacctctatagtttggtcaactcagtcataccagcccattggctctggagaagacaaacagtcttgatgaagaagggtccccccagtgtggca

SEQ ID NO: 850179 - DNA, 597 bp, Homo sapiens
ttatatcaggacaatttgcaactgcaaaaatatggaaccagcccaaaggcccatcaatcaacgagtggataaagaaaatgtggcacatatacactatggactgctaytaagccataaaaaggaatgaaataatgacattcacagtaacctggatggaatcggagaccactattcctaagcgaagtaactcaggaatgaaaaaccaagcatcacatgttctcacttataagtgggagctaagctatgaggatacaaaggcataagaatgatacaaatggactttggagactcgaggggaagggtgggaggggggcaaatgatagaagaccacacattggttacagtgtacactgctcaggtaatgagtgcaccaaaatctcagaaaccaccagtaaagaactcatccatgtaatcaagtaccacttgttctcccaaaacctattgaaataataattaaaaaagaaagtgaaaagacaatagcaaagacatagaatcaacccaggtgcccatcagcagtggattagataaagaaaatgtggtacttatacgccatggaatactacacagccataaaagaacaaaatcatgtcctttgcc

SEQ ID NO: 850180 - DNA, 624 bp, Homo sapiens
agcttgcaggagagacggccctgccatctgaagccagccactcatcagttacttttaagagaagtttgaatatgtaattaagcaaggtgttctgtaagtagtagtcatccccggagaggttcactaattgcactggagttctccctgctgggcggggagaccctgcagccagctcacagctcgtgtttcctcctgggctcagccctgtagggggttgcggctgtcagagccggatctcactgttgtggggctgagcagccccaacaggggcctcccatgatgtccgcaggacccttttttatatgtctgtacctcagtcatgtgtgctttcctgggattctccacggtggaattttgaggaaggacttcggaagtcacaggccactcggctgcatcaggccttccctttcaaaggcagatgtgaaatctctctttcgggggatcctgcggatgcttactgcacccaaggtattatgtacgcagtacacagaagaccgactcgaaagaagaaaaggagagtacataagcatattcatctatgaaaaagaaaagcaagcagaaaagaygaaagagaaggaaagtcctaacagtgcaccctcctggagctcctccaggagctgcttc

SEQ ID NO: 850181 - DNA, 542 bp, Homo sapiens
cctttccatggcaatgacccgatcgcctacaagttacatccttctcctagaaatttctgcataaaccaccccttaatctgcatgcaattaaatctgccctgagctactcctctccgcctaacrgggcagccccgctctgcaggggcagtcagggagctgtagcctcttcaatgaagctgtttcttccgcctcctgcttgcccttgaattccttcctgggcaaagccaagagctctccaggctcttgccccactgtggggtcaccggccctgcatctgcagatgggtaagagtcgctcaaccctgctaggtgtctgctcaggaacaggaaggctctcctgcaaagctgacttgggcctgaccatctctgtattactcggaacactgtatttggaggagttaaggaaacagctctgacaagaaatatttcaacaacactcaggcgggccatttgatgtcagcactaaaaccacaaaaatactttagctcgtaacgggaaatccaaacgccacatctgaatacgcagccctggccatggccctga

SEQ ID NO: 850182 - DNA, 553 bp, Homo sapiens
aacagttttttgtttgtttgtttgtttgttttgtttttttgagacggagtctctctctgtcgcttaggctggagtgcagtggcgcgatctcagctcactgcaacctctgcctcctgggttcaagcgattctcatgcctcagtctcctgagtaactggaattacaggcgcctgccacgacgctggactaatttctgtattttttattagagacagggcttcgccatgttgtccaggctggtctcgaactcctgacctaaaatgatgcacccgccttggcctctcaaaatgctgggattacagttgcaagccactgtgcccgactaacatcttttttagatgaaaaatgaagcagccagcataaacagatttttctccaatgaatgtgggaggatcactccaaacttattccagaagtccctgaatgagctctttctgaaaaaaagattgaaaaagattgtctgtttggtttggcttttaatggagattgtagtagcttaagataactgctcaagtttggaagctgaaagrtatctttttaggttgactgctggc

SEQ ID NO: 850183 - DNA, 591 bp, Homo sapiens
gctgggagtggttctcaaactgcrttgaaaactcaaactcaaaataattttccagtagatttttgctcttgcctttcttgtttgttgagaattttctcaactaattttgagaaacatttaagaatcattaaaatctaaaagatttgatgagctgattggctaatggggaatccaattacagtgtaggacccactaatttgaagccaaggtacactgtaagagtatgctgatgggttgctgaggttggctgaaaatgataatttgccacactggtagaaagaaaaatctaggaaagaggctatgttagcctagtgcattctggagatgtcaggaattctggaaagatttgaagaagaaagagaccatcatgtagaatgtccttgattaacgcagaggagtgttctaaacattagtagtaaatacgaacaaatgcagaggatatactcaaataaaatgaatttcaaatcagatgataattttgcttgagggtagagtctagtggcagccctaaacagttaaaagagtgcgaaaagctgtgtgttcaaaatcactttgaatgtgatttaactaaatattacttaaaagtacaca

SEQ ID NO: 850184 - DNA, 586 bp, Homo sapiens
tcacaggtaaatgtttgtaaataagcagtatatacttgggaggctgaggtaagaggatcctttaagcccaggrttccaaccctggacaacatagtgagactgtgtctcaacaacaacaaaaacaacatcaaaaaaaaaaaaaaaaaaaaaagctggataattttagggttgtaagctttgttaatccaatttcttaacatagacatataatattgattttcaaactcccagctgaatatttttcccctaaaacatactgtttccaaggttaatgtgtgttatgaaagataaaaatgtatgggagataattatacgagagacctgatatggtggattaattgcaaaatggccctcaattctctgctcctctttgtatccattccctctgatatctgactttgcaactcctcccatcaagaggtagggtcaatttccccatcccttgaacctggattggctttgtgacttgctttgaaaacaggatacagggggagtgaaagtgtgccagttctgagactaggtctccaaaggtcttgtgagcttctcctctctcagaattctgcctaccaccaagctggccagctgg

SEQ ID NO: 850185 - DNA, 513 bp, Homo sapiens
aatcccagctactcaggtggctgaggcaggagaatcgcttgaatggtggtgatgggggtgggtggagtttgcagtgaaccaggatcatgccattgctctccagcctgggcaacaagagagaaactccatctcaaaataaataaataaataaaaataataataatgtttaaataaagtgttaaaaaaagttatagaagttcaccaatgttccaagtcatatgttgctactgaagactatcttgaaagattttacagctgagttcaagtagcatctttgacaaaagcttcttgattaatttttgtggccatgaagtagcaccagaagaaaagtgtactgtgtataccttatagctaagtccttaagccgtatccttggttatgttatatacttgccattttaagtacagatctttttgccattgtagcagaaattctwatccaaaaatgttcttgccttctcctcacctaataagttctaattactttttaaattaagtgtacttacactgtaat

SEQ ID NO: 850186 - DNA, 612 bp, Homo sapiens
ggtcaggaactttcccaaatactttttgcctatgattataattacatggacataggctgcagtaaccatttaaaaggcaaaataaaaaaaaaagaaaactgaatataattagatgaaatggaaaggatgaaagaaagaaagaaaaagaaaaatctataaagaaaaggataaacttaataagattattatattcttagaagcttttttgtggcatcctgtccacaggttaattaggatacttctcagatgtgttcttcaaagccccagaattcagagaagaaacattggaaggaagagtatcagatgggtggatttatgcctccttctccctttatttatagtttcatgatatttctacaaaatatttcatgtgaagaaggagttccactttttaaaagtgtgttattgttacttgtttaaataatcaccttgtctaagagaagaaataataggtagggtgtaagaaggtaaaggtttaggcaattatcttcattctacatttgacgtgtctatgtttcagtctgcaatacaccccccattagctatagaaaacagatyttcagacatggatcttttatggctcccatttatctgcacagtcctttcctacta

SEQ ID NO: 850187 - DNA, 591 bp, Homo sapiens
agacctgtttctttgcatttacaacttgggttactgtttggcccaagaagccttgcctttggcctatatggtcttttgacatgccttcctcactgaacttagtcatttttaggttttcatttaaagtaaaaacatgtaactcttccttttatttgaacacttagagaccattgtaaagttattcatcgttctaatttcaatattgcatttctcagggaatatggaggtctgagtagagggaatatagggggtatagccggtcagaaaacacacttttattaagtttgctgttttataagagtgtcattgcaatagtaaattcaaagatcactgatcatagattaccatagcagacataataataatgaaatatttaaaatattgccagaattaccaaaatgtgacacagaaacatgaaatgaggacatgctggaaaaatagacttgttcaacacagggtttcaacaaaccttcaatytgcaaaaaatgcagtatgcacaaagggcaataaagcaaaacacaatgaatggaggtgtacctgtgctgtgcatcactatctactaatctctagaattaattcaaatttcaccag

SEQ ID NO: 850188 - DNA, 591 bp, Homo sapiens
agacctgtttctttgcatttacaacttgggttactgtttggcccaagaagccttgcctttggcctatatggtcttttgacatgccttcctcactgaacttagtcatttttaggttttcatttaaagtaaaaacatgtaactcttccttttatttgaacacttagagaccattgtaaagttattcatcgttctaatttcaatattgcatttctcagggaatatggaggtctgagtagagggaatatagggggtatagccggtcagaaaacacacttttattaagtttgctgttttataagagtgtcattgcaatagtaaattcaaagatcactgatcatagattaccatagcagacataataataatgaaatatttaaaatattgccagaattaccaaaatgtgacacagaaacatgaaatgaggacatgctggaaaaatagacttgttcaacacagggtttcaacaaaccttcaatctgcaaaaaatgcagtatgcacraagggcaataaagcaaaacacaatgaatggaggtgtacctgtgctgtgcatcactatctactaatctctagaattaattcaaatttcaccag

SEQ ID NO: 850189 - DNA, 533 bp, Homo sapiens
tctctgtgcctcttctgcctgggctcccactttggcggcacttgaagagcccttcagcctgccactgcactgtgggagcccctttctgggctggccaaggccggagccagctccctcagcttgcagggaggtatggagggagaggcgtgagcagcaaccggggctgcgcagagtgcttgcgggccagctggagttctgggtgggcatgggcttggtgggccccgcattcggagcagccagctggccctgccagtctggggcagtgaggggcttagcacctgggccagcggctgctgtgctctatttctcaccgggcctttgctgccttcccgcggggcagggctcgggacctgcagcctgccatgcctgagcttccccctcacagtgggctcctgtgcagcccaagcctccccgackagcactgcctcctgctccacggtgcccagtcccatcgaccacccaagggctgaggagtgcgggtgcacggcgcgggactggcaggtagctccacctgcagccctggtgcgggatcc

SEQ ID NO: 850190 - DNA, 605 bp, Homo sapiens
ggtctctgttgcttgatacatagaaaacttttcatatcaatttaaatcctaaagagtttgccattaaaagatttatattgtcctctagtcaaaatactagtaaccctttcattgtgtttgctattgatggatcttctgatgaacttacaaggggaagagttagctatgtatttgatgtcctactctgaacagaattcatgaaagctgatgcattaaaataaccattcaaaagagcaatgtggttcaatttgaataaggaaccgtatggttaactggattttcgttctcacgctcataaacacacatagatgagctcttcattatgaatggaagccacatgaatattatttattctctgtttaacctatgctctaaaactaccgaattttgcaatttttgtatagttttagctccttattgtgtttgtcatttgagaaatcttagcctatagacaatagtttcatactaggaaatttrtattttcagtcataagtttctaatactcttccttcttttgcactttaacactaataccaaatatatattatttatgatgcataaaataatgtcactaaaaatatgtattttatattattttgctgttt

SEQ ID NO: 850191 - DNA, 632 bp, Homo sapiens
cctgaaaaacttggactcttcctgattctgctttaagataatctcttaaactattatttgctgcctcccattgggttctgcccctgtgcccccatagctttccrtagttcttgtgcattcttctcttagagcattcatcaaactctgtggtcattatctgctaccctatccatccctctcatggaactgggaacccacgatgactgggaccaaattgtgttcggctgttaataatttctgacattttaggaatgattgactagtagatgcttataagtaagtgtttctgttgcaatcagaaaggagaggaaaaagggatagggggaagtagaaaacagagaatgagaaaaggcattgaactccacctctaataggcagttcagggaccccagtcctgtaagtcacacaaaaggaggcagcagcaggaataaggtaggtcatatactccttcatagccagggcaggtaaggcactgagtacagtctgtatttcttatctaagtgcccaacaactaccttggacaagttactctattcctccgtccctatgttctctcatctgtaaaacagagataagaaaagcaccaactcacgtggttatttggaggcttaaaaaaaataatgcatctaaag

SEQ ID NO: 850192 - DNA, 667 bp, Homo sapiens
atcatcattcactgaatatggcaaataaaataaatatgtgcatatactgtgcatatcacttagctagatttttgaaatggcattttcaatgcctgataaggtcgaaattttattaactagctatgatttagaaacgtatgctgcgaagttcttgtgggaaaaaaaggttttaagtcaacaataaaagtcaaatattaggaaaagagcaaagaagaaaactaatattgaaagctgcttctttcaacaagttgacctttcctcctgtacatattttcctctattagagctgagataatggagttattcctaagctttgccttccctctcccctgccccttgtctgtcgaggaaaggttatgcccagcagatgtttgtttcaataaacaccgcattaagcctcctaggcagccaggatggcacagatggtcttctcaaactatttatgtgctctttctcgatgcgtgattttttcctttacaatgatgacttgggtgttagagagattgacagcagcacagtccttgtgacaggaagcccrtgattctcactaacatagatcagcagccaggcacccaacacacagcctgggcctcaccttggtcacctgtgggtagcactgaaatatcacctccctgagaaacgagtgggaatattgaccatctactca

SEQ ID NO: 850193 - DNA, 455 bp, Homo sapiens
cctcccatcagggagggaatgcacattgccattttacagatgaccataaaggacagggaagaagggaaggcactcttcctcttggagtcaggcccctgtcttaagggagatagcccatgccggagagagccctgcatgcagtcagtgcaaggagaggtgctcctttgcacacaccgagtttgccttaagtgaagcttttcccagcccatgtgttttctccagccctgccctctgttcgctcaggtcagtgcctcaccgccacactgtctctgcttcacttagagtcctgggaattcatggatccagaacatgctgagaaacgcctggaatttgcatgaaatttattcaagtacctctttatctgcggcagytgatgatcaggcagcctaacctatctcacagagaagcagcaggcaggttggatgtcaacaagcaagtcctagagacacacagtg

SEQ ID NO: 850194 - DNA, 562 bp, Homo sapiens
aaggcagaggctgcctccaaggctacatgacctgcaggcagccccggaccccctggggaggactcaggtctccactgaagggacagccgaacagagggaaatggaagtagagccgtggggactcctgggagggggaagaaggcataggaggggagagtgaccagggagacaagcccctcaaggtcagagagggaagccagtgggtccccgagggtggggtcgtgcagtgaaatgtactgtaggaggtgggagcaggtgttgggagcacgtgaaagtcacagccagcctcaggcagcaccactcaagtctatctcagttgcttatctggtccagagaggttgaaaggatgggaaagcttcaagactggattcttcgcatctgctctatgacagagaaggttaggaccagaaagtggcctctgcaaacacagccatttatatgtttggactactgtgtttgctttgattttccwgtttcctaaataagaaaggctgctgcttaagagtccagtctgatctcaactaaggggaaaagacatttgtttcatttccattaagggtgg

SEQ ID NO: 850195 - DNA, 525 bp, Homo sapiens
gaagcatctgttttctgtaactcacccacataataaaagtcacacagtggaagcttttgtaattttggccctgggctgcagggaagatctcgatatcatggctggcaccgtctctgagggcttgaactcccccttggttcttgcccaccagttgcagttcagttcttagtttatcctggaggtcagcctcataacctgtagaccaaatccagagtgtggctgggtctgcttggcttctgtggtgttgggcagcatggggctattgagaattggtgtgtttgccgaaatattttatccaattttttaaaccgctttattgagatataattgacatacaagaagctatagatatttaatgtatacaactcgatgtgtttggagataagcatacacccatgtaaccatcatcactaccaatattaatgccataaacttttccaytatctccaaaagtgtccttctgctgcctttgggttttttggttttctttgtttttcttaatctaccttcttagcaaatttttta

SEQ ID NO: 850196 - DNA, 556 bp, Homo sapiens
tccttctgctgcctttgggttttttggttttctttgtttttcttaatctaccttcttagcaaattttttaaaacacaatatagtgktgttaatcatatgccctatatcgcacaggaggtttccagaatttacttattttgcacactgaaactttacacaaattgaactctttggccaatacttccccatttccccttccctccagctcctggcaactaccattctattctctgcttctatgtgtttaactagtttaggttttatacagaagtgagatgaggcagtatttggcttcctgtgtctagcttatttcacttagcataatgtcctccaggtccatccatgttgtcataaatggcaggatttccttcctttttacggccaaataatatttcattatatgtgaagttggccctccatgtccgtaggttccacatctgcagattcaatcaaccatggatcaagagtattggggggaaaagcaacaaaaaataatgcacattttaaagcaatacaatataacatctatttacatggcatttacatcatattagtt

SEQ ID NO: 850197 - DNA, 556 bp, Homo sapiens
tccttctgctgcctttgggttttttggttttctttgtttttcttaatctaccttcttagcaaattttttaaaacacaatatagtggtgttaatcatatgccctatatcgcacaggaggtttccagaatttacttmttttgcacactgaaactttacacaaattgaactctttggccaatacttccccatttccccttccctccagctcctggcaactaccattctattctctgcttctatgtgtttaactagtttaggttttatacagaagtgagatgaggcagtatttggcttcctgtgtctagcttatttcacttagcataatgtcctccaggtccatccatgttgtcataaatggcaggatttccttcctttttacggccaaataatatttcattatatgtgaagttggccctccatgtccgtaggttccacatctgcagattcaatcaaccatggatcaagagtattggggggaaaagcaacaaaaaataatgcacattttaaagcaatacaatataacatctatttacatggcatttacatcatattagtt

SEQ ID NO: 850198 - DNA, 680 bp, Homo sapiens
gttgaaaaagaataatctaaatgttgatctagaaaagttaraaaaagaatagcaaatgaaaccaaaatacagtacaaggaaggaaataattatgataagagcagaaatccatgaaatagaaagcaagcatacagcaaagaaacacaacaaaaggaaaaattgtttgtttgaaaaaaagttaataaaatggataatcattggcaaaatgagctagaaagaagacaatacataaattatcaatattatgaagaaaaggggatgttataaaaatgtcataccaataaatttcaaaatataaataaaataggcaaattcctggtaaagcattacttgccaaaactaagataagatgcagtagaaaatctgaattgtcatccatgtatgaaagaaagtgagactgtaatttaattctttcccacaagtaaaattctatgcccaaattcttcactaatgaaatccttctaaacatttaagaaggagtgacactgatctcacacaaactcacccagggatagaaaaagggaacactttccacttcattttatgaagccagttaaccttgataccaaaatcagcaaagaaagaaaacttataagccagtctccctaataacgtagtgtaaaaatactaaataaagcattaacaaaccaaattgaggacctaatcaaaagtataataaa

SEQ ID NO: 850199 - DNA, 570 bp, Homo sapiens
tgataccaaaatcagcaaagaaagaaaacttataagccagtctccctaataacgtagtgtaaaaatactaaataaagcattaacaaaccaaattgaggacctaatcaaaagtataataaaacaagtccaaattggatttattctaggatgcaaagttgatttaatgttcaaaaaattagtcaatgtaatttgccacactaagaaaataaaaggacaatcaactaaatagatgccaaaaaagcacctgataaaattcaacacccattcacgataaaagaaaaaaaaaaattctgagtgtgggattagaagggaacattctttaactgatagagtagcttggaagagaaagaactctaaaataaacatcacacctaatgggaaatattgaaagattttacccaaataaagaatgaaacaaagatactcagtcaccacttctattcaacattataataggcagtagttgcaataaggaaaaaaaaaaaaaaaaagctwtcaaaattagaaataatgggaaatgaaattgtaattatttttaaataacatgattgtgtacatagaaaatccatt

SEQ ID NO: 850200 - DNA, 494 bp, Homo sapiens
tggaataattgtttaattaaaaactacccttggaaaaaaattttaattgttatatgttccagtttgttattcctcttaggaatgtttattttcattaatttatagcccatataattacatttaaatattttaaagctgattacttataagaactttcaataaataagatgtataaaaaagacaaggacatgttcgtaatgtcaaaaagacaaggatgtgttcataatgttcataatttcagctgttgctgatggtcaaaaaaaaaaaaaaaagacaatcagaaacagctctcagattccttaaagaactaaaagtagaactaccatttgatccagcaatcccactactgggtatctacctggaggaaaagaagtcattatatgaaaaagatacttgcacacacatttatagcaayacaattcacaattgcaaaatcgtggaacccacacaaatgcccatcagtcaacaagtggataaagaaactgtggtataca

SEQ ID NO: 850201 - DNA, 709 bp, Homo sapiens
gggcagattttcccttccctttggaatctcttatctcagtactgcaagtaacattttaaagctcagttaaacatacagactgtggttgaggtcaaatctagaaaatgaagtttgcggggagagaggtgagtacttttcactttcatgcttcttggtttttaaacaagcttgatagttttggaataattgtttaattaaaaactacccttggaaaaaaattttaattgttatatgttccagtttgttattcctcttaggaatgtttattttcattaatttatagcccatataattacatttaaatattttaaagctgattacttataagaactttcaataaataagatgtataaaaaagacaaggacatgttcgtaatgtcaaaaagacaaggatgtgttcataatgttcataatttcagctgttgctgatggtcaaaaaaaaaaaaaaaagacaatcagaaacagctctcagattccttaaagaactaaaagtagaactaccatttgatccagcaatcccactactgggtatctacctggaggaaaagaagtcattatatgaaaaagatacttgcacacacatttatagcaacacaattcacaattgcaaaatcgtggaacccacacaaatgcccatcartcaacaagtggataaagaaactgtggtatacatatacaatggaatactactcagccatgaaaaggaatg

SEQ ID NO: 850202 - DNA, 597 bp, Homo sapiens
gttaaaaattctaaaattacttcaaaggctttggggttcatgaaaagaagttccattctcaaaactctgaaaatggttcagtttattcccaaggcctgctcaggaatgaagtgagagctgaatctgttttattttcaagactaaaaacatatccaattttattgagtttattgcacaattaggctgcagatttgaggagccaaaataagaaaattacaaatcatgttttgtacctcacccaaactagatgacatttctccaaattaatcagctaccccataaaggatactaacatgagatctgcagagactttcttcatgccaaaatattatggtgactttgtatctaaacaacagccatttccaagaaatgctgaagacagcatgtttcaaaggccaggatctttcacctgtatcccagcgcttattttcctatgtcctgaatacacttaggttgctggctttggctccattctgatttctcatacactgttttctctctgttcctaaaacattgtgtcatcatttgttgtgaacagttggagaaacayacaaaagaggcctccaggcaaagctctttccaaagtgagaggagctg

SEQ ID NO: 850203 - DNA, 586 bp, Homo sapiens
gtacttgacacccatgtgcttgttgttaactgtgggagcaccaccctttcccagttttctcactggcctgcaagtttctccccctctctctatcaagcatggaccccagtctgwtttataaatgagtaaatggaaccatctttcctgcttacgtcagaatttgcttccagtgcttgtaactcaaagcatctcagtcagacctacttcaggtcaacagccccaaataacactgcgcccgggcagggcgcggtggctcacgcctgtaatcccagcactttgggaggccgaggagggcagatcacgaggtcaggagatggagaccatcctggcaaacacggtgaaaccccgtctctactaaaaatacaaaaaattagtgtggtgtggtggccggcacctgtagccccggctactcgggaggctgaggcagaagaatggcgtgaacccgggaggcagagcttgcagtgagccgagatcgcgccactgcactccagcctgggcgacagagcaagactctgtctcaaaaaagaaaaaataatgacaataataacactgtgcccggcaaggtcagctaatgccacatggtaat

SEQ ID NO: 850204 - DNA, 516 bp, Homo sapiens
acagtgtgttccagaagcttctcccaagagagtgggggtcccaagggctgtggcaattacattagactcattttatgtttcctctgctgtcccttacttatttcatrtaatagcacattttgaatctatgagtttgcaaaatccaggtaagccaccataaaggtgtagaaaccactctactttcttgaactccatgggcaattagggaaagctgatgcgtcaaattcagaattccaccaacaaaatggcatttgcaattgctgaatacaacaattgtgttctacgagtaagatattttgcgtataacaaaaagtttaaaacatcagtgtatattagaaaaatatgcagtgaaacatgggagtaagtgtgcttgcaacacaaaagttagtcagtgtcatgaaaattttagccagagaacttggttggcgtagtatttaatgaaaagtaagtctgtgtcttctcctaaagttaaaagtataattctttttagttcctgcatcagtttatttttataca

SEQ ID NO: 850205 - DNA, 516 bp, Homo sapiens
acagtgtgttccagaagcttctcccaagagagtgggggtcccaagggctgtggcaattacattagactcattttatgtttcctctgctgtcccttacttatttcatataatagcacrttttgaatctatgagtttgcaaaatccaggtaagccaccataaaggtgtagaaaccactctactttcttgaactccatgggcaattagggaaagctgatgcgtcaaattcagaattccaccaacaaaatggcatttgcaattgctgaatacaacaattgtgttctacgagtaagatattttgcgtataacaaaaagtttaaaacatcagtgtatattagaaaaatatgcagtgaaacatgggagtaagtgtgcttgcaacacaaaagttagtcagtgtcatgaaaattttagccagagaacttggttggcgtagtatttaatgaaaagtaagtctgtgtcttctcctaaagttaaaagtataattctttttagttcctgcatcagtttatttttataca

SEQ ID NO: 850206 - DNA, 506 bp, Homo sapiens
ctggttgattaagatcaccattctccatttctgtgcctattcctcttttgtcccccatcctagagatactttgatttagctcacctcagattcatacctgttaggcactatctcataaaatcacaaaaccaccaggcgaatcaacagcttcaaccctagaggtagacacgggttgaccaccaatggggaaccccatccagttgaatttactcgccgacgcctttacatcatctcacccctccataccagaccccactggattcagcaagagctatctgtctcttccatttgtgctccatttctgcttcaaggccagacagctcttagaatcttagtcctcagcatcaaattagatgcctcatttagtaaaaagctttcactctgctcasaattcctaccttcacaccagccccctctaggtctaatattctgtatatctcattacccagctccaacaataacactcgaatttagcctcatcaaaggtcatactagcttccgtacct

SEQ ID NO: 850207 - DNA, 610 bp, Homo sapiens
tcctatctccatagtttttcttttttccaacaagtatttcttggctgctcccaagcwattcatgtttccagttctctctcttccttttcccccctcaaatgttcctgcatcagcccataacctgaatggccaaagaaaggattctcctggggagtggtgggtgcaaaagaagctacaaggcaaacacagaattctcgttctccatggggcaggccttgggccccaggaccaggattaggtaaggcgagtgaggtatccaggacccaaaataaaaagaggtactcacccagggcatgtaagtgaaggtcggctcctgagaatggatgcatccttacatctttttttttttttttttgtagtaaaacacacataacagaaaatttaccagttcaatcattttttttgttttgttgttgtttttgttttttgttgttgatgttgttgttgttgctgttgttgtttgagacgggtctcgctctgtcgccaggctggagtgcaatggcgcgatctcagctcactgcaacctccgcctccagggttcaagcgatcctcctgcctcagcctcccgagtaactgggactcgagtgctccatcatgcccagctaatttt

SEQ ID NO: 850208 - DNA, 513 bp, Homo sapiens
tttaagtttccaacagcacttatatttcattgacagaacttagtcatataacccataaggcaagggaggttggtctgttacttgggcagaattgtttctgtaactaaaaagagagaatggatgayggagacagaaattgagatatctgccacacaagtaaaaccaaatcactaaacatacaggattattaaatgaaatgtgctgtgaaaaaaaattgtaactggaaaaggggttgctagagacttggggttttggtggctgtgatagtagtcaggggagaattcacttgagatattatttaagaaaaggcttgaatgaagtgagggaatactctatgtgaaagtgtgatggatgatgcagtatgtgcattggccctggttcaagtagagcaagtagagtaagaaagtctgtgtgaacaaggaggaaagtgacagatgaggttggggaggtgtatatgggccaggccatatggagtcttgtagccttgacacagagtttggattagtttcctaa

SEQ ID NO: 850209 - DNA, 603 bp, Homo sapiens
ctatagaaagctgtgcatgcagagcaaactgtcaccctgaaatcaagcaaaacaggcaaatccagagtcacagctgaaatctgcttatttgtaccagttgcaaccagagccatgaactggtaagaacacataaatagtaattttgatgaataactggaggcttgagtgtagaccagcttgagaattggatactcttgtgggcccactatttcatatgttttacatccaggaaacctgttaggttctcaaggtggagatccaaaaaattatttctgtgatctggcagagatgggaaagataattcttctgaaatacactcaaagatttctccacagcaaatccttctctactggagggaaggctttactagagcctgtctcagagccatcagggagatacatttctcccatttccaatgccatctagacttcctatttcacccaagatggggagattctctacaagaaaaaatactggtgaagggcacaggccagataggcagacccactaaaacactgagatttaattcaaatattataaaatgcacactctccctcatatcttattggacaacmaacagggatccagtttaataatagtaga

SEQ ID NO: 850210 - DNA, 490 bp, Homo sapiens
aaaaactatacctaagcatatcatattcaaattgcagaaaactaaaaacaaataaaaatktttaaagaggccaggaaatatatattgataggaacaagaaaaacacttcacaaaaaacttcatgagaaatcatgcgacattctataaaactgctaaccagtgcttcttaaaatatggactgcctcctcaaggccaccaagatctgggatgtgggtgacggtaggggaagaatttaaaacgccacaatactctctcattgtaaggcagcatcttgtttttcaacaagccttctcttagttgtgtttgactagatttcagggttctacaaaagctgattttgacggttttgccagttcatttgctgcttttgtagaggcagaaccctggagtttcctatttctccattttggttggtattcctgttacaggaaaggggtctggatccagactccaagagagggttcttgaatctcatgcaagaaagaattta

SEQ ID NO: 850211 - DNA, 647 bp, Homo sapiens
aatccacaaagactgccagtgkggtgtgtgtggtgtgtggtgtgtgtgtgtacacttgtatctgtgtgtatatattatatatgtatacacacatatagatataggtagatacagatacatacatctcaaaaaaggcaataacgaaaacatcaaactatgcttgcattgtggcggcagaataagagagttagggtgagggggaaaatggttaagatctattacaattttaaatgactatgatactagcttaacttttaccaaacttgcctgtaactcccctcgaaatagacagacttcttttaaaagaaaggggttctccttacacaaaatgctttgtgttcacatcaatctgtactattcagaacaaaaccagttctgctggcagagattgtgggttcgcagggacatttaagctttcattaaactggaaagcaatcaagtctttatgtctacaaataatacatttcatagttccacaaatttggcagagtttgtgatgacatctaggatgttttcaccaaatcgtagacataaatatggaaatcatcatcaaacttgatgaaatagacggagggcttggcttctacttgatgaatgaccatgccagtccttttcgagccatcttctttggcatattccacttgttt

SEQ ID NO: 850212 - DNA, 617 bp, Homo sapiens
gtgcttgcaaaacagcctacataatccacacggaaattttgaggattcacaggagtttagcaaagttgctgtgttcaaaatctataggcaagattccattttcttactatatattaacaacaatggtggaaaaataaaatttatgaaaagacataatagcacaaaatatcaagaatctaagaataatgtgcaaggtcactatacagaaatgttattagtaggcattaaagatggtctaaacaaatggagataccatgttcatggattagaagactcaaaatgaattcttcccaaattaattaattttttccaaattgatttgtagaactaaagaaattgctatccaaatcctaaccaggtttttgtggaacttaaaatacttactctaaaatttgtgttgttttcgtttttgattttttttttctttttcttcttcttcttatattgagatggggtttctctatgttttccatgctggtctcaaactcctgggctcaagccatccacccgcctcagcctctcaaagtgcttggattacaggcatgaagcacttyatccagactaaaatttgtatggaaatacaaattcaatttgacaaatatttggccaggcatggt

SEQ ID NO: 850213 - DNA, 555 bp, Homo sapiens
ccgcacacacaacgcggctcgtccaggacacacacatccactccgagcgcgcacagtcacaagcgcccacctgatcacccagagtcagcaccacacagccacagtcacagaccacgaagacccacggcaaccatsgcaatcacacacgcaaactcctctcctcagccctccacacacaaaaggaccagagccggattcctcatcctcagctttctctagttccgctgggggccggcctggccaagttactccggactccaaggcgtggcagcagctaattgggcacagcgaaagattctgccacctggctaagaggaagccaaaatctcgcgagacatggtgttggcccgcagaatcctccgggaaatgtagtccagagcccgactgctcccctactaaaaatacaaaaattagccgggcctggtgggcgcctgtaatctcagcttcttggaaggctggggcagcagaatcgcttgaacccgggaggtggaggttgcagtgagccgggatcgcgccgttgcactccagcctgggtgacagagtgagactccgtct

SEQ ID NO: 850214 - DNA, 650 bp, Homo sapiens
ctttctggagagaggcttccaaaccactttcccaagaaagacagctgatcttgggatraatggcaaggacctgattgggtagaggatggctggtcacattgttttctgagctgtagactttatttcccttcctttgggaagagaagaggaagaggacagctcaggcgtggtttgagccctggattaagactgcccattgtccactaaaatctcttctttccttgctgcacgagggtgaagggacacccagctggacactccatttcccagctgctcttattgccaggtgtagacacaggggaatgtgaggtgagcatgtcctcaaagcctgacagattgggtaaattctcctttgtgttctctctttcatgagctgggcagatgtgcctgacacaggtttgaccaggcaactgaaaagacatccctaagagaagacaaagcaaaggtatgaaaggaacacacgtccctgactgactaggaggaacagagctgcctgctatctggaacaacttcctcccagactaagtgagaaataaacttctgttttctatatgctactgtgtttgggggcctttgtgttatagaagttttgctgtcatcctttccaattcaccttctcacaccagatatttcaaattaaaaagattata

SEQ ID NO: 850215 - DNA, 578 bp, Homo sapiens
cattatttagtgtaatctatgtgacaatcctctgagatatgtgttactattccaatttaaacamgaggaaacaggttcaaggaaggtaagttatgtgctgagggacacacaagagggagtggagctggatttcaagcccactgggtgtacagaactgagcctcttcaccatgggggcaaatccctcctgaggacagggctggaaaggccatggagatcatcttgtgcttggacaagcctctcaccagtcaccacagggccctgactcccattcctaccttcaagaagctcagcaggctactactcgtgttcatgttgggtcactacatacggttttatttgaaggaaggaccccagagttaaactcatttgaaaacccctgataaattcagtcccctccctctttttacaggtgaggcccggagagaagatatgacttgcttaaggtcacacacttagtttctctgtcaatctttctaaatcgaggacgagttctcttcccactgtatcaggctgcctcaacaaacagggaagtacaaaaatagccaaatccaggaaggagggcagtggtctgtgtgt

SEQ ID NO: 850216 - DNA, 673 bp, Homo sapiens
tcatgccttcccaacagtcccccaaagtcttaactcatttcagtattaacccaaatgtccactgtccaaagtctcatctgagacaaggcaagtctcttctgcctatgaccctgtaaaatccaaatcaagctagttacttcctagatacaatgggggtacaggtcattgagtaaatacagccgttccaaatgggagaaatttgccaaaacaaaggggttacaggccccatgcaagtccaaaatccagcaaggtagtcaaattttaaagttccgaaatgatctcctttgactccatgtttcacatcaaggtcatgctgatccaagaggtgggctcccacagccttgggcagttctgcctctgtggctttgcagggtatagcccacctcgtggctgttttcatgggctgacgttgagtgtccacagcttttccaggctcatggtgcaagctgtcagtgaatctacaattctggggtctggaggagagtggccctctcctcacagctccactaggaagtgccccagtaaggactctgtatagggkctctgaccccacatttctcttctgcacagccctagcagaggttctccatcagagcaccacccctgcagcaaacttctgcttggacatccaggtgttttcaaacatcctctgaaatctaggtggaggtttcca

SEQ ID NO: 850217 - DNA, 592 bp, Homo sapiens
cagactcctttaaagtatgctttttcttattctcagtcttctggatgaacagcactggtcagcctccctgcactgaccttatcagccctgtttgaggaatgaggaaactgtggcccagggcagagaaggaacttgctcaagatcatgtccttctttaaagtcaatggagatggtttgtggaattatgagccctgaatgggaggtttgtgacacataccagccagagctttacttcagttgtaacctcagggccctcaagcccattactccaacaagtgttcctcttttctcccaaacacccctctggatggaggcaggggagtcttggcaggctggtgaattaaacctgctttagaaggaaggaagccttaattacggtgattgggagatggcaggaggcacccagaccacacagatcacctagaggctgggtcaccctgatcagcacctgtccaatgggagcatcctatggccaaaggttctctgcatctctctgcctccmattggactaggcatgacaatctcagcctctactccacctccagtgcagccacaccaggggccctctagcatcccatgaagctgtgaactc

SEQ ID NO: 850218 - DNA, 411 bp, Homo sapiens
actggagatctgagaatggacagactgcctcctcaagtgggaccctgacccccgagtagcctaactgggaggcaccccccagtagggrcagactgacacctcacatgactgagtactcctctgagacaaaacttccagaggaacaatcaggcagcagtatttgtggttcaccaagatccgctgttctgcagcctctgctgctcatacccaggcaaacagagtctggagtggacctccagcaaactccaacagacctgcagctgagggtcctgactgttagaaggaaaactaacaaacagaaaggacatccacaccaaaaccccatctgtttgtcaccatcatcaaagaccaaaggtagacacaaccacaaagatggggaaaaaacagagcagaaaaactggaaactctaaa

SEQ ID NO: 850219 - DNA, 630 bp, Homo sapiens
ccatgcattgtttttgtttttgttttgtagccatgcattcttcttcttcttytttttttttttttttttttgagatggagtctcactcgtcatcctggctggagtgcaatggtgcgatcttggctcactggaagctccacctcccgggttcaagctattctcctgcctcagcctcccaagtagctgggattacaggggcctgccaccaaccccgggtaattttttgtatttttagaagagacggggtttcgtcatgttggccaagctggtcttgaactcctgaccttgtgatctgccttgcctcagcctcccaaagtgctgggattacaagcatgagccaccgtacctggcctgtagccatcattctttaaacttacttttctgtatgtttgtgacatgaagagttttataaagtgcagggtcagaggaagtttccctcttgcccgggtcaaagggaaatacttcatggaaacttcacaccctacaaagatcacaatgcctgagcctctccctgctggtctgctgtgctggacttcttttgtcatttttttttagacagggttttactctgtcactcaggctggaatgcagtggtgcaaccacaggtcactgcagcctgaactcctgggc

SEQ ID NO: 850220 - DNA, 630 bp, Homo sapiens
ccatgcattgtttttgtttttgttttgtagccatgcattcttcttcttcttctttttttttttttttttttgagatggagtctcactsgtcatcctggctggagtgcaatggtgcgatcttggctcactggaagctccacctcccgggttcaagctattctcctgcctcagcctcccaagtagctgggattacaggggcctgccaccaaccccgggtaattttttgtatttttagaagagacggggtttcgtcatgttggccaagctggtcttgaactcctgaccttgtgatctgccttgcctcagcctcccaaagtgctgggattacaagcatgagccaccgtacctggcctgtagccatcattctttaaacttacttttctgtatgtttgtgacatgaagagttttataaagtgcagggtcagaggaagtttccctcttgcccgggtcaaagggaaatacttcatggaaacttcacaccctacaaagatcacaatgcctgagcctctccctgctggtctgctgtgctggacttcttttgtcatttttttttagacagggttttactctgtcactcaggctggaatgcagtggtgcaaccacaggtcactgcagcctgaactcctgggc

SEQ ID NO: 850221 - DNA, 548 bp, Homo sapiens
atgtcggcaaggagtcactcatccaaactcaggtgcctgaagacacggctgcagggcggtgcamgtacatggagctggcacgcacacacgcaagtgcacaggccggtacccacgtgtacacagcacacacacgtgaacagggctggcagaacacagatgtgactgggctggtgcacacacgcatgttatcaagttctggctcctgagagaacaagggcaagacgcccagtgcccagaccctggcttccagctccagccacgggagacagggcttcctggaaaggcggcagctattgcactggggcaggtggcacggaggcgagcccagagcatctcaccgtgccaggaagcgggaaggaaagcctggagcatctcgtggtgcagggaagcgggaaggaagtgaagctcaaaagcccctaggacagggcacctcccctctggatgctctttccagaaaccctcaaccctgtacggtcaggaggaaacatggcacctcccctctgggggctctttccagaaaccctcaaccctgtacggtcaggagaaaa

SEQ ID NO: 850222 - DNA, 630 bp, Homo sapiens
aaatatgtagatatcaatagctttttttcataccaaaaaaatcagagtatataatggaaaaaattctcttcacaacagcaactaaagtaataaaatatctgtgaataaagttaccaagatatctgcaagatctatatattaaaaaaagccacaaaattctattgagggatataaaggaagacttgaaagatggagagatatattaagttcctggatgagaaaactcaatagaataaaaatataaatctgtccaagttaatttatacatttaatttttccaaaaaaatttcagtgagttgggacctggcatggtggcttacacctataatccctgcactttgggaggctgagacagaaggatcgcttaaggctaggggttcaaggccagtctaggcaacatattgagatactatctcttcaaaaaaaaaaattgccaggtgtggtggcatgctcctgcgcacctgtagtggcacatgcctatagtcccagctacttgggaggctgaggcaggaggatcacttgagtcyaggaggtcaaggttgcagtgaactatgattgcacatactgcactccagcctgggtgacagagcaagtctctttaaaattcagtgagttatgttgtatgggact

SEQ ID NO: 850223 - DNA, 506 bp, Homo sapiens
cagtagcttgagtccaaaccactctgaaaattatggaaattgggtttctgagcgrgcacagctaagagccatgccctgggacaggtgacgtgatccaggtaaacaccaccctctgagcaatctgctgggcaccagctggcccctcccaggaggcatcttgacttcctcactgatgagaagcctattttgtttaaagtgcctatcgacagtacatagtgaaatgctcggttccagctaattaagcgctcagctgtacggtgtggaaactaagagatcatgtatatggaactgtgaaatggagtttcaggaagggttcttggacgaacttgagaagggcatttgtgggtgaatgggacttcaacaaggaagcaagagaccacagatggggattaggggtttggaaggtcaggacagttgtctcacctccttccactcgctctctgcctaggtcaggaccctgcgtgcagccaccgccgtttccctctgagccacacctgggggcactt

SEQ ID NO: 850224 - DNA, 614 bp, Homo sapiens
actctagtactctagtttattgttatttggcttagttgcagtcctgtgtgaaccaacgaaaaactactccaggtgtgaagacggctcctaggtactgtattgcacagsccataacctggacactgatgttctagacagcttaataaagacagtcatttggtaatacaattggaatgtgttagtatgattttgctttgtaaagtttcctcatacttgacagaaaaaaaaaaaaaactgccccaagaaaaaaagtaaagggaggagggaagcaaaaacctaatatttgagaccctactgtgtgccaggcacccaagaaaagaaacagaatctagaccagcacaactttctcagcccaagggtcagtgccagaggcatggcagaaccttcccaaggtcaaggccaggttacagaaactggcctctttttaatgtttacatttaacaaagcaatgcctttaacaagaaaaaaaatccagtgcactataatgtactagccataagataattatttttaatatcaactcaagggcatcctgggcatgtcgtgtgataataggacacacacagaaaggtgcgtgatgaatcactcctactttcccggtaactgtagttaca

SEQ ID NO: 850225 - DNA, 564 bp, Homo sapiens
aactgtagttacaagctcacttggagataaagtcaaaggcttactttgtgagcatgaggtttgatcctgcaatgcccaagcctcacccctgggatgggtctggttcaaagcagggcgttttgatctaacactttaatgcagccatttgatgttaaaccaccttgtaaacatgtaaaatctccatgttttcaaaaacatgaaaatgatatcccttactagtgttggattcaggtcttgtaggacctaagttttgtatctgattttttttaaaaaaggataaattaggtatgaaagcaagtatttatttaaaatgagaaaaaacaacaaattttttttaaagttgcaaaagcacaaacatcaacaaaagaacagttttttaatgaactgcctagcatacctcggaagaattttttctacatttcttgactatatttcttgattatcttccctgataatcccttcatatgtcattgtktttgtaagatcaatccttaaaagagaaacaaaattctctttcttctaggatcattgatcaaaatctatttttgattactaatagtttag

SEQ ID NO: 850226 - DNA, 571 bp, Homo sapiens
aagttttaaaaatccaattaaaaactgagtgaaagacagttgatccgagagaatgtacagatggcaaataaacacatgaaaagatattcaagttctttagccattagggaagtataaattcaaaccacaatgagctatcgctatgcacctatcagaatggctaaaacaagaaatagtgacaacatcataaaagcaggcaaactacatcacttatatgttattactggcaggaatggacaatggtacagccaccctggaacacagtttgtcagtttctttaaaaaatacatgcaactaccatataaccttgcaattgtactcctgggcatctaccccacagaaataaacacttacattcacaaatattcatagcagctttattcataatagcccaaaactggaaacagcccagatgcactttaacaggtaaatggtaagacaaaccatggtacatccgtaccgtgaaatattactcagcaatgtaaaggaacaaactamtaatacatgaaacaatttgaatgagtactcagagaattatgttgagtgaacaaagtcaatctcaacaagttac

SEQ ID NO: 850227 - DNA, 618 bp, Homo sapiens
acagttgcttttttcacaccaggatccaaacaaggtacatacaatgcttttggttcakgtgtctcttaggtctcttttactttataacagttttctcctctttttttccccctttttaaatctctccctatttacttgttaaagaaaggtcatttgtccctgtagacagtccacattctatatttggctgactatattctcatggtgtcatttaacgtgttcttcccccaaatttcttataaactggtagttagatcaagaggcttcattagattcagaatcaatgtttttggcaagaatactccctaggtggtcctctgtatttccactgtatcacggcaggaagcgcctggtttctggctgttctattctgagtgatactaaaatttatcaagggcttaagaggtgacagcccttttcatccattacaaggctcctcatcaactcttcacataatgactaggcagtcactgatgatcactgcctccatccattatttcactaaggaggttgggttttttaagcctgcattaattaaagatattccagccgggcgtggtggctcacgcctataatctcatcactctggcaggcccaagcaggaggactgcttgaagc

SEQ ID NO: 850228 - DNA, 618 bp, Homo sapiens
acagttgcttttttcacaccaggatccaaacaaggtacatacaatgcttttggttcatgtgtctcttmggtctcttttactttataacagttttctcctctttttttccccctttttaaatctctccctatttacttgttaaagaaaggtcatttgtccctgtagacagtccacattctatatttggctgactatattctcatggtgtcatttaacgtgttcttcccccaaatttcttataaactggtagttagatcaagaggcttcattagattcagaatcaatgtttttggcaagaatactccctaggtggtcctctgtatttccactgtatcacggcaggaagcgcctggtttctggctgttctattctgagtgatactaaaatttatcaagggcttaagaggtgacagcccttttcatccattacaaggctcctcatcaactcttcacataatgactaggcagtcactgatgatcactgcctccatccattatttcactaaggaggttgggttttttaagcctgcattaattaaagatattccagccgggcgtggtggctcacgcctataatctcatcactctggcaggcccaagcaggaggactgcttgaagc

SEQ ID NO: 850229 - DNA, 528 bp, Homo sapiens
tttaagattaccatatactgttattaactggtaactatcatcactacattgtacaatagatctcttgaacttactgctcctaagtgaaattttacatcctttgaccaacrtctctccagccaccccagcccccacactaccccagcatctgaataacttttcactcaaaagccacataattgccaagaagtacatcgaaggatgcttaatatcatttgtcatcaaggaaatgcaaatcaaaagcacaataaaataccaattcatacccataggatggctatattttttaaagtgaaaaattagtgttggtgaaaatatagagaaattggaacccttatacacagctggtgcttccactgtggaaaagagtttggcggggatctggtctctcaacaagttaaacatagaattatcacacaacccactaattccactcctagctatgtccccagaaaaacactggaagcaggcgttcaaaccaaaacttctgcttgaacgcagcattattcacaaaagccaacagatgat

SEQ ID NO: 850230 - DNA, 546 bp, Homo sapiens
ccttagtgtgaactctggccccactaattactggctatgtaactttgagtaaaaaactttatgcacgccagttttcctacgtatgagtggagggtcatagtctctataaataaagtgtgtcatacaaaatggtttgcactgttgcaagacaaatgataaataatcagaaaatgaaatttattaaaaagaataataataagatgataatgatgatgacttcaatatttggcaagaatcagtccaggatttacatttttgccctctaatattcaccaatgatttcagagtcaaagttaaccgcagtcaactgtagttaaaagagagacttttctaatgaaagagctaactgaactatcaacaggatggagtactactggaagagttgaagagaccgaggtggataaaaggacaattaaaccttagtgggcatggagttgtcaacaycagcttaagacagagagatccagcgaagggtcacaaaactctgccttcagtcttattctagacaacatattcataaacaccctcaacatagatatagaagat

SEQ ID NO: 850231 - DNA, 629 bp, Homo sapiens
atacaaaaattagctgggcatggtgacaggcgtatgtaatcccagctaatcaggagrctgaggcaggagaatcgcttgaacccaggaggcagaagttgcagtgagccgagatgatgctattgcattccaaccagggcaacaagagcaaaactccatctcaaaaaaaaaattacactaaatgtaaatgtaaatggcctgaataccacaaactaaaggacaaatacagactgaaccaataacccaaactcaaccacatgctgtctacaagagtatatttaaaatatactctttaaaattaaatatgcactttaaaattaaaaatacaaataggttgaaattagaaaacatgaaaaaagatatatcatattaatggtaaacataaggaagctgtgtggctatgttaatactttaaaagtagactacagaacagaagctgccaaggattaaaagagtcattgtataatgataaattggataattaatcagtaatggggtttaaggtggacatgaattttggcagacagtattcaacttattatacaatactaaccaagcaaaaaatagagaaaactttaaagtattaggtataacagttgattactccagaaactacaaatgttgaggataat

SEQ ID NO: 850232 - DNA, 511 bp, Homo sapiens
ttaagcaagttaactgtgtatgttatggatcttggtctcctcacccatacaatggtgataaacatccggcacagaggagcatgaaagcatctgtggtagagcctaccrgctgcctacatcttaaaagaattagctagacatatttataaccagaagaaagacctttccttgcctttcttgcgcaaatttctgtacgatagtatgtaagtggaatgtcatgtgcaacttctgggagcctttcttataagaaagcaatacacactgtttttcattgtcttatgcatcccttcctccattttgctgcttttcctatggatgctatgatcttagactctgaatatgaggaccactaccaagggaagataaagtagtaatctggaaaaattggggtgcctaaggactttgtgaaacagaaatatctcactagtcctaaattatgtacatctgttttccatctatgtgagacaggaataactattttgtttgtatcactgtagttttgtgttttcca

SEQ ID NO: 850233 - DNA, 573 bp, Homo sapiens
agagttaggctcaaagatggaaacgacatagcagcaagtagttttgtttcactattaaaacaaaaaycatgaggagaggcgaagttaatagtatattttctattaacatggtatgaagtaacttaaatagcttaaaaaacaatgacatgaggtattagaatggagactgggtctgaaaggacatggggaaattataaaactgccaggctggaaaaacaatgatatataaaaagtgcttagtattgctttatttcctaaatatacttgtgttttaatggacaataaaggcatttcttacagtaatcaatgtatttaacggaatgctttttttacttgaaaatgcagatgttgtacttctgaccactcagcttcaattggcctcatggtaggttgtaatatcattaaaaaaggaactggttgtaaaactaagtcctcatctcagtggaggaatttatggctccaataaaagaaagaaccccaaggttcactgactggactctactgaagaaagggaaagtaatgcttaggggtttttctgtactatatgactaggtcatggtaacaaaggtgggt

SEQ ID NO: 850234 - DNA, 541 bp, Homo sapiens
gtcaaaattaatagggtattgctgcttcttatagaacaaaaaagaattctcatccattttattcattgctaaaaaaacatgtgtctgctaaaaatttcatttaraaaaaaaggttcaaaggtagtttccttgattttaaagtgttgcgaattaaaagctactttttctcaggtttgttattatcaaaaccacaccttcattaaaatgtaaagcattttattctttgagaatagattaaaactctgtattcaaccttatattaagagaggcattaaaactccaattatggattatagctttatatgagtttggagatttttttaacttcctttatatcaagaatatgttaaacggttaattgactgctgaatagatactctacatcatcataggaattaatcaatgtattggccttttgattctctgacttgctatttcatgtgttaatttaacgatttctccttccttctttgctgtccatgaagccttcatgcatgctattctatacaaactactttttattctaagttctacacacata

SEQ ID NO: 850235 - DNA, 618 bp, Homo sapiens
atttatataatgttcggcctttgaacaaatatctcagattaatcgttcagcagcacaaacggtctggactgtgcacctacaattagttttcatttttttgtttgtttatttcctttcttccttgctttcattttcttttcttttctcttttaagacaaactgaaagccagtgaccctggtagaactgtttaaaattctatgcctttgagataagcaacttttccattgttgcaaaaaaattaaaaattgcaaaattctaattttgaagttttaaaattggacagaaatattcattcctgaatccgaaaatggaaagtttgcattcatgcacaaaaaagaaaaagtatgtgttatttattctctaatcttgagaatttgggagcatgtagtgaaggggatctgtcaagatttatgttttctttgttaataaaaaattaaggttgctatcttttgcatatgaaatactgtttcagacaaacaatgtctgtctttttctttctccattcaatgtgaatactctcataggagccacattagggaataytgtttgagagaaaaataagtcaaattcttccaagtagaaaaaaaaaaaagttcccaacaacagccagacttttt

SEQ ID NO: 850236 - DNA, 590 bp, Homo sapiens
ctttaaaaatgtttacaagaaattaaartagtgagggtaggcagaagttgtcctacaacctttacaagagcaattcttttatttaagaaagtggctggattatttcccaagtgaataaattctctgtccactgccaatcagaaccgttagtggcctcatttcttcttactaactggtcctctcctttccttccgtcctctagataacacacaacaatgccaccttcactctgtcgacactggtgctttaagggaaggctgggttaggtgttcacaaacatattctctaatggtgtttattttccatggctggagtgatttctttttcccctactgaaactctattatatacccttttgttgtcatggctgaagcctgttgtttctgcaaaaacaataataggcctgaagattagggttgcattttatgggcctagcagcccagcagggcatcatatttgtatcaatcctataaattcctggcatcaggcctctttactcctagtaattaatctttttcataaatgctgtcatgtttagagctgttttattaagtttctgccttctaattttttctgcgtcactcctttgc

SEQ ID NO: 850237 - DNA, 553 bp, Homo sapiens
acctttgacaaatgatttgacatttctcaaagttctggatcctgctctgggaaaaggagatggtaactagaagtgtcgtcgagttgactaaagaggtaacatttcagtaatgcctacaaygaagtcagggtttggaaaatgagaagaacctttccctttgggctttcctggaaaggcctccgaggagctatttaaaaaggaagcttggctgtttcacccactagagcaaaggccctccaacttgctaacgatttattttgagataggtgagaatccatgcttcttgggttgatgaatataatagaccccgtttactaaacacctacaatgtgactgtcacatttggcatgtgctttaaccttcctgaatcattccccattcccccgttctgtgaaatggagattataatgcctaataggattgttgtggttggttaaagaggttgctttacattcattatctcatttgatcctcccaacaacggggtgaaataggccttacttgcccccattttatagctgaggaaactgagtttcagagaggtcaagtaatt

SEQ ID NO: 850238 - DNA, 595 bp, Homo sapiens
agtgactcatacctgtaatcccaacactttgtgaggccaaggcaggcagatcacttgagctcagaagttagagatcagcctgggcaacataatcaaaccccatctctacaaaaaataccaaagttagccgagcatggtagtgtgcatctgtagtcccagctacttgggaggctgaggcaggaggctcaagctctacttgagctccagggctcaaggctacagtgagctgtgactgtgccattgcactccagcctgggcaacacagtgagattttaaaaaatgcataactaggccgagtgcggtggctcacctctgtaataccagcactttgggaggccgaggtgggtggatcacctaaggtcaggagttcaagaccagcctggccaacagggcaaaaccctatctctattaaaaacacaaaaatcagctgggtgtggtggcaggtgcctgtaatcccagctagttgggaggctgaggcaggaraattgcttgaacctgggaggcagaggttgcagtgagctgagatggcaccactgcactccgacctgggtgacagagcgagaatctgtctcaaaaaaaaaaaaaagcgtaatta

SEQ ID NO: 850239 - DNA, 611 bp, Homo sapiens
tccccagggttatcaattattaatattcctttygaaaaagaattcagcgatatttctcctactcacacatctgtctataggatctctgcaagaagaaaaatatggctgtattctgcccgaccctgcaggcagtcagatcttatggttgtcttcccttgttccctgaaaatctgttactctgttctttttcagtataagcagagatatcatgcacaaatcgggtgatgaaatccactgatttggtattgttcaaacacgcatattttacaatcagtttatataatagtggtcctgaggtgatgtacattctcagcttacaaagataacaggattaagagattaaagacaggcataagaaactataagagtattgattggggaagtgataaaagtccatgaaatcttcacaatttatgttcagagattgcagtaaagacaggtgtaagaaattataaaagtattaatttggggaactgataaatgtccatgaaatcttcacaatttatgttcttctgccttggctgcagctggtccctccattcggggtccctgacttcccacaacatctagctcatagatggcctccttctcactatgccctcacatcttct

SEQ ID NO: 850240 - DNA, 573 bp, Homo sapiens
aatattattattccttgctaggaaaagaatttagcaacatcttccctacttgcatgtccrtttataggctctctgcaagaagaaaagtatggctttttttgcccgaccctgcaggcagtcaggccttatgtttatcttccctttttccctaaaaatcactgttattctgttcattttcaaggtgcactgatttcatattgttcaaacacacgttttacaaacaatttgtacagttaacataattatcacagtggtcctcaggtgacatacatcctcagtttatgaagataacaggattaaaagattaaagtaaagacaggcataagaaattataaaagtattatttgggaactgataaatgtccatgaaatcttcacaatttatgttcctctgccacggctccagccatccctccacttggggtccctgacttcctgcaacatctttccctttcttttcatataaatgtgccatggcaatgaaggcttattcattctctcggttttgacgcaggattctttgactggtccagcacactaaaaacaagctgattaaacagagaaacataattcc

SEQ ID NO: 850241 - DNA, 607 bp, Homo sapiens
cagggtattaatattattattccttgctaggaaaagaatttagcaacatcttccctacttgcatgtccatttataggctctctgcaagaagaaaartatggctttttttgcccgaccctgcaggcagtcaggccttatgtttatcttccctttttccctaaaaatcactgttattctgttcattttcaaggtgcactgatttcatattgttcaaacacacgttttacaaacaatttgtacagttaacataattatcacagtggtcctcaggtgacatacatcctcagtttatgaagataacaggattaaaagattaaagtaaagacaggcataagaaattataaaagtattatttgggaactgataaatgtccatgaaatcttcacaatttatgttcctctgccacggctccagccatccctccacttggggtccctgacttcctgcaacatctttccctttcttttcatataaatgtgccatggcaatgaaggcttattcattctctcggttttgacgcaggattctttgactggtccagcacactaaaaacaagctgattaaacagagaaacataattccaaaatttactacagtggagccccca

SEQ ID NO: 850242 - DNA, 629 bp, Homo sapiens
caaggtcttcaagttctgagtattatctactctcaggtgttcatagaaaatgggcgctcggatataatgaagctgcccccgccccggccccgagaagtctattatccttgttattcaagcctggattgagagatcctgaacagacatattttgtaattgtttcaaggaacactttgcttgttaggatgaggatattctttttaaacctctgaaatggaaaccaggtttgaggaagtggacaggaagtgaaacataaaataaaatgtatgcaaataaaaaacttcaaatactcaagaaagattttgtagtattagcataaccagcaagtatgttataatcctttcccaagtctcattagttttttcatattccatatacaatattgccaaaaatatgttaatctaaatggagaatatttagttccactgaactcattgtttgtaatttactaccatagtgattatactagttatcctatcatgccagatatagaaytgtgttcctctaagtgaactatatctaattacttcagcaaatttttagaacttgcttatttgtcttttggaaaacaacctactagggaaaaattttaaaacttcctgacattatctatgtaatttgctgatgtc

SEQ ID NO: 850243 - DNA, 606 bp, Homo sapiens
gcgcctcctctgcctgggctcccactttggcggcacttgagggacccttcagcccatcactgcactgtgggagcccctttctgtgctggccaaggacagagccggctccctcagcttgcaagkaggtgtggaaggagaggcgcgagcgggaaccggggctgcgcgcggcgcttgcgggccagctggagttccaggtaggcgtgggcttggcaggccccgcactcggagcagccggccggccctgcgggccccgggcaatgagggatttagcacccgggccagcggctgcggaaggtgtactgggtcccccagcagtgccagcccaccggcgctgcgctcgatttctcgccgggccttagctgccttcccgcggggcaggcctcaggactgcagcctgccatgcctgagccttcccccgcctccgtgggtacctatgcagcccgagcctccctgacgagcgccgccccctgctccacggcgcccagtcccatcgaccacccaagggttgaggagtgcgagcgcatgcaggactggcaggcagctccacctacagcaccggtgcgggatccactgggtgaagccagctaggctcctgagtctggtggg

SEQ ID NO: 850244 - DNA, 600 bp, Homo sapiens
acatcacatgttctgccagaagctttattttaaatacccttgtctgctaccttctgggttaaatagttttgaatatacatttaattcaaattactttctatcacagtcagtgactgcagttaaatttactgaacagctttaaggttttctagaaaaataatgaaggggaggtacagaaaaggctacccccatcttgttcattcaggaacattcattgtatctgaatataaagtagtctcatttggtacctcgattaatgctccctgattaaagccagctatcacaattcttaaaatgtaaacattataaaaataagtgaaaaaaggcttagaataggcaataatttaatagattagtcctagccccaagaggaattctcactatgaggctagggtttaatcttcaaaaggaaatttctggatacctaagctatatctatatcaaattaatctcttacaaacataaaggttamtaagttgtgctgattcagctagctgtgaaaatatggatcagtgttaataattgcaaggtccacctatgatatagcaagtgttttctttgtttttttaaaattagtgtttattgattagtatatattta

SEQ ID NO: 850245 - DNA, 523 bp, Homo sapiens
aagttaatgcaggagagcagaaaacyaaataccacatgttctcacttataagtgggaggtaaacattgggtctttataaagatagcaacaatagatactgaggacttctagagggggatgggagggaggaaagggttaaaaaatttattgggtactatgctcagtacctcagtagcaggatcaggcatatcccaaacctcagcattttacaatgcacccatgtaacaaaactgcacacgtaccccctgctaaatatataacaaaaattgaaattattaagaaaaaaaaaacatctcttcttaggaacaagatttttttctactaatttcaatctatataggattctactgtttcgattcttggatctgaaatttctccaaaaattatttttatcttgttatatgaatagtgttttctcaaacctgtggaattcatctgccatttttaattggtccctaagtttgagatttttctttctgtctagtttagattgaaggtagagatacaaaaggttttaattatc

SEQ ID NO: 850246 - DNA, 456 bp, Homo sapiens
cacttttagaaagacccatctcctgcagtcattattgaatggttttgggagagaaatacctttatcagtcagctccttaggcattttgaggttctttctttcagtttctcctatgaatgtagtacttcaccgttttggttccctcttgtggaacacttaggcattactaattcagacggagaaatcattgcaagcacaaataaactaaaggagtaatatacatagtctctgatccaaaagtagagtaaccatttatcctagttttctttttcatctagcttagatcagttgccttgacttaggttagcaattagcactctcaaaactgtctgtttggatcataaattatatcaccwgttgtggatctttagggaaaggataaactagttaacaaatgttacggactgaaaaaaaaggatattcttaaataaaaagttaaattagatgtctatccac

SEQ ID NO: 850247 - DNA, 456 bp, Homo sapiens
cacttttagaaagacccatctcctgcagtcattattgaatggttttgggagagaaatacctttatcagtcagctccttaggcattttgaggttctttctttcagtttctcctatgaatgtagtacttcaccgttttggttccctcttgtggaacacttaggcattactaattcagacggagaaatcattgcaagcacaaataaactaaaggagtaatatacatagtctctgatccaaaagtagagtaaccatttatcctagttttctttttcatctagcttagatcagttgccttgacttaggttagcaattagcactctcaaaactgtctgtttggatcataaattatatcaccagttgtggatctttagggaaaggataaactagttaacaaatgttacggacygaaaaaaaaggatattcttaaataaaaagttaaattagatgtctatccac

SEQ ID NO: 850248 - DNA, 522 bp, Homo sapiens
aagacatgtaaaaacaaggaataattcaagatccagaggacatgagacagtggctgaggcagtagtcttgctctcccagtatagatcatcaaaactatgacratggataaatgacaaaaagtaaactcccacctgtgacttgctcatgtatttaccttagtactgtcacttgtatgattattactcataaatagcttcatgatggtggaattgttgtagagaactgaaagaataataaatatattattatttatttttctaggaatcaaaaacatgtttaattggattacatgtatggaaacaaacagcttttcaaaaagagatgaaactgtctttttcaaactttaagttcaagcaattacctttgcaattacatgtacacgtttttatttgtttatatatataaaatagctattcatgtgaaatctacatcctgtggagtgactgcaggtgcttaattgttgcccataagcaaaccattactgcactataactctgttatagtacacagagaaaatacta

SEQ ID NO: 850249 - DNA, 620 bp, Homo sapiens
tgggaacccacctcttgcattggtgagacatggagtcaaagcagatcattttggagctttaagatttgactgccctgctggaatttggacttgcatgggttcagtaacccrtttgttttggccaatttctcccattttgaatgggtgtatttccccagtgcttgtacccccattgtatctaggaagtaactaatttgcttttgatttcacaggctcataggtggaagggatttgcttggtctctgatgagactttggactgtggaattttgagtcaatgctaaaatgagttaagaatttgggggactgttgggaaggaatgattggctttgaaatgtgaggacatgagatttgcggggaccaggggtggaatgaaatagtttggctgtgtcttctctactcaaatctcatcttaaatttctacatgttttgggagggaaattgttggaggtaattaaatcatgggggcatgtctttcctgtgctgttcttgtgatagtgaataagtctcatgaaatctaatggcttgtaaggtggtgtttccctgcataagctctctctttgcctgttgccatccatgtaagacatgacttgccccttcttgccttccatcatgattgcg

SEQ ID NO: 850250 - DNA, 304 bp, Homo sapiens
ggagtctgaagcaggagaatcccatgaacctgggaggtggaggccacagtgtgctgagatcgcrccactgcactccaggctgggcgacagagtgagactccatctcaaaaaaaataaacacaagccagacatggtggcatgcgcctgtagttccagctactctggaggccgaggtgggaagatcacttgagcccaggaggttgacgctgcagtgagccgtgattgtttcactgcactccagcctgggcattggacccaatctcaaaaataaaaataaattttttttagacctccagccatcctt

SEQ ID NO: 850251 - DNA, 627 bp, Homo sapiens
gaggatcacttgaacccaggagttttaggctgtagtgagctgtgaccatgcaactgcactccagcctaggtgacaaagtgagaccttgcctggaggaagaaaaaaaaratagaaagtttctttgtatccctttgcagttgctcccaccctcctaccccttcccacctccctgttcccccttccctcttctcagataaccactgaacagctttctgacactgcacattagttttcattttctacaatattatataaatggaatcatataatatgtacttgttttggtctggcttctttgaccctgtgtaattattttgagatttatccatgggataccatgtatcaacagttcattccttttccattgctgagtacattgtaacaatgtaccatgttgatgggcgttgggtttgtttccagtttgggggcattaaacaaataaagcagctgtgaacattggtgtgcaagtctgaatggatatgtgctttcttttcccttggatacgtagctaggggtggaatggctggaccgtgtggtagatgtattatatgtctagtttttttacaaaactgcctaatttttccgaagtggctgtacctgttttcatttctaccagcagtgaatgag

SEQ ID NO: 850252 - DNA, 611 bp, Homo sapiens
attttctaaattgtctctgcagtctttaatcactgtttatcctcttttaaagaggtggtcattgggacgccattgayggggggagggaggtagaaccctttccctgcccaattcattctctttctcagacatttggaggttccccggcccccacttctaagaactaaaaatgccgagttgtctccaacataaattcacttagttttgtcttcttacacttctgcacttggtgactgtgcgtctgtgcttgagcataatgtaaatacttaatttgtttaataaatatcctgaaatagcctctttgagttgttactagaagggcacgaaccttttaagtcacttagccagcacagatcaacacttaatgtctttaatgatgagcgtgatcttttttagtggctgaaatgctccgtaatcaatgatgtggccctgcctggaggcaggagaaactagataatgggcagaaaatgtcttgctggattgggccagtaatttgaatccctgaaattggtattagtgtggcaatttatgggagagcagtttcttcccaagggtagggagagctccccaacatcctaatgtcccttagtgatttacgcattattgaaatc

SEQ ID NO: 850253 - DNA, 607 bp, Homo sapiens
agttggggaagacgcaaacaatgtccatggaattgttaggctagtaggctgagccgagtgctaatgaggccactgttttgcctggcttatgtcgttctttattcctggcctgatctggacattctcttacccttcacagttcatcctaaacagccaggtccaccacttgcttatggtcagatgataactatacctctgcatccaaaaggaccctgtaagaatcttatattcagggataccttgtcctcactctgaaggagcacttaaagtccaataatactatttactattaatggactaaatattattaataagacatgtatattagacagtaaaaagaagactgctgcagtgttttttttctggttaaccctggcattttaattgcttggaacttcaaacttcagagctcttcttaaaggcaatatttaatttcctcccaaaaaaagcattttgcaagtagaggaatagtctgatctctttgaagtastgagatctcttttacttgagtgagaatctgatatgacgtgctattgctgatggcaatttaaatgctctgtgtgaagtttcatctctcaaaataaactttccattgtgtcttaacctg

SEQ ID NO: 850254 - DNA, 538 bp, Homo sapiens
cataatattttaccccaacaaatgtttaaattaaacagataccacagaggatgcaccctgtttgctccacggcattcctgacccctggcacgcaacagaagtataaraacattttagccagtacaactttactgttataaaaacattttaggcagtacaattgcaaagtctagatgcttttactgtcttcctatagtgtttctctctccccactcgtcttttcttttttaacttgtaatttctgggaaactgggacagaaaatatatttgccagtattagacactactttcctcctttaaggaagcagtgcctaagaatttcaaatgtttatcatctaaatgatttgaaataagcaaacaaaaattagactcctatccaggaagggggcatttttggttctgattaactgaatattctagatattgcagaaatcttgttgttgtttcctttccactggattatacaatgcttctggattataattaaggcctttaactgggcatgatggcacacacctgtagttttgagtcttgggag

SEQ ID NO: 850255 - DNA, 538 bp, Homo sapiens
attgggcatcagacttgttcaaacttcccaggtgattccaaygtgcatcaaggtatgagaacggatgcgctaggcggtggcctctaccaagtctccctctgatgccaagaggcccgttctatccactgctccactcatcctgtttatgccattcttcctgcatcccaggcagcagaagctccggggatatatttctgcccacatctcagaatctgctcttctaaaacagctgcttcaattgaagatatattttgtgcaaggctcttccatttaatgaagaattttttttctcattcccttaatattccttcccattaaggcataacctacaaacagcagatgaattacacttacgcagtgactataaaggacagctgttttatctcaatggagcattttctctttatgattccattattttactctggcatgacatgcctaatgttttaaataacgcacagctttccttttctttcctctttttttttttttaagttaaggtgaaatttcagctggaaatctactctaaaagatcttc

SEQ ID NO: 850256 - DNA, 616 bp, Homo sapiens
ccatctaagagtcagggaaagtagtatttaatacgtaggtagtggaaagtgaccttgggtgagcagtgggctgtaacaagtcctcccagtaagatttcagcccagctctgctgagctgcarctgtggcctgccttctatttccacctcctaaaggaaatgctgcttcctccatgaggcggctgtgtgatcacactgagcactgtatactgaaccaacttaaaatgtatggctactttggaggtctacctggacacaccactgacatagataatcaacctcaaagaaaacttcatgccaccagaaaatcttgatcatgacaaattaatccaacatatatttgttgaggccagacattgttctaggcaatggagaataatagttaaaatgaaaaactagttgctgcctttaagggacttacagaccagagtgagaggagtcatctatacaacatctatacatctgtggcctcagatccgtgcctgccaaagggcaccatcatcatacctgatggggagccatcaggtgttgctcttggccatcaccctgactcctcttaccacccagggagctatccacaaggaacaagggcctaaaaggaaactcaatttaactttc

SEQ ID NO: 850257 - DNA, 616 bp, Homo sapiens
ccatctaagagtcagggaaagtagtatttaatacgtaggtagtggaaagtgaccttgggtgagcagtgggctgtaacaagtcctcccagtaagatttcagcccagctctgctgagctgcagctgtggcctgccttctatttccacctcctaaaggaaatgctgcttcctccatgaggcggctgtgtgatcacactgagcactgtatactgaaccaacttaaaatgtatggctactttggaggtctacctggacacaccactgacatagataatcaacctcaaagaaaacttcatgccaccagaaaatcttgatcatgacaaattaatccaacatatatttgttgaggccagacattgttctaggcaatggagaataatagttaaaatgaaaaactagttgctgcctttaagggacttacagaccagagtgagaggagtcatctatacaacatctatacatctgtggcctcagatccgtgcctgccaaagggcaccatcatcatacctgatggggagccatcaggtgttgctcttggccatcaccctgactcctcttaccacccagggagctatccacaaggaacaagggcctraaaggaaactcaatttaactttc

SEQ ID NO: 850258 - DNA, 624 bp, Homo sapiens
aaaggcaaagttacaatcaatgttaaatgctgcagtgagggcatatgagatcagaagaaacatttctgtttggtggcagaaagccatctcagtgaagaaatgaaaccttgactgatatcacagattaaccaagaaaccaacttaaaaagatgagtttgagagttggagaagggatccatctgaggctctctcacctggcatgttctcctgagatgagttcatctatttctttgacatcagttatactctaaatgatggtctatcccaagaaaaccactctaacactctaacccagattctctctgtctctctctctgtctctctctgtttctctttctctatgtcttccctctttctctttcccttccctccctcctttttcccccaccacacttcaagccaacagcctatcagacattcccacttacatgtcctatgaaaattcccatttcatcacatccaaaatagaactcatctttctcttaaactgttctactttttaactttctctttcytggtgaacagtatccatattaacacctaagaatagcctggattcctcccttttccttactttccgcataaaccactaaccaaatgctagtgatacttgtaaccccttga

SEQ ID NO: 850259 - DNA, 535 bp, Homo sapiens
ggaggctggcctagcactgggggatgaaaggctggaggctggatgaaggagaaccaaggtcccctggccatgtgagggagccagccttgccgcagatgcagccacatgaatgagtccagaagaaaccatcagaagaaccacttggccagcccacagaatgaggataataaattattttaagccactttggttttagggcagtgttacccagcagtgatgatgttcacttctcactacctgcactgccacttgcactgctgccattttgattggagccaccagccagaatcacttcagtagcttctgcctggccttcctcctcctgtccttggcccctacagcctcttctcaacaccacccctaagtgattgcttcaaaatacaagccagatcatgtcactctgctccaaatctaygctactgagggctcctatattcattctgagtgagtgcccaagtactatgatggccagtgtggttcaacatggcttagccctcatcatctctctgacctaacctcttgttatgctctctct

SEQ ID NO: 850260 - DNA, 501 bp, Homo sapiens
ggctctgcagtgtattaaattgctcctgcaaggatgagaagtgtatataactcaataatgcctgtcattttccactgcagagatgaacttgaattaaagcagaattaattcagctaacttaagcaaaggtctaatatcaagtttatttcagttaaggtataagacaaataagtcaaattcctatgcaaagttctgcagtagttcaaactttaatctctaattcaaaacgatcactagaaatatgtcaaaatcaagaattttatgaatcttttacagcccacagagaggcttagatgaatggcatgtgttaaaaagaaatgaactacatatttagaaaggacatgacgttgcagaaattagtctgtcattaagatagctctgcatgtattcatagacaaagtgaacaactgaggcatatgtggagcgagcaatcaawcattttttgagcacctactaagtgtcaggtactgtcctaggcagtttatattcagtatctcactt

SEQ ID NO: 850261 - DNA, 500 bp, Homo sapiens
aagaataacaagataaattgaagggaagcagraaaaagagtgactataaataaaaaggaaaaatttaaaaattaagagtttgaatcatgtaaatgcattatgattcaaatgaaataaattcaaaaaatagaaaatatcatcatctaatgacccaacatttttgtttcagacattatgaattgaagtccaaagagattaaggtgtcacacaaaaccagaactaaaatccaagtcttcttattcccagtccagtggtcccatggcagaaatttggaaaaagtataaattaaggtgagttagataatcataaggagggtcttgaaggaagtctaagtgggggaaagaacagaggattcaaggctggaagttagtgacaatagatatcacaaggcaagtcctcacacttggggaagtccaaaaggatgtttactggatgctcacttcggcaacatatacactaaaactggaacaacacacagagggttggcaagccccctgtgc

SEQ ID NO: 850262 - DNA, 534 bp, Homo sapiens
gtccctccccatttttgtactctataacattcacaatttctcccagtttcttccattctctcctggcttgtttatggggtgataattagataagtctgatggtcctgcttgattccactttgacatcaattgcactccatacctgtgatggcacatggcagtggcgtgacaaaggctcccgttagtccggcttatcagtgcagcttgtttaaaatcctgaaataatgttataagcttttgttaattttgcaacattattttatgtgctatcttaaacttccttctaactgtgattccacaatgacacaagcattaagatatacatcttcctaaatacatgtgacacaagcattaaaatacacatctttctaaaactttatattttccttgtagtatcacatcaaataagaacagatgaaacaaaggaaacctattattgtagactcactcagaatcttgtactactggtctctastcaagaatggggattttttcctatggttttgacctgcaatgggtaatgaggtatctatc

SEQ ID NO: 850263 - DNA, 684 bp, Homo sapiens
cctacacactgacaggctagagggatccagcattatcatggaaaggagtaagataatacatacagtttgatcagyttttatccaagaaaagtcctgctcattatgactttgaaatttgaatatgcagattgagaggttgatctcacagaggttatttaaaaataaacaaattctaaaaatgcagaccacacacactataggaataaaaaaggacaagatttttggaagaaaaaaaggcatatttatggcaacaggtctccaactcccctcttctggtggtggagggggattctaaagtatgttttgcattgtcttccagagttccccagtagaactgagccctggttgcccacaatggtaaactgatcagtaatgggctctttatttgtttcttcccttccctatcagatgtccctactccctcatcagtgcttccttggattgtctccgaagaaactgcttccacacaaatcctcatgtcagtgcctacttctaatgaaacccaacctaagacggtgtgtatacccatgagtccctcaggactgtaagaataccctatttctgtattttcctcagggaggcaatagtgaataagaagcagtgtaaagctcgatctgaaaacagaaaagaactctagtcctcctgaaaaagtacgcttataggtggaggtcagtctcatgcatg

SEQ ID NO: 850264 - DNA, 406 bp, Homo sapiens
aaaaccagaagagttttgggaagagtggtggagatgggaggataaagaggagggagatggttaatgggtataactttaaaagtctttgaaatgacaaaagtttcctaggtagcagagtgtaggaatcacctatagtcccaaccaagacaaagttttaaccatttattaatattctgcaataatttgctgctaatttttttctccagcaaattcttatctttagaattaaagaaaatttagtcacaatccatgttcactgaatattaaaaatactattataaaccrttgaaaaacaattatacacatcagttttaataactcaatattccagagtagggatggtgtaatttttggcgatttcaataatgagatacattgttgtttttttttttcctcctcataaatc

SEQ ID NO: 850265 - DNA, 553 bp, Homo sapiens
caaataaaagacatgcaacttttccttttacttgaacacttagaggctattgcaaagctattaattggcctaaatccaatattgttgtatctcaaagaatagagaggcctgaagagaaggagagagatgagggaagagtaggttggtggagcagttagaaacaacatttatcaattgtctgccattctacatgggcacggcttgtggtgcccaaaaataattaaaatagtaacataaaagattactggtcacagatcatataacatgtgtaataataataataaagtttgaaataaatattttgggaattaccaaaatgtgacacagagacatagagtgagcacatgctgttggaaaaatggtgccaatagacttgctggatccagggttgtcacaaaccctcagtttataaaacattaaataactgcaaaggacaataaagtgaaacacaataaaagaggtatacmtgtatattaaaaagaaaaattattttaaataaatttatatactttcatccatgtataatttgctcctgatttgtgtgtgtgtgtgt

SEQ ID NO: 850266 - DNA, 525 bp, Homo sapiens
tatgtgaaaataaattaaatgtctcccyagacatattaaactctggagtgaacactgtttgtagttaaactctctcaccatgacatatgtaaaagcatccccagccatctgacatatctttcctgtcttctctgcctgttgtctgtcttcttggacacagttctcttgactactgaagttgtgacttcatttttcatcttctattctgttctttgtctgcttcatttaataacttacttgctatacttggttagtcttttgtgtggaaaataatgtggagagtagtgttttgcaatgttttatactgatatgacatttatagacaacactagtggtttatatgtgaaaggactgtaataattgcatagttgtttttgtttttgttattgttttgagcataaactttgattttgaactaatcaagtttaaatctcaactctaccacttaatcaaaccagctgactagtaagtttcaggaatagcagagtcagtagacagattatctgagttccactcagaaattta

SEQ ID NO: 850267 - DNA, 496 bp, Homo sapiens
tggatatgtgggaaaatttattctaaaaaatcagttctgagaaatattatagtgggtctactgattwgaaagataaaatataaattctcaaggcctgtgctggggggttgagggcagaggagaagggacaagaagaaaactgaaaagaattagactgatgtcagactttccaaaaaaaaaaagaaaaaaatatacaaagcaagccagaaaggtagcagagttttattttttaaattttaataaaacaaatgtaagtgcagtgaggctaccaagattcatcatgaatcaatacaaacattggctgttattttcaacagatctccaaagaaagagcagcaaatgtggagcaaactcaaaacgaccctgagctccagtcatccatgtaaatggctacacaagcaacatgttagcacctcttctccccactaccccatgttgagctgagtccgctcagagacgtaagggggtaaggagaggataaagaggaatgttttcc

SEQ ID NO: 850268 - DNA, 612 bp, Homo sapiens
ctgtgtctattattacaatgacagacacttagtagggcctctatagacatgtgttgataaactgaaacatgaaagtattcatgagatatttagtaggytaaactgaaaaacatttgcaatagattagatttaaggcattaagaagaagttgcaagaatctgctttatgattctatcttacaattagttaaatagtgattctattccccaagggagaatatccagcttgggacaaaggatctgcaggacgaatatgattttaattttgaacaagttgaggtttagttgctttggaaaatctaagtgaagacaccgagccctaaatcacctgagtaaaatctgcacaagttctagtaaagatattcaaatccaaaagttgaagttcagtatgacattttagtactttttttctttcccatttctctttccctccagagcttttttttcttaaaaatcacaaatctaagaatatagattacctcctcttctacatgttttgaaatatgaggttatactttctcatttagaagccacagaaaatcatattaaaaaaaatttaacttttatggctatacacatatataaggagaagatgaaatttcctccaatttcc

SEQ ID NO: 850269 - DNA, 621 bp, Homo sapiens
taattttgatatcaaaacatgatctgctttttatttgtccaaattttcttttgtccttcagtgtcatgttagttttctttctagggattktgtatagttcttcaaatttctcctgctatttcttttaaagttgctattgaaaatgtgatttttaatttcaattatttcttctggctgcctaacatttgactatatgaaagcaatttctttctgtatactattgtttacccagccatttctcaaaattatgtattatatttacagattttcagttgtttttctttgcttttccaaccatattgagaccgccaggtgaaaagggcttcccggtgaacctcggacgggcctgcgcactgggagaatgggggtggagccacggaagttcgcgccatttgcagaggggaggagcccagcctcttgcgttcctgtgtgatggggccggagccagtaaacaggcttccttctcgctctgctgtaagtttttctctttctcccttttcacccaagaagttccgtttttcctacccttctacgtgtccgcgagtctaatcttttctggccatatgacaagaaccaggattttcctacaatataatttgtaagaatatacagtttatcttc

SEQ ID NO: 850270 - DNA, 468 bp, Homo sapiens
tcccttgcaccatcaccatgaaattttaataccacataaatactttgtatctgtttatgtacttgtgatcctttggagggtcacaactcactgtactrtctaagagttttcccaaaaaaaccatctgacaattagggagtgtgtgctctctataaataaactatgggtccaaatgggaggtcattgaagacgggagaaaaaataaaagcgttgaatatttcacctctggctacagggagcatacaaatcctcacttgcccatgctctcacgtattgcctgcacatggaaacttccttcttcccctccctcctgttatatggaaagggatgaatgctttgctagtgctatatcatctgactgcaatgcttataatattttggggatcctgggcctccttgagaacattaagggatgaatgtacgtatgcacagcctcacactctataaatgtatgtgtcctgaatttca

SEQ ID NO: 850271 - DNA, 630 bp, Homo sapiens
atgtgggcttggtttcctcagagttttcctcacttaactaagaataatttatttgacctccacttggggactyaatattttaaatatttgaaagagtctgtttcccacccccctgcccccagaactcaggttgactgctaaaaaattgccattttgcagattaaaaaaaaagtagccacccatcagcaattgcatatagtttcagcctactagcaactagagatggggatgcctaggtgaaggtgacaaattgtatataccttttgagtaatttgccacaacagtccctggtatctctcttagtaaattcagattatacgtgacttttaaaaggtatcacagtatttgattatatgtaactatttatagaaatacttggtggtattacatggtcagtatttctgcgtcacagtggtttctgcatccctgacatgggttccacactcacccagtctctggtaggtggtacatgcactgcttgcttttctactcagctctttaagtctcaatcatgacttccaaattagctcatgtagtgatcctggtttgagattctccatgaagagggaatgaaagacctaatgtttattgtgcacacctgctctgtattagactctgtgtcaaatgctt

SEQ ID NO: 850272 - DNA, 445 bp, Homo sapiens
caaccagcccggccaacatgatgaaaccccrtctctattaaaatacaaaaaaattaactgggtgtggtggtgggcactgtaatcccagctactcgggaggctgaggcaagagaatctcttgaacctgggaggcggaggttgcagtgagccgagatcgcaccattgcactccagcctggacaacaagagtgaaactccatctcaaaaaaaaaaaaaaaaaaggtacatacactggacagtggctcacgcctgtaattccagcactttcggaggtggaagcagatagatcacttgggcccaggagttcaagactagcctgggcaacagaacaataacttgcctctacaaaaaataaacaatattagccaagtgtggtagtgcacacctatagtcctagctactcaggaggcttaggtgggaggatccctcaagcccaggagctcaag

SEQ ID NO: 850273 - DNA, 611 bp, Homo sapiens
ccaaagcaagatcttatactcactttcctctctttcccccaagcagacagtgtctctcttcatggtgtgcagactgggcttggggtagggaaaatctgggtaacataaaactgaccaacctaccctctttaatgtgtattttcttattactgtgctacaatcacatgctgtgaactatcaccaggtattttttttcttgtttggctcttatgaaggtattttaatgtatggataaatttttaaattcatgtttctccagggcaacaatcattggagagtcataccccatcatctgcaaggatttcttaaatttatagggaaggtcagaaggaataatcaagaaactaaaggcacacttcattttcttattgacctttgctttattgtgctttgcagatatacatttttttacatactgaagttttccagcaacctcatttcaagcaagtctaccagtgccacttttccaacagcatgtgctcacagataattmatgtatctgtgtcacatattggtaattctcatgatacttcaaactttctcatttttgtatttgttatggtgatctgtgatcaattatctataatgttgctattgtgatcgttttaggg

SEQ ID NO: 850274 - DNA, 372 bp, Homo sapiens
ctgaatgtcttatctgggagaatttgagtattgtttattgatgttgcactcctgcctgactgcatgttaaaccagtctgccatccctttaagaggtaagctacagtaataaatgaagtcagaattctttattcctcatctggcacacatcgtttgttttcttagaggaggtaatgcaagactgcattccaaccttgaatttcttttcttttccaagacctaagaatgtttcttccattgtgacrgtttttttttattttgtttttaacaatcacgtactttattgttctgtctatttagaatttaatcctaggtgttttcacggaagacaggattttttttcctttcttttttgttttggacaaatcttgtc

SEQ ID NO: 850275 - DNA, 581 bp, Homo sapiens
aagtcttaattttggttacagaattaaatattaatattaacaatcaaggcaatgtaaaagtaaagtacagttgactgaagctgggacacagacgaaaagagagtgaatgaaaagaaggatactaatattcttattttacaaaataggaactcagaatacccagtgcctatctgaaaaagatactaaaatgattagcatagtattaagttagaaaggtaaacaagagaactgaaatatagctatattaggaagaggggagggaggtggagttgagctaaaccttaatatgttgtaaagtcaatagacctttgatggattagtgagtacaggacacctttcctagtagaggacaccattagagggaattcgtttgagggaaaacagcctgcaaattatttatttatttatttgagatggagtcttcctctgtcacccaagctggagtgcagtggcacgatctcagctcactgcaacctctgcctcccaggttcaaggaattctcctgcctcagctcccragtagctgggattacaggcgcccaccaccatgcccaggtaatttttgtatttttagtagagaca

SEQ ID NO: 850276 - DNA, 603 bp, Homo sapiens
atatagaagaaacttataatacagatccttccacaaaggtgctagtggcctaactaggatcatatccagtatactcaaattaattaaggctaattaaatagtatatatagatcccacaatttcttacttgaaacttttggggccaatgcattttggccaacattttcagattttaaaaagcactattgtatgttaatgtgtgtatgtttatatcatatatgactaacacactcttagaaggacctactcataacaaaacacagtgatatttccacagtgaaatatgtaatggtcacatagcataaataaacaagataaatagcctcacattgtcaatctagtcaggtgtcatatctaaatgagttttggggccactttgaaaaaaactttccattttcagagcttcagagatttgggtactgtagataagggactgggatctgtcatatgggctcaacacagatcctggaagtgtrgagaggaagctacattggaattagaagactcggtgaaagtcttgtgaatgaggcagaatttgagctacagtgagttaattttctgcccctgggaggtgaggtccccacaatgccttgtcaccctgtt

SEQ ID NO: 850277 - DNA, 603 bp, Homo sapiens
atatagaagaaacttataatacagatccttccacaaaggtgctagtggcctaactaggatcatatccagtatactcaaattaattaaggctaattaaatagtatatatagatcccacaatttcttacttgaaacttttggggccaatgcattttggccaacattttcagattttaaaaagcactattgtatgttaatgtgtgtatgtttatatcatatatgactaacacactcttagaaggacctactcataacaaaacacagtgatatttccacagtgaaatatgtaatggtcacatagcataaataaacaagataaatagcctcacattgtcaatctagtcaggtgtcatatctaaatgagttttggggccactttgaaaaaaactttccattttcagagcttcagagatttgggtactgtagataagggactgggatctgtcatatgggctcaacacagatcctggaagtgtagagaggaagctacattggaattagaagactcggtgaaagtcttgtgaatgaggcagaatttgagctacagygagttaattttctgcccctgggaggtgaggtccccacaatgccttgtcaccctgtt

SEQ ID NO: 850278 - DNA, 473 bp, Homo sapiens
tcaacagcatcatgttttacgtttaaataatgaaaaataaaggagacaatgaatcataataaccttacagatttcttacaaattttgtgatcttggacatgaaagcactaaaaaatagtgagtataagagcagagctgtggtcagagggtctaaatcttactaagcagagtcgcgtcacttcttggtgtttcatgaatcagtgcttattttccaatgttctcacctacggcttatttgccgtaagaaatgggtacgagatctttcttagttaaataattgtttagtttctgttcaccagcttatataaacaaggtttctaaaaattaaaaacaatcttttctaaaaagtcgtattattttcataccaactatgtgtaaatctgtgtatgtcttcagggaaggattaaactcttcttcctcaacaccccttttcccygtttgcttctacctctggaccttggaagagtgaggga

SEQ ID NO: 850279 - DNA, 522 bp, Homo sapiens
cataggtacaggaaggggatgttctcatgcagtcctcccaggaaagcaaattgatgcrtttgctgtctttgaggagagcaatgtgagctaagccccgttctagtttccaggccctctgcacatttggctgctttgcctccttgttgacactcccctctcctcttaaaccttctttaggtaagagacttgccccagtcaactctggccgaggtggtctttgaggaggcgtcctcactggaggcttgaacaggtcctgaggtttgtctcacacagggtcaaagggcacggtcacaacggctggccaagcttccgggctctgctgctatgcatgtgttcccctcgtcctccccagctcaggctgttccaggaaccccatgttctctgtgagaatgtgggctgagctgtctgacctgtcatgttaaatgtcccttcggagatctctcctgggtacaggaaacagatgcctgttagaggaggaatatgaggtgggaggcagggttgggaagataaacccttgaccct

SEQ ID NO: 850280 - DNA, 612 bp, Homo sapiens
tatctggcttttaattggtgtgtttagaccatttacatttaatgagatgattgatatggttagtytgagtttaatgtcttgctgtttttgtgtttatcccatctattctttgttctgttttttgatgtatttttggccttcatttggacatatcaagtattttttatgatttcattttatttccttggttggctttttagctatacctctttgttttgttacttcagggttgcattaggatttatagtacacctctgtaacttaccacagcctactttcaaccgatattattatttattttatttatttttttttatgagatggagtttcactcttgttgctcaggctggagtgcaatggcgtgctctcggctcactgcaacctccacctcctgggttcaagcaattctcctgtctcagggtcccaagtagctgggattacaggcaccagccatcatgctcaggctaatttttgtatttttagtagaaatggggtttcaccatattagccaggatggtctcaaactcctgacctcaggtgatccacccacctcagcctcccaaagtgctgggattacaggtgtgagccaccgtgcctggccaataactgcta

SEQ ID NO: 850281 - DNA, 593 bp, Homo sapiens
ctacatgtaaaagaatgaaactggatccttttctctcaccttatacaaaaatcaactcaagatggatcgaagacaaatctaatacctgaaatcacaaaaattcaaggagataatctaggaaaaattcttctagacattgccttaggcaaagaattcatgactaagaccccaaaagcaaatgcaaccaaaataaaaataaataagtgggacctaattacaactaaaaatctcctgcatagcaaaagaaataatcatcagagtataacagacagagtaaacaaaaaaacctacagaatgggagaaaatatttgcaaataatacatctaataaaggacttatatccagaatctacaaggaactcaaacaaatcagcaagaaaaagtcttaataaaaagcgggcaaaggacatgaatagacatttctgaaaagaagatatacaaatggacaacaaacatattaaaaaatgctcgatgccactaatcattagggaaatgcaagttaacacaacagtgagatactaycttacctcatctagactggccattatcaaaaagtcaaaaagcaatagatgttggcatggatatagtgaaaag

SEQ ID NO: 850282 - DNA, 589 bp, Homo sapiens
atgtaaaagaatgaaactggatccttttctctcaccttatacaaaaatcaactcaagatggatcgaagacaaatctaatacctgaaatcacaaaaattcaaggagataatctaggaaaaattcttctagacattgccttaggcaaagaattcatgactaagaccccaaaagcaaatgcaaccaaaataaaaataaataagtgggacctaattacaactaaaaatctcctgcatagcaaaagaaataatcatcagagtataacagacagagtaaacaaaaaaacctacagaatgggagaaaatatttgcaaataatacatctaataaaggacttatatccagaatctacaaggaactcaaacaaatcagcaagaaaaagtcttaataaaaagcgggcaaaggacatgaatagacatttctgaaaagaagatatacaaatggacaacaaacatattaaaaaatgctcgatgccactaatcattagggaaatgcaagttaacacaacagtgagatactaccttacctcatctagactggccattatcaaaaagtcaaaaarcaatagatgttggcatggatatagtgaaaag

SEQ ID NO: 850283 - DNA, 644 bp, Homo sapiens
gagggtctttgctcatgttagaataaaaagcttattgtttgtatgcatccaaaaaaaaaaacttgtaaaaaatttccatcaaatmcaaagttgactctatcaaaatccattaaatgttttgcattgcaagtgtgcagaccagaggtttaatttcctgttgccttgctggacttaaggaatcattcgatccagttcacatttgaagaaaagattaggactggatgtaacaataactatcaattcatgccacatataatcatagccacttcttcaactctgacctaaatcatttaaaaaatattttgtccttttgtattgaagagtatggttgacacaaaaaaagtctcaatttttcaccatcacaaaacaaatgctacttacagtggagaacttctagactgagaaatgagtttccaaatatggcagaaggtttttttggaacaataatctccaaatccaattaataatttttcagaaaggtttcccaattcagttattagaaagccatatttgaatggctatttaaatagactattacttaatgatatttcttagctgtattccttaatactgtgtcttgtgacttctcctagatataagtgtgtcagtcagcttttcagctagctgaagcctccctaggtcct

SEQ ID NO: 850284 - DNA, 617 bp, Homo sapiens
aaattaaagagatttttatggtcttaatacattcctacttacttctcatgagctcaaagttcatcatacagtcacacagagctgcaagggagtctaggaaaaacagtctcaaaaagtagaggtggacagcttctcagggatctcccaagttctgatgactctctcaactctctgcttctctctgggttccagactagattctctcagaaaaagtcttggaatataggatggaaaaaaaaaatccagctgctgtagctatagattcacagtctgagcttctcccaccaccctctcagtctttgctgatcaaattcaggggaaggttaactagcctgtcttgaaccatatgtctatctctgggataatctctgcacctgagaaaggctggcttctcagagcagatgattttgttgttgttgttgttaaactttaaaagatgaatcagatgttacaatgactcatttctgggcaggcaaactcagggaactaggaaattgatgatggagtcagagattgaggtgctgggtgtggatgtgatgaagtacagacagagaggccacatctttccatgtgtgaatttatgaaagatytcagacacttaggtaaggatcctgaac

SEQ ID NO: 850285 - DNA, 671 bp, Homo sapiens
gagctttattgatgttaataatgcaccttattggccaggcacagtggctcatgactgtgatcycagcactttgggaggccaatgtgggaggatcacaaggtcagaagatcgagtccagccaggccaacatggtgaaaccctgtctctactaaaaatacaaaaattagctgggtgtggtagcacgtgcctgtaatcccagtgactcaggaagctgaggcaggagaatcgcttgaacccggcaggtggaggttgctgtgagctgagatggcaccactccactacagcctcgtgacaaaggaagactacctctcaaaaaacaaaaaacaaaaacaaaaaaacaaaaaactggtcaccttttcaccatatacaaaaattaactcaggttggattaaagatttaaatttaagacctcaaactaaaataaacctggaagaaaaacttcaaaagtaccattctggatatgggctatgggaaataattcatgactaagacttcaaaagaaattgcaacaaaagcaaaagttgacaaatgggacctaattaaactaaagagctgccacacagcaaaggaaaccatcagcagagtaaacaacctacagaatgggggaaattattcacaaactatgcatccaacaaaggtctaatatttagaatctataaggaacataattc

SEQ ID NO: 850286 - DNA, 615 bp, Homo sapiens
ctattacagtatgaaattctgccatttaatttcaagtaagaacccttatttccattctagtacctgctgtcttatgcatgtttaacacaacaacaacaataatataagtagttagyatatattaaagcattaacgaacaccaagcattgttaaatatattacatgtatttttgcttaattttcacaacattactaatggttaaatattattaccacattttgtagggcaaaaaactgaggcttagaaacattgaaaaaaacttgctcaacgttgcaaaacaagaaatttgtgacactggaattgacatctacaagggactgatgtaactaattgctggatacatgtccctcaaagacacagaaacagatcttgtattctagtggatctccggcacccagtgagggcctgaaacagagtacatgtccaacaaataattattgaagtaaagattgacatttcaggagcagagattaatattcaaaaacaaagatgagaattttggcagaaaagtcaaaatgaggtaaaagtacatttccaccttaactttttttaatttgcttagctgacataaggaagagtttataatttgtttgttttttttaattttattatta

SEQ ID NO: 850287 - DNA, 273 bp, Homo sapiens
cctgtgtggtgtggttcataatagtccatggagtggtaccagtctgtgacctgggagttgtgggcccctgctctaggtggtcctaccrtagataaataaataaaagtaaggaatttttgatcacaaaagaacgccaaagcacaagtcatgttacatatccttgtcccaacaaggtctcactcttactgacttcattcctcctcatttgaagttggaaagagatacatttactttgttggaacaagatgtgttcttctacctgctggtcaattg

SEQ ID NO: 850288 - DNA, 621 bp, Homo sapiens
aggtttcaggcctcctgagtgagagctcccagggggaggaccagactgtcatctttgctgtttggatgactcagccagttcagtcttagagtttcagagtgtctgaggagaccaggggctgaaktgaaccccccgcacagcatagccactctacaaaaacgtggccagacttcttttttaaacaagtccctattcctgttcctccttactaggcaagacttctcaacttgcttccagtcacatcctacaggtgtgttcagattggcaacaggttcatacctcagaggtacagagctcccagagggaagggcaggttatcgtctttgctttttcgcaggcttcactgctgataccttcagccactggaaaatacgaggcaattggcgactggagtggacccccagcataccacggcagccccacagaaaagtggccagactgttatgtgggtgcccatttccatatctcctcgatgggcaggtcttcctggcctgggtctccagccagccccccacttgagctttcaagccagtagcaactcagcaactccctggacagagcttccaggagcaacagaaatcctctctgccactgcctctgcagtggaactgcccttgctac

SEQ ID NO: 850289 - DNA, 610 bp, Homo sapiens
ttccccagggttatcaattattaatattcctttygaaaaagaattcagcgatatttctcctactcacacatctgtctataggatctctgcaagaagaaaaatatggctgtattctgcccgaccctgcaggcagtcagatcttatggttgtcttcccttgttccctgaaaatctgttactctgttctttttcagtataagcagagatatcatgcacaaatcgggtgatgaaatccactgatttggtattgttcaaacacgcaattttacaatcagtttatataatagtggtcctgaggtgatgtacattctcagcttacaaagataaaaggattaagagattaaagacaggcataagaaactataagagtattgattggggaagtgataaaagtccatgaaatcttcacaatttatgttcagagattgcagtaaagacaggtgtaagaaattataaaagtattaatttggggaactgataaatgtccatgaaatcttcacaatttatgttcttctgccttggctgcagctggtccctccattcggggtccctgacttcccacaacatctagctcatagatggcctccttctcactatgccctcacatcttc

SEQ ID NO: 850290 - DNA, 616 bp, Homo sapiens
ctcttggaaaattttgacctggacacccaggtttttccatatgtactctggagtctagaaaaaggatccccagcctccagttttgtkctctgcacacctgctggcttaacactatgtggaagccaccaaagcctgcagcttgtgccccctgaagcagtgacccaagctgtacatgtgcatctttcagccatggctggagctggagcttcaggaatgcagccagcagtgtcctgaggatggacacaagagtggggccatggtgctggagaaggaaaccattcttttctcccaggcctcagggcctgtgatagcaagggctgctacaaaagtctctgaaatgccttcatggcctttttaacactgtattggctattagcactcaactccattttatgcaaatttctgaagacttcttgaactttctcactgacaatcagcttttctttttgaccacttggccaggctgcaaattttccaaacttttaaatatgtttcaccatgaggtcatttctttggtcacatataggaccacaggctgttcgacacagacaggacacctcttaagctttgctgcataaaatttccttccaacagatacaatctaaattatcaccct

SEQ ID NO: 850291 - DNA, 616 bp, Homo sapiens
ctcttggaaaattttgacctggacacccaggtttttccatatgtactctggagtctagaaaaaggatccccagcctccagttttgttctctgcrcacctgctggcttaacactatgtggaagccaccaaagcctgcagcttgtgccccctgaagcagtgacccaagctgtacatgtgcatctttcagccatggctggagctggagcttcaggaatgcagccagcagtgtcctgaggatggacacaagagtggggccatggtgctggagaaggaaaccattcttttctcccaggcctcagggcctgtgatagcaagggctgctacaaaagtctctgaaatgccttcatggcctttttaacactgtattggctattagcactcaactccattttatgcaaatttctgaagacttcttgaactttctcactgacaatcagcttttctttttgaccacttggccaggctgcaaattttccaaacttttaaatatgtttcaccatgaggtcatttctttggtcacatataggaccacaggctgttcgacacagacaggacacctcttaagctttgctgcataaaatttccttccaacagatacaatctaaattatcaccct

SEQ ID NO: 850292 - DNA, 365 bp, Homo sapiens
cagaaactgacacgttaataagtaaagctttcctctacataaagatcagaactccaactagcacataaatcaatggaaatatcttagagtctcaaaattcagtgctttgaatccctgacaaatatraaaattttatactgaaaacttcatgctattcaaaacattaaaagagaaacatctgagttaaagcttacatttttaaaatctttttatgcttctaaatttatttttattcaaatatggataccaacaataatatttatgtcaatgccttccattcaattttgaacaaacagaattaggggtaagaataatgtgagtacttccaatcatttaatgtacttatttccagcattccatttgta

SEQ ID NO: 850293 - DNA, 498 bp, Homo sapiens
gacatttattgaatgaatataaattgtttgccactaactgctagacttattgaattctactcaactagtgagatctagtttaaggggaaaacaatagaaagtccctaggtctatctagtcattgttttatttgttcttcaccataacctgttaggtggataaagttcctttatttttatcattttagagaataaggagtagaagctcagagagtttgtgtaacttgctcaagtagtggaactaggactccaacccatttcttttgattcagagtacagtgatcttttgcctgtacttgctgtctccccattcaatgtacccacaggatgctgtgtgaagttctgtaggtaatttgtagattcaccacgggatgtgctctcaaagaactttctttgtgaaacatcaaactrtcatactcctcaccctcctcactctgcccctactgaagcctacaggtgcagaaatggatatgcacatccacactcatgatgtcttata

SEQ ID NO: 850294 - DNA, 506 bp, Homo sapiens
caaaagccaaaataaacccactaaactgtaggccagattctgtcacttctcaaacatctttcaacactagctaaaattattttaatggcctagaacgccttcagtgatccagctctttgcggcggctcttcccgctatgcactctgccccactgcttctcaaacacaccagagacagtcccatttcaaggcctttgcacttgctcttccctctgcccagagtacagtttccttcaccaatcccaagaccagctccttcactttcttccagtcctttttccaatgtcccattctcaccaaggcttctctagttcttcatatttcaaatccttcttttctgttaatttttttttcttcttggcacctatcattatctagcatactgtatatattacttatttatcctatttattgtctgtcatctccagyaaatatggtatcttttgttcaccttggtatcgccagtgtattgtccataataagcatttaatagacatttgttgcgtt

SEQ ID NO: 850295 - DNA, 630 bp, Homo sapiens
cctcaatcttttgctcttaattttgtgwttttgcttgcctcaatatcaaatccaaattgtgattatcatcttcacatttctacaatattgttcttttctatatttctaaatgtcatttaaagttttgcaaatataaaaatgcttacactaaaaaagttagaaaacacaagcaccctctcccatccttctttattcctagacttcctatttcaactctttttctgatccttccaatatttaaaaaaaaaatgtttctagttggttagatttatttttctagataatatattttcttgatttatgcattaggcattatctatttattcctttttttatccttgaggattttgtactcttcttacttcccaactaccttataattattttgttaaatcattagtcactattaacattatcatggtataaataatattattcatggctgagttaaatattgtttaatgctttatgttcctcttttgcccatttttggaattaataactgtctttctttttatatgattggttctctatatattgttaatatttcaccaataaatactctgacaattatttcaagtgatttgtttcaaatatttaatttcaaacatcatacttgtcattgcaaat

SEQ ID NO: 850296 - DNA, 586 bp, Homo sapiens
acattacacagtaaaataaatgaattcattttggccgactgctgttttgggttatttccccattttgctgttttgggttatttccccaatttccttagatgtgtacaaaaaaattagtgctgatgatatttttaatcttaaccctcatctgcttttttgatagatttttttcccagattttttctgttaacccaagcccacacagccagcaaaactcccaagaactcttgcaaccaatttttccttttcaattgtataaagctttgaaagttattgattctgcaaatgtgaaaaattaacttatcaaaaaatagcacacataaaatgggaactggccaaagaaacacaaagaatattgttttaactggaagttctatcattaactgctacaactactgtattcctgatatggctttttgcaatatatttatcactatatgggaacgatttaatctgctccatagagagagcagtaggagctctcagtggcctcaaaatatgatggttcttaccaaaaacarcgaatctaaatttcttgcagatagtaggcctaacttttttttttctaaaaggaaataactctcct

SEQ ID NO: 850297 - DNA, 613 bp, Homo sapiens
aacttatcaaaaaatagcacacataaaatgggaactggccaaagaaacacaaagaatattgttttaactggaagttctatcattaactgctacaactactgtattcctgatatggctttttgcaatatatttatcactatatgggaacgatttaatctgctccatagagagagcagtaggagctctcagtggcctcaaaatatgatggttcttaccaaaaacaacgaatctaaatttcttgcagatagtaggcctaacttttttttttctaaaaggaaataactctcctctaaaagtcaaatttgtttttaaaactgtggtgtctttaaccactttccccccccccagtttttcacttgacaccttgtcatgagttacagtggcttgcatcaatcattctgggttcacacagaaaatattttgtggtggttgactatcacatgcgagaaactaagtgccctttgcgggtgactgcgcaggtacctctgatttcttgccaaatcattcagaatgccgcaaatccattaaatctctccacagggaggaaaaarttcccgcattctagagagagaatttatgagttcatttcaatcaccacaaatgaaagccaccc

SEQ ID NO: 850298 - DNA, 596 bp, Homo sapiens
cccctctaaaaggccaatttcccttgaaaccttgcatggctccaagccactctttgtagaaacaatggcctatgtccaagtrgaatcaggggaggcaaatggatgacatttccttatccattggtagtaattccactaagccactatggtggctatgagtttctgagctttaaaaattaaaggacagatttggaatgtgcagtcgtgtcattgtatcacttctctgctgtcatctgtgaccatatgtcctaaattgaatagagcttttcggttggcatcacaagagatgacttttgaaactgacatttctttcatttggagaaatgtatatgttggagacataatcctatgagcctgagagcttttcattaatctctgtctttctaccaccatagttcacgccaccatcatctttcatctatttttcccttcaaatctattttcttcactgtatgtagagtgatctttccaaaatatcaactcaagcctcatatcctcaacaaatcaacaagaaatatcaaaataagcccttggcttaaaacagttcttgcttagcttcctcattgcttttagggaagacacagcaaaacagcata

SEQ ID NO: 850299 - DNA, 578 bp, Homo sapiens
ttgcttagcttcctcattgcttttagggaagacacagcaaaacagcataacctgtaagaccatatgtggtctgactccttcctcaggcttaccttatcccacayctccgtgttttctctcccagctattatgaattctcattgtccttattatcagttagttaactcttctcttccatcacatttgaactctatcatcactacccatgaaagcattttctgactcctcgcctattattggccttcacagaaccatgtaacaatcatagctcttatcaaagctggcatttcatgtttatttatgtgattaaatatatttttgtttctaattagactataaggttcacaataatctgtttctacccaacagtttatcctccttaactggcatgatgtaaatactcaaaacaaattgttgagtaaatgaataaatcagttcttgattttaacgtatcttgtgccctggataaaaaatcctttctatgagtgagacatgggcttccactggggttgggcttgaggtgagctgcaataaagccatatttctaatccaattattcatcactatggttgtattta

SEQ ID NO: 850300 - DNA, 634 bp, Homo sapiens
caaattattttaagcagttattttaaaataacatccaagattaagtgagagtttgacttaaagtcatttaatcaaggatactaaattaaaagattactctgcccgggtgtggtggtttgcagaaggaaaggcaatgatcattaacatgcaccatgccaggtgcttaaagagggttacaacaacatttgatgctcgctgcaaaccaagagacagaatttattattattattattattatacttcaagttctagggtacatgtgcacaacgttgtatacatgtgccatgttggtttgctgcacccatcagctcatcatttacatttggtatttctcctaatgctatccctcccccagtcccccaccccacaacaggccctggtgtgtgatgttccctgccctgtgtccaagtgttctcattgtttaattcccacctatgagtgagaacatgcagtgttttggatttctgcaagagacataaatttttattcatattctattgctcmgaaaacttagggtcagagaaattcaatcacattcccaaagacaccgttcccagtctgagagcagaaataaaatgtaagtctattcacccatctcaagttcttttcactgtgttctctagatatcagaaca

SEQ ID NO: 850301 - DNA, 634 bp, Homo sapiens
caaattattttaagcagttattttaaaataacatccaagattaagtgagagtttgacttaaagtcatttaatcaaggatactaaattaaaagattactctgcccgggtgtggtggtttgcagaaggaaaggcaatgatcattaacatgcaccatgccaggtgcttaaagagggttacaacaacatttgatgctcgctgcaaaccaagagacagaatttattattattattattattatacttcaagttctagggtacatgtgcacaacgttgtatacatgtgccatgttggtttgctgcacccatcagctcatcatttacatttggtatttctcctaatgctatccctcccccagtcccccaccccacaacaggccctggtgtgtgatgttccctgccctgtgtccaagtgttctcattgtttaattcccacctatgagtgagaacatgcagtgttttggatttctgcaagagacataaatttttattcatattctattgctcagaaaacttagggtcagagaaattcaatcacattcccaaagacaccgttcccartctgagagcagaaataaaatgtaagtctattcacccatctcaagttcttttcactgtgttctctagatatcagaaca

SEQ ID NO: 850302 - DNA, 571 bp, Homo sapiens
aaaacaatattattatatcaatttatactaaaaaatcattttaaaaaatttgacattccttcatgataaaaaaatacctaaaaaaactgagtctasaaggaacatacctcaacataataaaagccttatacaatagacccacagctagtatcatactgactggggaaaagatgaaagcctttcctctaagatctggaatataacctggctcaccagtgttattccacatagtactggaagtcctagctagagaaattagacaaggaaagatatacatggcatccaaattagaaatgaagaagtcaaattatacctgtttgcagatgatatgatatgatttggaaaaccctaaaaattcctcaggaaaactgttagaactaataaacaaatttagcaacgttgcaggatacaatttcaacataaaataccagtagcatttctatgagaacaggcaacaatataaaaaagaaattaaaaagtaatcctatttacactagccacacataaaattaaatcccaaagtgaaagatctctataataaaagctataagatattgctgaaatcaattga

SEQ ID NO: 850303 - DNA, 491 bp, Homo sapiens
atatgaaagtatgtagataaaattcttcactaagccttggggatccagctgcttaaggactaagaccgtatctagctccttttagtatttccacagcatgccatggagatacatgtttctgattatatatgayacatggaaattatatgttgttgaatgagtgattgagtaaatgtgtactagggcagctaatcataaatatttctactattgctaaaatgactggatttatccattccttctgagagtttatactgattgcttatattgtatcaaataccgtaactgagggcaatgtttactcaaactaatagcaccattcaaatttatgcaaacaataacactatatctttaaaatgttttcactaaaagctgcataaagagtgtattcaacaacaatagaataattttacaatcttttttcttgcttaatggccatttgtgccttctgacatgctgctagccattcaaaggtcacactaccttgaagt

SEQ ID NO: 850304 - DNA, 711 bp, Homo sapiens
cacattcaaaaagaataaaattggatccttattttataycatgcacaaaaatcaactcaaaatagattaaagacttaaacataagacatgaatttataaaactccaagaaggcaacatagggtaaaattttcataacatttgtcttggcaattaattcttggatatgacaccaaaagcacaagtaacaaaagcaaaaatagacaaatggatttacatcaaatgaaaaagccagaaactaaaaatcttctgcatagtgaaggaaataatcaaccgagtacaaaagcaacctacagaatgagagaaaatatttgtaaaccatatatctgacagggggttaatataaaaatatacaagaaactcaatagcagaaaataaaaataaaaataactatcttcaaagaagagatacaaatgaccgacaggcatatgaaaagacattcttcactaatcattagagaaatgcaaatcaaaaccacactgaggtatcatctcacactcattatgatggtcattataaaaaattaaaaattaaaaaaataaagtgttggcaaggatgtggaaaaatttgaaccgtgtgcactactggtaagaatataaaatgatgttgccactataaaaaaaacagcatagagattgatagaaaaattaaaaataaaaactaccatttgatccagcaatcccacttctgggcatttatccaaaagagctgaa

SEQ ID NO: 850305 - DNA, 504 bp, Homo sapiens
aaccttagagagatctattgttttagatatgagaacactgctatttctgcaaaaatcatccaggtcattagtggctgattcattcacatttctgcagtagctcagtatgtagagcaggctttgaaccagatacaaccagacttacaatcgattctcaatctttctaccactctgaacctcagttttacaaattaattgataatagaatcaaatgtagatacctggtctagtgcctggcacatcacataaactttaaactagtggttctttgtccttagccagttgtatttcatgaaacttgtaggcaagaacattgttgtacttacttccgtgcaaaatattctccaatgccatagtatattttgcccccctcattcacttttgcctttcaattaccatgtttcttasaggctaagtcagtttaagagccctccttcctccccaaatatgaaagccttcaaactggaatgggcctctgaggtaactaggaactgtgtcatatca

SEQ ID NO: 850306 - DNA, 627 bp, Homo sapiens
tgcagcactccaatatggcacatgtatacatatgtaacaaacctgcatgttgtgcacatgtactctaaaacttaaagtataattaaaaaaaagaaagaaaatacarctgtaagaaagaccataacaaaataaaaaaataaaataaaaaataaaatgcattgaaaagaaaaaaagcttacgtataaatttaactaagaaggtgaatgatctgtatactaaaactacaaaacaataataaaaaattacattggacacagtaagtggaaagatgttccatgttcacagattagaagaattaatattgttaaaatgtccatactacccaaagcaatctacagattaaatgtaatccttatcaaaaattccaagggtatttttcatagaaaaaaaaatcctaaaattaatatgtaactacaaaagacccttaacacccaaatgaatcttgagcaagtgtacaagaaagctgaagacatcacacttcctgatttcaaattatgttactaacctctagtaatcaaaatagtatggtactggcataaaagagacatagaccaatggaacagaatacataacccagatataaacccatgcatatatggtcaattaattttcaacaagggatccaaa

SEQ ID NO: 850307 - DNA, 642 bp, Homo sapiens
atacacaagttagtaaaatttgggcccagctgtactcccttcaacttgatgtggtcaaggggaaacaaaagggaggcccatacatacagctactgtaaatttatagggtatacaaattttccccttaggaataaggtgggccagtctctttggacctcccaaagaagaatcaagtctggttttcaaatgaaagcttcagagtatgaagcaatatttcacaaattattagagctttttaagggcatgccctctgcctagcagtactggataaacaggtatttagcagcaataaatcctaactcatctttttatatctcagggatcaccaagagtttcctgtttccagagactggcacatctttttgatgggcatgatacatgttatttgaatgactgattgaatgaataaatgagccaacaattgccatccctagataccaacaaatttccaactggcatctgcctgcttgttagtgtcatttccattaggtgtgacaagttgtaacctaaaataacacctcattgagacactagttcactttcaggactgctggggacaaggaagggagaagactacagctccttgcacaaccrgcctcccactcccattgtacctgctatacaattgttgctattttggct

SEQ ID NO: 850308 - DNA, 306 bp, Homo sapiens
aacataagaaaactcagaagacatgggcagagaagcaaaatggccaggtacgatgtaaaatgtaaygaggctagctagcacatccaacctggtgctaaaagtcttttaaggacttgaagctagcttgtggaaagatcagctattaatgtttgccagaggcaacccttaggcctttagagaaaattgtagttttccaatgataagaaaattaccccatggttctattcttgaattattttatcaattagctaagggaaaatacaatctcagacaatgcactgtacctgcactgcggctctattgtgt

SEQ ID NO: 850309 - DNA, 584 bp, Homo sapiens
taaaatcaccctaaattcaaattgggaacattctctagtaaatcagaacagcattcttygtggtcatgtttatttaagtattacatattctcattcctttgttaacaacaacgaaaacaaccagccaaccaaaaaaacaaaacaaaacccacacacacacacacaaaagtagcaatgctggcccttggtcttttccctgacctaaatttcactctcttgtaaaaaggtcatttccccctacccaagggagaataccaacatattttttctgacatacctctaaggctccaaaccttccacaacgatcaagaaaaatgacttgtttaaaagcttatttatatagtgttgacaataagattgtcatagtatggacatggaatagaatatattcaactggccagtggaattttatgtcagaataagcctatgccttcacttctccatgatgttgcataatacccactcctattactgtataatatttccagtagctatttacaaatcattctgaggaaaaataaccatttagggttttagatcatattaggaaatcacacctatttttaatataaaaatcttagaaa

SEQ ID NO: 850310 - DNA, 530 bp, Homo sapiens
taatcatagggctttttgcattggtcaaaggaatggaaaagtgtgtttccagtgttttttaattctaggcttaraaagtttttataagatataaattcatatttttggcatttaaaaaacagtttattagagttgccatattacaatgttctattttctgtggtaactgcactacacacaattttagcttctttaaaattaagagcttgtagcaagttgaatgtggcttaactttagaaaataaggtcccagagtccaggaagttcaataagcgcaaatgctctggacaggttaaaatcctacagcgatttactgttcattacacatgatcgtagccaaaaggctgagaaatgattattttagtgctcatttattgtagcctgagagctgtgttttagcagagacctatgcattcaaataacttaagatcaggtttgtggtacacgaactagtatacgatcaagtatgaaatcatatgaagaaaataaatctgtagttttgaactaggagtgcaaagatagttttaaaga

SEQ ID NO: 850311 - DNA, 687 bp, Homo sapiens
accttgtcctttagtccctctagtcccaggagtggtagaaccttactgctaatggtaacctctgcatttgaatcaccaacttcagctattggcagtagccagttgcttacatctttaggataataaacsctttgtagtgatttatttcagtttggaatatctataaagacatttgttttcctgattaaaccctgactgacacagttttatagcccattcctgttctctaatctgctcgttctcaggttggagtttctacagatcttcaccagcagaaggggtcctttctgaattgctgcatctttcaatgaatattctgttagggctatggcttcctccaccctgaacatacatttcatgtcttcccatctttttactttttcttcttatgcccctgcctattacctccttttacaatgctgttataatttattcccttttaaacatgcttactgtcacttcaatggcaggacaggaggaagagatggatgtgtgcactcagtttattgcctagctcgaaagtagtgagctactttcaaggggtagtttttttttttaagaaaactggatatgacaatctgagaataatttcatttttactaatttatttacattaaaaacaagattcaaaaataataaaataaaaaaccccaacaacaacaaggttcaatgtaatgattatttctg

SEQ ID NO: 850312 - DNA, 590 bp, Homo sapiens; identical to SEQ ID NO: 842931

SEQ ID NO: 850313 - DNA, 642 bp, Homo sapiens
ccctccaagtttctctctcgtcttccctgcacacccctgacctaaatatgaatgatttatttgagaaaattttttkggggggatagataacccatgaaattgtgggatgtttatactggctattttctcagcatttcatcttacctgaagttgataattcattgtttctagagttctccacaaatacaactttccattgacatgaaaaacacatgaaaccaaccaaaaggaactataaaatgtgaatttttactttggaagtgatgtctcctgtttatatcctttccagtatgtactcagacatggttactcaaatgagcattgttttttaagataaatgtacttacaaaaaatgactctgacctataataaaaatgtttaaaaaataatctgttttccatgtgcttaggatcgaagccacctacagtaatagcttttgttttcattaacaggggcgagttagttttgcaagtatttcttgagcatgtgttagagaactcattggaatgacctaagcaagactgccttataactataaaaaactgaaatatatttagtatagtagaaaataattgaatagcataactaaaaggtcatctttcttctatataatttgcttgaacagaaagacatcttgtaaaa

SEQ ID NO: 850314 - DNA, 600 bp, Homo sapiens
ttcactgagacatctgcttaaataagtctttggagcccyttgtttattgttagatatttttagagaccacattaacgtattaagactaataaaattatttttactaaacactgcctaaaagccccaaaccatgtaattccatctgaaagagaataaaaatcacttttgcattacacaagtcacaacttacttgattgcctattgccactttaaagctgattaacttgttcatttttattctggaattttctagatggtagataaatggcatggatttttaagtgtccttcactctatttcagagtcactatttggtacaatccttgaaagagagcatttttatattggcaattatccccatatatcattgaacttaatctttgggaattgaaactcaatcattttttcatatgactattaattgtatttgttcaagatactgtaatttaagaagagtgaaattttgtgaaacatgataatttctacttaaaatacattcattattcagctaataatgaaaaaacaggagtgtttgctcttcttgctaacattttgagaattctattcacatatcccactagtaatgtacctttgttatta

SEQ ID NO: 850315 - DNA, 613 bp, Homo sapiens
ctctcaacttctagatagattcctcaagagagaagtccttttttcattctgaacttctaattctcaaattttgattgtgtcctgttagttaccaaacacaccattatactactactctcatttcaatattgtacataaacgattccccatcttactaatgaaatgcttttttaaagcagtaacatatttaacatgtgcacatgttatgaagagtataggcaaactcaactattaaaaacatgtaactataaggaaagccatcttagacactatatgtgactacagctaagcttttctcttaagtatctaaagcaaatcaccagacttttacatagtaccctcacatagctagataagaaagtaaaagtaaaataatgaaagcagactctaaacagcagaagctccaaactccttagtttctctgttgtgctcaatcctttagcaaattacaggcctgaaaacaaggagtagctctatcacttaacaagtgactaaggaatgactttgttaattagaagtccaagggtgagaggctcctttccaccaaagctctgaataaacaycaacatcaggtcaaccagagttgtcttggtcccaggagtagcttaagcgg

SEQ ID NO: 850316 - DNA, 567 bp, Homo sapiens
gaagaattgtccatttcagcagtygcagcttgagtttcagcaagcctcatcaccatgggctaaggggctctggggttctaaattaactttttttttttttgagatggagttttttgctcttattgcccagcctggagtgcaatattgtgatcttggctcactgcaacctccacctcccgggttcaagagattctcccgcctcagcctcccaagtagctgggattacaggcaccgactaccacggccagctaattttttatgtttttagtagagacagggtttcaccatgttgttcaggctggtttcgaactcctgacctcaggtgatccacccacctcagtctctcaaagtgctgggattacaggtgtgagccaccgcacacagccctaaattaactctaaatcctgtctaggtcacaaggactgcaacttctaggcaggtcctactgctgtgctggcctaagagccagtggacttggaggggcacatgaccagtcagggtggcaaaggcagtactcgcatcacccctcccccaacctcaggcagcacagtttgcagctccaaaaga

SEQ ID NO: 850317 - DNA, 529 bp, Homo sapiens
taagcaggaaagaagctgaagtgaggttaaagtacaggtttaaaaagtatgcacayatatattttgttaactgtcctcatttgttcagagccaaacaggctgttagggagaaaactacaaaagaagggaaacacaaaagcacttatcttcaacagaaaataagtcaatccctgataattatttcgtgatttacacagaacaatgcaggcatatagatacatgttccctttaatgtcgggtcttcgcaaaagctatgtgtttatactgccacaaaagtgacggtagccatgccacattaatcacgttttgtttaccagctaaatcctaatggcctttgagaaatggctcagtaagagcaggctctccttagggccacctctaatcaagtgattagactgattgggaaaatggcatgacccatcaaataaacccttggtatcacgtgtttgttttttaatcactcattgccaacacgagattattatttttcaattgtacatttttccctatgattatgtctgtcaaggac

SEQ ID NO: 850318 - DNA, 610 bp, Homo sapiens
cccttcacaaagttatcaaatgagatactggattatttgaatatggtgacagagggaaacattttgatcggctgatcagctgaaaacaaactcattacactcccacctcaccaactagtttaaagtcaggaaaaaaaaaaggttattagcaactggaaactttttcacaaaaatatatgcctattgtcttggtgcggtggctcattcctgcaatcccagcactttgggaggctaaggcaggagggttgctggagcctaggagtttgagacaagcctgggcaacatagtaagacctggtccctacaaaaaaattgaaaaatttgccaggtgtggtggtgtgtgcctgtagtcccagctactcaggaggctgagcctgcaaggaggctgagcctgcaagatggaggctgcagtgagtcataattgtgccagtgaactccagcctgggtgacagagctgtcatatacatatatacatataatattatataattttataatatawtaatatagatccataataatatagatctatattaaaacatcaatattaaaacaataatgtatattgactcagttgttatcaaattcaacttacatagtaccttataaat

SEQ ID NO: 850319 - DNA, 606 bp, Homo sapiens
tattcatatagagaaacattaaattctacacctaccttacaccatgcaaaaaagtcaattccagatgtatccaaaactgaaaagtgaaaagaaacagtgtaaaatctcagtagaaaataatagagrttagtttaaaacctcaaagagaacaaaaaaaggaaaagaaacaaaatcctcaaagaagggtttttctgtttctattttctataaacattttttattatttataagttttaaaagtgatttcaatttttaggtttgtgggtacatgtgccagtctgctacatgagtatattgcatgatgctgaagttaggacatgaatgatcccatcaccaggtagtaaccatagtatcaatagtttttcaaatcttgctccacttcctccttcctctctctagtagtccccagtgtgtattattgccgtctttatgttcataaatacccagtgtttagcttcctcttataagtgagaacatgcagtatttggtttactgttcctacattaattcgattaggaaaatggcctccagctgcatctatgttgctgcaaaggacatgatttcattcctttttatggctgtgtggtatttcatggtgtatgtatg

SEQ ID NO: 850320 - DNA, 627 bp, Homo sapiens
accctgaaatgaaaagtaggaaaatacatttcaagaaaagcaaaccacacacmaatatttctcatgaatttggaagcaaagaattgtagcaaatttttgaaaaattaaatcctgcaattatatataaaggataatacctcatagagaagtggggcttatccaggaatacaaaattggtttagctttcaaaaataaatcagtatacttcaccatatcaacagactaaagaaggaaaaccatattatcatctctgtggatgaagaaaaatgatttgaccaaagctaaaatctcatttatggtaaaaatcttctagaaactaggaagcaatttacttttcaaatatgcttctcagcagaattccactaatttccaaaaattattacttccaattttgttactgggaatgtctcaaaaaactgcattgacttaggtgcggtgataaagaaactgatctcaggaaattaagggtacttttgaaagtaattttgtggattaaagctcatagtctttatacttttaaaacctatgtctgagggcatatttggaaccagttttattccctcttacctatttctcaggactcttttttggaatctattctagaagcaattctttctatgtgggtta

SEQ ID NO: 850321 - DNA, 573 bp, Homo sapiens
tcccgaacagtgagcgtattacaagaattacaaagggtaggagataggtccttctttcctctattagtactatctttaaaaagtaattacaaagcattgcagatattctagaatggggaaaaaagtaagtctatgcttacttttatacagtcattcttagttacttgatttttctatagaatgaaatcttttctgttttccttgtagcttcatatataatttctgagatagataatgggaaatttaaatactctagtaattatctccacatatcacaacttctgccaaaaggattaccacatcctttatcctgccttacagggtgtatctctattgtgattacacctggacattcaggcataactgatcattgtggggattattaatgagacaaaactgaaaaacatctatttgcatggagagtgagaatcctctgaggagagacctactcttgaggtaacaggaactttggaatcctgagtctgagctagttataagaacttagttgtcagaagggaatagagattcttagtaccawacaatggctcgtgtataagtctgatgctgggatac

SEQ ID NO: 850322 - DNA, 443 bp, Homo sapiens
ctttatgaaagtagtcttaaaaactttcaatccttgaaaactttcttagagattgaatacagataacatcactgatttaatgtttttcaagggattcrtctacatttttttcttttcatctgagaataatgaagagccttgaaaatgcttcatgactacgagggcttctttaaaagagttacattaactaaaactgaaatgtagttaccacacaaaggcaaggatagaataggaaaagacaatgaagaaaactccttgtaggcataggctccttatgaggtttgggcttctttctacccactatatcataacagtgtaagaaatgttctttgatacacttctcattcttttctcattctcttccctgtactgatttttctccacgtgtcccttccagattcattatctgccctgcaccaccctatgctttgctctagaggcta

SEQ ID NO: 850323 - DNA, 551 bp, Homo sapiens
gtcacgtacgccattagacctgtgctggagagtaaattctacttctctgtagtgggaccagactcctagacaggtaacaaagacaagactcaaactgaagayactttgtattcagtagactgatgagccaaaactctgttcagccgacagcacattacaagaaaaaagggaaagacagatttctaatatgacttttctagaaaatatgattttatatttttatttatatatttcatataagtatacataatatataaatatttagatatattttatatattatataatatataaatatttagatatatttttatatactatataatgtatacttatatattatcaacatacagtatcttcctctttcttgttctttgcctgtataatgtgtcaaaggcctcaaattcttttctttaatactaccccattcattgatacttgcattatcaattacaatttgtcttgtttaaagcatctacattactgatttatcaactttgaaaattgtatagctttaattccacagatttgcataaagttagttatgaccg

SEQ ID NO: 850324 - DNA, 491 bp, Homo sapiens
ttaagtgagattgctttcttgatttccttatcagattgtttgctattgctgtatataaatgctactgatttttatatgttgattttgagtgctgcaactttataaattaacttattagttctaacttttttttgacagagtatttaagtttttctaagtataagatcatgttgcctgtgaacaaggctaatttgatttcttcctttccaatctggatgccctgtacgtcttttagttgtctgattgctctggccaggacttccagtcttatattggataatacattgaaaagtggtgaaagggcacaacctggtcttgttcctgcttttacagaaaaggctttcaatttttccttactcagtatgatgttagtagtgggtttgtcatgcatggcctttattattttgagatatattcgttctacacccagtttgttragggtatttattatgaatttgagttttactgaacactttttaaacatctattga

SEQ ID NO: 850325 - DNA, 591 bp, Homo sapiens
aacaaacagagcctcaactaaactttctactgcaaactgattagtatatgaaaatattttaatatcrgtgagaaaaaaagaagtgagaaattatcaacggacttttttgatattaaataatctggatatattgtctttggaagaacttatgtgccagttatttattgtcacaacaatactgcagtgataacaccatagaacaaacaaccacaaaagtgtatgtataattaacaataattagtcattgtgcatgtgtctgtaatcaagtgggggtcagttaaggggatcccctgacattgtttatgcttgcttagatacctggagctcagagggctgttgagggaggtaggctggcttctgccagagtgaccagggcaactggacaactgtaatgtgacacaggcccagtgacccaggctaactgcggagacacaagaaagaatacattgaaatatgtcagaccccttaaggtctaggttcatactaggcaccttctcttaaaaatcaccctatagatcaaagcaatgtgtatgtccaagtttaggatgaagaggtgagtgaatatgccccatctcttttttggaaaggatt

SEQ ID NO: 850326 - DNA, 591 bp, Homo sapiens
aacaaacagagcctcaactaaactttctactgcaaactgattagtatatgaaaatattttaatatcggtgagaaaaaaagaagtgagaaatyatcaacggacttttttgatattaaataatctggatatattgtctttggaagaacttatgtgccagttatttattgtcacaacaatactgcagtgataacaccatagaacaaacaaccacaaaagtgtatgtataattaacaataattagtcattgtgcatgtgtctgtaatcaagtgggggtcagttaaggggatcccctgacattgtttatgcttgcttagatacctggagctcagagggctgttgagggaggtaggctggcttctgccagagtgaccagggcaactggacaactgtaatgtgacacaggcccagtgacccaggctaactgcggagacacaagaaagaatacattgaaatatgtcagaccccttaaggtctaggttcatactaggcaccttctcttaaaaatcaccctatagatcaaagcaatgtgtatgtccaagtttaggatgaagaggtgagtgaatatgccccatctcttttttggaaaggatt

SEQ ID NO: 850327 - DNA, 580 bp, Homo sapiens; identical to SEQ ID NO: 842976

SEQ ID NO: 850328 - DNA, 601 bp, Homo sapiens
tgttgactgtcagctaagaagagtcaccagcttctaaaggctacctgcctggagtccctgaattctgactcacttcttctatcttaaaagccacaaagatgggtcaagttcctctcatgyttcaaatctcttctgcctctgtgtccatattgtgtcactctgactgacctcttccagtcaactcaagttgcaaaagttcctcttccacttttaagaacctgtgtgattacgttaggcccacctaggtaatcttcctatttgacgatccatgaccataatttcatctgcacaattccttgtaccatgcaatataacatgcatacaacatagccctagaggttgaaaattatagggttaaacttctccctaccatattgatatatattcaaaactatttacagcaccactgttggcaatagcaaaaataaatgaaaacaatctaaaaatcctccaaaaaggacagattaaggatattatgggaactcgtacaatggaacattattcaattgtgagtaaaaattgaggaagagccctattttcaaatacaaaaagctcttaaggactcgttaagtgaaaaaagcaatgagcagaactatgcata

SEQ ID NO: 850329 - DNA, 663 bp, Homo sapiens
gcaaaggattctagacatgtgaaagaaaggcatgaaagaaagaccctggcttgtgaaaagagctaaagacaacatcattgtrgcaatggagaaaacaaaccttttcttttggtgaagggattagaagttcagttttacaaatactaattttgttaagtgttttagacatccaaagagatttatagtagtaattaaatatatagatctaaaactcaaaagagtctgaggatggagaaataattggaaaataaagacatgccggttatatttaaatccatatgactgaataagatcacctaaggaacaagtttataaaaagaagatcaaggactgaaaaaacaggaacaaaaacatttagagataagttagaagaattggcaaagaaatatgtgaaaaagaagcttaatgagattaagaaaatctggagagtgtgaggtcagctactctaggtccattattagggatacagttaagaccttcatgtagtctgttagttatatctgtttcataaaatcaaaggctagagcctcttaaaacagtatggtaagatttcatgttcattgtgcatatctatatactatagctaaagacatcaatagttactataaacaacagataaaaatgaacacatataaatgaacttcatgatttactcttgttcta

SEQ ID NO: 850330 - DNA, 650 bp, Homo sapiens
ttggggatccctttctccaagaacacacttcactctcccccacatctgtcatcaggttttttggggggtggcccctaaaatacttgtttatattatatgcctatgtttatatgatgctattatcttctaataggagattgaaccagggcttggctcaacctatgccaaactgtcctgctttccggaaatttaaaatcaggtttaagggattctagctgccatttgggataaattgtgcaaattaagaattgtggcaaactgtcttctaccatgtcatctaagtgcctctgcaccttgtacatgaagatgtacaaagtagaggatttgaagagattccagtcctccttgagaagctgaatctcaaagctgcctttgatgtttgtgagatgtccttgatttttcttaataattttctctttttttccctgggataccttgaatttctgttacttataagcaaaaaacattgattcaagttgcctagatccagaaaaagaaggaagtaaggcttttccccattttgttgtggatttgcagatagatttgtgccacaaaatgtcataattttatrcacactaatgtaacaaagagaaatcttaacgagatcgagtgtttttcatggttcacttaagtaactgggggaagaggcc

SEQ ID NO: 850331 - DNA, 613 bp, Homo sapiens
atctctattttgaactgtaacagcaagaatatcatgcatatyaacacagagatccttcatgtgcctgagatattctaataagctcttataacatggtatgttatacactatatctcaaacaactcttactattgctataaaattttcaacatggaactttgattaagataaagtgaagagataataatgtttctaaatcttaggaaattttttcctgttactgaggtgggggacttttcaaaaatgtatttctgtcttttgctggaaatatttatttcagtttcctacagcattgctatagcattgctgtaggaaattaacagtaattggtgactggcagttcaactgacagaaacacattattttgcggggaggcggaggaaaagcattcgcaaactcaatatgaatccatttcggaaagtagagttgtttagagaaatacaaatatcttcactcagtttttgcccacttactgaaaacacagtgtgaaactaaaattgaaaaagcaatgttcttctgaacatctttccattaaatattgcatcatataaaaataggattttatggttattattacacatattttcttccctttcatatgcagaatctaaaa

SEQ ID NO: 850332 - DNA, 614 bp, Homo sapiens
ttatttctgcctgatctttattatttcttttcttctactaagtttgcatttggcttgctcttcttttcctaattctttaagatgcattgttaggttgtttatttgaagtttttctastcttttgatgtagatgcttatagcaaaaactttcctctaagtactgattttactatatcccatcatttttggtccattgtttccttcatcatttgttttaagaatttttaaaatttctctcttaatttcttcattgacctactaatcattaaggagtatactttttttttttttttttgagatagagtctcactctgttgcccaggctggagtgcagtggtgcgatctcagctcactgcaacctcagcctcccacgttcaagtgattcttctgcctcaacgtcccatgtagcttggattacaggaatgtgccaccatgcctggctaatttaggagcatacttttaatttccatgtatttgtatagttttcaaaattcctcttgttactgatttttagttttattccactctggtcagataagatacttgatataatttcaatttttaaaagtttaacactagttttgtggcctaacatgtagtctatccttgataat

SEQ ID NO: 850333 - DNA, 546 bp, Homo sapiens
caaacaggccactttttggcaggtatcttgaaataaaatcctatattttaccagcaagatttctgggggaatattatgactttttatctgctttcctgtacccttgggttagagaagtttttccatgtgtgccaattttttaataaaaatgaaacaaaattcaatataatgaaaatgtatttcattgtcaaataaaaaatgaaatataaatatgtatcaaaaggaaaaaaggaaaagctattctgtttatataagagcatgtttgctagaataaactagacatctttgtctgcatggtttaaataagaactgatcaaggggatgcctccatcaggaaggacctgcaaacaaattcattttcctcttttgaccttacttcatcttcttctttttctgaaataaaccctaccattaagcaacaaaagacccagaaaaaaattaagtaattytgaaatgaaatactaattctacacaaaagccacattaataacctttttttttttttttaccatttagaccacttttgtgctttttataaactttctt

SEQ ID NO: 850334 - DNA, 595 bp, Homo sapiens
atttgaaggcaaatttaagagtttctaagattttcagttttatatttcactgaacacttcatatctctaaataagaacctgccttattttaaaacagtcttatctttctttattcctatgaacgrtaagtaatcagatcactgagaagcagaaagcatgctaatccgtataaaactttcaaaatagcacaagccactgcataaagtgcttgctggtctgaaattcattattccaaccaatgatttcagtcatttgaagtttgtgaagggttgttgggataacattttgaacattttcttaggggaatttattttattcttagtttcctgctcacatattatgacaggaagcgagaatcatgtaactaaatattatataaagcaaatgtgatgttggattaatctaatttgattggaatgcaattttttatgagatgatgaaatttagtgtttacttgaaatcaagcatcttctctcttgtgctttgcaacagaaaaatataggcaatgttgcatataaactttaaactcattcatttatgagatgcaaagtaagaacaaggcataaagaaaagaagctagtagaactgcctatag

SEQ ID NO: 850335 - DNA, 659 bp, Homo sapiens
ataggctaatttataaagaaaataaacatattcctcattgttttggaggctggaagtcyaagagcatggccctagaatctagtgagggtcattctgtggcagaagggcaggcagcagaaatgagcatgcatggcagagagaggaaatgagggctgaatttcattattttatcaggaactcattcccacaataactaacctgctccgtaaataatggcattaatttatttataatggaggagccctatgacctaataacttcttaaggcctcacctcccaatactgttacataggcaattaaattttggcatgaaattttttttgtgcggggcgggtggcattcaaaccacagccccagcccatggaattattattcaagcaagccatttctgtcttcccagcaagaacgcagggtacctcacccttttgatactataaagcctgcaacccggcgcggtggctcacgcctgtaatcccagcattttgggaggccgaggcgggcggatcatctgaggtcaggagtttgagaccagcctggccaacgtggtgaaatcccgtctctactaaaaaatacaaaaattagctggacttggtggcaggcgccttaattccagctacttggaaggcagaaaaaaaaatactacaaagtctgctttcca

SEQ ID NO: 850336 - DNA, 567 bp, Homo sapiens
ttggaaaaactgcaacctggatttagttgcaaccgcagggaggaactgctgctgccagggtgaagaaacactgctatagtggaagctgcgggagcgagagaatgtaagcaagcctagaggaagaaaacaggaaggaggaagtcacttcctcccccagcctcagtctctcagtaccactttatcctggcagagtagaaagtggtttttcagatgctagtcctagcatcacaaagcaaagatgaagttagagtggagagagaatagcttcataaatagcctactttttcactcctctaactccattcatttttacctctaatttttccttcttactttctatcatttcttttttcttctttttgaggtttttttttttcttagacggaatcttgctctgtcgcccaggctggagtgcaatggcgcagtctaggctcactgctacctcttcctactgggttcaagtgattctcctgcctcagcctcctgagtagctgggactacaggtacgtgccaccrcacctggctaattatttttagtagagatggggtttcaccgtgttggccagg

SEQ ID NO: 850337 - DNA, 334 bp, Homo sapiens
cagaaaagaagtttcacatttcagtttgaaatgaagatgtggctttttcagtaaagagactagtatttcygtggctaactgaattaacctgtgggctctaggtaagtcctaagcacatctgggaaagaataaaaggaatatttaattgacctcaggagtgctttagaagatcatccagacctatcaggacatcttctcagggaggtgggatgagatttaggaaccaacaagcagccatataatctcgccaaacccattagtggtcctgacatggctggagaccctgggatcctttctcctggcatggtagactaaaccacttgttggctctgtt

SEQ ID NO: 850338 - DNA, 629 bp, Homo sapiens
ggctggagaccctgggatcctttctcctggcatggtagactaaaccacttgttggctctgttccccaccctgtgccgcctggagcaggggaagcagatggtttcaatacaggcagaaacagctgttcctcatatggggtgagctgaatcttgattgttttaggttctgctctttacattgacccctcaatggtcctagttctgaagtatataagcgggccctttaaaagactttcctaaggcctgaatgtcaaatgaatcataatctaggtagcaagattgctcctaaatggacatcacagtggctgaaaacaatcaagggatggctgatttagtagggccatgctcaaatagggcaagtctctccccaaggtaaccagagacatcctcaatgcatcagcaatcttggaagctgtactcatctgaaagttcaggctttgttggacaacactcctgtccactggcacactcacacactcactgccatacaaccctttctcagactgagtccattagtagtatctacctgccgtaagcccctagaatcaaagatgctatgwggaaggcttggacccaaagacagcattggagacttggtcttaggtgagcaagggtttaatctgactagga

SEQ ID NO: 850339 - DNA, 573 bp, Homo sapiens
aaccatggtggtgtgctacgtgcgtataaacaatatgtgcatagtcatgatattctaaacgttaattcaaccattgattatgatattggtataaaagaacaatgaaagttgggaaattgaattgaaagtactttaagttttagctttttttacatctccaccttaccacatacaaatattttctcttccccatactcctagtataaacatactataaggtttgtccaatacttattgtttaaataattatggctacctaaatatgtttattaccaagttgctaatgtacttccattcttatttattgcttttgttttactggtgttatcaattttgcttatttgtttggttaatttctattttcttattactaaatcactttcaaactttctaatggaattctaaaatggctagctttttcttagtacagttcaaaaattcatatagtacataaatctataaggtaycattggttccattttgtcttctttccttgatggttttcttcttgaagtttttcattatcatgttccagactgagctggctgatctccagctggccatactgctgtt

SEQ ID NO: 850340 - DNA, 600 bp, Homo sapiens
cccttcaacatcatgatgccttaaatttttcttagagagcaaactgaatgcagtaggcatgacaggaaaattgctaaactatactttactagacttaaaatttctcctcattgaaaacctaaattggtaagccacagactaaaagatattcacaaaatatacatctaaaaagaagacttatatccaaaatctctgaagaattttaactcaataataaaaatatttaaaaatccagtgaaaagtggataaaataatctaataaacatttgcaaaggacacaaataaatggcagagaataacaacaaaagcaaaacaaattaaaaaatgcagcatcactagttatcacaaaactgcaaattaaaaccataatgagataccattacacacctagtagaatggctaaaatttagaagtctaacagtatcagctgttagcacagattttaagcaatgagtctcttaaatattgcttgtagaaatgttaaatagtccagccatttcaaaaaagagtttttcaatttctttaaaasttatgcctaccttatgacccagcaattttactccaaaacaattaaatcctatgtttataaatgattgtata

SEQ ID NO: 850341 - DNA, 617 bp, Homo sapiens
ttttctcttgccaccaccatgtaagaagtgcctttcacctcccaccatgattttgaggcctccccaggcaagcaaaactgtaaggacaattaaaactctttttgtttccagtttcaggtatgtctttatcagcagcatgaaaatgaactaatacagttaattggtaccaggagtggtgtgatgctgaaaagacacctgaaaatgtgcaagaggctttggaactgggtaacaggcaaaggttctaacagtttggagggctcagaagaagacaggaaaatgtgggaaagtttggaacctcctagagacttgttgaatgcctttgaccaaaatactgatggtgatatgaacaataaggtccaggctaaggtggtctcatatggagatgaggaacttgttaggaactggagcaaagatgactcttgttatgtttttagcaaagagactggcagcattttgatcctgccccagagatttgtggaactttaaayttgagagagatgatttagggtatctggtggaagaaatttctaagcagcaaagcattcaagaggtgacttgcgtgctgttgaaggtattcagttttaaaagggaaaaagagcataaaagttcagaaaatt

SEQ ID NO: 850342 - DNA, 573 bp, Homo sapiens
atagtctgctgacaacaggcaattaaagttcaaggatatttgagagaggaagcccattttaaatatggaagagaaagttgagtgatagaagggttagataaattgagtccagcagtacaacctcaagaataagttctgaaaggaaatccttgtaaactgtttggttttcttttatagaatcacctaagttggtcaccatagagatgacacaagcaaagacagtcctctcttcctctaagcttgcaaatgcctttgtaagaatggacaccagcaaattccacccccaaaaagagagatataatagaaacagagcaatattgtcaaacaccaggacttctgatctatgtcccagcagtagtggtaaaaatgaatcaagacaacaaatgtaattttttttctttcttcctataatataattgtagataaacatgagaagtcatatattattaggtcagggttaagtaaaaatgatgcagcattcattttcattcaatttaattcaacaaatrcttagtaaaagtcatgtggtagatactctaccaatattgtggatacacaaaaggagttaataca

SEQ ID NO: 850343 - DNA, 549 bp, Homo sapiens
aactaattataattaaaatcaaaatatttactraacctacttactcctataatttgcgttgctggttaaaacccagctataaaaattttgatcaaaaatttttattttgtaaatgatctgacacagcataaatgttaatcacatttctttattttatttgcagattaatttgagtaatttgaaaaattattaatgttacttaattactctcaacaccttacagtgtctcctgtaagcactattggtgatactgaatttaagttacatttaacaactatcagaaaatagtttttaaagtaaaaattatgatttggagtttaccaactaaatcttgttagctttcactgcctctattgagaagagcagcagttcttatcttcctcctttttcttctttaattaacaagagattatttgtatcatagccataaaatcagttcaggtcttacatgaacgacacccctgactgcaatggtgtagtttattgtattagtccattttcatgctgctgataaagacatacataagactgggtaatttataaagaaat

SEQ ID NO: 850344 - DNA, 549 bp, Homo sapiens
aactaattataattaaaatcaaaatatttactaaacctacttactcctataatttgcgttgctggttaaaacccagctataaaaattttgatcaaaaatttttattttgtaaatgatctgacacagcataaatgttaatcacatttctttattttatttgcagattaatttgagtaatttgaaaaattattaatgttacttaattactctcaacaccttacagtgtctcctgtaagcactattggtgatactgaatttaagttacatttaacaactatcagaaaatagtttttaaagtaaaaattatgatttggagtttaccaactaaatcttgttagctttcactgcctctattgagaagagcagcagttcttatcttcctcctttttcttctttaattaacaagagattatttgtatcatagccataaaatcagttcaggtmttacatgaacgacacccctgactgcaatggtgtagtttattgtattagtccattttcatgctgctgataaagacatacataagactgggtaatttataaagaaat

SEQ ID NO: 850345 - DNA, 562 bp, Homo sapiens
atcagcactctgtaaaatggaccaatcagtgctctgtaaaatggaccaatgagcagaacatgggcggagccaaataagggaataaaagctggccacctgagctagcagcggcaagccagtggcgttcaatgytgtggaagctttgttgttttgctcttcacaataaatcttgctgctgctcactgtttgggtttgcactaccgttatgagctgtaacactcactgcaaaggtctgcagctttactcctgaagccaacgagaccacaaccccaccggaaggattaaacaactccagatgtgctacctttaagagctgtaacagtcactgcgaaggtccgcaaggtctgtggcttcacttcttaagtcagcgagctcacgagcccatgggaaagaagtaagaactccagatgggctacttttaagaagtgtaacactcactgtgaaggtcggaggcttcaatcctgaagtcaagcgagaccacgaacccacgggaaggaaaaaactgtggacacgtgaacattggaaggaacaaactccgggcccaccatctttaggaactgta

SEQ ID NO: 850346 - DNA, 684 bp, Homo sapiens
agatgggctacttttaagaagtgtaacactcactgtgaaggtcggaggcttcaatcctgaagtcaagcgagaccacgaacccacgggaaggaaaaaactgtggacacgtgaacattggraggaacaaactccgggcccaccatctttaggaactgtaacactctgtgagggtcggtggcttcgttctcgaagtcagcaagaccaataacccaccagacggaaccaactccagacacataatggttactgttttatgtctgccattatgtttggatggtaataattattggtaattgcagaatgtgatgtaaccagtgttaaatggtgacatcctctcctaagttattcactgttatattccattactcaacttgttcacctaaaataatatgtcagtatttttccatgaataatttgagaaattttacatattctgtatgaagagtattcatgaatgagtcatcctatttctgtcattgatttttatgtgttgtgtcaaattgtggagaagactttcaagtgaaaggaacaaaaacaagactgtttatagcaggactggttcttcagctgggtaatatcaagttaccctgacagctttttctgtgatgctcttactcctccagtactgccacaaggctggcccctgacatccctacacatcacggcttacaagttgtgtcatct

SEQ ID NO: 850347 - DNA, 381 bp, Homo sapiens
ataatattccactttgtgatggctgcagagaagccatctctaagaatctcaatagcatatatgaatataatgacagaaatgtcagataactttcatgtatygcatcactaaatcttaactgaacttgtgatgtactccaaataaacctctaaaatattagccttgaactcctgggctcaagcaatcctcctgctacgtcctcctcagtagctaagactacagcataccaccacacttagctttttttaaattattttttgtggagacagagtcttgctatgttgcccagattggtctcaaactcctgccctcaagcaatcctcccatctcagccttctaaagttctgggattagcataagctaccatggccagctctttgc

SEQ ID NO: 850348 - DNA, 381 bp, Homo sapiens
ataatattccactttgtgatggctgcagagaagccatctctaagaatctcaatagcatatatgaatataatgacagaaatgtcagataactttcatgtattgcatcactaaatcttaactgaacttgtgatgtactccaaataaacctctaaaatattagccttgaactcctgggctcaagcaatcctcctgctacgtcctcctcagtagctaagactacagcataccaccacacttagctttttttaaattattttttgtggagacagagtcttgctatgttgcccagattggtctcaaactcctgccctcaagcartcctcccatctcagccttctaaagttctgggattagcataagctaccatggccagctctttgc

SEQ ID NO: 850349 - DNA, 538 bp, Homo sapiens
aattatatataattttatttaaacactcaaaaatcaaagaaatgtaaaaagtagaaatcaaagaccttaatcaatactgatcctatttgctgcctcatacataagcattaatatttttttcyttccttcccaataattttccatgtggtctatagtttgtaaaaaataatatcctaggatacacacacactcacacacacagatatttctatgtactacatatatacatatataaattttagcaaatttatgtcacatagaaatgcagctgcaataatgttccatttcagcacataaatctcttcctcattcttttcataaatgagtagtattccatagtgttagatataataaagtatttctctgcttctttattgttacactttagaagaaactttcaatatttttataatggactgttctgttttgaatatccatatatataaattttgtaaatatacagtaagatactagatgtagaatggaaggccaaaactgaaaaattctggcaaattgcccacagaagtctattccaatt

SEQ ID NO: 850350 - DNA, 641 bp, Homo sapiens
acctgtaaggattccattagtttacagtgttattcttttaaaaatcaaaaaatgtatgcatgcgtcctttaaatttcctacctgttagcaataaagcraaaataatttaagtaggttgatgcaaaagtaattgtggttttgtcactacttttaatggcaaaaactgcaattacttttgcaccaacacaacacattaaactcactaccatcttatagaaatttagctcattcacacagacatattatcagaacatatttgtgaggcactttaaatgtataaaatgccacttttgttttaatgatgtcaaccacctaagaaggcagtttgaagaagtattgctaattgtatttaatattagagtcagcagaatcacaaataatgttttgaattttaaaaagtagtaaagaatcaaaattggaaaaaacttttacttcaaaattgtccttttgtgagcaaaatagatttaattttaattaattaaagaaatctttatgttacctcctcctttcttttttcttctatcattgagcatctggttacttatttaactcagagttttagttcagggtatcaaggagtgtcatggaaacttctaaccctaatttctaatgataaccatgtgtgaagaaaggaagacatt

SEQ ID NO: 850351 - DNA, 623 bp, Homo sapiens
taaaagtttgatctatttaaaaatgctaagatcttgattattggctctctaaatcctgcagttcaggacattttgaacaagctgcagaattctaaragacagaatacgtattgagaagaatataaaatagccaaaagccaatgggttatccttatgccagtcatagtataaagtattcaaaaacacttgtttaatttatgttccagctaatatttgacagttattacatagaaacacataataatatgatttattttatatgtgaaaagataactttacaactttatgaacagcaggtaaattgaggaaagatgctactagcagtaaatatgctcacagtcagactgaaacctgagtctcctttgaaaattgattatgggctgggttcagtggctcacacctgtaatcccagcactttgggaaggtgaggtgggcaaatcacttgagcccaggagtttgagaccagcctgggcaacacagggagacccccttctataaaaaataaaaagagaagaaaagaaaaaagaaaattaattatggatagatatcaaattggaaattaccattgattaaatggattgttactgttgttgtcattgttttctcaattaattgcattaata

SEQ ID NO: 850352 - DNA, 606 bp, Homo sapiens
cttgagagaaattattatgtcttgagggcaagaaagggaactaattaagtttgcattttaaaaattgttaagaatagatgtaggatgggatagagggtaccttagagatgcaaggattgtggaggaatactttcatatgttttatgatgaattgaaagaagataatattctacttcctgtgcaagtcatatatatgtttgacacattctaaagcagacctaacttagggatcatttagatttgagtggtaagagatagaaagtaatgaggataattctcatgtttctcacttacctaagttttattctatttaaacaaagtagaaattagtcatagcaggaacactctgagtgttcataattttttaaatgagtgaactcagcagctttgataatataattagacatatgtaacaatacccatctacctgggttggctttataaaatgtagatatcaatacttggaaaacaagttatcctttcrtgtttattcattaacaatagtatgtccttcatcttaagtagtcatacatcttgctctttcttgattggaaccttaaagctaaaaatgacatatggacctctttgtatccatataattaacaa

SEQ ID NO: 850353 - DNA, 630 bp, Homo sapiens
cttgctcatgatattttgttttattgtgtactcagttgtcttagaaggatatgcccattttacaaaaagaatatttacaggactctttaaggrctagatgaggttgccctcctcaagatgatttggctttgcttctaggtacactaagagtctgagaattcttcaattcaagttcatagtttgaggacactgaaaacactaatctcaggatgtgaatgcaaaacttcagggactgttttctacctttctttgtctcctaagctcatatatgccctaagcgtgtaactctttaatgacccagcttaatgatgggagggtctttactacatttcccaccttgatgggttcaagaccttgattcttcaaggccacaaatatgaagcccaaatctacttagatcgttcaatgcctttgggacaaaagtgggtttatttctacgtgcctgctcacatatctggacacctgcttcccctacaattttgtcccagttgctcctcattggctaatctaatcttcaatacttttagagacatttaaaaaaaatacatgttctgtactattaatggcttttacaaaaggatgtgctcaataactagccaatattaaagtaacttgttaaaacatggtgtc

SEQ ID NO: 850354 - DNA, 610 bp, Homo sapiens
ctcggttggcaaattatcagttctttttattataaataaattaaaaatgcaaatgtttaggtcaagtgttattctctgaaaatgcacaaagagaaatgagccaagagaaaaataactaataacaaataaatatatttctgacaccaagacaagtccaagagaatttaaaaagtaattataaatattttatggtaatgtatttcaaatatacatgctgcagattccacgatttatgtcatggggatggatcaggagtccttgaaacctggcacttattaataaatgttgtttctaattttctatcactgcaaggtactcttatagacaccatgtgaacaaatcaaatgttacatctctgggattataggctcataaaaaatcaacacctagggcataacttgaatcacagtaacttcatgcatttcaaatgggataaagtcagccaagaagtgtttaggtttgcagtcgattgctcaagattatggtatcaaccaactctggaattaacttctgggatgaagagtaagaagaaagtaaaatcactccwcataggctcaaaggagacttttgttgaagtgggtttccccatggtctttgaagtgggtgaggc

SEQ ID NO: 850355 - DNA, 625 bp, Homo sapiens
ccttcattatatactgtcttaggctgtgaattggtgtttctgaactacttgagagactatagtacaccttagctttcctgtttttggctcaatagatatctaattggtacatggagcaattgggaaacttaaatttctagacatagaaggattcttcaaaattactaatttcttacctgacatacattttcccctgaaattacaattttaaggaaatttgtcttttaaggaacgaatttatctttcttttgcttatttttcctccaagactcaatctccatgagttccaagactcaatgagtatgcagaatttataaccacacaactacagcttgatctgccagaagaaaacattttcaatttaatcgctttctcatttctatcactgaaattctagagctctgtaatctactgtctccatcatttttgttattaatattattttggaaactgttcaaaaagaaagcgagtcactttgcctgaaaggcaattggctcctgctccagggtggcctcaagatgctacctctcaagaacactctgttcattccctgaaaacttgtgccaygagcagccaatgacaaagatgcaaagcttgtcctccagaacctcacatttctttttct

SEQ ID NO: 850356 - DNA, 612 bp, Homo sapiens
cctgttaactgttacgtgaacaacasagaaactttagttttgtttaaattataaaaatattggggtttatggaagctagagttaccctgaataattcactatactttattcataatgtgatttatccttttaaagaaactttttattcatttattcacaagcaaatttcaccaaaatttttctataaaaggccagctagtaaatattttagatattgtaagtcatatagtctccgttgtcaccactccactctgtcattgtaatatgaagcaagccatagatgacacataaaacaatggtcatggctatgtttcaataaaactttatttaccaaaagaagagggaggtaggctggatttggcccataggtatattttgctaactcctttgatagatgataggtaagtaaaactagaaccatacctttatgatattggctggggtcactcccacaactgcattcaacagagtatttgatggtgtctgaaattttaagatagtttcattcttacatctggtgctttatccactgtaactgaaacatctgggggctctctgagctcaaacttcttcacatggtgctggatcccaagagtcaaccatgggagctgc

SEQ ID NO: 850357 - DNA, 612 bp, Homo sapiens
cctgttaactgttacgtgaacaacagagaaactttagttttgtttaaattataaaaatattggggtttatggaagctagagttaccctgaataatkcactatactttattcataatgtgatttatccttttaaagaaactttttattcatttattcacaagcaaatttcaccaaaatttttctataaaaggccagctagtaaatattttagatattgtaagtcatatagtctccgttgtcaccactccactctgtcattgtaatatgaagcaagccatagatgacacataaaacaatggtcatggctatgtttcaataaaactttatttaccaaaagaagagggaggtaggctggatttggcccataggtatattttgctaactcctttgatagatgataggtaagtaaaactagaaccatacctttatgatattggctggggtcactcccacaactgcattcaacagagtatttgatggtgtctgaaattttaagatagtttcattcttacatctggtgctttatccactgtaactgaaacatctgggggctctctgagctcaaacttcttcacatggtgctggatcccaagagtcaaccatgggagctgc

SEQ ID NO: 850358 - DNA, 612 bp, Homo sapiens
cctgttaactgttacgtgaacaacagagaaactttagttttgtttaaattataaaaatattggggtttatggaagctagagttaccctgaataattcactatactttattcataatgtgatttatccttttaaagaaactttttattcatttattcacaagcaaatttcaccaaaatttttctataaaaggccagctagtaaatattttagatattgtaagtcatatagtctccgttgtcaccactccactctgtcattgtaatatgaagcaagccatagatgacacataaaacaatggtcatggctatgtttcaataaaactttatttaccaaaagaagagggaggtaggctggatttggcccataggtatattttgctaactcctttgatagatgataggtaagtaaaactagaaccatacctttatgatattggctggggtcactcccacaactgcattcaacagagtatttgatggtgtctgaaattttaakatagtttcattcttacatctggtgctttatccactgtaactgaaacatctgggggctctctgagctcaaacttcttcacatggtgctggatcccaagagtcaaccatgggagctgc

SEQ ID NO: 850359 - DNA, 644 bp, Homo sapiens
cactaatcatcagagaagtacaaatcaaaaccacaatgagataccatctcacaccaatcagaatagctattattaaaaaataaaaaataaagaacagatgctggcgaggctacagagggaagcaaatgcttgtacactgtttcttccagccactgtagaaaccagtctggagatttctcaaagaacttgaaacagaactaccattggaaccagcaaccccattactaggtatatatgcggaagaaaacaaatcattctaccaaaaagacacaggaactcacgtatttatttcagcactattcacaatagtaaagacatgtaattaacccaagtatgcctcaacagtgggttggataaagaaaatatggtatatatataccatggaatcctgtgcagccataaaaagaacaaatcacgaggtcaggagatcaagaccatcctggctaacacggtgaaaccctgtctctactaaaaatacaaaaaaatagccaggcgaggtggcgggcgcctgtagtcccagctactygggaagctgaggcaggagaatggcgtgaaccccgggggacggagcctgcagtgagccaagattgcgccactgcactccagcctgggcgacagcgagactctgtctcaaaaaaaaaaaa

SEQ ID NO: 850360 - DNA, 558 bp, Homo sapiens
acagagctgagaatcgcattaccagaggcatgactggcgtagacctctcatgccacacaaatgcctcacttctccacctggggttagcaaaaaactttcagtcaacacttgcattcatggctcataaatgttgasacttgagcagccttcttgctaggtgggtttctatgcgggggtaggagtttactctgaaattaattgtagaatttctctaggaagccaagctagctgaattcatttattctgagttcagaattatgaaaaagtgagaccagttttaagttttacattttgaagaattttaatataagcatgatagtttacaactgctgtgagtgagaaaaaaaattctctgtgttcttgcttctaatttgatttgaatccataaagtatatctcaatcagaaagcaacttgttgtaaaggagaaaaatagaatttatagacatgaaaataaatagatgaaaatcatgggtggttatttgatctttagaaggtacaaagtagccacaaattatgggtaccattttcttccacattttagttttacattcctgaaa

SEQ ID NO: 850361 - DNA, 689 bp, Homo sapiens
ttcctttccaatttggacgctcattatttctttatcttgtctgattgctctagctasaacttccagtactatgctgaataacagcagtgaaactgggcatccttgtcatgttctcaatcttagagaaaaggttttcagtttttccccattcagtatgatactagctgtggatctgtcatatatggcttttattatgttgagatatgtcctttctatactgtttttttagggtttttattatgaagggatgttgaattatatcaaatgcttctccagcattagttgaaattatcatattgtttatgtcttattctgttgatatatcaaattggttgatttgcatatattggaccatccttgcacctctgagataaatcccacttggccatgataaatcatctttttgatgtgttattgagttcagtttgctagtgttttgtgaagcatttgtgaatcaagattcatcagggatattggcctgtagttttgtttttttttttaaatgggtctgtctggttttggtatcaaagtaattctgggctcataaaatgagtttgaaaatattccctcttcttctgttattctaaatagtttgagtaggattggtattctttaaatgttaggtaaaattcagcaatgaagtcattatatctcaggcttgtctttcctgggagatgttttattatcat

SEQ ID NO: 850362 - DNA, 601 bp, Homo sapiens
ataacacatttttttatccactcrttagtcaatgggcacttaacttggttccacatctttgtaattgtgaattgtgctgcatttgcaaatgtctttttcatataatgacttcttttcctttgagtagatactcagtagtgggattgctggattgaatggtagatctacttataactctttaaggaatctccatgctgttttccataaaggttgtactaatttacactcccaccagcagtttgtaagtattcgctttttcccacatccatggcaacatccattgctttttgactgtttaataatcgccttacttgcaggaataaggtggtatctcactgtagttttaatttgcatttccctaatgattagtgatgttgagcttttttttcatatgtttgttggtaatttgtgtatcttctttcaagaaatgtctattcatttcctatgctcacttttcaaaggaattatttgatttttttcttggtgtttgagttccttacagattctggatactagttctttgtcagatgcatagattgcaaatattttctcgtattctgtgggttatctgtttactctggtgagtatttcttctgctgtg

SEQ ID NO: 850363 - DNA, 641 bp, Homo sapiens
gatgctttcagcctatggggtggagtgtaagggaaatggctgcatgttattttgcagtaggttgaggaagcctcccagcgcagcatgamtcagtaggtttggagtgtaagtgcacaacttcacacattatgtaaccaacactgtgtgaggcacattaggtgatcactcacatgagcttgtgcttgtctcaaagccactattgtctgtaaaaggtataattaccctgctaatgctttacatatggcttgcagctcatgcccaggcccatgcccaggcttgtgcccaggcttgtggcttgcacccatggctcatgcccaggctcgcttgtgctgagatagagtaagaaccgtgtcaaaaccgtctgtgattcctcaagtgtttttccagctccctgccacttgtccacccactgccctcggtccccagcttgggctggaacccgacacttaggatgacaagcattatggtcttgtggatgttaattagacagcattattatagcataaaaaaaaggcacaagcccatttctaataattattgtattttcctaaccagtacatatgattttttttagattatcttgttttctgttcatgatcgcttgacattctatctcttattttattaaaagttgtgacatt

SEQ ID NO: 850364 - DNA, 468 bp, Homo sapiens
gggatttaattgaagttgacacagaatgactttaaaaccttccaagccaatggctaatgatgaaaatacatatgaaaattaatttgggggatcctgtgcagaggaaaacaaaatagttctaktcaaccctcaaaggaaatgtccagaagtgaagatgaagttatctttcagagttccaatactcctaccccactacctgtttaaaatggacttttatgttacataatcctgaaaatgttaggagtcaaaattcctctagataaatgtggtacacatataccatggaatactatgcagccataaaaagaaaacaaaattgtatcctttgcaccaacgtgcataggaaatcttatcctttgcaccaacatggataggacatcttatcctttgcaacaaggtgctttcagaagcaggatgagcactgcaattgaaggctaagaggaaatggctcttggccaatttaactga

SEQ ID NO: 850365 - DNA, 528 bp, Homo sapiens
gctgtgcacaccccacctatggctagatgggtcagaaaacacccagttcttgataggcagttcaggtcgcatggtgacttgatgacccataatctaacattcagtttctaccaaagcccagtaacaggccaaraactgtttctcaaaaggagagtagttatctgcagaagatggcagggccttactccaaatcctagaggctgccactgtgtttcacctacaggggcctgccaaaggctccaaacggcatccctatctgccaccgacacctcaagcaccattggatctgatgggtcatatggcccaagtgtaagaacagcttgcacagcagcctggacctgttgcagaaccttctcttgttctggaccccactgaaaaatggcagcctgtcaggtcactggataaatcggccagagtaacacacttaaatgagggatgtgttgccttcaaaatccaaataggcccactaggagttgtgcctttttcttggttgtcggaggggccaaatgcagcaacttatcttttacc

SEQ ID NO: 850366 - DNA, 528 bp, Homo sapiens
gctgtgcacaccccacctatggctagatgggtcagaaaacacccagttcttgataggcagttcaggtcgcatggtgacttgatgacccataatctaacattcagtttctaccaaagcccagtaacaggccaagaactgtttctcaaaaggagagtagttatctgcagaagatggcagggccttactccaaatcctagaggctgccactgtgtttcacctacaggggcctgccaaaggctccaaacggcatccctatctgccaccgacacctcaagcaccattggatctgatgggtcatatggcccaagtgtaagaacagcttgcacagcagcctggacctgttgcagaaccttctcttgttctggaccccactgaaaaatggcagcctgtcaggtcactggataaatcrgccagagtaacacacttaaatgagggatgtgttgccttcaaaatccaaataggcccactaggagttgtgcctttttcttggttgtcggaggggccaaatgcagcaacttatcttttacc

SEQ ID NO: 850367 - DNA, 596 bp, Homo sapiens
tacaactgatgaaccaatattgatacactattactaactaaagttcacagtttatatkagggttcaccctctgttcagttaattttcaaaatgtcatttcttttttttttgagacggagtcttgctcttgttgcccaggctggaggtgcaatggcatgatctcagctcactgccatatccgcctctgaagctcaaacaatgctcctgcctcaacctcccgagtagatgggattacaggtgcataccaccacactcgctaatttttttattttcagtaaagatggggtttcatcctgttggccatgctggtcccaaactcctgacctcaggtgatctgcctgcctcagcctcccaaagtggtgggattacatcgcacccagcctaaaatgtcattatttcttccttgacatatgaattgtttagaagcatgttttaaattttgtaaatgtatggggactttaaaattttatttttgttattaatttataacctacacactttatagtcagagaagattagctatatcatattgattctttgaattttacagggacttacttttggtctaatacgtaattatgtttgtaaacatccca

SEQ ID NO: 850368 - DNA, 480 bp, Homo sapiens
gcttccacagcatgtaagggtaccaagcaggttgccgctgctggttgggggtggccascttttattcccttatttgtccccgcccatgtcctatttctgccctatcagaatgcccttttctcaatcctccctgtgattggttacttttagaatcctgctgatttgtccattttacagaggctgattggtccattttacagagctctgattggtccattttacaaacctcatgctagctacagagcactgattgatgcatttttacagagtgctgattggtgcattttacaaacctcttgctagctacagagcgctgattggtgcattttacaatccccttataagacagaacagttctccaagtccccactccaccaggaagtccagctggcttcacctctcatgactgctatttcaagatttgtacacaatctgaaatgtccctttgtttggagctttaaaccagggttccaaaaatgt

SEQ ID NO: 850369 - DNA, 551 bp, Homo sapiens
ttaactgaccttaaaatagggagcttatcctgtattctcatatgggaccaatgtgatcacatgagcccttcaaagcagcagaggaaagcagaagagttgcaatagaaggagaactctgagagattcaaaacgaaaaagggactccgtttactgctgctgtttgaagatgaagggggcaatgtaggggtggccttaagaagctgagtatattagttcatttacacacggctaataaagacatacccaaaactgggtaatttataaaggaaagaggtttagtggattcacagttcctcatggctggggaggactgacaatcatggcagaaggcaaaggagaagcaaaggcacatcttacacagcggcaggcaagagagtttgtgtaggggaactcccatttataaaaccatcagatctagaaagacttattcactaccatgagaacagtatgagggaaactgcccccatgattcaattatctccacctggccctgctcttgacacatggggattattayaattcaaggtgagattcaggtaggggcacagcca

SEQ ID NO: 850370 - DNA, 597 bp, Homo sapiens
ctttcattgcaaaatcttttgttaggtcaggcacggtggctcacacctgtaatcccagcactttgggaggcctaggcgggaggatcacctgacgtcaggagatcaagaccatcctggccaacatggtgaaaccccatctctactaaaatacaaaaaaattagccaggtgtggtggcgtgcacctgtagtcccagctactcaagaggctgaggcaagggaatcgcttgaacccaggaggcagaggttgcagtgagctgagatcacgccattgcactccagcctggcgacagagcaagactctgtctcaaaaaattaaaataaaataaaataaaacataaaaaaatctttcattatagtttttggaaggactgaaattagatgcactcttcaatccttacagcagcaaatttttcttttattactttgttttatgtgtcttccttgcaattagtattaacctaggattttttwaaaaacccactctctgctttgtagtttaatgattgatgtattagattttatctcatatatctgactttatatttatttattttatacatttttatgttattttcttttttccctttctttggtagg

SEQ ID NO: 850371 - DNA, 641 bp, Homo sapiens
tctcttttttctttttgagatggagtcttactctcacccaggctggagtgcagtggtgcaatctccactcactgcaacctctgcttcccaggctcaagcaattcttctgccttagcctcctgagtaggtgggattacaggggcacaccaccacgtccagctaatttttgtttttttttttaatagagacagggttttaccatgtcagccaggctggtctcgatttcctgaccccaggtgatctgtccgccttggcctcccagagtgttggggttacaggcatgagccaccacacctggcctagtctggatttcttcacttgccgattaatgaagagcaaacagcagaaagagagaaagccacacgcccttttcgagcctttgcttgcatcacgtttgctaatgtctcattggctaaggcaagtcacatggccaagcccaggttcaaaggttagagaaaaatactccgcctttttcttgtagggtctgcaaaatcacattgcaggaatgggtagaatttatggctatgttgcaagcaatcacagargtggaactagtaaaccattaaaatgttttgcaacccagaagttcctggctcaatttctggcaaagcatttaaaagatgtattaaaagatggcatgc

SEQ ID NO: 850372 - DNA, 612 bp, Homo sapiens
ttcaagtttatcttatagccccatgggcattctctgactgcagacccatattctttcttccctttctaatgtcctacaatatttactacgtaagatgccaaatctcacatttttgccaatttctatcttctgtttgcaacatgactgtcatgcagcaagtgctcaacagaaattaacatgtaaaaaggccaaaataatctacttagtatatttagttgtatgtttattccatgaaactgtatcatttaaatttaattggtggtagaaggcaagaggaaggagagaattttcttccttaaactatgtcacttttatatttagtgtttgtcagaatgaacattaggtactatcttactagtcaaagtgttataatttttctatcctctcaacaggataaaaagtaatatattgacccccatttttctaaagagatgtgagttgattgaaaattagaaataactaaaaattggaaatgaactatcattgagctatcaaattaacttccgaagycataccataacatcctcagaacaagtctgaaagaagacgtagtacacaatattctactactgtatctttacaaatattaatttagaaattaccatttggtcc

SEQ ID NO: 850373 - DNA, 612 bp, Homo sapiens
ttcaagtttatcttatagccccatgggcattctctgactgcagacccatattctttcttccctttctaatgtcctacaatatttactacgtaagatgccaaatctcacatttttgccaatttctatcttctgtttgcaacatgactgtcatgcagcaagtgctcaacagaaattaacatgtaaaaaggccaaaataatctacttagtatatttagttgtatgtttattccatgaaactgtatcatttaaatttaattggtggtagaaggcaagaggaaggagagaattttcttccttaaactatgtcacttttatatttagtgtttgtcagaatgaacattaggtactatcttactagtcaaagtgttataatttttctatcctctcaacaggataaaaagtaatatattgacccccatttttctaaagagatgtgagttgattgaaaattagaaataactaaaaattggaaatgaactatcattgagctatcaaattaacttccgaagtcatacyataacatcctcagaacaagtctgaaagaagacgtagtacacaatattctactactgtatctttacaaatattaatttagaaattaccatttggtcc

SEQ ID NO: 850374 - DNA, 653 bp, Homo sapiens
tcccaggggggctggcagcagcctgctgcagtatgtacagcacaaaatagaataattggtccccagaggggctgtctcttcagctgccaatagggattgtttttttccttgtgaataaaaagccaagcctccatgactcttctactgaatattaacgtgtgcctctggtgctcagcggctcgtgggagggattaggtcctggtgattgttacagctgtcctctttgctgccctaccgttgatgacagcatgaaatcgacagtcctgatcaagggaataatgcggtcaagcttcctgatagtcaaatggataaaatgtgcagtgtaccatagaggtgtccaactgggtgggatcataggggttaaacttcagcctgggggccaaagggatgctctgtcctcctgcaatatgacatggcaaagggccggaattgactgagactgtcaggaggtcaggtgggggcttcctgctgctccttcctttctctagcagaaaaagcaaaagaaaaagggtgagcacaagtgcttataaatattttcccaggggaaaaaaaatcaactgcttctagaaaggttttttttttktttttttttaaaggcttttaaaaattgagatataagtcatatgtaataaattcaccattataaaatgtac

SEQ ID NO: 850375 - DNA, 469 bp, Homo sapiens
agtgatgtcatgtggatagcatgtctctcctaatacaatgtgaggagaagggcacttaacctctctgtcctattctttccaacatcccatgaccctatgaggaaagcaaacagawaaaaatagagcaggggctcatcctacaggatacttggccaggactcttcaaggctctcaagatcattaaaaacaaggaaagaccaagaaattctcacaaactgtaggagaccaaagagatatgacaactaaatgcaatgtggtgccttggattagatcttggagcccagtgaggatgtaatgggaaagcgggtgaaatacaattagtatctgcagtttagccgacagtaatgcctcaaagttgttttcttagctgtgacaaatgtaccatcataatgcaagatgttgacaatggaggaatctgggtgaaaggtacaggagaactctctgaactatctttgaaacttttgcttac

SEQ ID NO: 850376 - DNA, 469 bp, Homo sapiens
agtgatgtcatgtggatagcatgtctctcctaatacaatgtgaggagaagggcacttaacctctctgtcctattctttccaacatcccatgaccctatgaggaaagcaaacagaaaaaaatagakcaggggctcatcctacaggatacttggccaggactcttcaaggctctcaagatcattaaaaacaaggaaagaccaagaaattctcacaaactgtaggagaccaaagagatatgacaactaaatgcaatgtggtgccttggattagatcttggagcccagtgaggatgtaatgggaaagcgggtgaaatacaattagtatctgcagtttagccgacagtaatgcctcaaagttgttttcttagctgtgacaaatgtaccatcataatgcaagatgttgacaatggaggaatctgggtgaaaggtacaggagaactctctgaactatctttgaaacttttgcttac

SEQ ID NO: 850377 - DNA, 634 bp, Homo sapiens
gaagaaggaaatatgcagtccttggagagacaggacccaaagcaacctcacaaaaccagtcctgttttgactgragagtctgtctggcttagacaatccttttcatcttttggtttctagtttggtacagggaaaaatgtccttgatacgccaaagcattctcatgagaaatgcaccaaaattttttaaatgtgcatttatttgatgatcagcaaatgttaggtcaattgtggtaaaatgttttctgggtcgggcgctgtggctcacacctgtaatcccagcactttgggaggccgaggtgggcagatcacaaggtcaggagatcgagaccatcctggctaatatggtgaaatcccgtctctactaaaaatacaaaaaatcagccgggcgtggtggcgggcgcctgtagtcccagctactcgggaggctgaggcaggagaatggcgtgaacccgggaggtggagcttgcagtgagccaacatcgcgccactgcactccagcctgggtaaaagagcgagactccgtctcaaaaactaaataaataaaataaataaaaaactttttctgaccaaatggacacctgttggttttgcctactcagcacccatttccttgttgttgttgttgttgtttt

SEQ ID NO: 850378 - DNA, 612 bp, Homo sapiens
tttaagttcattaaaagccaaggtgtgcaacgacactcccctcacctgtgctttctcgtccttctgccaccaggtgccaggggagccaagaagagcaaaaccaaggaggcattgtttcctycagagcctcattcatcaactcgctctgaacagttagcacgctcagacagtcatcttctgcaccttgcctttccctgtgtcttgactgagggcttatctgagagccttttgttcaggctcataattattcagtgactcaggagcccacaagcattacccacggagccagacaagaccagcaagctctgaggaccacctgttccaagtcatttcctgtgtgggcggcaacttcacagggctgaaaatacgagttacggtaaaaatgtcttcaaccctggcgcgctggattgttgaaactcgatggaatcttgcttgattatgttcaggccagacacatttcattatcattctttgcatatatattaaaaactctaacccctttacaaacaaatgttctcaaggggcagacagcacacccttgcctcatgacattgctctaatagagaaaacaccccagtgtttcacccattaggtcagatccacgaacacaga

SEQ ID NO: 850379 - DNA, 642 bp, Homo sapiens
atgcatgagaatccaaacatcaagacctaatcagggagagactttagaaggagagaatcttggctgggtgcagtagctcatacctgtaatcccagcacttgtggaggccaaggtgggtggatcacggggtcaggagttagagaccagcctggccaagatggtgaagccccatctccactaaaaatacaaaaattagccaggtgcagtgtcgggtgcctgtaatcccagttactcgggaggctgaggcaggagaatcacttgaacctggggggcagaggttgcagtgagccgaggtcacaccactgcactctaacctgggcgacagagcaagactccatctcaaaaaaaaaaaaaaaaaaaaaaacaaggagagaatctttgtcatttgtcaaagcgtaccacaaaggctattcccattttccttttatctttagttaacaaacacttaagtcagtgtaactgtgcaccaggcactattgtaaagagctttatacatcttaactcaattatccctctggaccacccatggaggcagtaccattattagctttgttgtacaggtgaggaaacttaggccagagagcttagtaactygccaaagattgcatagctggtaggtggaggagaagggatggagtgaat

SEQ ID NO: 850380 - DNA, 611 bp, Homo sapiens
ggaatgcaagagcttgcccagggtcatttgatgtcaatgacacaccaataaaaatgatgctaaaaatagcattagttaacattttccagaatccatatcttccttattagacattaaaaatctctaaaaatgcaaaactattttttcttctggttgagtagaccctctcaactctattctttcactattatgagaaaagcacactgcttccctacactctcacacacaacttctgacaccgtatgtaagaatagtgtcacactatccacccggagatagtgctagatcccagagcttaagagctctgcctcacagaactgcccccacttcatacgccaatcacaagccccaggctgtggcctgtgcttttgacccaacagctataaactagtagttcccatgactcccatccttgggttttataatttggtaagacagctcatagaatgcagggaaatacttcactatgtttaccagtttattataaaggatagtacaaaggctgtacatgaacagccrgatgaagaggtaccagtagcaagatactgggttgagaggggagagggtggagcacacagttttcatgacataaagctttttccatgaaaaag

SEQ ID NO: 850381 - DNA, 604 bp, Homo sapiens
tgagtgaactaaataaagggagaatttttttccttttttttttttttyttttttttgagacagagtctcactctgtcacccaggctggagtgcagtggtgcgatcttggctcactgcaacctccacctcctgggttcaagcaattctcctgcctcagcctcccgagtagctgtagctgggactacaggcgcacggtgccacgcccggctaattttttgtattttagtaaagacagggtttcattgagttgcccaggctggtagcaaactcctgagctcaggcaatccgcccgactcagcctcccaaagtgctgggattacaggtgtgagccactgcaaggcagaaatatttattcatgatttgcctggcctgtgcagagagctcttctgaactcatgctttgctaggtccttcctacaggacaaaccagactgggcaatggaacactcatctttcctatcttccagcagttgtcaatctattatggccagcgttcagtgagactcctatgacatgaaacttacagcttttttcaccaggaattgactttggtcaatttcagcaaagtgtggggtttagtagaaggaaactcacagaatcaggag

SEQ ID NO: 850382 - DNA, 615 bp, Homo sapiens
tttgttgaagaagtggttatgtaccaaatgtttgtgtccccccaaaattcacatgttgaagcactaaccctcaaagtgactgtactaggagaaagggccyttacagaggtaattaaggttaagtggactcataagggcagggcttgatccaataggatcagtgtccttataagaagagacaggagagtgctcaagcactctcttcaccatgtgaggacatagcaggaaggcagcagtccacaagccaggaagagagccctgaccaggaaccaaattggctagcaccttgatcttggacttccagccttcagacctgggagaaaataagtttcagtcatttaagtgagccagtctatggtattatgttgtcgcagcccaagctgatgaatacagaaggaaatgaaaataatggggattctggcttagctttggcacctggattgtctgtcacctgtagatctattgagcatccagctaaacattttgaacctccctgggtacctgagtctgtgaccagtgttggagactcaaagatctgtaagacacagttctcatcgttgataacctacaggtcacatttgacaggcttccatcagggaggtcttgtgattcatg

SEQ ID NO: 850383 - DNA, 617 bp, Homo sapiens
ttatatatcaataaagcttttcaaaatgggctaaaaatgggcaaaaaaataaagataatatattgatacagtcaactgttcttaccatccacatctcagactttccgggaaggcagatggggtagkggaagaaacagtaacgctgattcatttcatcttgggcctctcttgatttgctgcccaaacaatacatgctggacttgcaagctgtaccagaaagcctggaaagggagggaaaaaaagaaacacccttggacaaaacctcagcagccaagttgagactctgagccatatgcatgtctttgtgtgggttgaaatctattttctctgggttcgatggattattataacacccaaagttttccaaaaaacgtcagacaaggttaccacagcaattaagctgtctgccatctgcaagaggcttggcttaaggtttactgaagttaaacatgttttgaaaagaaaaaattaaggctgtcgatgttttgcctatcagtcaagctcagcaacattaggccttggagactcttcagggagagtcgttctccctcaaggaatagtttagcattggcatgctgaaatttcagaacccaaggaacatttcaaaaataaattat

SEQ ID NO: 850384 - DNA, 558 bp, Homo sapiens
aatccaaagttcttatgctggatcactcaaagggataaaaatacatttctactcattcttttcttccctaaaggcaatgtcttgtttatccttccttgtctctaaatagataatttaatcaaaatgaactarccagatgatctacaataatcaacattagctgtgaaaattgtttatggaactactcgctacccagcacagatgtattcacatttccttcatagtgcctggattctactagacatcacagaagcacattccctacaaattagtgattatatatattcattgttttttttttgttttgttttgttttttttgccaaatgctttctagattgttgccctatttgttgtttaagaaatgctgacccttttcacaagacagtgctgaaagcgaagaaagaagttcctgcccctcctaaagccaaagccaaagcaaaggctttaaaggccaagaaggcagtgttgaaaggtgttcacaaccacaaaaaaaagaagatccacacgtcccccaccttccggcggcccaagacactgcaactccggaggcagccca

SEQ ID NO: 850385 - DNA, 524 bp, Homo sapiens
ttgagggctcagaagaagacaggaagatgtgggaaagtctagaacttcctagagacttgttgagtggttttgaccaaaatgctgayactgatattgacatggtttggctctgtgtccccacccaaatctcatctccaattgtagtccccacatgttgaggtggggggtcctggtgggagataactggatcatgggggcagatttgccccttgctggtctcatgatagtgagtgtgttctcatgagatctgattatttaaaagtgtgtggcacctccccattctctctctctcctgctccaccatggtaagacgtgcttgcttccccttcaccttctgccacgattctatgtttgaggcctcccagtcatgcttcctgtacagcctgtggaattgtgagtcaactaaacctcttttcttcataaattacccagtctcagctaattctttagagcagtgtgagaatggactcataccttggctggcagatggccatgcccttgctgtttccatgattatccctttg

SEQ ID NO: 850386 - DNA, 455 bp, Homo sapiens
gggtgcccgcctgtggggtgagtcagcggctggactgagatgacagctcatgagcatgtctcctgggactgtgcctgtggcctgggcttgggccagactccgtcagcaactaaatgcacctggaaggctctcctcagctctgcaaatcccaccagctgcctgacctgctttccccaagccctaccactcctctcgcctactcttaactgccttcgtcaccccagttaggtcaaatggcattctcttcagaatgacctctaccatctgttgagactctgttatctgccaggcagtgttgcaggcatttcccttgcatcatttgatttaactctcataagtgtgctatgggatgactgttattaccttcttttaagatgaggaaatgacactgcagtgacwataactaatttgctcaggatcacaaagctgggaagtgatggaggtgggatcccagg

SEQ ID NO: 850387 - DNA, 559 bp, Homo sapiens
agaactcattctcttttataacaagacacaactggaaacactggttattttaccaaggctctgactgaaatacaatatttttagatatgatcagattgctttgaggactgaagttgacttttgtggagcygataaaatgtcccttggagagactggccttgtaccttgtctacatgattcccttacaagcttcctgattttgtggtgagtaatgaatgtcaccttatgacaggcccatgaacctcaagttatttgagggaccttgagaaaagaggtattcatccatttatacaggtattacagacacagtctgagactgagtcagatttttggcttgacttcttaacatagctaggaagccaaggggctttttaaaaagtctaatctgagattctttatgaaaatattccagcaaagccaacttagaacaagcctataggtcattcatcattcttactaaacttttgtaaataatcaggtcaaagactaaacttaaacaaaacagtctgtctatgattatctttggttgaaatgggaggattcgagagaaaaaattatg

SEQ ID NO: 850388 - DNA, 488 bp, Homo sapiens
ggtatttagagcgtatctggatgggaaaaaaaatttggtttgctatgatttgcccggccctatgaaataaaacacacctcaaactcaatcaatagcttttcaaacagattaagttttgaaaatacaatgtataagaatgctgagaagaggcaacctgcagtggctcatgtctgtaatcccagcactttgggaggccaaggtgggtggatcacaaggtcaggagttcgagatcagtctgaccaacatggtgaaaccccgtctctactaaaaatacaaaaattagccaggcgtggtggcacatgcctgtaatcgcagctactcaggaggctaagacaggagaatcgcttgaacccaggarggggaggttgcagtgcagtgagccgaggctgcaccactgcactccagcctaggcaacagagctagactccgtctcaaaaaaaaataattaaataagaatgccaagaagaaaaaaaaaacagaaaaaagtt

SEQ ID NO: 850389 - DNA, 625 bp, Homo sapiens
atataataatttaagcattgatgatactaaaatttcagaatttaaatagtcatttggttgaccctttataacaaagaggtgtgattctattattttccttgtttgaatacttaacaaaattatttgtgttgtatagtataactagaggaaggatttaatttttgtaaatgtaagcaaaatatttttcataaacagcctaatatttctctactcttgaccagattaggaagaaacagcaagaagtagtgggttttttggaagcgaataaaatcgactttaaggaattagatattgctggagatgaagacaacaggaggtggatgagagagaatgttcctggagagaaaaaacctcaaaatgggattcctttgcctccccagatcttcaatgaggagcagtactgtggggtgagtatgtgcttctattaaaaatcctgctgtgtgtgtgtttattagaaattttctaaagcagattaagtttgagtcagcatttgaaattattcacaactgtcaggtcatggtctatttctgccatccaatagctggatggtagatccrttatgaataatcaatatttaagatttagaaaaggacagaaacaatatcatgatgattcagaagttttg

SEQ ID NO: 850390 - DNA, 553 bp, Homo sapiens
atttgcttgattgttctctctaggtatttattctgttttcgagtttctcttttatttcactaaatatattaaatatagctgttttatattctttgcctgataattccaatatctgattctgatttttaattccaccttctgttatttcttcatgctctcactatgttttctttttattcccttatttatattgtaacttttggcttcaaactgctcatttttaaaaactttattagtggctatcttagtctgttttgtgctgctaaaacagaataccacagactgggtagtttataaacaatagaagtttatttggctcatagctctggaggtggaaagtccaagatcgaggggcagcatttgatgagggctttctggctgcatcaaacatggctgaaggtatcccaggagcaagagaaagggagagcccaaactcacagcctcaagcctttttataaatgtcatcaatcagttcaygagggtggtccccttatggcctcaacagctccccttaggccccacctcccaacactgttgcattggggattaagtt

SEQ ID NO: 850391 - DNA, 640 bp, Homo sapiens
tctaaatctctagtaacggccagtgttacacatttgggtgctcagcaaagaaataacatagtatttcacttctcaccagataatgtagaaccatttgttataggtctatttcttttcctcctttctgatgrttctgctgaatctgaagagtcaccagaagtaacacctgaagagataccagcacttgtcttgtgggttccaagataagctgtcctacttgaggtagactgggtaggagaacctaccaactcaggaattatttttgtctgagattttaacctcttcggcttgaggtttctggccaaacatatgaacaaaggaaacagtatttaacaaaatacaaagataattggttcacagagaatgactaaatagaagtatatcatatttcttaaactgagagtaattttatcatcaaaacattaaaatattcactattaacattttattctggcactgattagtagtagtatttcctaactctaaatttaacgtactgttattcaaatttggagtaatgaatcaatgttccaagtaagagttacagaaaattatttgaataccttacattctttggattaaatgctaagaggaaccaacatttacgtaatataggtattcattcatactaccaatgtaa

SEQ ID NO: 850392 - DNA, 608 bp, Homo sapiens
gaaagaaagaaaaaagaaattgaacatttctacaaagatataaaaatgaccaataaacaaaggaaaaaatgttcagtatcattaggcatcagagaaaggcaaatcgaaaycacaataatacttcctataagttaaaaaaaacaaaagtatccaggatgtgaaaaaattggaacccacatacactgttgctggaaatgtaaaatggtatacctgctccaaaaaaaccatttgtcagccctcaaaaggttaaacagagttaccacgtaacccagcaatgccactcctacatatgtacccaaaagaaaaaaaaacttgcacatgatattcacaggaggactattcaccgccaaataatggaagcaatccaaatgcccatcaactgatgaatggataaaaatgtgttatatccatacaatggaatatgattcatcaataacaagaaatatcttggtttctaaatgccattctccaatcaaacaggccatggcccctgaaaaactgcctgattccacagctgaggtaaggaaagtacaaggtgagccttgaacactgcatattgccagaagctatgaaaacactcaaaggcgattcaaaagaaaatgtcaaat

SEQ ID NO: 850393 - DNA, 551 bp, Homo sapiens
atcaataacaagaaatatcttggtttctaaatgccattctccaatcaaacaggccatggcccctgaaaaactgcctgattccacagctgaggtarggaaagtacaaggtgagccttgaacactgcatattgccagaagctatgaaaacactcaaaggcgattcaaaagaaaatgtcaaatggacataggagccaacatgaaggggttcccagtggccaaatctgcaataaggtagcaacaaaataatgacaacaattgaacactgattttatttcacaaaaatctgagtacatactaatataaataaatgggaaaggagaagatgtatcttatagtagaattccaactaacacatgtaagacaatgaaaacaaaaaatcattatttgaggcaagaattatcaacggatgctacaattagtgagtggaaacagcataagaaacaagatttttgcagcacataaatatatccccatgggacactaattataatggaaaaagtatttactttacactggagaaacctgacacataccccctaaatcaaattatt

SEQ ID NO: 850394 - DNA, 624 bp, Homo sapiens
acaaaaatccaagaactgataaaagaaygaaccatcctacttctaactcaatacacaagctccctggatagcattacacactgaacatatatttgtacacctgtgaaaacaggtactacagttactattaacagttgctattactacccagcctaatgacagtcattcaatcatcaattatatcctgagattaataatctacacaactctgaataagtgagccctccttaaatgatcatcacaaaaatcacattcgagtaatttagtacctacattgaggtactaaaattactccaatgtgtaattttactcgaatgtgtaaaattacattgaggtaattttaattttttaatttttctgcccacctatacattacatggttataaagcaaagtgtatatgaattttttatttcttaacaaaacagtgtcaagtcttcccatttaagtctacgttgttatgatatcaagggtaaaataattgggtataccagaacattttcagtgtgaaatctgaaattactcttcaaccttctgatcattttagatcctagtataattgtgtaaattatgccaatgttacatcaaagataattatatacaatatagtacagggaagtctaaaa

SEQ ID NO: 850395 - DNA, 604 bp, Homo sapiens
gtcatttctggtattttgcaattacaagcaatgttgcaatgaataatgttgtgtatgttcatatttatggaggtgtagcttttgggtaaattctcagaagtaggattgctaggtcaaaagctacgtgtgtatgtagttttgtcacggattgccaaatttccctccagcaaggttgtacaatttgcatgcttaccagcaacacatgagagttcccgtttccccacagcctggccaacagggtgtcatcatactgtttagtttatgccaacctggaaagtaagtaaataagaaatggtatctcagcatagttttgattctatcttattataagtgaggttgaactactgttccatctttttgtatgattgagaacaatttttatatgtttttataacttgtcattctatatcttttgctcattattttctctctcagatttttgggctttttactccttctaattttaagaattcttttgatgttaggacygatggccccctttatctgcgttttgagtcataggaagtatttccttatatggaagtttttttctggtgcttatatcttatatggtttcatttatttgtctttctaggttttattc

SEQ ID NO: 850396 - DNA, 555 bp, Homo sapiens
agacaaacggaagtttattaacatgcatgcctcctgtgtatgtgatagatacccagagagatgagtcagtctcaargaggagactttgaattcaggcttaaatatttaataccatcttcagctgtcacaaagaaaggtgttgctggcaggtgtggggaggtaaccaggaaaagcagtcaaaaagggtaaggtttgttgtgcagatttgagtcatccttgtcttcctggtacagagggggaggcaccctcataaatggagggctcctttacagaagtaaatttcccttacaaaagggtaactgcctctgtgttctcagggcttcttctgtgtcagcagtttctcaaaataatccttatgcccaaaaggcatattttggtgggggcaggttgtggtctcctacactggtcatgccaaagcactggcaaacattatagtgtagcagttatgagcatggattttaggatctgacaagcttcaattttgatttctggctctgttacttcctagcatggtgatctttgacaagttatggcaagtcatacaacttttgtaat

SEQ ID NO: 850397 - DNA, 596 bp, Homo sapiens
aagggttttggtaacttgatgcatctgaactttggcttagaaaaatataatggcatgaggcctacccattatagacactaatgtggagggttcaggaatctcttgccatatagaatagctttgttcctgaaakaatttgagtttttaaaactttatgaaacttgatggcattgaaaattactaatgttcgtttatggtagttattcttcagtcttctctaaccagggattatttgcaaaaaaagtgatgaaagcattaacagagctgtcattaagaaaaaattgaataattcttttgtaatgtgaacatccttttgtatgtgaatcaatacaccttaattgaccagtcttgcgatttgtagttttatacattcaatctcctgaaagtgattatgtctttattcctaagaatctgataaacaaattgttaattttattatttatttattttaaattttaaattatttttattcaatattatttttatcatgttgtttgtatatttgaggaaatgggacagacatttacctccagggttctttaaatatataggtcaagaatgcctcatgctctttctgagacccgactcaatcacga

SEQ ID NO: 850398 - DNA, 550 bp, Homo sapiens
tgtctatctgacatttcctctggatgccttaaaaataatcccaaattcaacatgacccaaataggtcttttcattcccatcaatacctcctcccaacctaccttccaaaaaaatcaaaagtccatagcctgcctctatcttcctaatcttggcagatggcaccaacattcatcagatcagtcacaacaaatgtattttagagttatccttccgtggtggctcatgcctgtaatcccagcattttgggaggctgaggcgggagaattgcctcaggtcaggagttcgagaccagcctggccaacatggtgaaactctgtctctactaaaaatacaaaaatcagccaggcatggtggcgggcgcctgtaatcgtggctcctcgggaggctgaggcaggaaaatcgcttgaacctctgaggcggaggttgcagtgagccaagaccgcaccattgcactccagcctgggcgacaagagcaaaactctgtcycaaaaaaaaaaaaaaaagaaaaaggaaaagacttatccttcatatcattgttttacctacgatt

SEQ ID NO: 850399 - DNA, 522 bp, Homo sapiens
tcacataaaattaactctactctggtgtccacgcagagctacaggcctattctctgtataaagcaagtgccaggatgcatgggttaatttgccattgctcagagctgggaaggagaggaaagaagatgctaatgggtaaccttcccaaagcagccggggcttacagaagtaggggctcagcacacattgattgaagaatagcactacgatagcactctgcgaatcttaaaagtcatacaatttagagccatgtgagaatttagcaatcttcaagctcattgtatagatacatgtccattatgatactgtagttaattctgaactcctgcctggtgataaaaattgctttaaacatgttggacattttctcatccacatcaatgaatatttgggctctagggacttgttgcatctttctttaaaagtgaaaagtcttctgtatattggaaagagattacatgaggacagtcaattacatttttsaaagtgcacacattggttggttgtaaaatttacatgatc

SEQ ID NO: 850400 - DNA, 510 bp, Homo sapiens
ttttgaactgtatgtaaaataccatcaacctttctgcattcatttgtgtctggcttctttccttccaccttatgtttgcagatatctaccatacaygtatagtacctgttgtttctttccttttatacacagagttattatacagccctgaaccagcatcacctgggaacatgctagaaatgcacactctggggtcccacaacctgtctgaatcatcccccacctgggggctgctttacatctgttctttgtggcatccctcccctacccgtcacccagagccttgttttctagtaccctgcgtgcatattgcagaagcagctcaggctttggaatcagcagagctaactttgaggttttttggctctgccaattgataagctataaaattaggtgggtatttatgttctgaatcatctatcaaatgggtgcaagggtgatgcccacctcaatagagagaagcaacacaattaaatacatgcaaagacctttgtagattataaagtgctt

SEQ ID NO: 850401 - DNA, 432 bp, Homo sapiens
aataaatatacaactatatatttcttacttatttaagaacgttctcataaaggaaaaccttaaagttctcagatggtctctataaccttggcctattttataggtttgtggaagggacaactgacttagagaggctatggagatacaaaataacaccaatggttttgcagatagaaaagcacctcttctgaaagaataaggaatacacccagcctgtggaagccagaaccagcgcctttactttcataattcaaagtgggggcgagattcttctcatgtaactgaactgtagtattaatgatacaaagagatggaggtcgtatcctagctttcgagtaaatgccaacacaagcaagtgtgtctgcacatgcayacacacagtcacatgtgcaactaaaaccagtgctttttcctgctttgtgttatgggctt

SEQ ID NO: 850402 - DNA, 626 bp, Homo sapiens
ccctgaagctgggtataggaaaacatttgttctatttttcactaacctctaactgaaatttatcatgttttaaaattattaatataggcaacaaaccacagtagtattagtactgtgacttcatcatcaataaaaattactaatattttcaaaatcacatttcagatatagctctctatacatttttattgacactaataacttcttaaaatttgctatggacacaaatctagtgtgtcatttaataaattaatcaagaagaacatatcatacatcatggattttatctaatttgataactgtattagtttactattgctgctgtaacaaatcgccacaaacttgatgacataaaagaataccaaggtattatctatagttctgtaggccataaatccaaaatgggtcaagctgggctaaaagcaaggggttggcaggccgtcttctttctacaggctcaaggggagaatctattttcttattttttccaatgtctagaggctgcccaaacccctcggttcatggtctccttccatcttcaaagccagcaatggcccatcragtttcccattgcatcactctgacacgggttctcccgtctcttccttctacttttaaggactctt

SEQ ID NO: 850403 - DNA, 626 bp, Homo sapiens
ccctgaagctgggtataggaaaacatttgttctatttttcactaacctctaactgaaatttatcatgttttaaaattattaatataggcaacaaaccacagtagtattagtactgtgacttcatcatcaataaaaattactaatattttcaaaatcacatttcagatatagctctctatacatttttattgacactaataacttcttaaaatttgctatggacacaaatctagtgtgtcatttaataaattaatcaagaagaacatatcatacatcatggattttatctaatttgataactgtattagtttactattgctgctgtaacaaatcgccacaaacttgatgacataaaagaataccaaggtattatctatagttctgtaggccataaatccaaaatgggtcaagctgggctaaaagcaaggggttggcaggccgtcttctttctacaggctcaaggggagaatctattttcttattttttccaatgtctagaggctgcccaaacccctcggttcatggtctccttccatcttcaaagccagcaatggcccatcgagtttcccattgcatcactctgacacgggttctccygtctcttccttctacttttaaggactctt

SEQ ID NO: 850404 - DNA, 624 bp, Homo sapiens
aatggttcaatacagaggacctgattatggatctctgggggtgaaactgcaagtgcattttatttattttctcagtaactatttgcagttttaagactatccagtggaaacatgcattactttattatcagaaaaaaatctttttatttgtatttattcccttatttgtatagtatacagataagatatagtaagagttgactgtcataccagctctcatgtctgcctctgaggctggaaatcaagggctgtttatatggttctctggtgctatgttactcagaagattcaaaggaagactgaggccaccaccaggtggaaggtaagagcctatcaatgacttggttttgtggtactgtgtcccacctcctggttgcccatttttcacaggtaattggaaataatgggaaagccttaagacaactttgagaatgagttagaaaaatcagtggaagtggatttagcctatcatcactcacacagtacagagactcaaaccrtgacaggcagctgggttcaaaaactgccagagattcagcacagtttgaaaatgacaatttttttgttgttgcagttttacaaaggaaaacaggatagagttatttccatgtagttgagtattgt

SEQ ID NO: 850405 - DNA, 651 bp, Homo sapiens
agcagtcagggttaattcagatcgtttcctctgctcttgcattccctgatttcaagcacsgcgaggctggggctgtaattacggaatgggtagtactcactgttcaccagttgtgtgtaagctttaaactaataactcagcaattacgagaaaaatgagcggtaattacacccattttactcgcggctagacagatgggacattttctcctcgttattggcaaactgtcaccacatttatttcatttttactgtttactatttgttgtgctttgattaagagtaattataggctaggaaaatatgaaaaacatgaatgttgggtatttttaaaaatagaaggaggcccttctccctgttttatattgatagaattctcattttagatcctattaaaatgatatcaacattctcaagatatttccaggcaggcttcagttctgtgacagcttttcagcaggggattcccatgtttgctcattatttgggtcgtcatagacccataaatatcctgcattttttttttttttacagcagcctctgtgtccctcacactcgtccattttggtccattttggtccattttgtgtctgatgataaagcacaggagaaatccacccgtcgctgggatccacaggggagtaacgccaaa

SEQ ID NO: 850406 - DNA, 586 bp, Homo sapiens
cacagactacttcaaagtgatgtgcagcaaggcacaagagttccaaaagccactgtggctggttagttccccattaagttgcttccttgsttggctttattatttcatctgctccattagtgaacagcaagcgttttgcaaaaaaggcattgcacagcctcaccaagctcctagagaagcctttctagaagctgcttcatgtatccccacaaagcaacatgggcagcaggttggtgggatgccccactctcccgaagaagcagcagacttatccaggttaactccctcctctctcctttgtccccaacatgcactgatcaggaagatgaaaccaagtgaaagccacttcctgtgtgggtcttaaaattcaataaaaataatatctcagaaaaaagccagaacacactttctgttcagatggaaaaatgcatgtttccctccccaccttcacctacaagctgagttcatgttatttcaacagcacatcatggacccagatgcaaatggacagtatctgaaatgcagtcccgagcaggagaaatgtagtttcatcagcgagtcatttttaaggcttgatttctatttg

SEQ ID NO: 850407 - DNA, 620 bp, Homo sapiens
cctaaaagattattataaccattatgtgttcayaataaaaagcaaaatgaaatcaggagagaaatttgatttgggtaatatgactgcccatcttatatgttcaaactgatacagtagtcatccatatgctggattcatagtccatagggtttcagatgtcaagaacgccagcacataaatagtaaaagcacaactgggtaggaagaggcaggtagcacagacgccagacaagatgatgcaatgtccatgctctaaaactttcagtgtcatgcaaaaacaatgaattctatgactaatttagaagatgatagttaaaacaggagtaagcatttcattcctttatctgacagaaaatccaaggcagacataatggattaatacgcacagatggagctgtttgaaattctaggtttccctataagtggtgttttgcagattataaatacgcttttataacacatcattaaaatgtgcagtcttcccagtaaaagtcattcactgtatctccctgtttgtcaggtttagaggtccctatacaaattgcattgtaattatttgacacatcaaattttcatatatcttgattaaagacaatcctttttttctttcttatgtgaatt

SEQ ID NO: 850408 - DNA, 599 bp, Homo sapiens
ggctgctattgctgctatttttatgtcagagatgagaaaccatataaactttgaactctgtcgtgaggaacagagctgggatttggtgctaggttgtcagttaagcagtgactgtgtttgggctcagaaccctttaagaatgagaagaaagtgctgcactctgtcatgaacaaaaaggacacacacagttctgtttccagctccttaaaggtccaaatccccacttaaaacacctttgatctaaacattgctgcagattatttaaaattctcataataagatgtgcttgggctaggtatgccgtgtagtccttggagctcatctaaagccttataaactgaatcgtgttcctttgtaatcacttaacatttagatagattgaggttcagtaatcagatctttaagtcacagccacacaaaaacaagacaactctgctaacatgtctttggttataacatttatttcctgtttctttttttgttgtgttctataaaatcttaatgacctactttcatatacttcttccagaattaaaactatgwtcaaaaattgaaaaaaccaaaccagaaaacatgatttttagagtggcttcctccaa

SEQ ID NO: 850409 - DNA, 521 bp, Homo sapiens
gagccagcagtcccattactggatatagatctaaaggaaatgaaatcagtgtgttgaagggatgtctgtactccatgtttactgcagcgctgttcacagaagctgagagatggaactgacttaaatgtgcacctacagaggaatgtataaagggcggcctgtaactgtctgaaaccttgttatttctcccacgtagcctctcccctctaatccttcattggctccactttcttcttctttttttttttccttttttgagacatgttacccaggctggagtgcagtggtgtgatctcagctcactggatcctctacctcctgggttcaagtgattctcctgcctcagcctcctgagtagctgcgattacaggtgcccgccaccacacccagctaatttttatatatttagcagagatggagtttcrccatgttggccaggctggtctcaaactcccaacctgaggtgatccacccatctcagcctcccaatgtgctgggattacaggcatgagccaccatgc

SEQ ID NO: 850410 - DNA, 607 bp, Homo sapiens
cccttgtagagagcttcaggagctgtaagagaarttattcaatccatccttgtacccttccttgagctcactgtggaattactctgatggaaaactgcctttgtggtcccaccatggaaaaggtgctcctgaagtttcctaaaataagggcaggaaggcctcactggccaatacacttatcaggagaatagcagtacagacttttaacaaaaaatagagagtactttcaataaataaagcataaaagtaaggctttcgtatgctgcctaaatcctaatcttgtacatatctttcagttaccacagtatggcttcccgccaacctctgggatgtggcatgtaatgggactcccaggatgaaaagactcggtgtcctgtcgttcattcattcatttattcattcattcagtcatttaatatgtatgtatctgtctatgctatgccaagaaaagccatgggcattgggatagagcagtgaggaaaccaacacatctgcctcctcagagaatttacagtccagaagggtagagacagacccacataaaatggtagactactagtttctttcctttccacatactcccatcatcattttccattgagatggt

SEQ ID NO: 850411 - DNA, 592 bp, Homo sapiens
cctatttatgatggatccacccccatgacrcaatacctcctactaggccccacctccaacatcaggggtcaaatctcaacatgaggtttgaagggaataaatatccatatcatagcactattcattaaatggaggtggatcatcacaaagttctccatcctcatcatcttctcattgagtaggctgaggaagaggaggggttggtcttgctgtctctggggtggcagaggtgggagaggtggagaaggtggaaggggaggcaggagaggcaggcacacccagtgtaagttttactgaaaaatatccacatgtaagtggacctgcacggttcaaacccatgttgttgaagggtcaactgtatatcaatatttactgctatggtgtggatgtggtttgtccctgccaaaacccatactaaaattttatccccagtgtggcagtgttgggaggtggggccaagtggaagtttttctggttacggggtaaaatacttcatgaatagattaatgccctccctcaggtgtgcattccccttctctcgggaattaattcctgagagagtatgttgttaaaaagagtctggcttatttgg

SEQ ID NO: 850412 - DNA, 544 bp, Homo sapiens
aaatgacctgaattgtcacttcccagaagaagacatatcacgtccaatgagcacatgtaacagcatcattagtaattagataaagacaaatttaaacaataatacaataccatytcatacacactatattggttaaaatttaaaatactgttgggatgaaaagttggagagaatatggagcaacaagaactatcatacatttctggcaagagtttaagtggtaccttttagaagttttataaagttaaacatgccatcccacttagtatttccccaagagaaatcctaacatatgttcacaaaaaggcttctacaaaaatattcataccagcctttctcctattagtcaatccctggaaacagcccaaaagtctggcaacagaataggaaaaatgtttagaaaagaaacaaagttctgaaatcagcaacaacatgtgtgaatttcagaagtattataatttaaaagaagaaatcagatacctaagaatacataccacttgcttctatttacataacaggtaaaactaatttgtgttcaaatcag

SEQ ID NO: 850413 - DNA, 433 bp, Homo sapiens
gtgacccctttttaaattgtaagggagtgagcagagaggtcagcttgggttaagataagacaggcagacccctcgacagctgaaggcatgggagcacaggaagtctggagattggggctgacatagggaagaagatactccaggaagaatgaatgcaagagcaccttgcctagtttgaattttccttagaaatgtctcattgtctggacccaagatgtggcttatattgaagttatttatctaaattctcctctcctccactggattctagatttttgtgggcagttcctggtcttaaacattaatatttctgctgatgtgcctagcacaggatctgtcacaataggagaatggtraaataagtgagtccatgccaaaggaaacctgatgttcattaggcctggtgtagtatttctgccactctgtgtggctg

SEQ ID NO: 850414 - DNA, 590 bp, Homo sapiens
ctaagtccaccttcaaataatagtacgctacttcacaagtagtgctgataccttataacagagtattcctaattctttcctcccattctttgtracattgttataattcattcatttatccatacgctatactcacttaatacattattgctattattattttaagcagtgagccgagatcgtgcttttagatgaagtataaataagaaaaatcaaagtttcaattttttcttcatttattctttctccaatgttctttttattcatgtaaatcctggtttctgacctatgtcatcttatttctttatagagaaattattttaacatttcttacaggaaaggtctatgtactagtgataaatttcctcagtttttgtttctttgagaaaacttctatttctcctcacttttgaaggataattttgttggatatagaattctaggttggcattttgtttttgtttttttcttccaaaacctaaaatattttatttactccattttcttcccgctttcatggtttctgatgaaaagtccactgtaattcttatctttgttcctttataggtaaaattatttctttttcctct

SEQ ID NO: 850415 - DNA, 534 bp, Homo sapiens
acaagacagtaggatttggttcttgcccccagataatttatgttctgatagaaataacagacatttatcaacatgttgtaactgtacatttgactgtatactgattttaagaaatgagtaaatatacctgagtgcccccaagtatggcttttagtgcaacattccaatttggctacaaatatcacaaccacaactactggtagccttggacccaagagtattgcgttgttacacaatactggatattttgcatttcaagaaaaagtctcacaatctctccatatggagcagtctttttcttaatgttcatatgtttacagaaatgagaactttggatattgtgaaataaatactggctaatgccagagcttcctgcatctctctcaagacccagcacgagacaaacacctctgtcagatttcccttgactaatttaaaagctgtgaattcattctgcttgcccagattttaaggcttctatccctggaatgtcacctcctcttcytttctgtccttgtgccattctgttttttt

SEQ ID NO: 850416 - DNA, 529 bp, Homo sapiens
tcacagagcttaacaaaatttcaccagctaaatccaatctacagagagaggtacacagagaacatcaatgtraagctcttattacactttaattttttaaagtaagtttttaaaattatttttaaatatatttattttaaaaattattttaaaaaatttatttataaatatttattttaaaaatcactaaaactttttaacaattcctcagatgtattttgatattctatttcggtctttcattcattcaacaaaccttttttgaacaccgacattgcagatacttttcagggaaagaacaagatagagcccctgacctcactggggacaggcaaggaaatgtgtagtgcagtcataaaattttggagaaaacttaaaggggaaaacattctgggtgagggagcacactagtttgattttttaaacagcatttccagagagtcctccttttaaggtgacatttgcacaaagacttgaaggagtgtctctttttgttcaggaacactttgtagatatacataatttgtca

SEQ ID NO: 850417 - DNA, 439 bp, Homo sapiens
gtttaagcgtcgtttcataggacttgaaggtcccattgctgctttttgtagattcctcctaatgtcaggagaagattgaatgaraaaatgtatacccaggagagcttgcccttctggggtgtctgggcctgcattagtatatttcctgagtgcttcaactaaaagaccctgaaacagagcgggattttcatcttttccccgagttacttctttaaccttgtcataattgactggcttaaccacacactttttcctctacttttttttccccacagcacagcaagcggatgacaatatttgtaaatcgtggcaatttgaagaacatagtcaacgtaacaaactcttgtataagcttttctggtttatctgaaaactggccaattctttccttttataaggtctaattagacatggaaagtggcatatgtactctttgagt

SEQ ID NO: 850418 - DNA, 439 bp, Homo sapiens
gtttaagcgtcgtttcataggacttgaaggtcccattgctgctttttgtagattcctcctaatgtcaggagaagattgaatgagaaaatgtatacccaggagagcttgcccttctggggtgtctgggcctgcattagtatatttcctgagtgcttcaactaaaagaccctgaaacagagcgggattttcatcttttccccgagttacttctttaaccttgtcataattgactggcttaaccacacactttttcctctacttttttttccccacagcacagcaagcggatgacaatatttgtaaatcgtggcaatttgaagaacatagtcaacgtaacaaactcttgtataagcttttctggtttatctgaaaactggccaattctttccttttataaggtctaattagacwtggaaagtggcatatgtactctttgagt

SEQ ID NO: 850419 - DNA, 638 bp, Homo sapiens
gatgaggtatggtggtaccatcaaagacctggcaagaatcagatagcacccacaaagagttcgtgaagagagttcaatgaaaggcccatgtcttgaaatacaggtacaagacagcttgcacrgtacccagggaccaaagtgggaagccatctctgtccctggacataattcatctctccctttccccctcaaatctccctcccctgcctctcactggggaagctgtgagaggctagagggtaagtggcctcaggatgtgttcatcaaggtcagcctcctggctcagcagaggcagagacacccccaccagggctcaactgcacgtaaccagctctgtgagtaagcggggctctctcattctccccagtggggctcaaagtggcaagtcccacatctgagtatccattattcttatttcttgattaaattgtgatgaagcaaggtatcacagggaacgcaacctgcttatctttcttaccaaatgaaatagctttactagctgggaggaaaagaacatgagtttttcagcaataacagtaaactcagccctttgaggattcttataaggtgggagctccctccaagccatgctaagcgtggggaatcctcagtgtcctgggctctgggtttccacacct

SEQ ID NO: 850420 - DNA, 638 bp, Homo sapiens
gatgaggtatggtggtaccatcaaagacctggcaagaatcagatagcacccacaaagagttcgtgaagagagttcaatgaaaggcccatgtcttgaaatacaggtacaagacagcttgcacagtacccagggaccaaagtgggaagccatctctgtccctggacataattcatctctccctttccccctcaaatctccctcccctgcctctcactggggaagctgtgagaggctagagggtaagtggcctcaggatgtgttcatcaaggtcagcctcctggctcagcagaggcagagacacccccaccagggctcaactgcacgtaaccagctctgtgagtaagcggggctctctcattctccccagtggggctcaaagtggcaagtcccacatctgagtatccattattcttatttcttgattaaattgtgatgaagcaaggtatcacagggaacgcaacctgcttatctttcttaccaaatgaaatagctttactagctgggaggaaaagaacatgagtttttcagcaataacagyaaactcagccctttgaggattcttataaggtgggagctccctccaagccatgctaagcgtggggaatcctcagtgtcctgggctctgggtttccacacct

SEQ ID NO: 850421 - DNA, 578 bp, Homo sapiens
tgcttatttgtcactttaaaatgaaatcagattcagtgagctttgtgtctttaggggaattctcagtgaagtctggaaaccctyccccctcaggttttccgaccgctgcttggagtttctggtatgaagtgctggtgttctccgccaagcagcaggtgcatctgtaaattactgtgggatgttaatggctatatactttcttattcattacagctccagtccccaaaaggcaaaaatgtgaccactggactccctgcccatctgacacctatgcctacaggttactcagcggaggtggcagaagcaagtacgccaaaatctgctttgaggataacctgtaagtaccagcgtttagaaggaaaataaagcgatcctactgattcttgccccttccctgaggctgaccaagcagcagttctgcccacaggagagaaccatatgtcgttggtctcaggcaaaaggctgagagcatccaagtggaaatgagaaagctccgctgtattcaccagggaaggagctgattgtctctaatggctgtatgtgtcttgtgtttaatggttttacggtttcgtttgact

SEQ ID NO: 850422 - DNA, 532 bp, Homo sapiens
tataatgataaaaggactagtccaacaggaaaatatcacaatcctaaatacatatgcacctaacactggagctcccaaatttataaaacaattacgactagacctaagaaacaagatagacagcaacacaataatagtgggggatttcaatactccactgacagcactagacaggtcatcaagacagaaagtcaacaaagaaacaatggacttaaactataccctagaacaaatggacttaacaaatatgtacagaatattctaaccaacaatatacattatattcatcagcacatgcaacattctccaaggtagaccgtatgatagtcacaaaacaagtctcaataaatttaagaaaattggaattatatcatgcgctctctcggaccacagtggaataaaattggaaatcaactccaaaaggaactctcaaaaccacgcaaacacatggaaattaaataatctgctcctgaatgattgttggrtcaagcatgaaatcaagatggtaattaaaaaattctttgaactgaat

SEQ ID NO: 850423 - DNA, 587 bp, Homo sapiens
gaagggggtatgtgttataaaaacatatctatacatgtctgtgtatttttgtgatgaccaagtctatagtcaracaccatgatacacatttattatatcagctggaagagctcattccatatcattgtggaaatatcctagattgctaaaattcagtcataatcctattcaatccagttctgagtatttgttgggtaccaactgcaagacattccatccagttgtaagcaactgaaatttgccttgactttccccaacagcaaaaaggcagacatgcgtgttctggctacatcaaggtggaaatcggtcctgtgttctcttctagggatctgctggaggaaggaaaggccacggttccctgcctggcagaaaaacttaccagcgagctcatcacacatatctgtgtaagcacgggcagagctgtgggttctctaaaaagaatactacgaccgcagagctgaaccttgctggcttcttaaacatcactgtacacacagatcttctgaggatcttgttaagatgcagtttcagattctgtgggtctggagtggggcctagaattctgcatttccagcaagcccccagac

SEQ ID NO: 850424 - DNA, 483 bp, Homo sapiens
cattgcagtggatcccaagrgacgaggacagtgaggacttggcctgagttgggcgagggagtgatttgattccgcttcggtttcacaggaaggctcacaagggtctggttacagtctccatgcaggctaagagagaaaaggactggcccagcactatagggcctgagtaactgggtgaatcatgaatttactgagacagagaactgtgggagaggtctgatttggggggaacagccagcattcaggttttacaggttacacgggaaatgccgattgagaggtgggcaggcaggcggacacaagcatgtggcaatggtggcccaggtctgggctggagaggaggagttgggagtctcaggctagatcacggggtgacctagggccatggggtggggccagatgggtcacccaaggagggaagattgagaggaggccagagcctgagagtgctccgatgcttgcaggggaggaagatgaaggaaa

SEQ ID NO: 850425 - DNA, 528 bp, Homo sapiens
ccactatgtatagccattatgggaaatagtacggaagttcctcaaaaaattaaaaatggggccgggcgcagtggctcatgcctgtaatcccagcactttgagaggccgaggcrggcagatcacgaggtcaggagatcgagaccatcctggctaacacggtgaaaccccgtctctactaaaaatacaaaaattggccaggtgtggtggcaggcgcctgtagtcccagctacctgggaggctgaggcaggagaatggcgtgaacctgggaggcagagcttgcagtgagccgagattgtgccactgcactccagcctgggcaacagagcgagactctatctcaaaaaaaaaaaattaaaaacttaaaaattaaaaatggaactaccatgtgatgagcaatcccacttctgtgtatttaaacaagacaaattaaagccagagctcagagatacctgcactgccatgctaactgcagcactattcacaacagcaaagatacggaagcaacataagtgatcatcaacagatgag

SEQ ID NO: 850426 - DNA, 487 bp, Homo sapiens
gagaaagaactgagagtgaaatcttggcccctgggaggtgggacagagctcgcattctgaaactgacaggacagggtgcttgacaaaacaaaaagaaaaaaatmatcatcctccaaaggattttaacaggacccagagtctcacagcatatcaaagtggccagtataagatttagttacttggtatacaaagaacaaggaaaatgtgattaattctcaagggaaatgacaccaacatatgtcaacccaaaatgatgtgggtgttaagatcaccagacaaaaacttttgctggttgctttttgttgctgtttgaatttttttagagatggtgttaccagtggagggtgtccaggttcttggcgttttgaacaatgaattggatgaagcacacaaagcaaggaaagaatggagtgacaaaagcagagacttattgcaaatgaaagtacactccacatggtgggagccgctggagaataacggctcaaga

SEQ ID NO: 850427 - DNA, 467 bp, Homo sapiens; identical to SEQ ID NO: 818322

SEQ ID NO: 850428 - DNA, 548 bp, Homo sapiens
gttcataggggcatcgggtgaatggccagggcagtggcgtcacctgcatcctctgtgtaaggacagaaacacctcgggcagtggctggcacccaggagggtctgctctgggggtttggggctcacgggaggctacgagaagcaaatggcacctcctccacgggccttcagtttaattcaatgacccaacgtttgtcggaggcgctaacgtgctgagctccctcaagccagcaggacctttggcctagaaggatccaggccagaattctgagaacatctctcacctgggggtagatttccagagcagtcgggacctctggtgcctggggccctgaatggcacctagtgcgcacctatgcctacctatgcccaccagggccatgggctccccaggggagcagcccagggtgcagctcgatgggccgtgcaccagggagaaattcaggggktaagggcttctctggagcttgcccaggacaggtgaacagagcaagaggaattccaccccccagggtgtcttcccagggcccaagtccactgtgggggttt

SEQ ID NO: 850429 - DNA, 672 bp, Homo sapiens
tcatcaacttcatataaactgacrtttttcattcatgtgtttatgcagtcattgaataaatattttttgagcactttggataccaaaggtttagcagtgaatgaaataactcagtccctttcttcacagagcatatgttctgctatgtctttaagtcacgtgttttttctatttgaccgtccttgccaattttcccctaactcagacatccacttgtctttgcccctggtattatcttaaatcaactctaaatcaatccgatttcttccactgcttcaatgctagttgacgtttggcttaactgcttatataattatttctgcttttattgaattcttatgatgaaaaaacagaagacttgaatctgatgatttttactttagaaaggttaatgatgaaagtgttgtaatactacagtttggtgaaatggcactttttgtgttgtgtgaactgtcatcacttaatgaggagcaggagatcagcttacagttttctgctatagttctggacatcatgagaccttattccccaccagcatgatctctgtctatggctcagagggagagcaatagggatatggggtgctattcacagccttgcctgggtgactgtgtcttctggcagcttagtggctcccaggggcaggatcctggtcaccagcatcctacagca

SEQ ID NO: 850430 - DNA, 588 bp, Homo sapiens
ttcctttaccccagaaatgcagaaatacatggttttggatgtttgacctcattggttggtgggcatgaggaggtggtctgctttggtgccartgaccgtctgtgagtcacagagtgagtgaatgctgagccgctgtgatgggaaagctctctgctgagttggttcagtctgggtcacagagtgagtgaatgctgggctgctgtgatgggaaagctgtctgctgaattggttcagcagtgcacctgcttcctcacggggcattagccggtcagggcgatgtctctggatcactcaacttgtccctgacagagcaaggaataagaaacccagttagattgtctgtatcatcagatgccatttacatcccagtcaaattagcagccagatcactgatttcttataggtatacatcttttgacttcagcataatctcttcccctttttctgcatccttgggttttaaaggatgtttactatgtaaatgtttaacatgtttactatttaaacttaatagttgaggtagcttttaaaatttgtgtccattaaacccaaggactcttgcagaagtcgtatggtttttcttctttc

SEQ ID NO: 850431 - DNA, 642 bp, Homo sapiens
gcactaattggaataatgaattagaaagtggatgttggtcattattaggaaaaggtactttgttacacgagacagtaattgcattgtggcaagagaaagaatctgactaattaatttgtcttttttttcttttgcctatgagtgcttcttctgcttgactcctccccataatcggactccttccaagacagcctaatcttcagggcatttggatgcagctgccttttgttccagagacacaggccatctcaggggaggtatctccctggggcctgaacagcgtttttctagacaagaggaggctgagggctgtgggttctgctttgccagccctgaatgctggatcccgagtggcagaggcaccaagtgctgtatgatgtgtgtatgtgatgtgtgtgcatgtacatgtgtgtgatgtgtgtccctgctcgccccaggctggccatggtactgtgctagtcacagactggctgtgctgatcaagccaggcacagtggaaaatgggaagatgttggcgtttgcccctcccttggctgtgtgtcattcacctggggcatgagctgtgcccctgctctgcagtaatgaacaaggcagstcagcattggtccgagacacgtgagttaagagaggaggaagagcact

SEQ ID NO: 850432 - DNA, 628 bp, Homo sapiens
ttgtattatgttacactacttgagatcgtattgtaatccctyggaaacacgctctatgtttttcctcttatctctttggttttccatttggatgatttctatagagctattttcaaattcatggatttctttggctaagtcaagtttactgacaagcttctcaaagccatttttcatctcttttactgtgttttcatttttagcattttcattttgttctttctcacagtttctatctcttttcaagacagcatattattttaagcaaagaaatggaaataagctaagtctcatgaatggtggaagaattgacaaataagctaagtctcattaattttagggagacttagctagtttcattcaatcatttatgtaaatgtgttcatcctggcatagaaagagctagaacagaaattgagctttaaaagcaagtttcaaaaccatggatattatctcatgtatgctttgtttttaaaattccacaaagcaacataatatttctagagtaacaaatatctacaaaatgcattttgtaaaacagcctggaaggaaaacccacagaagatgataagggttcggtttggcaggaggcagggttgggactccagctttactggtcacatgtgga

SEQ ID NO: 850433 - DNA, 581 bp, Homo sapiens
cacagagctgggcaggggctgggaaggaggcctggatccctggccatgctgctagcaggacttgggcaacaccrgggtgctttctgagagtgcaagtacatggtgagtgtgcttgcctgtgtgcgtgtgtgtgtgagcatgcatggcagagctgagcatgcatatgcactctgtgacatgtgtaagcatgtatgtgagcttgtgtatgcatgtattcatgtgtgacgtgtgtgtatatatgtgagcttgtgtatgcatgtgagtactcacgtgtgacatgtgagcatatatgtacgtgtgtgtttctgtatgcatgtgtgtattcacgtgacgtgtgagcatgcatgtacatatgtgattgtgtatgcatgtgagcattcatgtgacacatgtaagcatgtatgtacatgtgggggcttgtgtatgcatgtgagcatttgtatctgacatgtaagcatgtgtgtgtgagcttgtgtatgcatgtattcatgtgtgacatgtgtgagcatgtatgtgagtttgtgtatgcatgaatattcacatgtgacgtgtgagcatatatgtacgtgtgattgtgtatg

SEQ ID NO: 850434 - DNA, 480 bp, Homo sapiens
ggttgccctggcccagtctgctggcgtcctcgtaagaagagcagatgagggcacggacacacacagagggacggccctgtgaggacacagggagaagatggtgtctgcaagccaaggagagaccccaggcaccagccctgcccctccttgatctcagaccccaggctccgggactgtgagaaggaagtgcctgttcaagccaccagttctgcgcattcttaaggcagcccaaacaaactaataaaatccctagtgcgttgtaccaggcggatgtaagcctgagacgacacctgacaaagacattatgataaaacacaattggggaacgtcccgcacatcaacacagacacaaaacactcaaccagatgttagcaatcacggccagcaagggaagtaaatgktacaccacgaccaaacgtgcttccgccgggaatgcaagagccgtttactgtttgagcatcaatcagtgtcattcacaga

SEQ ID NO: 850435 - DNA, 480 bp, Homo sapiens
ggttgccctggcccagtctgctggcgtcctcgtaagaagagcagatgagggcacggacacacacagagggacggccctgtgaggacacagggagaagatggtgtctgcaagccaaggagagaccccaggcaccagccctgcccctccttgatctcagaccccaggctccgggactgtgagaaggaagtgcctgttcaagccaccagttctgcgcattcttaaggcagcccaaacaaactaataaaatccctagtgcgttgtaccaggcggatgtaagcctgagacgacacctgacaaagacattatgataaaacacaattggggaacgtcccgcacatcaacacagacacaaaacactcaaccagatgttagcaatcacggccagcaagggaagtaaatggtacaccacgaccaaacgtgcttccgccrggaatgcaagagccgtttactgtttgagcatcaatcagtgtcattcacaga

SEQ ID NO: 850436 - DNA, 658 bp, Homo sapiens
tcttaactacagaaaaattccaatggataaatgtaaaaggaataagggaaatagaaaatcattgttatgacattacagtaataattgctgctgtcaccactgataaatgctaaaattagtggacagaattttaaggaaaaacaggatatttacgtaactcaacatagcagttattgcagtggctgtagcatgcgtcctcaccctcatttatctccctgtttctaggagacggagcttaatgtcactccccttgagtgtggactgaatttagtgactcaatttccaagaattgagcaagaaaagggaaaaataataactttatgttggagaaatgcacagagttcaccttgcccaagtgatcaaaggtgacttcacagtggtaagtcaggacaataccctgcaccctgacgtgatgtcgtgaaagggcactcgcgtacgtggtattctctccacaagtccataacccacggcaattgtgagtaagcctcagacaaacccccaccgcgggtcactctccgacattgctggcaatcctcttcaagagtgtgcaggtyatgaaaggccaggacacactgagaaagggtcccagatgtgaggagacgaaggagatttgacaggagaagcatgatgggatcctggaacagagcaagaacgttag

SEQ ID NO: 850437 - DNA, 516 bp, Homo sapiens
attacctagaaggttgccgggttggcctagttcagcccgaataargaggcttaaagctggaggtggcctggagatgatggcttagagatggcctggacaggcctagagatgatagcctggaggtggcctggaggtggctcgtcccctgttgctgcatcctcatggcagccaggggtcttttggaaggcctggccagccactgctgagccacttcccccagcttcatcccctgtgactctgacaagcccccaccagccacagggatgagcagaccctgcccagggacaccatccagctgcccatgtggccctgagtgctggcttacctgcctgcctatgtctctgggggtccctgttgggagccccggctccccagcaagattggtcctctcctgggtgggggcttccgcagcagctggagagaagggggagcattccccattaattgaacctgggctgagtttctgtgggagctttgccctgggaacccatggtggccataaaacaccaaactcag

SEQ ID NO: 850438 - DNA, 447 bp, Homo sapiens
ctcagaatgtggaatcatgcagcatgtgacattttgactctgctttatcccttgcccatgatacttctgagatgcattcatattgttgctgartaatttttgataaatatgccacaatttgtacatccattcacctattgatagaaatttggagatttacagttttagagattatgaataaatctgctataaactttcttgtaccggtctttatgtggatgtatgttttcatttttcataggtaaatacctaggagtgggcttttctagatcacatggtaagtgtgtgtttaattttgtaagaaactcccaaggaacgcattgtcccaagttgctgcaccagtcagtgtacattcccacaaacagtgcatgagagttcctgttgcttgtgaaataaatggtcagcattcagtgttgtcagcttttaaaattttctcctttctagtgg

SEQ ID NO: 850439 - DNA, 447 bp, Homo sapiens
ctcagaatgtggaatcatgcagcatgtgacattttgactctgctttatcccttgcccatgatacttctgagatgcattcatattgttgctgaataatttttgataaatatgccacaatttgtacatccattcacctattgatagaaatttggagatttacagttttagagattatgaataaatctgctataaactttcttgtaccggtctttatgtggatgtatgttttcatttttcataggtaaatacctaggagtgggcttttctagatcacatggtaagtgtgtgtttaattttgtaagaaactcccaaggaacgcattgtcccaagttgctgcaccagtcagtgtacattcccacaarcagtgcatgagagttcctgttgcttgtgaaataaatggtcagcattcagtgttgtcagcttttaaaattttctcctttctagtgg

SEQ ID NO: 850440 - DNA, 594 bp, Homo sapiens
cttttttttttataatagtctctgatgatcttttgtatttctgtggtatcagtttaatttaaatgcctccttattcatttctgattttgttttctttggttcttctctcttcttttttatttaaaaaaatttttagaaacagggtctcactctgttacccaggctggagtgcagtggcatgatcacagctcactgcagcctcaaacccctgggtcaagcagtccaccagcctcagcttcccaagtagctaggactacagatgggtaccaccactcctggctaactttttaaatttttctttagagataaggtcttgctatgttgcccagactggtcttgaactcctggccttaagcagtcttcccacactgcagctctcaaagtgctgggattataggcatgaaccactgtgcccagccttcttcttttcttggttagtctagctagtggtttatcaattttgtttatctttttgaaaagccaagtttttgtttcattcatcctttgtattatttttctggtctgtatgccatttagttctyctctgatttttattatttcttctcttctgctaatttggggttcagtttgttt

SEQ ID NO: 850441 - DNA, 578 bp, Homo sapiens
ctgcagagcatttccacgtggagattccatctcgtttgtatccagctccatcaggggcctgctctcaggctcccctgggcgtgtgcgtgaggttggaagaggcgggtcactgcaggaatgtgtcgttctgtcatgtcactctctcgatgtctggtctcatggggttccttaccaatttagggacttgttagggagatatctagaactatattgatagatatacatcatgaaccagttccccttaggtgtttctaaaatgatataaattaccaaggaaatagcctttggttaaagttcattattttctggtcttgcattgttagcatagactgctgtctgctgtctgtgccatttctatttcatgtaacttactgaggttttctttgtgccctaatacaagctagttttttgtttgttttttttttttaacgaatgtttcaagtatgtttaagaagaaagtmtaatctctattattggagtacaaagtttgatgtaatgtccctaagacctacctcctgttactagctctctgtcatgctgagttatttttgaccccttaccttgccatggctgacagt

SEQ ID NO: 850442 - DNA, 608 bp, Homo sapiens
tgccacagcaaagctcacgagactcacttcttcccattggaattcastaagaacaaattcaacaattcagacgccccagctggaggtttattttatggattttacctgtgcggtatttagggttgtgtttatgaataaaggtgtgcgttctggcaagtagaaatacagagcttgtctttcacccaagtatctgtaactttctccaatgcagacactaaaatgcaataaaaacaaaccaaacccattaaacatgaattagatgaggcaggctgatgggaggttgtgggattaacaggccgtcagcggattgaagctgcgcacatcgctgggatgctgctgcgggaggattcggtctaatccgggagcatctggctgggcagtgggcagcgtctgcagtcgtggctgcttgaaggtatgaaggttgtggcctttgcttccccccatcaggctgccccaccctggaccccacccagacccctcgggcaccctggggtcatcttcagctcccccttctcttccttccttctcttccgcctgggcccctactgtgacccgaggtcagcagaggaccctggcaggtggctgctccctgggactcgactgtgcag

SEQ ID NO: 850443 - DNA, 545 bp, Homo sapiens
gctataaagaaatacctggggttgggtaatttataaagaaaagaggtttatttggctcacggttttgtaggctrcacaagcatggccccagtgtctgcttctggggaagccttgggaagtgatagtcattgcagaaagtggccatggaagcaggcacatcccatggcaagaacaggagcaagggacagagtgggcagaggagccaggctcctttaaacaaccagctctcatgggaactgagtgagaacgtgctcattgccaagaagatggctctaggctattcatgagacatccaccccgtgatccaatacctccccccggggcccacctgcaacactgtgaaacacattttcacatgagatttggaggagacaaaacctccaaaccatatcaagtggcacactcacaagaaaacgtgtcagtggccaagacgatttgcaatgaggactggatgaggctgggacccaactctctgtctctgacattcctgctcatctcatggacagaggcactgattgttctagaccatctttccaagggtgttg

SEQ ID NO: 850444 - DNA, 600 bp, Homo sapiens
cagagttcttattgaagggctcacctgttcggattgaggaaggaacatgtaaacagataattacagggggccatactcagtgctgcagttgggatacatagaaaaccaggcaaacgtgttgaggggcaattcatttgggccgagaatcagggaaagctttagagaggaggtggcctttgggctggaccctagggcatgagttataattgggcatggattgggtatacatttattagaaaaagactggaaggttggaataaccggagtacagagtgtgtagtggtgtggaggctggaggtatggaagcatagtgaaggagttgggaccctgctggaagtgttaggggcattgtgaaatggttggaactttgttggagatggaggggggtgaaagtggaggaggagttgcatggtaggtagaataatggctcataaagctgtccacatcctaatctcaggactatgttatgttayatggcaggggagttaaggcagcagatggaatgaggttgctaatcagctgattttaaaatagggagattatcctggattatctgggtgggctctgagtaatcacaagggttcttaaaagtagaagaga

SEQ ID NO: 850445 - DNA, 605 bp, Homo sapiens
tctacccggtgccaatttctcttgatctgtgctggaagaatgcccaggcagatcttctcaaaacagtaaactcaaacaacaaaaaaagaagaagacatagttttaaaagccgagtgctgtatactgcctctaacttatgataaatccccagtatattttgaatttttaaagagaaacctttacttgttttgcttctgtaaactttcctttgtgctaaaggactcaactttagaatttacaaacttaaataagagtctgaactaaagatgtatttagctcttggatatgctattaagtattacttgccataaaacaaatgtgccatacttctgcccccgaatcccgtaaaatatctacttttaggtattttatgacacagttaacagtgagcctaaaagtaagtttacgtacaaactaaaccaaaggtttttcataccaatgtctaaaaagtttagattccaaatgtagtctattttcaatacagtacaaactttttcaaagttggctcmaagaaagagatttctgtccctgtttgagggacatgagtgcccactgtggtcacctgcctctgccctgcaacttccagaaaggcctacagagctccc

SEQ ID NO: 850446 - DNA, 617 bp, Homo sapiens
ggccaaatggggaggattgcttgagaccaggagtgagagaccagccagggcaacaaagaaagaccctgtctctccaaaaaaaataaaataaataaataaataagaagaaagaaaaaaattaggtgggtgtggttgtgtgcctgtagtcctagctacttgggaggctgaggcaggaggattacttgagcccaggagttggaggctgcagtgaattctgatcataccactgcactccagcactctcacaacagtgtgagactctgtccctaatgataacaataataataatatttgaagagataatagccaagaaatttccaaaactaatgaaagacatcaatcacagattgagaaaagtctatacatattcaaagcaacattaaccaaaagaaaactatgcttaggcaaagcatgtaaaactgttaaaaaccaaaggaaaacaggaaaatcttggaaatcaccataggaaaaaaaattacttcaaaagagcaataattagactggcatctcacttttcagtgaaatggaataaaaaatgacaatggaattaagttaaatgactaaaagttaatatttatcatcttaaaattttwtcaattctaagatattttgtgaat

SEQ ID NO: 850447 - DNA, 627 bp, Homo sapiens
agttttaaataatacattcatgagatgggattttaatgtgcaatttaagaagttattaatgttcgaaagacagagtcattgcttctgtgttcaatcaataygcagtacatagctttttcccttaatacttagttatcagctttatcatttctaatatttcatgaatactcttaagtgtttttatggagggagacaatttagtgaaaagtctctgctttagaaatttttatacccatttatctcaataaaaatgtttcggacatagattagtcctaccaccttaagtgtgactatgacttttattttttcacgaattccgtagacccaaaatgcaaaatctgtggaacaaataattttcttttataaggaagattcccccccacttttttttttaaagttgcaggaactgcgaatagtaaactagcctgacagtctaggaatctaaatataattcctgagactcctacaagttgcctatgctatattatccatccttgccacaaactattttggcatcttctgctttatctataaaataaagagcccctagtagatggagctagctttcatccataaagcatctattttaaatcatccaggtgagtacattattttaaaagccgtaac

SEQ ID NO: 850448 - DNA, 682 bp, Homo sapiens
atggcattctagcattgctttaaaaaaataacaaaaataggcatatgctcttgttttgtaaatgaaccttctttcatatctctggtatactgataaaattgttaaaggtgtttttggattgtttgttttgttggcttcctgaatggtctatgtttatgccaaatttctgtttcatttattttggtctctttttcatgtgttaatctttactctaacattcggtgtttctctgctgccagcagacattcaaggaaattcattaaaaagaaactggagtgtattgcataatattgagaattacagagtggtgtgactcagcaaaatgactgggcagaaagttgctttcgttaaggaaattaccaaatgacaatagatataggtcttttttcatgggcaattctgattctctgagggaggtgagtgaggggaatgccaatttgtttattcccaaatatgtgtacatgcataaatgctcatgtaaactcaactgccagaattccagattgcagtggaatacagaatgagatggaggatttccatgaagcaacatgctttctctgctgcatacactgtatgtaggtggaaggctcttgtttaagttgctcatgatacatactcttttatctccagcataaggttggagaaggaacatgaggatccragctgctcatcgtacagcatt

SEQ ID NO: 850449 - DNA, 646 bp, Homo sapiens
gtaaatcctctggtgagggaccttaggatttcagatatttgaacataacatgactagtgaccaacagttggctccagcccttgttccaactctaattttccaccggagtgagcttgtgtttttattgtctatagagcaaagggctagaaaggaaccacctcatgatcctttaagattttcttggttcagcatatggcaaattctgtaacattataagtttactctctttgtgacaatgcagacacaaatatagtttttcattgatcttacaataataatgtgattctcacattttgaaatttaaaatttttatttcagcattcaatctccttcctttgttgatctttgaaatccagtattgttatctgggtatgtcctatttgtgacagttcttcatctttttgcttctaagacatagtacaccacttcttagatgaattatagaaagtttacggagcctctccttttgggacaggggtaccaattatttatgtgttggattttctttgtcagtctttcattatctatcattaccgattattttctctgttatccctttcagttctttgttcatttcatttttattactttttaaatagtattttccatggyatttataaggtatgtgtaaatgtctattttctat

SEQ ID NO: 850450 - DNA, 646 bp, Homo sapiens
gtaaatcctctggtgagggaccttaggatttcagatatttgaacataacatgactagtgaccaacagttggctccagcccttgttccaactctaattttccaccggagtgagcttgtgtttttattgtctatagagcaaagggctagaaaggaaccacctcatgatcctttaagattttcttggttcagcatatggcaaattctgtaacattataagtttactctctttgtgacaatgcagacacaaatatagtttttcattgatcttacaataataatgtgattctcacattttgaaatttaaaatttttatttcagcattcaatctccttcctttgttgatctttgaaatccagtattgttatctgggtatgtcctatttgtgacagttcttcatctttttgcttctaagacatagtacaccacttcttagatgaattatagaaagtttacggagcctctccttttgggacaggggtaccaattatttatgtgttggattttctttgtcagtctttcattatctatcattaccgattattttctctgttatccctttcagttctttgttcatttcatttttattactttttaaatagtattttccatggtmtttataaggtatgtgtaaatgtctattttctat

SEQ ID NO: 850451 - DNA, 568 bp, Homo sapiens
cttctccttgaatgcctcaagtaaaaggagactcgataccttctaaggtaattcattctttcattggagaagtctggctattataatgttctccttyacctcaagtaaatatctatccccctgaaatatctatttattattcctagaaaggtttcttggggccatttaaaataaatctaattttacttttatttgagagtccttttaatatttgagcatagtcagcatgcctgtttctttttcatattgcatttcctcatgagctgaacagtcaggtatctctaattggtcctcttacaatatggtttaagtccctttactatctgggcatgggaggtcatgtaagctatcacaactgcagcaagatcctgttatcctgacaacaaatggattagggacaactatgtttcttaaaatcagactagaagcatcctttagctctttggaaattatagtccacatgcaagcatggtaattctccttttatccaatgtcacatagaaatcaggtgctctacagttgagagttttccaaataatattaaccctttaagcaccaaatttttggg

SEQ ID NO: 850452 - DNA, 487 bp, Homo sapiens
catttgtacactgttggtaggaatttgtraattggcacaaccatcatgataaccagtattgtgtttcctcaaaaaattaaaaaatagaactacaatatgatctagcaattccacttctgaatatacatccaaaggaaatgaaatcaatatctcaaagagatatctgcactcctatgtctcatgttcactataccattattcacaatcttcaagtgtgcttatgtgtgtgtgtgtgtatctgtgtatatgcacacataattcaataatattaagccttaaaaaaagaagatctggccatttgcgacaacatggatgaacttggggacattatgctaaatgaaaaacaagatagaggaagacaaatactgaatgatctcacctatatgtggaatctaaaaaaattgaattcatagaaatagagaggaaaacagtggttgtcagagcctggggagtgagtggggaaaatgaggagatgtggatcaaaatg

SEQ ID NO: 850453 - DNA, 600 bp, Homo sapiens
acattcttctctcgcaatgaaaccatctgcagccaatcccagcaggttttccttcagggctgtaagcaaaaggcaagaatacasattgtttctcattctacaccattttagtgcagcaaaggcaaaaggcagggggaaaacttaaataaacatgtacagatgtctttttccaggttattttccattttccaaatcctgactttgagttctacaattaagaaaaaatattctcagattaagtatattttcttacattagagaaacagggccgtgtatgaagagatgcacatctgccaggtcttgattttaatcatttatttgatagatgtttctggacaaacagactcagccatgaccagatgtagcatgtctctgttaataatctgagttaattgaatctcccttttgccatttgccaattatctatggatccagattgagtggttttctttttcctttttttccccctactagacagagacacataaacctagaggttagcagggataagaatgttattatgatgttactgtaactggaagtaggtgccaatggttactttctgagagcagttgaacaaaaaggaatgcaataaacttt

SEQ ID NO: 850454 - DNA, 652 bp, Homo sapiens
taatgaaaatgacattatcttttaccaaaacttgaataagggaatgttctttccaaaatgctctttgcttgtaaacaaatgagtatttttaccttgattgccataagtgtttattttaattgtatttgaatatttcttcttttagatcttaaacaaaaatgattatgtgcatatcccctagtaaatatcttggtgtctactatttctttaactagcattgttttttgttcagctctcactcttttctcactctaagaaagaatcaaatctgtatctgttcaagtatattctaggaatcgggcaccaagacagaggtgcaagttcaagagatttcttgagggtaatgcctatgaaaggtaatgggcagagagagcaggagtagggctaggaaagtctttagtaggtaatgcaagttggacacccatgaagatagatagaaagaaggagggttgggtagaaagaaactcacattgcagcccatctaggaactctgatgcgaagtccatttttcagcatgaggcagaaaaggcaaactgtgaaacctccactgtgctyagtctttgtctgggatcttccagaaagagcataggctctgcccaaatgctgtgatggatcccaaagacactccagctagatagaggctgtcagttaa

SEQ ID NO: 850455 - DNA, 631 bp, Homo sapiens
tcttccacagaagtgatccacacaaagtagacccagaggcattacataaaacctcaaccattgggaagattttccctcactactgtctttcaaggctacccgctggtgtagttttaatatagtcactatccatttttagtttgtgtccacataccaatctgactcatttgtaaatcaggtttggcctcattctttgtcttcaaggaaaaattgttcacatgagacttttcgtataaccataactgtgaggttgtgcaatcattgtgggtgatatggggatttagcttacctactcaggcagcttagtcatatactctgatgctattaggattctatcctttatataccatttctatcttatgatgggccactgccagttctacccaactttatgacttcatggtttgctaaaactcagctcaaaaggcaatgcattgtcacctggtgtctcttagttaagtgttacatctgtattaggacccagtagcatatcaggatctgattcttcaataatgyatacatttctgctccagagagcatgcccttgcttcagaactaaggaccttgtgatgattttcctaatggggcttcctataaactccatattctatcttttctaccatctagctct

SEQ ID NO: 850456 - DNA, 599 bp, Homo sapiens
actaactgcagacttctcagcagaaatttgacaagccagaagagattggaggacaatattcaacattcttaaataaaagaatttccaaaccggaattttatatstggccaaattaagcttcataagtgaagaagaaataagatccttttcagacaagcaaatgctaagggaattcatcaccacctgccttgcaagagttcctgaaggtagcactaagcatgaaaggaaaaactgataccagccactgcaaaaacacactgaagtacacagaccagtgacactatgaagcaatcacataaacaagtctacaaaataaccaactagcatcatgataacagaatcaaattcacacttaacaatactaacctttaagaaacccatctcatgtgcaaagacacatataggctcaaaattaaagggatggaggaaaatttaccaagcaaatggaaaacagaaaaaagcaggagttgcaatactggtttctaacaaaacagactttaaaccaacaaaggtcaaaaaacacaaaggacattacttaatggtaaaaggttcaattcaacaagaagagcgaactatcttaaatatacatgcacccaata

SEQ ID NO: 850457 - DNA, 622 bp, Homo sapiens
actactgggtatatatcttataaaagtgtgttcacatgtgcaccaaaagacattaaagaatgcttttagtggcattatttacaacagcaacaaacyggaataacctaaatatgaatctgcagtaaaatggcaaaaatactatgatacatgtattcaatagagtattatgtagcagtaaaaaatacactgcaatggtttgctatgccacaatgaatctcacaacataatggcaagtgaaagaaacctgagaaagaagacattctgtacaatttttttatataaaactcaaaaccaggcaactcgaatctctgttgttttggtttaataagttgttaatgttgggaaagactgcaaatataataactgaaagagggcagaagtggagttaagaagtacagttaagatgtatacacttctatttgtatgtttaaatatatatatataaacagtaaaaataagtatattcctatgttagtaattctaatttgacaggatttgaaaatcagaaataatagtttaattttcactaaatgctttttgacatttattttctatatacagtatattatattttctttatcactaaaaacatttggaatcttgtaaaaatttcaattctaca

SEQ ID NO: 850458 - DNA, 622 bp, Homo sapiens
aaaattgggaacaaggtgataaggtccaccatcgacacttttatttaatattaaataggaggtcttagtacmataaagaaaaagattgaatttcaggaaaggaataaaaataacgaaaaagaaataaaaggcacatagaacataaagtaagaagtaaaattatttttccccaagaacataatgtttatataaaaatcccaaagaatctaccaaaaaaaaaccccataaaactaatatctaaattcagctaaatcatggtatacagactcaatatacaaaaagcaattatattcttatatcctggcaacatttgaaaattaaagttaaataataaaatataaaataatatcaaaagcaaaatatttagaaatacatttaacaaaaagatgaaagatcgtcataataaaaactataaaatattctgaaactctaaaatatttaaatataatacatggataaatgtaccaagttcatggactggaaggtgcagtattattgtttatttatttattttgaggcagggtatcactctgtcacccaggctggagtgcagtggcatcatcataactcactgcagcctcaaattcctgggctaaaagaattctcctgcctcaacctccca

SEQ ID NO: 850459 - DNA, 627 bp, Homo sapiens
ggcatattttaatatcttatcttgaaatcataagatgtatttgttcaaccaaatcttacagtaaagcagtataaaaaatataaattctacagtgtgatagaaatgcaaactatttgaygttcaatttaatcattttttcaggaacctaaatattatttattaattattactttaactatttaagattagttacaatgaaaagaatattgccttagagatcttccattaattattcagttcccagcctctgattcctttataaacttctaaattcttcagagataaatgtacttggctcaaatttaatcatgttacaatgcaggttctgtatcaacttagtttttgtagacactatatggtataagaagacaatgtttaattttatgtcaatatcttgcataaacttgttcaattaattcattcaataaacagtcattgagttcgtatcatgtcccaggcactgttaaaaacattcatcttatgtggtgaaaaagtatgtatggaagtacctgcttttatatgaaaagtactgatgttttttctaaaacttgaagtatagtctctgatttgcctatctaaagagtgaaaaatttcatttttactttctgcagaaattcagtttcttgt

SEQ ID NO: 850460 - DNA, 417 bp, Homo sapiens
tatcaaacattcctttattactaatttatagaagcatttttaaaaaactaccttttacatattttatccaatacttttatttcaatggacaggtgtgagttgggtagacactcttggaatgctgactatggattaaaccacttaatcttcacaaaaaaatcacttgaagagtcctgcttttattcaggtcttaaggaaatctaggcacagaacttgtacaaggtaggagagaagttacttgttcaagatatactaattttattgtgtgtattttttaatcttaagyagttcactatattgctggtaaaaatgaatgcacaaacaaaatgaccacatagaagagctttaatcattcctctttgcccagcaaattaaatacaaactccacttgtgtattcaaaaaatcaattgtaacat

SEQ ID NO: 850461 - DNA, 632 bp, Homo sapiens
ccaaaactgcactagatggtaatttcaaagtatttacaattttgaacattaaactggatttgsaagtgtttatttgtgaatttttctatggttttatcatgcagggttttatctgacctttagaattaggtacttgtaaagtgtagatcaaagtgtgcaatcattactcaagattactttcaatgtcttgcaaaggttttaatctaatgaaccttccaaagattatttttagtatgaatggataaatgataagccttattgaaaaaatagttattttcagtaaatttttcttatatttgaaaaaatattaatgggttatttttcaacagtttacaaagtaagctgaatatattttattttgattaaatttggtgaaactttaattttagaaagaatatgcataatcaataaacatattttaaagtataatcatatagtataatggcattcaaatcttataggcatatgtgtttgaactcatattgataggaaaaaaatcaatgagactacataacattttataaaatagtatctgcaatatgaataaatacatagttttcctagttctggaaagaaagtaacatctttttaaggtctccttaacttccacacctacctgagacttttgaagt

SEQ ID NO: 850462 - DNA, 556 bp, Homo sapiens
gtggaggaattttcaaagaaataaagaaaaaaaagacataaaactgggcctttgaaaaagtttataaagggcattttttttttggaagaatttaagattggctttagaactctaacttgagttcatattrtgatgcatgtacaaattcatgcatatatatttgaaaaataattcgattctctggagtaagctttgctcccttttatatgtatccagaaagctggcaaaagctcatgtatgttatttcaggtcaattaatcacaattattggactgcattaatcatttataaaagactaaattgcttaaaattcaactgctatattttcaacacttcccctcagatattctaagtttttgtatagctcctgaggtcagacggaaattacaaagtcacatctattttaatggcattcttatcaaaaaccacttaatgtggtatatgcactttcactgaactcaaaggcataagccattcagaaaccaagcagctctgggtggcacaaaaacaataaaacaattctacacattcaaatagcttaaaatgaaatagaaga

SEQ ID NO: 850463 - DNA, 611 bp, Homo sapiens
tcttcactgtgacaaatctttttctttttaattccagcacttggcacaatacttggcacatagacaacactcaaaaacatttgtgaaagttattttttttccccaaatgcagaggtttaaaaaaaaatgcatcttcctaatctacttcaactagaaaagctgaacttgccccgtatttagtgaccctgagttgcctctgtgatcaccacttttaagtgccacacaagcatgagcatgagaatttgaatcaacagttgtttcaactccaccaaacagttaatgagcttctttgtaacgggcataaaaagataaaataataataactttctcatgataaaacaaggcttccagcttgagcaaagactgctgactagaaccaagtaaagaagctattcagcaacattctgaataatctaccatcattaaatacaaatgtggactggtaccaagggcatcattaagcagttttctttagcaatactcaaaggcagmctgagaactggaggaaaaccaggggccagcagggcagctggacagaggggcagaggtcctgagggtggaagcactgaccagaaggaagggcctgaggacaggaaagacagggagagacc

SEQ ID NO: 850464 - DNA, 621 bp, Homo sapiens
cacaatgagaaaaaaatatgtaaaacttggcagagatatttgcaacacatgttrcctagaaaggtttagtatccagaatatataaagctctcctataaattaataagtgaaaaataacacctcaattaagaagttagcacaaatacccataagcatgtgaaaaagtgctcaacctcataataatcatgaaaatgaaaattaacaattagataccctttcacacatattgacaaaattttttggaagttctgaaaggtgtagtattggcaaggataaagaaccgtggaagcattcatcccatgcaagtagaaggacagccatttggaaaatggatgttagctcatacagcttatcataatgtaccctatgtcccagtggcttcactacaacctagtgcaatctagtcagcctgttacaggccccagaaaaattcttgcgtttgtttacctagggatatatgagaatgttcaccattttaaaaacctggaaacaatccagttatctctcaatatgggtagattgtggaataggtaactaaatgatcatatattccaataatagagtacctcgcagcactaagagtgaatgaactgcagctactcacattctcaaacacagcac

SEQ ID NO: 850465 - DNA, 621 bp, Homo sapiens
cacaatgagaaaaaaatatgtaaaacttggcagagatatttgcaacacatgttgcctagamaggtttagtatccagaatatataaagctctcctataaattaataagtgaaaaataacacctcaattaagaagttagcacaaatacccataagcatgtgaaaaagtgctcaacctcataataatcatgaaaatgaaaattaacaattagataccctttcacacatattgacaaaattttttggaagttctgaaaggtgtagtattggcaaggataaagaaccgtggaagcattcatcccatgcaagtagaaggacagccatttggaaaatggatgttagctcatacagcttatcataatgtaccctatgtcccagtggcttcactacaacctagtgcaatctagtcagcctgttacaggccccagaaaaattcttgcgtttgtttacctagggatatatgagaatgttcaccattttaaaaacctggaaacaatccagttatctctcaatatgggtagattgtggaataggtaactaaatgatcatatattccaataatagagtacctcgcagcactaagagtgaatgaactgcagctactcacattctcaaacacagcac

SEQ ID NO: 850466 - DNA, 605 bp, Homo sapiens
cagcctctcaactgagcatatccagctccaggcctcaaggcatctcagtgaaatgttaacccagacacatcccctctctcagaataggcttgacagagactggtcactgcgtcctccctcccccagcccagggacttggcggtcgcttgctcactgggtcccctgaacaaggaaggcaatgttccctcaattcacagaacctttctattcccagccgtgcccagccagcatcctcactgcttcagatgtgccatgggctgtgggctggcagcttgaaaacgtgccttgggattatcaagcccaaatatgagcgttgctttttgaaaggagaacaacaatatttttttccctctaactccagatacatagtaattctagaagaaaagtgtaatattcagaggccaagccaccttgttctcaggatgggcaggagctgagtggggctgagtccctggggaagctattgccacaccagccctctcaagaggagcagatcacagctaacagggcagaagaagcagaggacctagacccccagaagtkgggaggggtcttgggagaaggaacttaatgatagctggagctccctcttaaaaatggggctt

SEQ ID NO: 850467 - DNA, 295 bp, Homo sapiens
gtgtctgttgttcgcctctttgtgtccacgtgttctcatcattaagctctcacttataagtgagaacatggggtattttgttttctgtttctgcattagtttgctaaggataatgacctccagcttcatccatgttcctgcaaaggacatgatctcattctytttaatggctgcatagtattccatgatgtgtatgtccacattttctttatacagtctaccgctggtgggtatttaagtggatttcatgtctttgctcttgtgaatagaactggaaacatccccctaaatctct

SEQ ID NO: 850468 - DNA, 557 bp, Homo sapiens
tcccgatgtcagcgagcaagagctgggaaaggaagagatgaatgggaacagacataggagtttgcctgtgaggacaattacctgagttgtgagcagtgacgaccgaatgaaaggaaacccactgtaattaaatagggtggcagtacgaggagctgggccaacagtttcacacatcagctttgatagcttatttaggaggggagggaatgttcaagggggaacaatcagggcttattgcataaatgaatgaatgaaagttcctagtagcctggtcatcactcaaggagtggctgcacgctctggaatgtcaacactataatgcctcaatttgcctagaagaaaatttaaataaatagattttctatacaatcttttctcctctattgttcctttctgaaatttggtagtttaaaatgtacatctacgttatggctgtgtttgtactgaacatctgaaccagacttagtccagccaaactgttcactcytgctctcgtcacgatcaataccagtcaaatcaatcttgcagcaatctgcaccaatcacaggaatgaccaa

SEQ ID NO: 850469 - DNA, 576 bp, Homo sapiens
tccattctgtgtttaggaaaggtgcatggggatcaactatatcttttgaaattctgtcttctatttccaactgaatagttcttaatatacaatcatcctgatcttaaaatttggtgagatgtgtgtgtactttcctatggatagaaatgtcaacatcttcccttggaggatggaagagtttcgaaatgtattactggctgagcgtatcttccctgtctctgactttggttggggattgaacaaaagagataagaaggagaggaacaggcaagtatgttgttgagcctataccaagtgacaagtaccatattagtcactttgcatcatgaatcagaaaagaaaattcactatgtaataccatgataaagaatatttaaatatcttaggtgttaagaattaataaataaaatacatattaattttttaatgccaagcctcacagtatctcaccacccctcaacaaggraggcttcctggcctttttgcagaaggaagcagaccccacttagtttgtttccatgaagcagtcagcccggccaggaacagagtatattccctgccgatgcacacttgtgt

SEQ ID NO: 850470 - DNA, 566 bp, Homo sapiens
agatgccaggccagcagatggccgaaacgataagcatatgtccagtagcaggtatgtgcagctcatttgatcattaatcaaaaactgtcccttgcaggtcacaggcgtgattcttacagcttatcctcacgtgaggggtaagggctgtgccatcttaacctgtgctgagcactggcttaaccctgcaaaggttcagaacaaaaactccttccagctgcaactcttgtggctctgacagatcgaggttggatgaaggggctcatcatggtttcccttcctgagagcactcttccagcaaaagtctgtggatagcagtggattccgtgatctaccctatctcctggcaattgctgctactctccatggtgaaagacccataggctgtgcagggtggtaaccgcccacacgtgtgttcctttaagaaacctaggggccctcctgggatgctgcagcccaatcgcatgaggctggcctrtcattacaggttctcaccatctgcagtttgtgtgtttggaatcttctctcactatgagacataaaccggccaaaatggcagattcacttct

SEQ ID NO: 850471 - DNA, 635 bp, Homo sapiens
ttagaaaatgctacgtgatacagaaaaacagaagttatatcagactaaagagagccggaagtgacagcggaaggtcatcgttttaaacagggttgcctggatatacttcagtgagaagacttggacaatgacctgaaggctgtctggggaaagagtgttctggcagaggagccaggtagtgcaaaggccctgaggccagcacattcttcatttgtttaaagaacagggaggaagcgagggtggctgaagcagagtgggtgagagagggagagtgttgccaccaacaaggtcagaccagatagggccttgtagtccttttaaaaactctggcagttattccagttgaaaaggtgagcctctgcggggttctgattaaagggttcactctagttatcgtgtcaaaatagaaaagaagcaaggaagagtaaaagaaggcagaccaatgaggaggtgattggagcagtccaggcaagagtgtttgagggcttggagcagaggggccacagtggaggagtgaaaagtgtttggttttaaatgcagagtatttggagggcaaaaccaaaaggattttcyaatagatggtttggtggcctgagcaataggaaaacttgctgcctcgcttagagaggggaggg

SEQ ID NO: 850472 - DNA, 669 bp, Homo sapiens
ttctgcctgctttatattggctggcagctgattagatgatgcccaccagattaagggtgggtctkccttccccagcccactgactcaagtgtttatctcctttggcaacacccccacagacacacccaggatcaatactttgcatccttcaatctaatcaagttgacactcagtattaaccatcacagtgctgcaatgaacatatgtgtagaacagtttattttcatttgagtatatacttagtaaggggattgctaggtcaaatggtagttctgttttaagttgtttgaggagtctccaaactgctttccacagtggctgaactaatttacatagctgccagcattgtgtaagtgttcccttttctccacaaccttatcaatatctgttattttttgactttttaataatagcctttctgactggtgtgagatggtattcattgtggttttgatatgcatttctctgatgatagtgttgatgagcctttttaaaatatattcattggctgcatgtatgtcttttgagaaatgtctattcatgccctttgccaattttttaagtggggttgttttttctctgttgaattgttctttatgttattagacccttgtcatatgcatagtttgtgaatattttctcccattctggaggttgcctgcttacttt

SEQ ID NO: 850473 - DNA, 669 bp, Homo sapiens
ttctgcctgctttatattggctggcagctgattagatgatgcccaccagattaagggtgggtctgycttccccagcccactgactcaagtgtttatctcctttggcaacacccccacagacacacccaggatcaatactttgcatccttcaatctaatcaagttgacactcagtattaaccatcacagtgctgcaatgaacatatgtgtagaacagtttattttcatttgagtatatacttagtaaggggattgctaggtcaaatggtagttctgttttaagttgtttgaggagtctccaaactgctttccacagtggctgaactaatttacatagctgccagcattgtgtaagtgttcccttttctccacaaccttatcaatatctgttattttttgactttttaataatagcctttctgactggtgtgagatggtattcattgtggttttgatatgcatttctctgatgatagtgttgatgagcctttttaaaatatattcattggctgcatgtatgtcttttgagaaatgtctattcatgccctttgccaattttttaagtggggttgttttttctctgttgaattgttctttatgttattagacccttgtcatatgcatagtttgtgaatattttctcccattctggaggttgcctgcttacttt

SEQ ID NO: 850474 - DNA, 602 bp, Homo sapiens
cagcctctcaactgagcatatccagctccaggcctcaaggcatctcagtgaaatgttaacccagacacatcccctctctcagaataggcttgacagagactggtcactgcgtcctccctcccccagcccagggacttggcggtcgcttgctcactgggtcccctgaacaaggaaggcaatgttccctcaattcacagaacctttctattcccagccgtgcccagccagcatcctcactgcttcagatgtgccatgggctgtgggctggcagcttgaaaacgtgccttgggattatcaagcccaaatatgagcgttgctttttgaaaggagaacaacaatatttttttccctctaactccagatacatagtaattctagaagaaaagtgtaatattcagaggccaagccaccttgttctcaggatgggcaggagctgagtggggctgagtccctggggaagctattgccacaccagccctctcaagaggagcagatcacagctaacagggcagaagaagcagaggacctagacccccagaagtkgggaggggtcttgggagaaggaacttaatgatagctggagctccctcttaaaaatgggg

SEQ ID NO: 850475 - DNA, 587 bp, Homo sapiens
tccattctgtgtttaggaaaggtgcatggggatcaactatatcttttgaaattctgtcttctatttccaactgaatagttcttaatatacaatcatcctgatcttaaaatttggtgagatgtgtgtgtactttcctatggatagaaatgtcaacatcttcccttggaggatggaagagtttcgaaatgtattactggctgagcgtatcttccctgtctctgactttggttggggattgaacaaaagagataagaaggagaggaacaggcaagtatgttgttgagcctataccaagtgacaagtaccatattagtcactttgcatcatgaatcagaaaagaaaattcactatgtaataccatgataaagaatatttaaatatcttaggtgttaagaattaataaataaaatacatattaattttttaatgccaagcctcacagtatctcaccacccctcaacaaggraggcttcctggcctttttgcagaaggaagcagaccccacttagtttgtttccatgaagcagtcagcccggccaggaacagagtatattccctgccgatgcacacttgtgtctgtcctcggt

SEQ ID NO: 850476 - DNA, 567 bp, Homo sapiens
cagatgccaggccagcagatggccgaaacgataagcatatgtccagtagcaggtatgtgcagctcatttgatcattaatcaaaaactgtcccttgcaggtcacaggcgtgattcttacagcttatcctcacgtgaggggtaagggctgtgccatcttaacctgtgctgagcactggcttaaccctgcaaaggttcagaacaaaaactccttccagctgcaactcttgtggctctgacagatcgaggttggatgaaggggctcatcatggtttcccttcctgagagcactcttccagcaaaagtctgtggatagcagtggattccgtgatctaccctatctcctggcaattgctgctactctccatggtgaaagacccataggctgtgcagggtggtaaccgcccacacgtgtgttcctttaagaaacctaggggccctcctgggatgctgcagcccaatcgcatgaggctggcctrtcattacaggttctcaccatctgcagtttgtgtgtttggaatcttctctcactatgagacataaaccggccaaaatggcagattcacttct

SEQ ID NO: 850477 - DNA, 593 bp, Homo sapiens
attttgtctcctaaaacaaactatgtgtgtacactagctatcaatacttcttactgtagtcatggtcyaaaatgttggaaagccactgatatgattttgagacttacctggcattattgtgaaaactgtgttggatcaacagtgaggatgttagttttacactcacaggtgagggtaagctttgctttgttctggaaatattacccttctggaaccactttatctctttttggattctgcaatccctgcaaacagacgccaatgcttcaattaaatcagagctcctagttttgtttcattttgctataatcactttctggaagcacactttggaattcaacattgttgcatctaatcttaggcaataaatataagtgatcatgtgggaccaaaaaaaatccattctgtgtaattgatcatctgtagtggatttacaaattacatagtctcaacattttttaaagaaggtttctggtacttagaaactcaaggaacaaaaccggctctcaaaactcaggagattaacccagtcattcacagtaaggtatatctcgaaaatccacacattaaaggatcccttgaggtcagatttt

SEQ ID NO: 850478 - DNA, 559 bp, Homo sapiens
gtgaggtttgtgcttgcatgtgtcgatgtgcgctatgggatcttaacattgattgctatttatttttatgtgtattggtttgtctgcaaaggataatatatcaagttgatatctgacagcttccttccaactgagaccttgcagcatgaatccagcccagcccactttccctcccagctagactccagctgttactcctctgccactgaaaattggcagcaccctcctccccacagcagattttgtgtgtgtgattgattgggattttatttgtgatttttcctgttcttaacttttccaagagatacacgattcccagatgactctgcactggcttgcaaaattcagaaagtagcctctgcaggagaactctgcccctttgcttttgtttgcttgttcacttactctaaagaaaatgaacttctggtcaataatcacttgctccaaaaagggcacagccactaaagtacaccaaaaaatctaaaagacattaaaaatatttcagggccagagaaaaactacctttttcaaggatccsagcacatgcagacagggaaaa

SEQ ID NO: 850479 - DNA, 288 bp, Homo sapiens
gcgcatatgtttttacaaacccaaactctccattctggagatttcctgagacacattccttacggagtcatgtacgataagctgggagttactgtctcctttatcaccattttgaaaagcagaagctgctctcagcaactgaggcactattcgttactccctrcatgggcacgctataattacttcagactgtttaaattttctcaatgatagtgaaatgcagttagaaaccatagttaacttgccacaataaagacaaattgtagagaaatacaattaaactaagtt

SEQ ID NO: 850480 - DNA, 288 bp, Homo sapiens
gcgcatatgtttttacaaacccaaactctccattctggagatttcctgagacacattccttacggagtcatgtacgataagctgggagttactgtctcctttatcaccattttgaaaagcagaagctgctctcagcaactgaggcactattcgttactccctgcatgggcacgctatarttacttcagactgtttaaattttctcaatgatagtgaaatgcagttagaaaccatagttaacttgccacaataaagacaaattgtagagaaatacaattaaactaagtt

SEQ ID NO: 850481 - DNA, 540 bp, Homo sapiens
aaagggccactccagactcctgaaactctaygcctgttagagatcttaagataaagctgaccaaggaaattttccccagaagcagacggcattcaagatgtgaacagctttcccaagattgtatatcaaagctgctttgttgtcatgaaagccttaccttttttttatttacttttcctttattttttgttgtttgagtctgatataatttggcgctttgtccccacccaaatctcatcttgatagactgtggacttttaagttaatgttgaaatgagttaagactttgggggactgtttggaaggcatatttggttttgaaatgtgaggacatgagatttggcaggggctaggcgtgcaataatatggtttggttctgtgtccccaccctaatctcatcttgaattgtgctctcatgattcctatgtgttatgggagagacccagcaggagataattgaatcctggggctgatttccctcatactgctctcacgccagtgagtaaatctcatgagctctgacggttttatcaggagttt

SEQ ID NO: 850482 - DNA, 601 bp, Homo sapiens
taaatatatactaatcaataaacactaattttaaaaaaacaaagaaaacacttgctatatcataggtggaccttgcaattattaacactgatccatattttcacagctagctgaatcagcacaacttaktaacctttatgtttgtaagagattaatttgatatagatatagcttaggtatccagaaatttccttttgaagattaaaccctagcctcatagtgagaattcctcttggggctaggactaatctattaaattattgcctattctaagccttttttcacttatttttataatgtttacattttaagaattgtgatagctggctttaatcagggagcattaatcgaggtaccaaatgagactactttatattcagatacaatgaatgttcctgaatgaacaagatgggggtagccttttctgtacctccccttcattatttttctagaaaaccttaaagctgttcagtaaatttaactgcagtcactgactgtgatagaaagtaatttgaattaaatgtatattcaaaactatttaacccagaaggtagcagacaagggtatttaaaataaagcttctggcagaacatgtgatgtc

SEQ ID NO: 850483 - DNA, 609 bp, Homo sapiens
ctaaaacgatcacaatagcaacattatagataattgatcacagatcaccataacaaatacaaaaatgagaaagtttgaagtatcatgagaattaccaatatgtgacacagatacatkaattatctgtgagcacatgctgttggaaaagtggcactggtagacttgcttgaaatgaggttgctggaaaacttcagtatgtaaaaaaatgtatatctgcaaagcacaataaagcaaaggtcaataagaaaatgaagtgtgcctttagtttcttgattattccttctgaccttccctataaatttaagaaatccttgcagatgatggggtatgactctccaatgattgttgccctggagaaacatgaatttaaaaatttatccatacattaaaatacctttataagagccaaacaagaaaaaaaatacctggtgatagttcacagcatgtggttgtagcacagtaataagaaaatacacattaaagagggtaggttggtcagttttatgttacccagattttccctaccccaagcccagtctgcacaccatgaagagagacactgtctgcttgggggaaagagaggaaagtgagtataagatcttgctttgg

SEQ ID NO: 850484 - DNA, 566 bp, Homo sapiens
ggaaatatgaacatagttgagattattcataaatataayttatatcattcgatttaataagaaaaatcaaagtatggaagcaatgaggctgatcatgccttttggagaccatcaggcctagatccaagacctgtctcatccattcattgaaagaacttggtcgagttatctaatatatctttctttgggttctcaaataggaaaaataaaacttaaacagtagtattattattaagatcaaatataatacatgtagaactactattttgttactcagtgtatgataacttcagactaaataatacttaatttaacataagtccctttttaccttattgttttaaatgtttaatgtctgtatgtgattcattatatgagttaatcattatttactttgatttatttcttttttaaatttttttattggtgatttccataaggtaggggagagtgaaacaatgtttcttgggagcctgggttacaacaaaaaaagaatctcttattaacatgaaactttcatgttttttaatatttatcaacttttgctatcagagtttgatgcttta

SEQ ID NO: 850485 - DNA, 618 bp, Homo sapiens
ggcaaaagaaaatagctattgtcagtttttaataggtaatatcaacaagattcatgcaacactttatttaaaataactcttactcaatttccaaaraaatagtattacaaaattttatccttgctggtttagacattaaaattgccaagtgatctatgtctgaataagaacaatggaggtcatggtattataatgcattttctttggtaatttcaaaaaagtttggcacatgtattatttcatggcagctagaatactggaaaatacaatcttctaaagagaatagttcatagaaaattatttttacaattctgctgtgtggtagtgctgtcatctataaatagcataaatgtcactcagtgtctaagatacatgagcttttaaggaagagcatacatttttaaaaaatcacatatttgaataaagaatatgaattttctgaatttgtataatttggatctactatcttttaaaatgatgcttatgactttgtgtaaaaataaatgtcttaattactagacaagcgtgactgtatgacaaaaattcctgtttaatattgagccaaaccttaaaagtgtgattgtattgtaaattttccctttgaatttaaaataattt

SEQ ID NO: 850486 - DNA, 675 bp, Homo sapiens
aaaagaaaaaaaaaaacttcaaaaagtggtatttgaaaaaagagaatcagtaggatgtccaaaccagtgcataccttcattgtaaccttgtcattctccataacaactttgaatttattcttgtgggtcccagctatatcataacaatttgtaacaagaaatatgttttgttttcttatattttcaaagtgataatatgcctagtccacagtagtcacttcttaagtagacagataaacaaaaataacattaaacaagaaaaacatttttgaataatattgaaggagttcaggaaaactatactatttatgctgtaaaattctatgaccatttcaattattttctgaatataattattctaatatacaaaaaatgaagtgagacgttaaaattcggtatcattcaaaaaattagccgggcatggtggcgggtgcctgtagtcccagctactcggagaggccgaggcagaatggcatgaacccgtgaggcagagcttgcactgagcccagatccagccactgcactccagcctgggtgacagagtgagactctatctcaaaaaaaaaaaaaaaaaattgcatcattttaaartatgctaaatggaaattgcggaaactaagatgatgacaaatctgaagaatttttaacatagcatttttgctcttaaaatttaga

SEQ ID NO: 850487 - DNA, 598 bp, Homo sapiens
gctctgcaggaggacacctggaatcccctagccaaccctctgttttggtctaagctcatcagccagcctacatctgccttgggagcaatgatggcttctgygtctcttctgacccatcacttgaaagtaactctcattgacagaatctaaccctgaacctagctgccaaggatttggggaaatgtagtgttgaggttttcagaactgtgtccccctccaagagagggatgtgaatagatggggaaaaatggttctatattaatagtgaacaatatatcacactgtattagtccattcttgcacagctataaagaattacctgagactgggtaatttatgaaaaaaagaggtttaattgactcacagttccataggctgtataggaaacatggataggaggcatcaggaaacacaatcatggcagaaggagaaggagaagcaagcacatctcacaatggcagagcaggagagacagagaatgaaggaggaagtgccacacactttcaaacaaccagatctcatgagaactcactcactatcacaagaacagaaagggagaagtctgcccccaagattcagtcacttcccaccaggctcc

SEQ ID NO: 850488 - DNA, 645 bp, Homo sapiens
aaaagtcttttttaattttaatgaagtccaacatattaatttatttgttcatgtattattatgctatygatactgtttgtaagaactcatcatcaaacccaaactcccataaattttctcctatgttttcaagttttatcgttttgtatattacattaactatatgatccactttgagcgtatttctgtaaaaggtgttaggtctttatctgtattattattatcattactttgcatatggacatccaatttttccagtactaatggttaaaatgactataatttttctcttgaattgctgttattcttttgtcaaaggccagttgactataattgtgtgggtctatttttggatgttattctattccactgatgttagttctttcaaccaatatcatactgtctaataactgtatttttatacaaagtctagaaagtgggtagtttgagtactctaactttgctttttggcatcatgttagctattctaggttttttgtctttccatataaattttggaatatatttgtcaatatctaccaaatcccttgctgagagattttattaaatctatagatcaatttggaaagaattagcatttaaataatactgagtcttctagtccattaatgtgaaatatgttcc

SEQ ID NO: 850489 - DNA, 532 bp, Homo sapiens
acatgagacaaagtatgtgaaaaataacttgtgaaattgttaattgttaagggtattgttatcatcagtttcttttcaacagtacagttctggaaattcgaaaaacaaaacaaaacaaaacaaaacaaacaaacaaacaaaaatgctgtttcatttgtttcatttctgttctcaagatcttgatttcttgaaactgttcccacgtgcagtgaaacgcccttcctggaatttagagttttgactgtaatttttgtctcaaatgagtggatccaaatacaaacgtagctctggtttgtcgtggttgtgatctgcagggtttgccagtttcatctaggtagtatgacacaggaaatcactgagatagtccactgccaaaatccatggccccagtgaccccacttcatcattttgtattaaaacaaacaaacaaaacttaaactgtkaaagttctgtctctcaaggagagtatcaagaacatggtcacaggaaccagtgtgatgaagaaatcctgaaaattacagctggaaggagc

SEQ ID NO: 850490 - DNA, 571 bp, Homo sapiens
tgtctggcacactgactagtgtgttgtctcactgtctccagaagacagacatgggggatctttctacttcatttttcctcctgatacgttgcttatttaaagtgacacaaattccactcactgtctttgaggatgattgtctaagaaaaaaacaaaacagcttgttttactttttgtactttaaatcctcctaatccactctctctgcttggcgtgccttctggaacagagaaggtgccaggcgccggctcctgcctgtctctgccaaacccaagtccctggtttgctcctggggagaagggacccacacactccctaagcccactcggggccccctagggacagcagcctccgctccccacactcctgcggctgcctttcacgatttcctagcagcacagctcccaagtctttcctccctgtgcctgtgtggggtttgctgaaggtcctctctcttccycatgccggtttttgtccatgaaagtctctgacagggtttagtaatttcttccacggcctggctgccctcacttaagttggatcagtgacccagttcccatcttttagctcc

SEQ ID NO: 850491 - DNA, 610 bp, Homo sapiens
ggatattttactaattgattttcaaatgttaaaccaacagtgcattcttaaaataaatccttgctcatattacattatattattaatatattgctgcatttgattgatttacaaaaacaaacccagaaaaatgtcaaagtgatattatttgtggatctatgtttataaaagttattgacattttatcggtaatgtctttgtgtgatttttgatctgataaaataaatttggaaatattttcttctcctattttctgagacagtatgtgttgagaaagtatgtatagagttgttattaattattatttgattattggtaaaatttaccaatgaagaaatatggacgtagaattttctgtgtataaaattttgaaaatcttaattcgatttatgtaatatatgcagggatacatatatttcctattccttcttttgtaaggaatgctttagtagtttgtgtctttcaaaatctttgtctgtttcttctaagttgtcatatttgttgtaatraagttatttattacattttcttactgtactgtcctctggatatctgtaggactgcagattttttaagaatatatccccttttatttctaatattggtaatc

SEQ ID NO: 850492 - DNA, 593 bp, Homo sapiens
ctttagtggccttatttttctttattgttttaatttaataggcttgaaagaccttgtttccaaatacagtcacattctgaagtactggcgtttaggaattcaacatatgattttggggtgggacatgttacagctcctaacaaccttgttttttagtttttacctgggaggtatataaatacttgaggaccatatagatagttatatacttaaaagcaaaattaaatcaaacttttcaaagcaattcctaaacataaaatgtaaatttaaaaataattccaatattgataaaatggtgtaagtcaactacagtctgattatggctaaaatcattaagcagaatacagaaggaaactacctgaggattctgaaaactaactaagagggacataggaaactgaagtaacaccctgaatcattttccacttcaggaatggtatttacattgttttattttgctttgcttccttttttgtctgtcagctttggttcaaggatagatcaaattgctaaaagtatagtgaggccaggtgyggtggctcaatcctgtcatcccatcaccttgggaggtggaggcaggcagatcacctgat

SEQ ID NO: 850493 - DNA, 555 bp, Homo sapiens
cactggtaaagtaataaaaggtttatgattcatttctttcttgataatggaggagacaattaagtaattactggacttayggtattggttgtgttaactcaaccaataaagtatctagccaaattgtgctttgaagtacccttatagaataatacaatgaatgcttaaaaaaagaaatcagctgcaccatgcatcacctacatttacaggcaggcggaggtttagacaatgaccatctgagacctaaaaatggtgtttttcattactagtttccccatttcattctttctaaagttaagtcaaagaagtaggatccagcatctaataccacaactttcccttaactcgctttctcagaaacacgttttctcggctccattgcaccatggatggcccttgtaggccctcaggaccttgaattttacatgtacttgtgtgactgattgacatgtctcccaccttctgccagttggcccttcctgtctacctgcaccaagctgagtgcaaggcatattactgctcctcagggaatgtttgttgaataaaatggatgtt

SEQ ID NO: 850494 - DNA, 574 bp, Homo sapiens
ttatatattaaaatattttattaaccattgttaaatagtacatgatatttcaaaaacacaatgagatgatcatctggaacacctccatgcgaatacaactgtcattttgtaaaattctaagttttctcatttgtatattttcacagaattttaagtttatatatttttgattttcttcatattatatatctaagcattttccatggcattacaaagctattataattatcatcctaatgtttatgttatagtcaaccaaggggaaatactataattttcttaatcattgaacattcaagttgcttccaattttccagtattagaaatatgcaataaatacatatgtacataaatctttacttcttttgaatcctttgcacagaaaagtattaatcagttaaaagtatgcacatttttagagttgccaatatgattaaatttattttcaaagtgatcatatatatttgtattacctcagcactctcaccagtggggcccataacragaggtactggtactcgttcatcactagtcctctaacaaattgtctatcatctataaatgttcactaatt

SEQ ID NO: 850495 - DNA, 624 bp, Homo sapiens
aggcaagccaggcagtattctttatatagcaagttttagggtaaaacatgtgcatttgatcatgtcttcacactttcttgccaagacttgtgactactgaggaggttagataagcatctttatgaggggttagctatgctacaggcattgtttaaaggacttactgcagaaccccttggtatacgggaatcaaacatcggacatcgcgggggttttgcttcaagatagcgtcactcttgccatgcaacaggctgttttcctacagaatcttaaatctgaaaattcaaaatctgaaactttttgagtgccggcatgatgctcaacagaaacgctcattggagcattttggatttttgattctcagagttgggatgcccaaccagtaaacataaagctaattttccaaaatttgaagaaatctgaaatccaaaacacttcagttctgaagcgttttacataagggatactcaacctgcaatgctaattattataattctgcagaaaggtygaatggtgtaaaatcaggtagcactgaatacaaattttagatctgccacttactggtggtgaaagttcaggtacgttacttaaattttctaaaattctgttttcccatctgcagaa

SEQ ID NO: 850496 - DNA, 613 bp, Homo sapiens
gacactggagcctacttgagggtggagggtgggaggaggaagaggatagaagaggatagaaaaactacctattgggtactatggttactacttgggtgacaaaatcatttgtacaccaaagccgagtgacacactatttacccatgtaacaaacctgcatgtgtaccccctgaacttaaaataaatgttgggaaaaaatatttttatatatttctttttaatgatagttctactgagtatccagttcttgcttgaaatttaccatctctcaaaacttagaaaatgttactccaccatcttcttttttccattatttcttttgagaagtctagtgttagcttggtcatcttttcactctggctgcttttaaaatcttatttgaagttctttagttttacaacagtgcattgaagtgtgaagttacttgtttgctttctttaatactgcttgatatccattgcaatttctatatttttctacgttctgtgtgtctacatttttctacgttctgtatgtctacattttatcacctttttatattttctgtttgcttgcctttttttcmaatatgctgagcatttcttctgatttgccttcttaatcaccaattttc

SEQ ID NO: 850497 - DNA, 593 bp, Homo sapiens
tcaatccacttacattctcatgggctgggacagataaaaacatgtgcacaaataaaaaactaagtagatagaaacatactgctactactactaacttctgtgaagaggaaaaataaagtagcgtgatagcaatggaagggagttgctttagtttggacaggatctgaggacctctccaaagaaatgacaagtgaatggtccattaaggaaaaagtagggggtaggggcagttgcactcaaattgtggaaaattcttggttacagagggggaagtgttgctatgaacctgaaaaatggcatggtagttgaagaggatgtcagggcatggggaattttattttggatggataattttgtagcaaatttgtaagcttatgagaatgatccagcagagaaggaaaaattgatgatactgaataaaatgagaaaaactggaggcatacagttcttgagaaagcaagaacatatgagatagagatcgtaaataggggagtttgtctttgggatgagttgyggtggttactccgtcaacagggtggaagtcagggcttgtacataaagacaacagctaggatcactgggaaaattcagtt

SEQ ID NO: 850498 - DNA, 593 bp, Homo sapiens
tcaatccacttacattctcatgggctgggacagataaaaacatgtgcacaaataaaaaactaagtagatagaaacatactgctactactactaacttctgtgaagaggaaaaataaagtagcgtgatagcaatggaagggagttgctttagtttggacaggatctgaggacctctccaaagaaatgacaagtgaatggtccattaaggaaaaagtagggggtaggggcagttgcactcaaattgtggaaaattcttggttacagagggggaagtgttgctatgaacctgaaaaatggcatggtagttgaagaggatgtcagggcatggggaattttattttggatggataattttgtagcaaatttgtaagcttatgagaatgatccagcagagaaggaaaaattgatgatactgaataaaatgagaaaaactggaggcatacagttcttgagaaagcaagaacatatgagatagagatcgtaaataggggagtttgtctttgggatgagttgtggtggttactccgtcaacagggtggaagtcagggcttgtacataaagacaacagcyaggatcactgggaaaattcagtt

SEQ ID NO: 850499 - DNA, 287 bp, Homo sapiens
ctatggcttagtcagtgtttcccaggttgctttttktacacatgttctctaagagcagggagagataacttgaggcaaaacctaaagaggcattcagcaatattgtttttatatttacttaaaaacaagaaaacacattggccgtttctataacagacccatattgatgacaataaaagtttcaactcattgtgatgtcaaattttctgggaaaacagtccacattaactttgtggctttataagcatagagctttataccctgtgtttctgtaaacacgcactttg

SEQ ID NO: 850500 - DNA, 287 bp, Homo sapiens
ctatggcttagtcagtgtttcccaggttgctttttttacacatgttctctaagagcagggagagataacttgaggcaaaacctaaagaggcattcagcaatattgtttttatatttacttaaaaacaagaaaacacattggccgtttctataacagacccatattgatgacaataaaagtttcaactmattgtgatgtcaaattttctgggaaaacagtccacattaactttgtggctttataagcatagagctttataccctgtgtttctgtaaacacgcactttg

SEQ ID NO: 850501 - DNA, 623 bp, Homo sapiens
tgttactagatttaataatatgaatgcttttgtagmtcttgatgcatactgctaactattgtccaagacatttaaactgttttataaagagatttgtatatatcatatgaatacacaattttcctatcccttcaattagaactgaatattatcatcaaagtttttccaatttaattagcaagaagtgatattaacacttcagtttgtatttctttgagtagtgaggctggccatttgcatacatttatttacctattataattcttcttttaggaattgtgtgtccatgtcttttacccatttgccctttgatattttgccttatttcttgtcaattttatggtgctttatgtaataatacaattttcaattgcctatacatcttttaatagttttttttttagacggagtctcactgtcacctggctgcagtgcagtggcacgatctcggctcactgcaacctccacctcctgggttcaagcaattctcttgcctcagtctcccgagtagctgggattacaggcgcacaccaccacgcccagctaatttgtgtatttttggtagagacggtgtttcaccatgttggccagaatggtcttgatctcctgaccttgtgatccac

SEQ ID NO: 850502 - DNA, 623 bp, Homo sapiens
tgttactagatttaataatatgaatgcttttgtagctcttgatgcatactgcyaactattgtccaagacatttaaactgttttataaagagatttgtatatatcatatgaatacacaattttcctatcccttcaattagaactgaatattatcatcaaagtttttccaatttaattagcaagaagtgatattaacacttcagtttgtatttctttgagtagtgaggctggccatttgcatacatttatttacctattataattcttcttttaggaattgtgtgtccatgtcttttacccatttgccctttgatattttgccttatttcttgtcaattttatggtgctttatgtaataatacaattttcaattgcctatacatcttttaatagttttttttttagacggagtctcactgtcacctggctgcagtgcagtggcacgatctcggctcactgcaacctccacctcctgggttcaagcaattctcttgcctcagtctcccgagtagctgggattacaggcgcacaccaccacgcccagctaatttgtgtatttttggtagagacggtgtttcaccatgttggccagaatggtcttgatctcctgaccttgtgatccac

SEQ ID NO: 850503 - DNA, 623 bp, Homo sapiens
tgttactagatttaataatatgaatgcttttgtagctcttgatgcatactgctaactattgtccaagacatttaaactgttttataaagagatttgtatatatcatatgaatacacaattttcctatcccttcaattagaactgaatattatcatcaaagtttttccaatttaattagcaagaagtgatattaacacttcagtttgtatttctttgagtagtgaggctggccatttgcatacatttatttacctattataattcttcttttaggaattgtgtgtccatgtcttttacccatttgccctttgatattttgccttatttcttgtcaattttatggtgctttatgtaataatacaattttcaattgcctatacatcttttaatagttttttttttagacggagtctcactgtcacctggctgcagtgcagtggcacgatctcggctcactgcaacctccacctcctgggttcaagcaattctcttgcctcagtctcccgagtagctgggattacaggcgcacaccaccacgcccagctaatttgtgtatttttggtagagacggtgtttcaccrtgttggccagaatggtcttgatctcctgaccttgtgatccac

SEQ ID NO: 850504 - DNA, 638 bp, Homo sapiens
acaaggcattctgaggcatagcctttattttaaaggtcaaatttcatttctttaaaagctctacacttttatttttctattcccaacaatacagtattcataaggaaccagaggtttcttcatctaaggatccagaagtaatgatctacaaaacttcatgtgtaaatcaccaattcctaccatagcaaaacctgtgctcaaaatcatttctgctggccttgctccgtgttccatcttctgagacgctggcatactctgggtggcaatgcaaacctctccaggtagccaagctggggcttcactgccacctgctcccatctccctcccgtctgagcccctcctttcctctcaaaggtgacccatattccaggggcagcgggctggcagcccctcttgatgagcttcagtgacttccacacaggactcttcactccaatgctgtcactgagaataagtctgtgactcatgtcagggagcacttatacctagaggaccaattattacagctgtgcatggactcctattattaaggtaagacatcttggactttgcagactccttgaaataccaaaaattttargattttgccaaaaaaaaaaaaaaaggtggagaggatcagggggaattcaccacaaagg

SEQ ID NO: 850505 - DNA, 468 bp, Homo sapiens
aaaaccaactgttgttttcccattcataaaaatatttatgaataaacacattattttaaagtccaaatataaaagcaccaagaaaagaaaggttgaggaaagaaaggagaaaaggagaagaaaatgaaaatatcagctggattgcatggtaacaatagcacaaaaatatccatttactccctttcctttttaaccaatttgttgcaagctgaaatcactatattgggatttatttgttgaatgccagtaaacttcaatgtgcttccaaaaattaaaggtagctgatgatcacagactgttttttcccattctatgttcaatggtgacaggtctgaaagtttctgatctcacaggatgtagataggttctaaaaagggaaattgatgagagttgcttgggccaaygttaaatgccaataaactagctccaggcaactagtgaccaatcatgatacttttattttggttc

SEQ ID NO: 850506 - DNA, 553 bp, Homo sapiens
cttcagatactaactgggactgacaccattggcactcttgattctcaggctttggggtttagactggaactatacctatctttcctgggsctccagcttgcagatggtagatcctgggacttctcagactccataatcaacctcacaataaatctctttcttatctctacatatatcttcttggttctgtttctctagagaaccctgactaatacagaaggaaaggagtacctaaaacctttcttgtaaaccccaggattctgtggctctaaggaatgggggcagtgggtgtttaatgaaggtattaagcaggagtgacattatcatgttagtgcaatatctttcttttgcaaaggaagaaactggagcccagatgaattccaaaccatcggcaaaaaatgtgtgagcattggagaggccaatattaattagattaatgagtaggtaccatcaccttttcatggttatctgccagactctgaatgtaaacacacacacacaaacacatatacatatttgggacactactccctgccccttctaagctcactat

SEQ ID NO: 850507 - DNA, 607 bp, Homo sapiens
ctgatatctgttagcctcaaaagattcaggatccctgaattcttgcttccaccctgttacatacccctcccaacacacacagactactagttacccctaracatccattctgtcctttttctacgtaatatgatccctgctctttacctgggcacattgccacccaattgaaagactaccttcaccaagccataaagtagttggcagtgaccatgtaactaagtttggccatagagttccatgtgacttctgggaagtttccaaaaagggagggtcatgctcttggtccctacatctgtctagctgcctagagcaaaaatatgaggctggagttcaagaagacatctcagagccccagggagggcagaggggagagctgggagggacctgggtctctgatgacttagtagggctgccagagcagctcttctctggctgcttccacacttctttcatttgagatagacacaatctcctgtcctgttcaagccactattactctcatttttttctgttctatgctgccaattgatagtgcctgcaaattaccctggtcctaaaataaattatgtatcatgatgcgttcatgtgataagtctcagcactt

SEQ ID NO: 850508 - DNA, 607 bp, Homo sapiens
ctgatatctgttagcctcaaaagattcaggatccctgaattcttgcttccaccctgttacatacccctcccaacacacacagactactagttacccctaaacatccattctgtcctttttctaygtaatatgatccctgctctttacctgggcacattgccacccaattgaaagactaccttcaccaagccataaagtagttggcagtgaccatgtaactaagtttggccatagagttccatgtgacttctgggaagtttccaaaaagggagggtcatgctcttggtccctacatctgtctagctgcctagagcaaaaatatgaggctggagttcaagaagacatctcagagccccagggagggcagaggggagagctgggagggacctgggtctctgatgacttagtagggctgccagagcagctcttctctggctgcttccacacttctttcatttgagatagacacaatctcctgtcctgttcaagccactattactctcatttttttctgttctatgctgccaattgatagtgcctgcaaattaccctggtcctaaaataaattatgtatcatgatgcgttcatgtgataagtctcagcactt

SEQ ID NO: 850509 - DNA, 579 bp, Homo sapiens
cctaaccaaagtgtgtggcctgaaagaggataggtacgattcaaggaaatttggattgctactgacaaaagaaaggagaaagaaagctgcatcytgaaccccacaaatatctattatatgaaatgtttcttccagtttttttttaattcaggagtgagaattaaatttcattaaatgccatgtagtaggcttttattgagaaattacatcatctttctcttttaactaattaatatggtgaattatattgaaagatattccattatgaaacttcttccattcttggaatatacttgcttactcatggtgtaattatatttaaaatgcatcactagatttcacttggtagtattttgttcaggatttttgctttgatattaatgagatttttgtgggggaagttgacaaggtgttgattttaaaattatacaggctttataaaaagaatttatgttttttttccttgactagcatattaagctgttattgcattgctatatattagactgagtaatttctaaagaaaaggtttaattggctcatggctctgcaggctgtacaggaaggttggtgctggca

SEQ ID NO: 850510 - DNA, 616 bp, Homo sapiens
ctagctggtctgaagttagtgaccaaaaccattgagatgccctcctgagtgccttcaggggaattttgtgtagtccacataactttgcattytaaatcacaccgtcctaaacatatcctccacatttgatgaaaacccttctatccatatttacatgacacagtaagactcagacaactgaaactcaattttatttatctaggttagtaaaaagaatcagcaagattgatggcacgctttaaaaggcacactccagtggcagtgggtttatggataataggatgagtctgggctgttaggaggattttacgatgctccaggcaagaggtaacaagaacctgaattaaagcggtgagacttaaaagaagcacagatatgggaggcatgttgaagataggatcaaaagggtttggcaagtgattgaaagtatggagagagggaggcagaaatgctaaagtggctttccaaaggcatgaggctgagttcacaggaggatgacaataacattacacagggaaggagaacccagaaagaccagtgattctggggctcagggaaaggcgataacttatttagaaaataaaaagaatatgcttagcttctatttgctgaagta

SEQ ID NO: 850511 - DNA, 523 bp, Homo sapiens
taaatgaattacaaaaggttttcaccaagaaaagctaagggctccttcttatgctatcttctcaattaaaaaaaggaatttgggccaggyttttcctcttctcccctcactctctgtttctcaattctataatttctaaaattcataaataacaaatatattagggactagttcttaacttttctcctcaaatatgtactagggctagtacaaccattagatagcctaaaatttgattattatatatctctcctcagaaatacccttaatagtgagtattttcctcccataggtgattaaaccaatgatattaacaatgttaggaaatacacagagtgtatttgaggaagtaattctcttctgtggctttagtaatgtggcttctttcagttcacttttcatatttcaaatcaagtcagatgatttcaaaaaagaacttatggaaatggaaacagttttatgttgttttgatataaccactgtttgaagcagaaatgcagaagcagatggtactgctgaacca

SEQ ID NO: 850512 - DNA, 544 bp, Homo sapiens
tagcaaactgagactcagagaggttaaatgaattacaaaaggttttcaccaagaaaagctaagggctccttcttatgctatcttctcaattaaaaaaaggaatttgggccaggcttttcctcttctcccctcactctctgtttctcaattctataatttctaaaattcataaataacaaatatattagggactagttcttaacttttctcctcaaatatgtactagggctagtacaaccattagatagcctaaaatttgattattatatatctctcctcagaaatacccttaatagtgagtattttcctcccataggtgattaaaccaatgatattaacaatgttaggaaatacacagagtgtatttgaggaagtaattctcttctgtggctttagtaatgtggcttctttcagttcacttttcatatttcaaatcaaktcagatgatttcaaaaaagaacttatggaaatggaaacagttttatgttgttttgatataaccactgtttgaagcagaaatgcagaagcagatggtactgctgaa

SEQ ID NO: 850513 - DNA, 609 bp, Homo sapiens
cgggagagcgcaaggcctggtagcctcaagtctgacttgagttgttgcaatgaagaatcatggcttcttacccracttccagatctcagcaaatgcacagaccctgggcgacttggttgaacggaggccagcatgacagcacactgtcaaccttcctccaagccatttccagggggacctgtggccttttactacagggagtgtgcaacaggggaaggaaatgcctagatggtttgaggattgctagacagtggttctgaactaacactaattcctgagggcccaaaattccactatgccccagcaatctaaaaggaggtggacagtgggaagatgatagatggagtcttaactcaggtctggttcacagtaggcccagttggtccatggaccccatccccactagtggttatctgtctagctcttaaatgtataattggaggagacatacttagcaactgtcagcatccctgcattggctctgtgacccatgtggtgagggccattatcacaagaagaacttagtggaaatccctgaaacttccacttccatccaagtgagtgaaccagaagctatactttatcccaggggaatttgagagattaatg

SEQ ID NO: 850514 - DNA, 609 bp, Homo sapiens
cgggagagcgcaaggcctggtagcctcaagtctgacttgagttgttgcaatgaagaatcatggcttcttacccaacttccagatctcagcaaatgcacagaccctgggcgacttggttgaacggaggccagcatgacagcacactgtcaaccttcctccaagccatttccagggggacctgtggccttttactacagggagtgtgcaacaggggaaggaaatgcctagatggtttgaggattgctagacagtggttctgaactaacactaattcctgagggcccaaaattccactatgccccagcaatctaaaaggaggtggacagtgggaagatgatagatggagtcttaactcaggtctggttcacagtaggcccagttggtccatggaccccatccccactagtggttatctgtctagctcttaaatgtataattggaggagacatacttagcaactgtcagcatccctgcattggctctgtgacccatgtggtgagggccattatcacaagaagracttagtggaaatccctgaaacttccacttccatccaagtgagtgaaccagaagctatactttatcccaggggaatttgagagattaatg

SEQ ID NO: 850515 - DNA, 526 bp, Homo sapiens
atctgaaacgcagaggattctccagggtacctctcttagttctcctgtgaccaatagtaatggtgtgttagcctgtttgctataacaaaataccacaaattgaatggcttataaacaaccraaattgatttctcacagttctggagcctggaaagtccaagattaaagcaccagcagattcagtgtctggtgagggcctgcttcctcatagacagcaccttctcgttgtgttctcacatggtgagagggataaagagcactctggggttttttttttaaataaaggcactaatcacagtcatgagggctctgccctcatcatctaatctcctgttttagtccattttgtgttgctataacagactgtcacagactgggtaatttattataaacagaaaggtatttggctcaaggttctaaaggctgagaagcccaacagcatggcgccagcatctggtgatggccttcgtgctgtgtcatcccatggtggaacgcagaagagcaagggcaagagtgagggaggaag

SEQ ID NO: 850516 - DNA, 574 bp, Homo sapiens
cccaggctcaagggatcctcccacctcagccttctgagtagctgggactataggcgtgcrccatcacgcttagctaatttttgtattttttttttttttttagagacagggtttcgccatattgctcagactggtcttgaactcctgggctcaagcgatctgcctgccttggctttccaaagtgctgggattacagttgtgagccatcgtgcctggccggagttgtccttttccgttggtgggtatattaatacagaggttacaatcattggctacaggtgacaacatatagactaacatgttctatgtacaagacaatcagtaaaacttcatgattcagaaacaaatcagtgtccttattagtgccagtggcttacgtattaattggtacgtcaacagttggaaggactcaagttaaaattcttcactcaggaacagagtgtaagcggtgaatcgttaagaacttccctggcagttaatttagaagcctgccaaatgtgacctgtaggttatcaaacatttatctgacaaataacttatatccagaatagacgaagaacacttacaactggat

SEQ ID NO: 850517 - DNA, 548 bp, Homo sapiens
tgagatctgcttatttaaaagcattttaaattgatattgtcaggggtcctactgttaaagtctaccagttaattatgctatggcagcaggacctacctacattttataacagattcatkgacaggaggcacagcaacataatttagaaaaatagaatctaatgattctgtctttttcagtcagcaggaggggggctccatgcagacgcacaaacctgtgtctgcaaaggtgcaagtgatttgtcactcaacagttataactctttgggaatatgggcagagatttgagggatttaaataatatagagggatagaaaaaggtattattgacaaacaaaagaagacatatgtttgaaaggagagaaaaataaaatgtttcagaaagataggactgcatttgggaattgttgctaaaaataatgtgtctaatttgagtattctagtccttttgtttttatggagatgaatcattttgatttggacctttttaatgtgggttgattataaataaatgctatggtttgaatgtttccccagaaggcatgtgtt

SEQ ID NO: 850518 - DNA, 628 bp, Homo sapiens
tgagggctacaccctcaagaagaataagagtttgatatygcaagttcgagtttgacctcttgcttgctctcaccctctcttgtccttctgcattctatcacctgccatgggatgatgcagcaagcaggcccttgcaagatatgagcccactgaccttagatgtctcaccttccaaaactataaaacacaaatctccattctttataaatttctcagtctggtattctcttataggcagcataaaatggaccaaagcaatgagagcacataggttgagattaaaaatacatatatattatttattataacttcagtaaaataacatttagaagtgtattttctgattgatatttaccatctatgttttacatgattgatgggaatccagggaccagaatacatttatcattaaaccctatttaaaaatctgtctttattcttcagtaattcagaaggctttcgcaaacttgcgggttggcaaggttttctagaatgattcctcagtcaaagtagaggtgagaaggactgctgatgaaagtgcagacttagggtaccaatttttctctgtcctttcatggagccagaatagtactgcagacacccaacaaacatgttttgatggctcttt

SEQ ID NO: 850519 - DNA, 610 bp, Homo sapiens
aatgtgatcaaacattaacattaatatcattcaatagtgactttggacttttggctgtttgcttccgagaaatgtgagttgtttgactcagtttagtcagggyttggagacaaaaaatatcttatagtgtaaaatagatgctttcttatctggagtaaaatctagttctacttcactggtggtggaataaaacatgtaaatatcatctggaaggccaagcctattaagatcaggagtggaggggtaccacgttatcaccaatataattaggagagagagctatataatgaataaaatcattttataagtctattttcattcaacattagtaagaataaatacttatacaataatataaacatggaaaatactaaagaaatgacatattttaccaatttaacaaagaccacaacacacaaaaggagacaaacaataaatcaggtagttacaatttagtttaatgacagggcaaaattatcgagacatctataggaatagcaagtaattcaaacacaactaaaggagggcatgtcaaagaaaaatgctgacaggtgctcttcgagctgaatgttaaaggacaataaaaattaggtgttcaaattagtggtag

SEQ ID NO: 850520 - DNA, 278 bp, Homo sapiens
agactgaaattgcagacatgttcataagcacaatgcttcttttctctttcttgtctttctgtrcgtaagcaactagaagccatttgtgtcaaggtaacgtctggagaaacaaaaggtcaggaaaggccaatgctcctaccgaccacaatccagccccaaactgcaagaaagagccagctgccccgggggaattcctgcctggtggggctccatatcgccagccctcagctgctcagggtacagccgcttgtgagaaccgagccacagtcctgcttcct

SEQ ID NO: 850521 - DNA, 536 bp, Homo sapiens
aggctaagtcacgagaatcgcttgaactggggtggcggaggttgcaatgagtcaagattgtgccactgcactccagcctgggagacagagtgagactctgtctccaaaaaaaaaaaaaaaaaaatcaatggatcataaaatcaaatggatcataaagggttcacttccgagctctctatcctgttccattggttgatatatcatttttttgctgttttttttaattaaaaaaaaaagaaatccaacacatttataacttttaggaacatacagactgtttaaggtgagacacacttttgaaacttaaacttttttgtggtcattcatcactgatattacagtaagcctggatatgagtaaactccagtatgataaacataacattagcatataaccctcactgcccaaagaaatctgattgtatcttacatattattaaattaataaagctcccccctaatattaagttgcygttattgactgaaacttggatctgtgtttggtcccaagtgcatctctgtagcctacctttcaaa

SEQ ID NO: 850522 - DNA, 627 bp, Homo sapiens
ccctacttaaagtcacagagctagaaagtgactggaaggtgcctacatttatgttgtctaaattcacaacccaagctgtttcaaatatttcaaagtgcttctaaaattagaaattccaggtgacttacaaattgtgagttggggtatttatatatgtggaggtgaaaacaaatccctgtcgatgtgacgtggaattgaaatcaaccataacttggctcagagatggggctctgtgcaggtggtaatccaagctgtcctcgaaggtgagagctgttactaccattcccgatgttaacagtggcctgagcttatacactagaagagtctccatcagaaagagaagaagatgttggaagcttcagcagatgggctgtttgcctctcactgaaaagaacagcatcgtatcagggtctgctggggttttacaaagcccagatagagacaagagttgccgcacaacccataggagaaaaattaagcaaactaaaacctttcttggagagcagagcttccatataaagattgccacttggttgcttgctggcatctctccgcgatggcagattttcacccgaaaccaccagagcccgccycaccccttatctctgcgctggccctggtggagac

SEQ ID NO: 850523 - DNA, 647 bp, Homo sapiens
taaacaatgtctgacctatagcctttgaggtaggtttctgatgggaattgcagatgatggagccaccttctgctttagggacctcccccattcccgggtggacaccgccccccccgcaacctgctctgcttcatgcatagagggaagaaataactattccctggagatgccgcatctgattcataaggaaaaaaaaagggatttgaggggaagataataggaaggattttgttttgtttcatttttttctcatttcacattttatttgtagaagtttaatgactagatatcaatgttctcttttatttatctactttcaaattttaatgaatacttctggctataattacctaatttttatacttaaaatgactagacacctgtagttcagagcacattgtattccagcatgatggcttatggtatcaagtgctgcatatatatggattaatcaataagcaaattcaattcttatgaggtgcagttcattctttaaattgaagaggcattgacaacaggagggagagggtttagtgctactctcttaggatgagaatctaccatgaatgtgttcacttctctgttgytcctttattatccagggaagtggcttaatattttctaagagtggccattgtaagcaggac

SEQ ID NO: 850524 - DNA, 606 bp, Homo sapiens; identical to SEQ ID NO: 825005

SEQ ID NO: 850525 - DNA, 636 bp, Homo sapiens
acacatgcgaacttcctggatcggcatccaccacatcaatcccactgagtgagctcccttgctgttgcatgggatggtagtgtccacatagcacagaggaaaatctgtgtgacacagagcaatggtaggtasgttaacataagatgcctctgtgagaggctggtgatcagcactgggattagtcaccataagaagctgtggctcctaaaaggctgcctggatctggttaatgaaagttccaggagtgaagcagccagcaactggagtgactccagtggcagcagcaaacttcagcatggccttcggaccagtattcctggatgatatgacactgacattgaaagagttttcaacagcaacaatggcacaagctcccaggagaagcttctcccaggtcctcttcagatttatgatgtagatgccaacacttttccttttatagatgtactgtcccatctggaagacaaagctggtgctacctaagtgggttcctcctgcaaggaacttaaggacatcctcctccttcatttgcaggacatagaggttctagacattgtgaaagtttccctttaagttacgatgggaatccagaacaacatcataaggatccttctctgggtagtgcagaaagccctc

SEQ ID NO: 850526 - DNA, 636 bp, Homo sapiens
acacatgcgaacttcctggatcggcatccaccacatcaatcccactgagtgagctcccttgctgttgcatgggatggtagtgtccacatagcacagaggaaaatctgtgtgacacagagcaatggtaggtacgttaacataagatgcctctgtgagaggctggtgatcagcactgggattagtcaccataagaagctgtggctcctaaaaggctgcctggatctggttaatgaaagttccaggagtgaagcagccagcaactggagtgactccagtggcagcagcaaacttcagcatggccttcggaccagtattcctggatgatatgacactgacattgaaagagttttcaacagcaacaatggcacaagctcccaggagaagcttctcccaggtcctcttcagatttatgatgtagatgccaacacttttccttttatagatgtactgtcccatctggaagacaaagctggtgctacctaagtgggttcctcctgcaaggaacttaaggacatcctcctccttcatttgcaggacatmgaggttctagacattgtgaaagtttccctttaagttacgatgggaatccagaacaacatcataaggatccttctctgggtagtgcagaaagccctc

SEQ ID NO: 850527 - DNA, 576 bp, Homo sapiens
aaacttgaggtggacaaaaaaaaaagcacaactctaagactccgatcccctggcaaatcagtgggaatgcaggtccccgaggtttcggggaaggatcgcgccgaggcttcaatccagatacacaccctgacaatgggatctcaataaggaactacccaggaagccgtcgccgcagcaagtgcccaggtgatccttatcgtgggcaagtttggaaccgcagtaccccgagaatcccgcgctgggcgctcaggcgagagggctccgggctcccgtccacgcccacccggggcgttctaggagggctgcgcgctgggagcgggaagggcccctggaaggcggctgcagcgagttccggggctgagaggtcgctgccacccaggaagccccgactgtgccccacgcagggcctcggcagggcggcaggctagggcgggttcggaggtgacagcgcccggcttcctgcgccaaaagtgaggcaactccggaaacttcctggagccggcgcgcgtttcctscaagcaccgcccccgccgcccgcacgctctagcagcccgcgggcgcactgacctgagatgg

SEQ ID NO: 850528 - DNA, 333 bp, Homo sapiens
aggcatgattgttgacatttttatacaaactgatcgtcagctctagtaaacttccacaagagacctcattctatatattgtttgactccctgcttttttcatttagtcttyatgaacattttaaagctctcgagacatacagccaaattgctttcctttcagccgtacattttggtatctgaaaacttgctgtgcagcagcaccatggcaggttctgggcactgaatccatgagcagtgttgtcatggtccctgccatgtgtggagctaatggtccagtctgccagagagccacactgtatgcataggggtgtgtgtgtgtgtgtgtgtgtgt

SEQ ID NO: 850529 - DNA, 333 bp, Homo sapiens
aggcatgattgttgacatttttatacaaactgatcgtcagctctagtaaacttccacaagagacctcattctatatattgtttgactccctgcttttttcatttagtcttcatgaacattttaaagctctcgagacatacagccaaattgctttcctttcagccgtacattttggtatctgaaaacttgctgtgcagcagcaccatggcaggttctgggcactgaatccrtgagcagtgttgtcatggtccctgccatgtgtggagctaatggtccagtctgccagagagccacactgtatgcataggggtgtgtgtgtgtgtgtgtgtgtgt

SEQ ID NO: 850530 - DNA, 542 bp, Homo sapiens
atgtcttgtcagcctctgtgtcccaccacacacctacaatggcctgacacataggacaatcaattctcattatttgcggtaattatgttccgtaaagtcactgtgaacactgaatcctcactcataggggaaatacagggttaggttcctgcaagcctctggccacatcttcatcagctgatcaatacaaaaccttgttttatgtgtgtttctttctaaagatgccttatgtgataaataccattgactcattaacattgaactcatggccagcagcactataactcacacccgagcaaagcttaacacatactttctccataaggcacatcacagctttttcacaccgaggaacactagacaggtcttcagcaccacaccaggggggcattttaaacagtgaagtcaccaaaagcacaaaaatgtaaaaccatggcactaagtagaccaagtaaaggacacttgttgacagtatgagagcagctgcttgttccatctcagctgggactgtrcataaagggcaactcaaaatttctgccact

SEQ ID NO: 850531 - DNA, 559 bp, Homo sapiens
aaagctcattaagatcctacagagatggaatctgagtatgaagtaggtcamattcagtctccctgatagtgcccttcaggcattgccaacgtgggcttctcgctcagcagaggtgggttgtgtgtggatggattcctagactgcagcatgggctctaacctaatgagaaggtgcctacacaggcctgcagccagaagtcctgattttcacgtaaaatgccctcagttccttcaaatcttcagatttttcctcaggtaaagctttgtatcctaggtgcttggtattaggcatctgcttgttggaaagtaagagagccacatccgcaactgcaagagttgggagactccagcggcagtaacaacccaggggatcacacaaaggtgagcgtgacaagaggagaattttttttcccctctggcaccctggtgtggcaggagggtacgggtagggactgggggctgtctagaggcctggtcttttctcctccccactcttcacctgttgccaatcctaggtcctggaagaatgcctgacacgcatcctcaggttgactgacaat

SEQ ID NO: 850532 - DNA, 486 bp, Homo sapiens
cactttgccacagcaatgtgaaacttgatatactgtggtatcaagggcattcagtcacaggaatatgttcttgcaaacaggtcttaagggcagtgggctagtatggtttccctaaacagacactgtgtgtatgtgcacatgcaaatgcttttgtgtgtgtgtatatacatatgcagataaatgcacacagcctattcaaaatcattttggtaataactttgattctgggagttgggtgctaggtaaagctaagtgtaatttttgctccaatgccacatccttttattcaaatcatagttttcttggaagtttccaaaaccgctaatgcaaatgacatattcatctgtagaaatttcccttttagkaggatggcaatatgccaacaaaggtgaaatataaagcatatttttaaaaagagctttaactagtcctgcattttatagatctgctttgtgacccttattttatcatgtccatttgctgctt

SEQ ID NO: 850533 - DNA, 510 bp, Homo sapiens
tttctttctttctttctttctttctttcaggttctcactctgtcacctaggctggagggcagtggtgcaatgatggctcactaaggtctcaaactcctgggctcaaagaatcctcccacctcagcctctaaagtagccaccatgcccagctatttttttttttttattctttgtagaaacagggtctcactatgttggccaagctggtcctgaactcctggcctcaagtgatccttctgcctcagcatcccaaaatgctgggatctaagatccaatctaagatccagctgaggcacaagccaccacacccagcctcaattggatcttagattttggtgcccagaagtgtacatgctacaccaggggtgggcttgaataaagcagagtggaaggggacaatcacctscctccccagagtgcacgatgtcctattactagtatgtttaataatactaatattagtataatagtatactaatattattagtatatcttaggagacattactat

SEQ ID NO: 850534 - DNA, 635 bp, Homo sapiens
aaaacatgcagaaaacatatagaaaaagagcaaaagtaagttcttccttaactgcctcaaaattaaatggattaaamtctccaatcaaaaggcagagtttgaaagaatagatattttaaaaatgatccaactatatgctgtctccaaatgacccactttagatccaaacagacacaaataaatttaaagtgaaacgatagaaaaatatatgccatgcaaacagtaaccaaaagacagctggagcagctataggtatcaggcaaaatagacatcagtcaaaaactgtcaaaaaagacacagaagggcattacatattgattaaagggttaactcatcaaaaagatttaacatttataaacagatatgtaccaaacaacagagtcccaaaatatatgaagctaacaccgactaaagtaaagggagaaatagataattctataataacagctggaaacttgaatatacaactttcaataatggataaaacatctggacaaaagatcagcaagaaaatagagagtattaacaattgtataaacaactagaaacagacatatatagaatatcatatgcaacaacagcaaaatacacattcttctcaagtgcacatagaaaattctctaggatggaccatg

SEQ ID NO: 850535 - DNA, 659 bp, Homo sapiens
cagtgcccgtggatccaagaaagccctgcttgtcagatgggaataccatctrtacagatgatgccccgcacatgcaagagcctggcatttttgggccagggctaaccagggtaaagtctgaatcaccccatgtggaatccgtctcctacggggtgtggactgtggggcatgaattccaattgcgctttccttacataactttgctcttcagatccctggttccgaatgtggggtgtatgcagtatggcccactggaagtacatgaaaatgctagaaggtgaatctacatgtattttttgatctaatgaaaacaagcaggaaaataagttgtactgacaggtaatgtgcagactgatactgctgtcttgactcagactgtgttgggcaattgtctttccctgtgaattccgtgaagaaatgaacccatccagacccatcccatggcaataggattgatggtgccaacctcccatgtttgttttatgccccctgtgttgtgacgtggggcagttaacctatttctggcttaaacagtgtcaaaaataaacaaagccaggcactagttaaagtggtaagaagagacttcaatcagcactttgatttgtgcagcagtgactaggcattttaaaggaagaataagggaatgaggagaggtgtga

SEQ ID NO: 850536 - DNA, 659 bp, Homo sapiens
cagtgcccgtggatccaagaaagccctgcttgtcagatgggaataccatctgtacagatgatgcccygcacatgcaagagcctggcatttttgggccagggctaaccagggtaaagtctgaatcaccccatgtggaatccgtctcctacggggtgtggactgtggggcatgaattccaattgcgctttccttacataactttgctcttcagatccctggttccgaatgtggggtgtatgcagtatggcccactggaagtacatgaaaatgctagaaggtgaatctacatgtattttttgatctaatgaaaacaagcaggaaaataagttgtactgacaggtaatgtgcagactgatactgctgtcttgactcagactgtgttgggcaattgtctttccctgtgaattccgtgaagaaatgaacccatccagacccatcccatggcaataggattgatggtgccaacctcccatgtttgttttatgccccctgtgttgtgacgtggggcagttaacctatttctggcttaaacagtgtcaaaaataaacaaagccaggcactagttaaagtggtaagaagagacttcaatcagcactttgatttgtgcagcagtgactaggcattttaaaggaagaataagggaatgaggagaggtgtga

SEQ ID NO: 850537 - DNA, 565 bp, Homo sapiens
actagagatcagctagatgcttctctgattgaagatttccataggctgatccagggtcctgatcctgaaacattaagcctgtttagatccactggaacaacaaggtggaaagcagccacaatggcaactaaactttctctaattctgtgttacttagttcacgagttaaagccaaatattcaactaaatattctcttacttctcaaatctaaatagatccagtaagcatcaggtcttctatcagctaagaaatacagctgttacaagagataaatgcaaaatctcacttaaaaaaatgaaataaaattcagaattagataataagaaacaaacagtaatcacaggttatatgattacgtacataaaaacattcaacataaataaactttcagaataagagattagatatccattgtacacatatatgcattttatttcaaaattaaaacaataaatggtttttcttttctaacagattctaatatttgyatggaaatacaatagcctaaccacaaccaaaatgctaattaagaagaaaatgggaggaacatgtattgtcatatat

SEQ ID NO: 850538 - DNA, 559 bp, Homo sapiens
catgccgctaaatgcatacatctttaccaaacaaaatgtctcttaaacttgtccacacttatttaactacagagagtaaagtagaagatgacaaggtgtattggagcttgccttgaaagcaagttgacttttgaactacaaaggaaatttactttacctatgtttagaagttaaagcttggcataataaaattgcataaaaaataactacagactgcgtaagaaacaaccatacttatgacaaaaccagaagtcagcttcacttaagacacgaaatgctctatcagtgcttctctacacacttggggcctccatctgacttattccaaagccctgctatgtcccagattgaagagaaaaatatgaagtgctcaaagtgattcattgtggtgtcaaaatatattagaattcctatttatttttttatctkaaaaagaacaacaaataagtttgctcatattttacatatagattgacattggaacctccactcagttattcatatgtacagatagttctaaactgatgatgggttacgagtctgactgaaagaagagtga

SEQ ID NO: 850539 - DNA, 497 bp, Homo sapiens
ctagaaaataaaagaaccttagaatccatccactgagatgaattcaaggagagtctgcttgaaaatgaaataaatacttcaagatgtttacagctggggcmtaaattaaatatctaacattaagaggaaacattgagataagtaagaagaaaaaacaactgatcatgatcaaaatgagagtagaaggcattggatgaagaacatagattagttttaaatggagaagtattaacttttcttctgaaactgtggtaaagaaagaaagaaaggccgggcgcagaggttcatgcctgtaatcctagcactttgggaagccaaggcaggcggatcacttgaggtcaagagttccagaccagcctggccaacatggtgaaaccctgtctctattaaaaatacaaaaattagccaggcatggtggcgggcgcctgtaaacccagctattctggaggctgaggcaggagaattgctggaacgcgagaggtggaggttgcagtgag

SEQ ID NO: 850540 - DNA, 584 bp, Homo sapiens
tgattgtgacagcaattatagtaatacagcaataactgtgtatattaaatgatcaaggtgtgttaattcattagaataagttatccactaacctsatagcaaccttacaagattgttattgtcattctattttacatatgactaaagtcgtatgaaaactcactcatatgaaatttgaacactttccattttcattgggatatgtgcataaactcaagaaagtcatacttatgaaaagtataatctataactgtgcattaaaactttaactgtaattagttgtgggagacctccaacatattcaatagttgcctctaggtatctggaagttgtgagaaaatgcattaaagaacataatttgtatttgaacagtgacgctaagtgggatatagtaaaaatacaactttatgtttttctcccacactttctttaatacttatgtggcagggaaactatttttcttataactaaatgaaaactctggccaagcccaaggcttctctggtaacttgtatttaatagatagtcctgtgatcaattatgatcatatcttcaaacccaatttcatttcagtaatttaaatg

SEQ ID NO: 850541 - DNA, 288 bp, Homo sapiens
ataaaaaatttagtgttctataccattgtaggatgactgtagttaacgatagtgaagtttcgaatagctagaaggctgtcgaatgttcccaacacaaatatgataaatggagatagtgatatgagataatgataaattgagataatggatatgctaattacactgacctgatcattatccattayatatatagaaacgtcactatgtaccccataaataagtacaattattatgtgtcaattgaaaataaactaaaatgttacaaaaagaaaaggctctataaataag

SEQ ID NO: 850542 - DNA, 568 bp, Homo sapiens
agaacagtagcacctcagggtatctaagcttatataggtwgccaagaaggcatattccagtacattaaattctatgcatatgcatttgcaactagatcattaaaatgcaagttttgattggatatgccttctcctctttatcattttatgattgatttgatatgatgtcctggacataggggatatagttaaatgtttcttaaataaaggaagggcatttttattcagtaaacagctaaggggatactcaaaaatgcatatttaatggaagacatatctttactcagaagattctgttaattagatgatatactatagggggccaagggatacagaagttgtgatcaaactaggagaaagaaacccctgatgctcaaaaagcagttttatctttgatagtttatcgtgaatttattttcgtctaggtgtgacagcatgacattttgtcaatgttgtatacattttattgcaattttgttgaatcttaacagcacaggtattactgatattgagccgctaaggcctcagggctatacagaaatgctgggtttgtgcttgaattggacag

SEQ ID NO: 850543 - DNA, 571 bp, Homo sapiens
gttgccattttgggggtgctttcatgtactaggcctstgtagggctttagggctttttttttttttttttttttttttgtggggtgggaccttgctttgtggactgggctacagtacagtggtgtgatcatggctcatttcagcctcccgagtagttgagactacagacatgcgccaccatacctggctaatttttaaattatttttagagacaaggtcatgcagtgttgcccaggctggtctcaaactcctgggctccagtgatcctcctgccttgacctcccaaagtgctggaatcacaggtgcaagccattgctctgagcctatagggctttttatatacactttatcctgtaatcttcacagccactctgtgaggtgaacggttagtcctagtttatagatgaggaacccaaggcacagacgttaaggaatatgctcagagctcatgagtggcagggctcaaatccatacccagagctgtctcgcaaggtgttctgactctggctcagttgttcctagatgagagctttcctgctccaaattctcccctccctgtagcagatcaatt

SEQ ID NO: 850544 - DNA, 429 bp, Homo sapiens
aacgctcatgagccaacaatagagagtaaacgaggtgtctttacgtggatacagacaaagcaaggttaggtattaatgagtagtcagtatcttctgggccccacctcacaggctgtgcctcatgctccttctgaaccactcctcatcctcactgcagctagacctgtggggacagggcaaacaagagtgtctgaggcaggggcagggtgttcagccacctgtcagctccggctgggagagggcatcccaacgatatagtgtccagctccagtggcaagagctagtgaggccgtgcagagtttggcctcagcttcaggtctcgcatggatccagctttgcaacctgggaaactcctacggagctgccctgaggctggggctcctctgcccgtgccrtgactttagacaatgtgcatggccaagcagggca

SEQ ID NO: 850545 - DNA, 526 bp, Homo sapiens
ttaaagtgtgcttttgttgaaagtacatagttgggccccgctttttttatacatattatagtctgacaatatttgcctttttttagagtattttctgtattagcatttaatgtaatttttggtacagttttgtttaaatctgccattctgatctttcactatttgttttccacttgtcctctttcttccttttctttcttttttctttctttctgtttctctttctttctttctttcctttctttctctctctctttctttctccttccttccttcctgctttccttccttccttgcctgttttctgccttattctaggataataaaatattagcattctgtcatgattcctctattgagtttttaaaatatgcctacctcaagattgcaaatttgtaccctattatctgatgactgaaaacaattgacttgtatrtttgatctagtgagagaactagtcttgtatgagttacaccaccatatttggaagtggaagtttttcattatggtttctcaaatggatatt

SEQ ID NO: 850546 - DNA, 479 bp, Homo sapiens
taggtagcagctttctgggtggcctgggcaccagcatgggtctgggtgaggtctatgctggggctggtgatatgggaggcatcacaattttcactgtgacccagagtctgctgagctccctaaargtggaggtggatcccaacatccatgctgtgaacacccaggagaagaagcagatcaagaccctgaacaagtttgcctccttcattgacaaagtgtggttcctggagcagcagaacaagatgctggagaccatgtggagcctgcagcagcagaagacagctgggagaacgtggacaacatggagagctgcatcaacaactttctgcggcagctggacacatgggaccagaagctgaaggtggaggtggagcttgacaacatgcaggggctggtggaggacttcaagagtaagtaccaggatgagatcaacaagcatatagagatggagaatgaattttcctcatcaagaaggatgt

SEQ ID NO: 850547 - DNA, 615 bp, Homo sapiens
taccagccagtgcccagtgccccttctccaagtgcaatgccatcacccacctcatggcatgagagtgaggatttgaagaactgatatgaataaaacccctcccacagcgtctcccacacagtggccggtgacactcacatccgaagtcctgtgtaaaacccctcccacagtgtctcccacacggtggcaggtgacacacacatctggagtcccgtgtaaaaaccctcccacagtgtctcccacatggtggcagggatacacacatccagagtccttgtgcaggtgcagcctcagggctggagagaactttagaggcccttggaggtctcctccttccagaggttgctctatgaagaccacttgtttcaggaggccaatttctttcatctcttaccttgctcctttccaacttcaccactggtctctccactcaatggcttaagaaaagaagatttggggttggagtgtgtagtgcacatcaatttgaagtgcttcccaagcacctagtttcctatctgccacccaacagaatccytatttccttcagccaagcaggaataaattgtaagtgaggttggtcactttgggatccatctggcttaagccaatgatagg

SEQ ID NO: 850548 - DNA, 539 bp, Homo sapiens
tacatgtgtagaacatgtaggtttgttacataggtgtgcgtgtgccatggtggtttgctgcacctattgacacgtcctccacattctcttayctcatgtgcaagtctttgtatagacatgcactctcacttgtcttgagcaaatacctaggcatggaatggtgggatcacagctgtaccattttacattcccaccagtgctgtgagagagttccaattcctccacaccttgccaaattcagtatgtatgatcagtccttttagaaatttattctgtctctccacacagtcacatacaaatagcccttctgtactgatgagataaatgtaatagacaatgtttttaataaattaaaatatagcagaatatccattcatattcagaaaaatagagataaataccagggaaaatagtcaagagttaaggggattacattttagaaagtgggctgagaaatgataagaaaagggcaggatacagtagtaggtatttattacatttttaagaatatttaacattttaagacattccatgggtta

SEQ ID NO: 850549 - DNA, 629 bp, Homo sapiens
aaataactggcaaatgttagaatcatttacaagtaagaacacactacattaattcatgtgcattgaatgatgtggagtctagttattgccctgattaccaaatgaataaaaccttgagaggcagggtgaaataaagtacatggcctttggctacaaagagcctgggtttgtatcttgacatcgccatttatgagctatgtgatatgagtataaggtaacattataaaacttcagtttcttcatctttaaaaatggcattaaaatgatactacttcttaagattgttttgaggagtatatgatataaattctaagtacagtgccaggtacaaaagtgctcaataaagttaagctattattattaccttggtattcattaccattaccataaaaagttctaagaactaaaaattaagtattatatgaaattttaattttgaaaaatactttgattttattaatatctcaggacaattaaagcagtcaattattaaaatccaaaaagaattcaaattattttacaatagagatgtagaaaccaacttccakttgccatatttgttaactagcatataatggccacactaagtttcttttgatcactattgttatctttacaaatgaattaca

SEQ ID NO: 850550 - DNA, 534 bp, Homo sapiens
tgcagcaaaaaatactgagccaaaaagaaagctctatgaaatgaaaatagtactgtgaagaactcttcaaagaaggcatcacttcagatagatttatactggctctaaacccccaacttcccaattacrtcatcataaaaatctgcacaccaaacagcagcacctcagaatcttcacgtttctctttcttttaaattcaagcatgaatgactcattattgggtgagcctatatacagaaatccttcacaatactgggtaattgtaacagatatattaaaggtataggtaacagatagatatgttaaagaaaaccaaaaaattctagcaaaaactttttctaaagaaccgtaactccaattacaacacagcagtagcagctgaagagtgatgacaaataaaatccctgaataataaacgccgaggtaggctctaaaagaattgctaattatttgagccaaagaatacacaaatttcacaaagaacagtacatttgatcaattgtccagtttatcaattgggatgttcaatattaa

SEQ ID NO: 850551 - DNA, 604 bp, Homo sapiens
cctccaatggataccaggaacatcccctgctaaattggtgcctcttaactgacgggtgtacaatctcaaaatccagtgattacaggttatctctgtggccaggtccaatatggtcaggctcctagactcatcccattgggctatccatggatctgaactcatatgtgtcttggacccacagggatcaatccttagtccaatagatcccagcacctagatgggtccccatgtccagttaaatatttaccacataagaaaagcctggcctgagcccagaactgacttcctgggctattcaagtgctttagaaccagatgtactttagctgctccggaaggaggtattggagaactttcatctagagcttatcacattccaggttctttacacaggttatcttgtgacaaccccaagaggtgtctgttatcagccacattttacaaattaggaactaaaggcacaaagggtttcaggaatttgtcaagtcagtaagtgttgaaatcagcattcaaatacagrtctaactctaaaactctcatcttttcattttatcatttggctactgagctactcaagctacctctggtgagaggcaaattgttaa

SEQ ID NO: 850552 - DNA, 599 bp, Homo sapiens
aggcaagttttagaacaggagtgaaagtttattaaaaagctttagagcagaaggctgggtgcagtggctcatgcctccgaaagtgcctgtaattgcagcactttgggaggccgaggtgggccgatcacttgaggtcaggagttcaagaccagcctggccgacactggtcacagccagtgccagggaaaggcagtctctcaatagatagaaaaaacctgaagccaatagatagatgaaactctgtctctactaaaaatacaaaaattagccagttgtgcacctgtagtcccggctgttcaggaggctgaggcaggaacattgcttaaacccgggaggtggagattgcagtgagctgagatcacgccactgcactgcagcctgggtgacagagtgagactccgtctcaaaaaagaaaacataaataaataaaactttagagcaggaatgaaaggaagtgaagtacacttggaagggggccaagagagtgacttgagaaatcaagtgccyggtttgacattttgacttggggttttataagttggcatgcttcgggattcttgccgtcttccctggttcttccctcggggtgggctgtctgc

SEQ ID NO: 850553 - DNA, 618 bp, Homo sapiens
attattgatcatttagaaaagtttcttttagcttcattatttagctataatccattacaagtaatgccatgtatatttttaggattatcgtcaaatttggtaaagcctctatcaaattttttttgtatattggctgtaagatttaaaggcatttcaagttttcttggacagtgataaatcttaagttctctttgaattggccacactcattaaccagtttgtcttcaatgtcttatttcaatggcatatgagtttatattatctttattgataaatttaaattttcttccagtgagtgacatgttatcagccttcatcaagatcagacagattgtgtgtagtactgctaagtttgtaccctatacgcagtaattctgataaactcaattttgtaccattcccattgaaagagaggagaaaactgtgaaacagttgtaattgtgtatatggcatcattgagtatattcttcacaagcagaacttcctttttgaccaggaagatgaaaacagacttgtccctccttaacarttttacatatctggtgactagaagcatttccaatagactgacttttatctccattcatttcaagccttgtttccccttcactatccata

SEQ ID NO: 850554 - DNA, 569 bp, Homo sapiens
tggatttatttttcaatataatttggagaccctttgttatccaaataaaattgatgagtttctgtgcctgtaaaaaaaaaaaaaaaaaaaagaaaagaaaagacactgttgcatgccccaraaagcttgtggtgggtggtaagttctcacgagatttatttatctgagcaacattgggactgagggaacatctgaaagctaccatcttgaaaatttttgaggaagtgtttctgaaatatttaaaaatacttaagtcagtcattttgaacaaaagaaattgatacaataagtttttttttttaaggatgattgtctaattttgtaatatgttgttttttaaaaacctgtctgatggtgttttatacatttctaactttttacctgagttatctctttagtcttttggaaaataccctacacaatactaacctttaaaactatcaaatttttgttataagataaatgttatctttgtactagatagcaaccctttataaggttgtaaggtataataaactgcttatttttttacatacttcatatcaagcattttgcagtccaattatata

SEQ ID NO: 850555 - DNA, 587 bp, Homo sapiens
tacagagtggtatagtggacactggagactcagaagtggggaaggtgggaggagagtgagggatgaaaaactacccattgggtacaatgtacaccactcaggtgacagatgtactaaaatcctagacttcagctgggcgcagtggttcatgcctgtaatcccagcacttcgggaggctgaggtgggcgaatcatttgaggtcaagagttcaagaccagcctggccaacatggtgaaaccccatctctactaaaaatacaaaaattagccagccgtggtggtgggtgcctgtaatcccagctactcgggaggctgaggcaggagaattgcttgaacccaggaggcagaggttgcagtgagcccagacctggccatctggccattgcactctagcctgggcaacagagtgagactccgtctcaaaaaaaaaaaaaaaaaaaattcctagacttcaccactatacaattcatsgatgtaatcaaaacccacttgtgtccctactttttttttttaaggcaagaaatgaagcaagttaacctcagctatttagcgcaggcaagctcccaggagaaaggtcacagagcatgc

SEQ ID NO: 850556 - DNA, 613 bp, Homo sapiens
atttatttttaaagttttttgtagagataggctctccctgtgttgccyaggctggtctcaaactcctgggctcaagtgatcctcgtgctttggcctcccaaagttctgggattgcaggtgtgagccaccttgcctggcctaaatctatattttaaataatcttttagtaatttcttatattttggctgacttgtaaggtctgatttggttgtcataatttctaccgtagatgttgctaagaataaaagaaatgtcatctctgccattttatgattggcttttgctaatattggtttgagggaatattgccaatttttatttaatcaaaactgaatctgtaaatccacttaactgggcacataaaagctgcttccgtatctttatatactgaaattaataaatgaggactgttgtcaacccttcctcattgcaaatcttctacatttccctcagagtacttttctacctctcacaccaggcagtgatgtcagtgtcagtttgcatattgaatattagtaaagcttaatttcttttttttggagactgaatcctagagcagtgttcctcagagtgtggtttttgggtcacctatgtcagaattactttgaggtgc

SEQ ID NO: 850557 - DNA, 598 bp, Homo sapiens
ttttttaatggctgagtagtactccattgtgtatatgtagcacattttttatccatatgtgtgttggttgcttccaaactttggctattgtgaagagtgctgcaacaaacgtgggagtgcagatatatccttgatacactgatttcccttctttcaggtatatacccagcagtgagattactggatcatatgataactctaatattaattttttatgaattgccttcaaacttttctccacaacagttatattaactgactttcccaccaacagtgtatgagggttcccttttcttcatatcctcgctggcattttttattgtgtgtttttggaaaaaaaacacattttaactagggtgagatgatatctcattgtagttttgatttgtttttctctgatgatcaatgatattaagcaccattttatatacctgtttgtcacatgtatgtcttcttttgagaaatgtctattcagatatttgacccatttttaaccakgttattagattttttcctatagagttgtttgagctacttatatattctggttagtaatcccttgtcagatggggagtctgcaaatattttctcccaccct

SEQ ID NO: 850558 - DNA, 614 bp, Homo sapiens
ttttcatttttatcttattgtactgtctatatcttgaacaattcttgtaattattattttattggatcaycttctagtctttctacttaagtgtagtttacacaccacagtaatagtattataatattctgtgtttttctgtttacttactattaccagagagttttgtaccttcagatgatttcttattgctcattaacatcatttttttctgactgaaatactgcctatagcatttcttgtaggattgatattgtgttgatgaaacccataagtttttttttttttgtctgagaaagtctttatttgtcttctgtatttgaagaatatttctactgcttatactcttctagggtcaaagttttatttccttcagcattttaaatatgttatgccactgtcttctggcctgcaaggtttccagtgaaaagcccactaccagaaatgttgcagagctccattgtatgttatttgtttttgtttttctcttgttgcttttagtatcttttctttatctttgacctttgtgagtttggttttaatatggcttgagattgtcttctttggtttatgtctgcttggtcttctatgaccttcttgaacttgaatattgg

SEQ ID NO: 850559 - DNA, 454 bp, Homo sapiens
ggtggctcactcctgtaatcctagcacttttgcagtccaaagtgtattacttgaggacaggagctcaataccagcctggccaacatggtgaaaccccatctccattaaaaatgcaaaaatkagccagacgtgctcgcctgaacccaggaggcagaagttgcagtgaaccaagattgtgccactgtactccagcctgagtgacagagcaatactcagtctcaaaaaaaaaaaaaaaaaaaaggatcataaagaagagaatgtatttatttcttaagtggaagtggatcatcataaatgtatttattctcaatgtcttcatattaattaggctggggaagagaaggaagagaaggggttgatcttgctgtcttagagatggcagaggtagaagaaaatccacatgtaagtggacctatgcagtttaaacccatgttgttcgagggtctgctgtagt

SEQ ID NO: 850560 - DNA, 635 bp, Homo sapiens
tgcagggatatagtatgtcagatcaggaacaaaaaggagcataacattgaatcaggatgaatttatccaaatgggttgacttacatagaaattctggactgtagattcattrtgttatcttgataactagaaatgaagaataagtttggtttaacttaagcacagattcatacatggcctatattaaatgggtttgaagtagcacagctccatgtaatatatgggaaggaatcacaaagcttatggagataggactatccatgtgcctgcaaactgcttaacatccaaaaaagcattttacgtggattgaccaaaaaaatattccttcaaaaggcattaggaaatgcattgaggatatggcacggtgtggggataatatctttgagaagttttgcaatgtctccccactactagcagaatataattgtgagagatgccactgttcaaatgggtttcccgatttcagtgacataaatttctgaagtgacaaaaggcaagctgcatatctttggcactggagacaacgtaggcaagcttactagaatgaaaagaaggttgatttagtaagcagaatgttttaacctgcaaatgtttttgtcagtggctaatggatcatgatatgctgaagactgaaa

SEQ ID NO: 850561 - DNA, 665 bp, Homo sapiens
atgtgtgatcaggttatattttgcctgaaaactgatgtgttcttctcggtacttcaatgatcttttactgttgttgttttacttcttctttgatggctctttcccttaggaagtcatataaacatgagccatacactaacttaggcaaagattatcagagggaaactagagaaaaaagactatatacattttttaattttcaagtttcaaagctgtggtccaagtgtaaaacaaaaaatattttagaactgatccaggtcatttcttgctgcttgctgttagatcaaaaattccgtggacttcaaaatgggtttaaagggaggactggactatgtgtgtggtaatcataaagaaactcacagctccactttcataagtgccaattttccccaggaatgtcatcggagccattgtctataaaccagcagtctctatacaagagctcagtaccttatccttgccaaggctatcttaagtctagatgtccctaactggtgtctgacttccctctgtggaagtttaaatttcattcaacagtaaagcctgtacttgtcctgaaatatggctcattcactgtttcatgtatgctgtgtagactacatattttccaatgatctaggaaaatatttttaagatgctcrtaacagaggcaaaactttggatcc

SEQ ID NO: 850562 - DNA, 602 bp, Homo sapiens
ttccaaatgacaggatttcattaatttttatggtggaatagtactccattgtgtataggtaccactttttttttttgagacagagtctcrctctgtcgcccaggctggagtgcagttgcactatctcggctcactgcaagctccgccccccgggttcacgccattcttctgcctcagcctcccgagtagagtagctgggactacaggggcccgccaccacggccggctaatttttttataattttagtagagacggggtttcaccacgttagtcaggatggcctcgatctcctgacctcgtgatcctcccgcctgggcctgccaaagtgctgggattacaggcgtgagccattgcgcctggccccacattttctttatccattcatctgttgatggtcacttaggttgcttccatatcttgggtactgtgtacagcactgcaagaaacatgagaatacagatatctctttaatatacttatttcccttattttgggtatataccctgcagaaggattgctggatcttatggtagctctatcttaagttttttgagaaacctccaaactgttctctatagtatagtaattaccatatggtgta

SEQ ID NO: 850563 - DNA, 610 bp, Homo sapiens
cttatactgaccaacattataarataagttgtgtgctgtgctgtgtgaaataaaaagatggttattagatattgactttgtcctcaaggacctcacaatctattaggataaactctcctgcatgtcaaaaaaagttttcacagaggaaatgatgtcaaaggtgaacttgaaggaggagaaacatcagccaagtgaaaaaagtctgcagaggggatgtgggtaacatgacgcaacatgataggtagacagagcttatcatggagagaaacaaagctagagtgaagcagaggatagtatgaaagagcattgaataccacattatagggcattaggggataaaatcactgaaagaggtaagcagaggcatgacttgttcatcttgaggtttggggatgatctactgtccgctgtgtggaggaggaacggggagaaacagcacactctgatgctcacaagcacacggttcctgactgtgtgagcccagaggcatagtgaacgtccctgtgaggggaaagccataaggaaggcttcagacctggcttctccattgcatcctttcaggtagccaaagcacagaagttcttccaggaatgatgaaagagttatcatc

SEQ ID NO: 850564 - DNA, 649 bp, Homo sapiens
tactgttatttactcagggtggaagaacctgtccactttawtttttttgttggaacagagtgcagatggaatttaaagcctaaagcattgtgtattaatagataaaggttttaattccccaaggctaggaaccagacccttagcttccagctctagccactgggatgctttccatgtgacaggcactcaagaaatgcctgttggtgacaacggcaataaggcagaaagaaattaattctgaaattgttcttcctctggctgcgcaacctcagagctggcagttttaacttcaactagaacaggcatgtgaaaaagctgcagaaacagacttcaaaaacacagatacttacttcccagagttgactcctttcatgtgatctgtgtaaatatagatatcaggtatgaacttgttgaggatgctccttgcagaatccacaatccggttcgccatctgaggtgacacacgtacagagtacctgcagcctggagttaaggatgtcattctgcttgaattccaggacagagaaaaatcagttataaagctggcaagtatttgtggaactgtagtaacaaactgggacttccaaatctattgttttccaactgaatttactgaattagtaccataattaaatttttttcattatta

SEQ ID NO: 850565 - DNA, 586 bp, Homo sapiens
attctactcactctgtgcagactccaaaaccctgagccacactgtactgccgtctacatggagacatcttcctcactccactcrgactggcacttgtgccgggcagctgtcctctgcagatgccctcttcttgcatatattttaaatgtagacccaacatgagtccctggtggattctgtgctgctataacaaaatattgagactggataatttataatgaaaaagaaacatattggctcacagttctggtggctgagaagtccaagatcaggtgctagcatctggtgggagagagagagagagggagagagagacaaagagaccatgcctgaaagcccctttattaaggcactaaacccactcaggagggtggagccccatgggccaaatacttaaccaaagatcccacctcccaacactgtctcaatggcataaatttcaacgtaagttttgatggggacaaatgttcaaacccatggcagcacatgaataaaacagaatagaaaagccaaaaattttaaaaaataagaaaacccaaaaataaacttaatgacatctggaagtctaataagtggtaaatatgcc

SEQ ID NO: 850566 - DNA, 586 bp, Homo sapiens
attctactcactctgtgcagactccaaaaccctgagccacactgtactgccgtctacatggagacatcttcctcactccactcagactggcacttgtgccgggcagctgtcctctgcrgatgccctcttcttgcatatattttaaatgtagacccaacatgagtccctggtggattctgtgctgctataacaaaatattgagactggataatttataatgaaaaagaaacatattggctcacagttctggtggctgagaagtccaagatcaggtgctagcatctggtgggagagagagagagagggagagagagacaaagagaccatgcctgaaagcccctttattaaggcactaaacccactcaggagggtggagccccatgggccaaatacttaaccaaagatcccacctcccaacactgtctcaatggcataaatttcaacgtaagttttgatggggacaaatgttcaaacccatggcagcacatgaataaaacagaatagaaaagccaaaaattttaaaaaataagaaaacccaaaaataaacttaatgacatctggaagtctaataagtggtaaatatgcc

SEQ ID NO: 850567 - DNA, 616 bp, Homo sapiens
ataaatactaaatacctacaattatttgtgatcattaaaaacaatgaaagcaaaagaaagggtgctcagtctcattagtcacagggtaatataaattaaarccacaatgaatgactacaatacacctacaaaactggttaaaattaaacagactggcaataccaagtgctgaataggatgtggagtaactagacctcagatatatttacagtcactttgtacaaccacttgggaaaactaaacataggcacaccctacgatccagcattcaggcaagagacatacacatatatgtgcacaaaagactgtacaagaatattcttggtatcactgtttttaatagttaaaagtggaaacaagccaaattttcatcaaaactaaattgtggcacattaaaaaaacagaataacatgacgtagtaaagaaagtcaacaaactgctgctacaacacggagatatgtcacaaatacaacagagctaaagaggccaggcacacaaacaattacgtactatatgattccatttacaaaaattatagttaatattttagaaacctaatccatggtgttaaaaatttaatgcttaccttggcagtgggagggaatggtgtggctgg

SEQ ID NO: 850568 - DNA, 565 bp, Homo sapiens
tacatcataatctgatccagaaacrgttcattgttgttgcatagaataagagaaaataatactttgaaactacatttttttaattctcacttagttcatgagtcacccacttatcaagctttttcaccattccaattttcttcaaatgtcaaacgaccctagaatgttcgaccttgagttctttggcaacttctcatgtagttgtaagacgatcagcttcgatgactgctctcagttggtcattgtcaacttccaatggtcagccactgcactcctcatcttcaaggctctcgtctctttagcaaaacgtcttgaaccaccactgcactgtatgttcattagcagctcctgagccaaatgcattgttggtgttgtgagttgcctctgctcttttgtgacccatttggaacccaaataagaaaatcgctcaaatttgctttttatctaacattattctcataggctaaaataaatataaaataaacagcaagtaataagtcattcgcaaaaaacataaagcaagaaatgcacactaacatgatgtatagcataaccacatttattt

SEQ ID NO: 850569 - DNA, 653 bp, Homo sapiens; identical to SEQ ID NO: 847010

SEQ ID NO: 850570 - DNA, 617 bp, Homo sapiens
ccaagttcctataatcaagggagtgcctatgctgcctggatccttacaagtatctcccaaactgaaaccattatgatgtcagagtcacttggctggrtgcggtggctcacacctgtaatcccagcactttgggaggccaaaacaggcagatcacctggggtcaggagatcgagaccagcctggccaacatgataaaaccccgtctctactaaaaatacaaaaacaaattagccgggcgtgatagcgggcgcctgtagtcccagctactcgggaggctgaggcaggagaatggcgtgaacccgggaggcggagcttgcagtgagccgaggtcgcaccactgcactccagcctgggcgacagagcaagactccatctcaaaaaaaagaaaaaaaaaaaccatctcgactgaaaatacaaaaattagctgggcgtggtggcacacacctgtagtcccaactactcgggaggctaaggcaggagaatcgcttgaacctgggaggcagaagttggagtgagccgagatcgtgccactgcactccagcctgccgacagagcgagactccatctcaaataaataaattaattaattaaacagattaactcatattattcataaa

SEQ ID NO: 850571 - DNA, 409 bp, Homo sapiens
aaaataatagtctattgatacatagaggactgaaattttttttaaaatacagactttgaaatcagtcatatgtaggtttgaatccaggctctgccacttacccaccaggtggccttggacaaattactgaacttccctgaacctccgtttccacatgtgtatcatataacaggggttgaacagcttccttgtggggccgtcgtgagaagaaaatgcataaagtatgtaaagtgcctgcccagagtgaaagctcaataaagggtagtggacctagaatgtaggcggtgttaagaggatgagaccagagatcataagacctgagttaaagttctgagcctgcaaytgactagccagtgacatcctctctgtggccctccctctccttacacctataccaagaccaagcgtg

SEQ ID NO: 850572 - DNA, 560 bp, Homo sapiens
taaaggatggggcggctgtagcaataagggagagagaggggcaacctgcttggaattctacacacaatgttttggggctggcaagcaggacagaactcaccccagtgcaaacatgcakatgtgcagcacgtcctccccgatgaagtccaggtaaaatattgcacctgcagcagcaaatcatagaaaataccgctgagctgttttcaaatcacccatctgccagtctgtctaggatttggctaagctctcttccatttaggaaactaaaatgatcaaaacttatgactgtgccttacaagaagaaaggaataaaagccatttaggggatcaggttgtcaacttttttccaccttagacccctctgatctccatgttgttttttaacttttattgggggataatattagactcacaaaaatggtgtagagttcccatgcacccttcctccagctttccccagtcatatcttccataaccacagtgcataatcaaagcaggaaaacgacaatgaacacttactaaccaaaccacagaccctatttaccagtttgtgcctgcag

SEQ ID NO: 850573 - DNA, 592 bp, Homo sapiens
ctgggattctgcagtttggcttccttcttaccgtctcccttccatgttggattaggtttcagtgttctctgttttgctaaatcagatcccatctgttcattcactttccggcttccaaaatgtgtttgacatcttttgtttgctattatgttctctcctgttctctttatccttgtggtttatttcctttgattcctttaccaccagcaatgttttaggaggagagataaacatgcgtgctcaatctgctgtacaaaattggaagctgaatgtaccacagcttacccaactgattccctgctaatggaaacatattccaatgttttgtagttacaaataatgctaatgcattcttatatgagcatatttgagcatttggggagtgttaactataagacagattcctaaatgtagaagcattgggtcagaagttgagtacgtttgaaacttactgccaaatgtcactccaaaacaattgaaccggttaatactgctgwcaacagtgtgtatgaaataaagcacgtttttattaatgaactagctacgtgtcctttttgatgctggaccaatgggtttctttgcttgatttaaa

SEQ ID NO: 850574 - DNA, 575 bp, Homo sapiens
gcatctccaggatccagaggctctaagtggatgaaaacaattgggtgcttgggccagagactgtgcaagcctaagcagagagagaggggtttcttaacttccctcccacgttcagtccctttggaactcgagtttgcccctaggatagaagtctgtaaggctaccagctggaaccctttgctacactgctgtaaaggctgtgcagaaaaaaatgttggaattctctcatacttggaaaattaccctttaatacacatggtttcctctctgtttcctagccataggccaggatgttaactggggtggggtagaggcagacatttaattcttgttaagagggagtaataaaatgtgaagtgatagggagccaatctatcgttttctgaatatccacaagaggcttacatttagcaacaacatttagcaaacacatgtcaggcactgtttagttgctggggacacaacatccaacatgacagttatggcttctaccaagacgcagcttaaaggccagrgagaggcaatggtttgcggtgaataagagcacaagctttgaaatcagacctgaggtagaa

SEQ ID NO: 850575 - DNA, 616 bp, Homo sapiens
gagatttgagtggggacacagagccaaaccatatcaactctccagtccctaaaataaagtaagtaactaacatgatcatcttaatccaatacattaaaaagctcttccctctcattaccacaggatttagaggttatggaatatttacaagatgtacaatgaaaatatagagataatgttttttatttgggggatctgtttattttattgaagcccccaaatcgagatagaaattcaaaatttcaaaacctaagtcatactgactaatgaaaagacaggaaaagcataaagaataataaatagaaaaatgaactgaaactaaaatgctattagaaaaattttccgtaagaaagacactgaactattttcaaagtgacatatcagaaaaagaaacttgcaaatagctaaagctagtgaggcagtcccaaaaaccaataaggagaaaaatcatcctaaaaatgatggatgatttagtcagggcaactaaaattaaaccagaaagagagaacacacacaggtagtraaatatgtcagaccacattctgtagaactagaaaaaaatgggagtattgaattctttaataataaatggaatcctccaagtattaaaagaaac

SEQ ID NO: 850576 - DNA, 365 bp, Homo sapiens
tcatactataactggttgtcactaagacaggttagagtaaggtaacagatttgttacaatccacatctctgccttttacctaggtagagataaatcagcaacaaattctacattctactaatgattctactagagatgcagtctgcttatgtttcaaagcattttcttggtacatggagcagctgattaaaatgtccatgagggaaagctcatgtataaaatgaactcaatttgaatgaaaggaggtggagcctgtagaaakttcaaatacagaagaatgtgaagtgggtaatgattacaaggaaccggcaaaatagaataaaataaaaatttgattaactaaaaaatggactagacagagagag

SEQ ID NO: 850577 - DNA, 365 bp, Homo sapiens
tcatactataactggttgtcactaagacaggttagagtaaggtaacagatttgttacaatccacatctctgccttttacctaggtagagataaatcagcaacaaattctacattctactaatgattctactagagatgcagtctgcttatgtttcaaagcattttcttggtacatggagcagctgattaaaatgtccatgagggaaagctcatgtataaaatgaactcaatttgaatgaaaggaggtggagcctgtagaaatttcaaatacagaagaatgkgaagtgggtaatgattacaaggaaccggcaaaatagaataaaataaaaatttgattaactaaaaaatggactagacagagagag

SEQ ID NO: 850578 - DNA, 365 bp, Homo sapiens
tcatactataactggttgtcactaagacaggttagagtaaggtaacagatttgttacaatccacatctctgccttttacctaggtagagataaatcagcaacaaattctacattctactaatgattctactagagatgcagtctgcttatgtttcaaagcattttcttggtacatggagcagctgattaaaatgtccatgagggaaagctcatgtataaaatgaactcaatttgaatgaaaggaggtggagcctgtagaaatttcaaatacagaagaatgtgaagtgggtaatgattacmaggaaccggcaaaatagaataaaataaaaatttgattaactaaaaaatggactagacagagagag

SEQ ID NO: 850579 - DNA, 613 bp, Homo sapiens
ataagcataactaacctaatacacagtaaagtrctgtttaatagctctcatattaacttcaatttacagagattgaactggggaccagaaagataaactttccaaagtcacacagtttttaaagtgttagaacataggtaacagcccaagtgactggtactttgtaaatggtatcatctaaataatattacttgccaggtatggtggtatccacctgtagtcccagctactcatgaggctgagaatggaaggacagcttgaggcctgcagttcgaggctgcaatacactatgatcatccctgtgagtagccactgcactccagcctaggcaacatagaaaggcctcatttctaaaactaagcaaacaaacaaaactgctgggttaaaatcatcttcaaacttaaatgatattcctgaaaacacatgacatttgcatctatcctcacacacacatttttcatttttcatactgtaagtataagcatcaaatttgagtttcaataaattagaccctgggtcaatgaatagaggagagagacggataaagagagacagaggaaaaaaaaagagagaagtgaatacataaattacaatgactttaaatttataaaat

SEQ ID NO: 850580 - DNA, 586 bp, Homo sapiens
ttagtctgtcttagtggaatatttgatgcatgcagatgttccttaacttacaatgggattatacccccaataaatcctttgtaacttgaaaatatcytaagttaaaaatgcatttaatatacacaacctaccaaacactatagcttaacacggcctaccttaaacatgctcagaaatttacattagcctatagttgggaaaaatcatccaacataaagcctatttttttatgaagtgttgaatatctcatgtaatttattgaacattatatggaaacaaaaaaaaaaaaaacagatgatactatgggtactcaaagtagtttctactaaatagatatcactttggaccattgtaaaattgaaagactgtatatcaagacatcataagtcggggaccatatgtatttaggagtttctatcaatgatgaatttataagaacagtgagctcacagaaataatcaggaaacagtggctgccaaaaaatgatgatgataataataataatgtgactttaaactttattaaatggaagtgtgaggaaagtaatgtttttttcaattgtaccggatagaacatacttccagag

SEQ ID NO: 850581 - DNA, 569 bp, Homo sapiens
ttaaaaaaaatgcagagatggggtctcactatgttggtgaggctggtctcaaactactgggctcaaggcatcttcctgcctcagcctcccaaagtgctggaattacaggcatttgacatcatgtccagatgattgttttcttttctatgcagaagatttttttttttttaatttgatgtagtcccacttgtttatttttgcttttattgtctatgcttttggtgtcatatccaaaaagtgattgccaagaccaatatcatggagttttcccctattttcttctaggaattttatggcttctggtcttacatttaaatctttaatctatgtcgagttagttttttaatatggtatataagaagtgtgcaatttcattcttttacacatggatatccagttttcccatcgccctttattgaagagactatcttttccccattgtgtattcttggcagtcttgtcaaagtgtaattaatcatatatgwatgggttcatttctgggctctctattcctgtccatgaatatatgtgtctgtttgtgccagtaccgtgatgttttgattacaata

SEQ ID NO: 850582 - DNA, 367 bp, Homo sapiens
gttcatttctgttttgttaggttttgttttgttttctctaggattcaagtctccccctgttctatgtgtggaacactttctcttgsctgcctggcaactcttcaacaaggccccatacactctgacatcaaggagggtattatcccagagctttctcccaagatactcaaacctggtggtttgcaggcatgaggtggccaccaccaaactttagtcagtcaatagccagcaggctctgcatgggcatcagcccttggacacaaaagtgactaaaaggagctgctaaatgccccagtagggcttctgagaagaaagggcagcagagtaccaggaggagaagcctaaagaacaaaatgcatttgctgat

SEQ ID NO: 850583 - DNA, 621 bp, Homo sapiens
ttgtccatctcacttttttagttagtatatttagatcatttagagcccrttggtttacaaacaaatttatgggtttgtattcctgagctctccctaaaatctcccaggtattttccagttccctagtgctttctttttctgtcctctggccagaaagctggagcattggttactctatgctgccatatactacccatgaccgtgtcaacattaggggtagcgaagatcatagtaattgaagcttcaggtttctggcctgtgggaagacaaagaggaaaaaatatataattggagttttctccactctcttgggacaacagatcctctggttagagtggaagattttcctccctcaaagtttatatgctcctggatggatgtacaatcattttggaggtcaatatgcaacacaatatctaacatacttgaagatgggcagccctgtaatcctgttcctcatcatacaccctaaagaaacacttcaatgtgtataccagagacaaaaattactttatcattttatagtagcaaaaaattaaaattaagctaaattatcatcaacagaggagtgaacagtttgcttcctcactttattcatgtctctgacctaaaatgcagcct

SEQ ID NO: 850584 - DNA, 621 bp, Homo sapiens
ttgtccatctcacttttttagttagtatatttagatcatttagagcccgttggtttacaaacaamtttatgggtttgtattcctgagctctccctaaaatctcccaggtattttccagttccctagtgctttctttttctgtcctctggccagaaagctggagcattggttactctatgctgccatatactacccatgaccgtgtcaacattaggggtagcgaagatcatagtaattgaagcttcaggtttctggcctgtgggaagacaaagaggaaaaaatatataattggagttttctccactctcttgggacaacagatcctctggttagagtggaagattttcctccctcaaagtttatatgctcctggatggatgtacaatcattttggaggtcaatatgcaacacaatatctaacatacttgaagatgggcagccctgtaatcctgttcctcatcatacaccctaaagaaacacttcaatgtgtataccagagacaaaaattactttatcattttatagtagcaaaaaattaaaattaagctaaattatcatcaacagaggagtgaacagtttgcttcctcactttattcatgtctctgacctaaaatgcagcct

SEQ ID NO: 850585 - DNA, 626 bp, Homo sapiens
gaatatgtgtgaatgctttattctattgatgtgaattttccagatgcctaaagctaagtgactaatcaaaaatttttgttttgttttacttcatcgagtctttatggaaatatttctgaaagtgctggaaatgtaagttctggagtcagcctgctatgttcgaatccctgtttctttatctactgactttccgtctttgggcaagtagtaatctttctgagcctcaactttcttatgtataaaataagaacaatagtaaccacctcatagggttgctatgtgaattaaatggggtgtgcatatacagcatttgataggcagtggacattcaagaaatgctagcaatgaatattttatgcatattagaattgcttcttgaaagctggggccatcatggtgaacattaatgattgtaggacaactaataactgatgccctcagctcctattaagagccagaaagttatttgcctctccatttaattgccccagtctgccaggattcttcccagtcttgtctgggttttgartttttatatagcatcccaatatggtttggctctgtgtccccatccaagtctcatcttgaactgtaatccccataattcccatgtgttgagggaggta

SEQ ID NO: 850586 - DNA, 655 bp, Homo sapiens
gcagcaatcaaggcagtaatagattttatgacctagccttgggaagcacacactgtcaccttcacagtattttattggtcacatgggtcagccccattcaatgggggagggcactctataagggcacaaatgccaggaggcctcagaaacataaatatttttgctatgggtatagattcatgggttttaggctggaagaaaccacaaaaataccctggttgacagtaagaatcagtcccattgatgataaaagatggaatttaaaagcttaatagggacaattttcttctgcaaagaggtagatggggtggcatgaatttcttgtgttagagacagttttaacagatgaaccctcaggtgccaagtcagttaaccagagctgggttgacaatcagggatttaggagggaaaaacccaaggcaaggaaagtccttgtgaatgtgaccaggtggagaaacaggtagatgacgatttgccaactccatgttcaggggctgagctgaggccagagtcggcagctkgtatttcttctccaatgggctacttagggtggctttttgggctcagtggcactccagaacaagtctagcatattggctggtggtagcaggaccttactgacattccatatggaatggagctggaagcagtcctg

SEQ ID NO: 850587 - DNA, 555 bp, Homo sapiens
ttcaaataaccctgtgacttggttgtgcgagtcacataaccctgtgacrgtagtgttgttggtattcccataactgtgtcattggttgcctatttacatagctctgtcatgttgaacgtggcattcatatcacgctgcgacatcagtggtagtggtattcacctaactttatgatactggtggggattatattcacataactgcagtgttgctgctggtggtagtcttataaacatgtaattgtggatgaggttgcaaatcataactctgcaacaatggtgggggtatttatataactctgcaacattggtcatagttttcacttaactctgtaataatggatggagtatttgcataattctgtgactctagtcatgttatttatataaatatactcatcacctagcatccacagagtggtttcaggaccctctaggataccaaaatccatagatgctcagatctcttatataatatggtatagtatttacatgtagcctgtgcacagcctcctttatactttgaatcctctctagattatttacgatacctaat

SEQ ID NO: 850588 - DNA, 506 bp, Homo sapiens
cagcctttattgtgttgaggtgtgttctttctatacctaacgtaagagtttttatcatgagggggttttgaaatttaaaaaaattttttttagagatagggtctgacttygttgcccacgctgaagtgcagtgatacaagcatagtttactgcaaccttgaactcctgggctcaagcaatctttccggcctggtctccctacaggtgtttgccaccatgcccggcttttgtattttttgtagagatggcggtctcgctttgttgcccaggctggtcgccaactcctgggcatgatcatcctcctgccttggcttcccaaagtgttgggattctaggcatgagccacagtacttagcctcctgtccttataaaaattgttttctggttgattcgtgtctcctttttttcttcccgtcttattgtttgtcattgcagtttgatggttttctatagtgataaggtttgatttttttctctttgtcctttgtgtatttgttctaccagtg

SEQ ID NO: 850589 - DNA, 506 bp, Homo sapiens
cagcctttattgtgttgaggtgtgttctttctatacctaacgtaagagtttttatcatgagggggttttgaaatttaaaaaaattttttttagagatagggtctgactttgttgcccacgctgaagtgcagtgatacaagcatagtttactgcaaccttgaactcctgggctcaagcaatctttccggcctggtctccctacaggtgtttgccaccatgcccggcttttgtattttttgtagagatggcggtctcgctttgttgcccaggctggtcgccaactcctgggcatgatcatcctcctgccttggcttcccaaagtgttgggattctaggcatgagccacagtacttagcctcctgtccttataaaaattgttttctggttgattcgtgtctcctttttttcttcccgtcttattgtttrtcattgcagtttgatggttttctatagtgataaggtttgatttttttctctttgtcctttgtgtatttgttctaccagtg

SEQ ID NO: 850590 - DNA, 644 bp, Homo sapiens
atataatcacatggaggttgtagccttgccttgtatgattaaacagagaagaaaggtggtatttgttaacatttctgttttttacatgtatcattcttttatcacatctcataggtgatagcatcctatttttttctttattttcttgggattcagcccaagtctgtctccaaagtccatcttctttcctactgctctactacactgcagagaaataggacggtgaaactgaatatatatgtatgtactgtcataaaactggttataatgcgttctttttctccccccaatctaccttttctttttccccagaatccagattatcttcagtattctatcagtacagctctctgcagcttaaactcggtggtacataaagaagatgatgaacccaaaatgatggacactgtataatttggttaagactgctgaggccaagtgctattttgttacaagaaaggaagaacttggctattttcttgacacttttatgggtgctgcactttatttttgttyggtttttgatgggagggaaagagtactgaaatgttttgtaaattttttttaatgtgctgctaggttttttgttttgttttgttctgaagagaagagtggtaccatatgttgcaggaagtcaaactgga

SEQ ID NO: 850591 - DNA, 581 bp, Homo sapiens
aggcaattagtccagaaaaagaaatagaaagcatccagaaaaaaagaagtaaaactatgtctaaagccaacggtttgagaccagcttaggcaacatggtgagacccsatctctacaaaagattaaaaaattagctgggtgtggtggctcatggctgtagtctcagctactcaggagactgaggtgggaagattgcttgagcccaagaggtcaaggctacagtgagccatgatcatgctactgcactcccgcctgggcaacggagtgagaccctgtttcaaaaagaaaaaaaaaaaaatcatagaattgaaagtccagaaataacctttcaaatttatagtaaactgatttttaataggatgccaaaataaatgaatgaagaaaaagtagtctttttaacaaatgctcctgggacaaataaatatccagatgaaaaggaatgaagttagacctctaccatgcataaaaattaactcaatataggtcataaacctaaatgtaagtgctaaagctactaaactcttttttttttttttttttgagatggagtctcactcttgtcacccaggctaaagtgcaatg

SEQ ID NO: 850592 - DNA, 581 bp, Homo sapiens
aggcaattagtccagaaaaagaaatagaaagcatccagaaaaaaagaagtaaaactatgtctaaagccaacggtttgagaccagcttaggcaacatggtgagaccccatctctacaaaagattaaaaaattagctgggtgtggtggctcatggctgtagtctcagctactcaggagactgaggtgggaagattgcttgagcccaagaggtcaaggctacagtgagccatgatcatgctactgcactcccgcctgggcaacggagtgagaccctgtttcaaaaagaaaaaaaaaaaaatcatagaattgaaagtccagaaataacctttcaaatttatagtaaactgatttttaataggatgccaaaataaatgaatgaagaaaaagtagtctttttaacaaatgctcctgggacaaataaatatccagatgaaaaggaatgaagttagacctctaccatgcataaaaattaactcaatataggtcataaacctaaatgtaagtgctaaagctrctaaactcttttttttttttttttttgagatggagtctcactcttgtcacccaggctaaagtgcaatg

SEQ ID NO: 850593 - DNA, 581 bp, Homo sapiens
aggcaattagtccagaaaaagaaatagaaagcatccagaaaaaaagaagtaaaactatgtctaaagccaacggtttgagaccagcttaggcaacatggtgagaccccatctctacaaaagattaaaaaattagctgggtgtggtggctcatggctgtagtctcagctactcaggagactgaggtgggaagattgcttgagcccaagaggtcaaggctacagtgagccatgatcatgctactgcactcccgcctgggcaacggagtgagaccctgtttcaaaaagaaaaaaaaaaaaatcatagaattgaaagtccagaaataacctttcaaatttatagtaaactgatttttaataggatgccaaaataaatgaatgaagaaaaagtagtctttttaacaaatgctcctgggacaaataaatatccagatgaaaaggaatgaagttagacctctaccatgcataaaaattaactcaatataggtcataaacctaaatgtaagtgctaaagctactaaactcttttttttttttttttttgagatggagtctcrctcttgtcacccaggctaaagtgcaatg

SEQ ID NO: 850594 - DNA, 553 bp, Homo sapiens
tactgtacattcaaacacccttttagtaaaataaaaaactgaactggttagatagttkaaatcagtaggatggtagaggatgggaaaagggagggatactttgctgaaaggcagagatagtgatctcttactgtctctgagactgaagggtggtcctcaatttaatctttccttccaggcattctggagcagggaagaatctgactttaaaattgttccctactttctactgtttctccgttatttggcatgtcctcctgagttcagaagaataggtcttaagggttttatgctgctgaaagtaatatcccattagattgctggtggagctattttttttttttttttttttttacaatgtgaaagctgaattgtttctaagttctactaaacatatatgtaccagtcagtgcttttcaactgcgtcaggttcctcaacctgtgaacctacccagtcctttaggaaagcccaggtgtgatgcaggaagtaacctgccctctaccacagtacctgaatcaggcatgtgctctggaaatgttgacctgacatgag

SEQ ID NO: 850595 - DNA, 579 bp, Homo sapiens
ctgtatctgaaaatggatttatttcctaccctacatgccttaaaaaggaggcaggggcagttgtagccatatgaaccacactgctggccacctatcctgttcagtctagccttggatagtaacgtgccttggtcagactggatttctaattttgacctgtgcaaaatatgtagaaattcaaggtcatccttctttgactatgtacaatatgttttaaagttattccagaaagaatgatcagaaagcgtgtttgtatgcttatgtatgcgtctagtggaggcaaaacagttaaaatggctgagaaaatgaaaaacaaaagaagaaaggcaacctaagcagttgtacctcaggagaaagtgtttgaagagaagtctgttctgcttgttaatttggaagaaagggaaggaaaagggggtggaaggcataattttatacataagtagtaagaataaagggatctaaccttaacaaktcttcagttttaaggaactcaggaagagataaaggagagaagttaatagagtatggcaagcagtttcctgaatgtatttgaataagtgtaaaagtaaggccatgaaa

SEQ ID NO: 850596 - DNA, 586 bp, Homo sapiens
attctactcactctgtgcagactccaaaaccctgagccacactgtactgccgtctacatggagacatcttcctcactccactcrgactggcacttgtgccgggcagctgtcctctgcggatgccctcttcttgcatatattttaaatgtagacccaacatgagtccctggtggattctgtgctgctataacaaaatattgagactggataacttataatgaaaaagaaacatattggctcacagttctggtggctgagaagtccaagatcaggtgctagcatctggtgggagagagagagagagggagagagagacaaagagaccatgcctgaaagcccctttattaaggcactaaacccactcaggagggtggagccccatgggccaaatacttaaccaaagatcccacctcccaacactgtctcaatggcataaatttcaacgtaagttttgatggggacaaatgttcaaacccatggcagcacatgaataaaacagaatagaaaagccaaaaattttaaaaaataagaaaacccaaaaataaacttaatgacatctggaagtctaataagtggtaaatatgcc

SEQ ID NO: 850597 - DNA, 503 bp, Homo sapiens
actttgagaaccagcctggccaacaaggtgaaaccccatctctacgaaagaatacaaaaattagccaggtgtggtggtatgcacctgtaattacagctcctcgggagtytgaggcacaagaattgcttaaacccagaaggcagagattacagtgagctgagatgtcgtcactgcactccaatctgggtgacagagcaatactctgtatcaaaaaaaaaaaagagagagagagagagagggaaggaaagaaagagaaaggaagaaaaaaaagaaagaaagaaagaaaagaaaagaaaagaaaagaaaagaaaagaaaagaaaaaagaaattgcctttaagcagctgccctggtgagggagaggatgacacctgggaaagggggcaggctgtgattgaagactcattcttttttttttttttttttcttttcaagacagagtctccctgtgtcacccaggctggagtgcacaggtgcgatcttggctcagtgtaacctccgccgc

SEQ ID NO: 850598 - DNA, 621 bp, Homo sapiens
ttgtgcccagccacaccattccctcccactgccaaggtaagcattaaatttttaacaccatggattaggtttctaaaatattaactataatttttgtaaatggaatcatatagtacgtaattgtttgtgtgcctggcctctttagctctgttgtatttgtgacatatctccgtgttgtagcagcagtttgttgactttctttactacgtcatgttattctgtttttttaatgtgccacaatttagttttgatgaaaatttggcttgtttccacttttaactattaaaaacagtgataccaagaatattcttgtacagtcttttgtgcacatatatgtgtatgtctcttgcctgaatgctggatcgtagggtgtgcctatgtttagttttcccaagtggttgtacaaagtgactgtaaatatatctgaggtctagttactccacatcctattcagcacttggtattgccagtctgtttaattttaaccagttttgtaggtgtattgtagtcattcattgtggytttaatttatattaccctgtgactaatgagactgagcaccctttcttttgctttcattgtttttaatgatcacaaataattgtaggtatttagtattta

SEQ ID NO: 850599 - DNA, 589 bp, Homo sapiens
ttaagtctctcctacaaaatagggccagcttttgccagagaacttgctgaaagctgccaagccatgaaagcagagggacaggtgcttaaggcttactgagtatctggtagttatggctccattgtcttgctcaactcttccacaaagcaaccactctggagtaggattctgaactcacaacaactttgttgttgttgttgttgttgttgttgttgctgttgttagacagagtttcactcttactggccaggctggagtgcagtggtgcaatctcggctcactacaacctctgcctcctgagttcaagcgattctcctgtctcagcctcccaagtaactgggattacaggtgtccgccaccacagccggtttcaccgtgttggccaggctggtcttgaactcctgacctcaggtgatccacctgcctcagcctcccaaagtgctgggattacaagcgtgaaccaccacacccagcctgaactcacaacttcttacggtgacctgattatcacatggaacactaaggcagaaacaacccatgttcagactagttattaaggatarccaggaaacagtgagtgcctctttta

SEQ ID NO: 850600 - DNA, 542 bp, Homo sapiens
aggaccgaattactggtgcagaaggtcactaaatgctagcacttgctcagtgggcttggaacaagatccttgttctcattgcttcgctgcacttctagcagagtgtgggggagggaggcctggagactggctctcaccagggaagagagcgatgtcgcttgtacaagccacaggataaacacttaaaacagcaaaggggacacggcaaacacatgcatgagcaatgtggagtcccagactgacgttcgcacctaacgctctggagaaattggccaagattggcccaaccaactgaaaatattattgctgtaattctttcaaggtcgcttgtcagactgggttatctacctcccaagagcttgctgcacaaatcggcctttccagagagacagaactcagggctgtgtctgggggaccctctcaggcctggttgccattttgctcacgctcttccctgccaagagcatctgattcaggccatctggggtctgtagtrgacaagggacgagcctggatcctgtgccagtggtcacgcagcctga

SEQ ID NO: 850601 - DNA, 647 bp, Homo sapiens
gctggccatgagtttttctattccagacaagttggaagatcaagggtgaaatgggtcatttttaatatcaaacctgttgccctgctttgttttcaaatcacaccactcttcaccctctggccccactaggccttagtgcaaattagtaaaaacctcccccttgaggggcagatacagggccctgccactgtgtccatcttggtgagacaccaaaggctgggttttagttcccacttgccttataaacacagttgtgcctgtactcccactttgatcccccctgcccacaggtgcccaaaatacacacacacatacacacacacacacacacaacccttgaaatgactggagtagcactagatgattcttccagtgctaaacaatttattatttacccacctcttcctttcctcctctctttcctcttcttgtcctcttcctcttcctttctctctccattctctctctcttctgcaataatacagtgagtgtttgtgtaagtttcaaatccagcaacctgaagattcgcctccaatggcacagggctggacygcactcagaggtggctgccacccaatcgtcactcagcgttttatcgctgggctattctgttcgagtgctaagcaattgttcacagaaataagata

SEQ ID NO: 850602 - DNA, 561 bp, Homo sapiens
ggctgggtagtgagtgaaacaggagagggtgcccatcaaagtggtttggcgagtggctactgctcagtattgccatatgcaaggggcacttctgatttttctatatttttcaagctatgccagttatctgggtgttgtgtgaagtcaccatattattattatttcttttgagatgtagtcaccgtattcttcagcactgatgactaacttgagtctttgaaaaacaccgtgcaagctaaagcaaatgtctctgtgggcttcccgactgcaacctctgggttaagggaagcccagtaggtgtttctctttcctgtcctaccaccctgaagcctgccacggattcattcaacaagtgtttttggacattgactatgtgccaggcactgttctgtgctggacataaggcagtgaaaactcagataaaatgcctgttctcaataggccacattcactgagagatggacagtaaacaaaatgartaagaagaaaatgtatactatattagatagtacacagggctatggaggaaaacaaagcaagatggcaataggaaaggtggtt

SEQ ID NO: 850603 - DNA, 596 bp, Homo sapiens
gattcctgctcaaataagtttgagaaaaaaatgctggttagacaggcttgttaattgtagggctctcctgtgctttaaattactaatacgcacgattaatctctaagagtgarccaagaaacagcatttcctaccttcatttgagcattgagatttttgtgaaggctaaacaattagcctcgcccagagtaatgttccatggaacaataaatgaggaacactcttaagtatcataattcaaagagttcacagtaagctacaagaaagcaggaaccacctttagccactcccagtgtactcccagtactaagtacagtactgacagtgcaggcttttactaagaaattactgatgaatgaatggatagacacccccaaactgtaagttggaaagtattagctacatgcatatattattttcaattgtagccttgcatcaaataatgatttatttctcttcatctttctaccagcatctcaatgcaaggtcacttcagaagtctggaggcttctataacagcacacaggatcaaaggaaggaccctccactcaagaataatctgtcatgactgcggctaatatcaacattatccaaga

SEQ ID NO: 850604 - DNA, 496 bp, Homo sapiens
acaggctgtctgtggctgcttttgtgatacgatgcaggagttgagaagttggacagagaccatatagtttaaaatatttaccaccctagcctttgcagaaagttcgcccaccccttagagtacagaaaaagaaagatttcagagatgtcagtttgggaaggtccttgaaaagtcacttggcaaagaaaagttgtgagaagaaggttgatgttttgtcaaagaaatgcaacgatgacagatgccaacctgccttttcttccagcggcagaggacctcaggccgtggtgtgcatgcccgtgtatcggtgtgggtatgtgcacctgcacacatgtgtgcttacacgcagctcaaaacggtgccaccctgtccagagttattttggccatcatggttcaaatcaacagacttttytggaaagcttctgcacacatgccatgctcagaacaggaggtgcaaagatgggaaaggattctgcctgatatgcaaatagtgaccg

SEQ ID NO: 850605 - DNA, 398 bp, Homo sapiens
agctgtttctggaaaaggaaagggaaagaaagaatagattatataagaacsaaatcaagcaaatcaagaacccaggaaaaaacccagagccaacctactcctaagtaatatccatcctggaaagccagagcatcctaaaacactccaatagtgagtttattttcaacatcgacatgcactcaaatctactcacatttgaacctagtattacattatgattgctcaatgttggagccaaaatcaaactgcttactttgaactagctctataatattgcagacataggcgaatgaagaaacaaaacaatgactttgtttaagaaggagtaggtcctgaataaatgcttctaactcagtaatttcacctactaagaaaacaccttggctgggcgtggtggc

SEQ ID NO: 850606 - DNA, 623 bp, Homo sapiens
acatggaccccttgaacctaaaagttagaaaaaagggcaaaaataataacaagcacattacaaaataatatgkgcagatgatcagtaaacaccagaaagggtactcaaaatcttttttatcttatttttttgagacagtttctccctctgtcatccaagctgcagtacagtggcaccatcttggctcatggcaacctctgcttcctgggctcaagcaatccttctaccttaacctcccaagtagctgggactacaggcgcataccaccacacttggctaagttttttgtgtttttgtagagactaggtttcactatgttgcttaggctggtcttgaactcctgggcttaaatgatccacctgccttggcctcccaaagtgctgagattatagacataagccaccgtgcccagcctctgaaaatctttaaatatcagaaaaatacaaatttataccataatgagatagaatagtgcatacctactggaataagcaataaaaagtctgattataccaaatatgggaactgatgtggaataagtagaactctcatatcttgaaaatgtgattgtaaggtggaaacagtttggcagtttcttaaaaatttaagtgcatatctatact

SEQ ID NO: 850607 - DNA, 623 bp, Homo sapiens
acatggaccccttgaacctaaaagttagaaaaaagggcaaaaataataacaagcacattacaaaataatatgggcagatgatcagtaaacaccagaaagggtactcaraatcttttttatcttatttttttgagacagtttctccctctgtcatccaagctgcagtacagtggcaccatcttggctcatggcaacctctgcttcctgggctcaagcaatccttctaccttaacctcccaagtagctgggactacaggcgcataccaccacacttggctaagttttttgtgtttttgtagagactaggtttcactatgttgcttaggctggtcttgaactcctgggcttaaatgatccacctgccttggcctcccaaagtgctgagattatagacataagccaccgtgcccagcctctgaaaatctttaaatatcagaaaaatacaaatttataccataatgagatagaatagtgcatacctactggaataagcaataaaaagtctgattataccaaatatgggaactgatgtggaataagtagaactctcatatcttgaaaatgtgattgtaaggtggaaacagtttggcagtttcttaaaaatttaagtgcatatctatact

SEQ ID NO: 850608 - DNA, 623 bp, Homo sapiens
acatggaccccttgaacctaaaagttagaaaaaagggcaaaaataataacaagcacattacaaaataatatgggcagatgatcagtaaacaccagaaagggtactcaaaatcttttttatcttatttttttgagacagtttctccctctgtcatccaagctgcagtacagtggcaccatcttggctcatggcaacctctgcttcctgggctcaagcaatccttctaccttaacctcccaagtagctgggactacaggcgcataccaccacacttggctaagttttttgtgtttttgtagagactaggtttcactatgttgcttaggctggtcttgaactcctgggcttaaatgatccacctgccttggcctcccaaagtgctgagattatagacataagccaccgtgcccagcctctgaaaatctttaaatatcagaaaaatacaaatttataccataatgagatagaatagtgcatacctactggaataagcaataaaaagtctgattataccaaatrtgggaactgatgtggaataagtagaactctcatatcttgaaaatgtgattgtaaggtggaaacagtttggcagtttcttaaaaatttaagtgcatatctatact

SEQ ID NO: 850609 - DNA, 508 bp, Homo sapiens
gggtggcagccaggcggagggtctcctcacttctcagacggggcggccgggcagagacgctcctcacctcccagacggggcggcggggcagaggcgctccccacatctcagacgatgggcggccgggcagagacgctcctcacttcccagatgggatggcggccgggaagaggcgctcctcacttcctatgtgggatggcggccgggcagagacgctcctcactttccagactgggcagccaggcagaggggctcctcacatcccagacgatgggcggccaggcagatacgcacctcacttcccagatggggtagcggccgggcagaggctgcaatctcggcactttggggggccaaggcaggcggctgggaggtggaggttgtagctgagatcacgccactgcactccagcctggctaattwaaaaaattttttttgtagagacgaggtttcaccatgttgatcagactggtctgggactcctgggcttaagggatcctcctgcagc

SEQ ID NO: 850610 - DNA, 508 bp, Homo sapiens
gggtggcagccaggcggagggtctcctcacttctcagacggggcggccgggcagagacgctcctcacctcccagacggggcggcggggcagaggcgctccccacatctcagacgatgggcggccgggcagagacgctcctcacttcccagatgggatggcggccgggaagaggcgctcctcacttcctatgtgggatggcggccgggcagagacgctcctcactttccagactgggcagccaggcagaggggctcctcacatcccagacgatgggcggccaggcagatacgcacctcacttcccagatggggtagcggccgggcagaggctgcaatctcggcactttggggggccaaggcaggcggctgggaggtggaggttgtagctgagatcacgccactgcactccagcctggctaatttaaaaaattttttttgtagagacgaggtttcaccatgttgatcagactgrtctgggactcctgggcttaagggatcctcctgcagc

SEQ ID NO: 850611 - DNA, 580 bp, Homo sapiens
attggttcaaatatggtaaacaatgagatatggrtaaatgatgcatctgaagccactaacagcaacaggttaaaagtagaaagatggacaaaggtatatcagaaaaatgctaataaaaagaaagttatatagcattgttaatatcacataaaataaaaataaaagtaaattgcattaaataggggcaaggatggttttgatcaattttccagtacatccctataagtttgtttcttactctccttatctcgtctatttcatccacttctctaaacatatcttcattgcttaaatgcctcttatgtacatctttatattctggagagatggaattagctttctctaaaagttccttctgcattttcctcctcctctggcttttcctcaaaatttggttcactattttctggccttccttccatttttggacagggtttcatctcatgtctgtggggcttctctttcttccttctattctttctttctttttccttccttccttttgttttcctttcttccctctttcctttcttttttcctgcttattcccctttgagtgcaataacttctggcactgatc

SEQ ID NO: 850612 - DNA, 517 bp, Homo sapiens
gtgagctgagattgcgccattgcactccagcctgggcaacaagagcaaaactccrtctcaataaaataaataaataaaataaaacaaaaacagcagtaaagatgattaaagaggtagagaacagggcctgtagggaaaactccagaacctggattgtttaggttaaggaagtaaaggctgaagggctaggatgagctgctgagaaacagtatttgaggaggcagagccaaataggactggtaagtatatgctatagattgaaaggggcgagaggaagggcgttaaaagggtcttggcaagtccattgatgcaggggcctaaattaggtggctctccttaagaaaaagaatgcagaattataaatacaacattactaggacccttcttgggctttaaaaggagtttgtgcaggtgaggggccctggggcttaaactctgctaacttcacagtgaatttacctctagccaagggtgcaacaagtgatctggtaacacaggttagggaaatggtctcaga

SEQ ID NO: 850613 - DNA, 547 bp, Homo sapiens
agtgatcagatatcacctggggatggtagacaataagaaaaccaattagataccaatggtggtcagatatgaagatggaggaagactccatctcaaaaaaaaaaaaaaagatcacatatctcaatgtaaaaatatgaaatttaatgagaaattcttcaggtcctaggacttgatgaataattattagacatgacaccagaaaagcacaatcaattctaagaatttattaattggatgttatcaaaatttaaaacttttgccctgcataagagcctgttaataaaaagacagggtaaaaactggaagaaaagtgcaaaccacacctgataaaccatatctgacaaggagctcatatctagaatattgtttaaagttttcaaaagtcaacaacgacaacaagaaaaaacaagccaattagaaaatgggctaaargcatgaaccgatatttcactgaacaggatagattgatggaaaatgagaaaataaaaaaacttttatcagaggaatgccagtccttttaaattatcaagcccagagagacattaaa

SEQ ID NO: 850614 - DNA, 547 bp, Homo sapiens
agtgatcagatatcacctggggatggtagacaataagaaaaccaattagataccaatggtggtcagatatgaagatggaggaagactccatctcaaaaaaaaaaaaaaagatcacatatctcaatgtaaaaatatgaaatttaatgagaaattcttcaggtcctaggacttgatgaataattattagacatgacaccagaaaagcacaatcaattctaagaatttattaattggatgttatcaaaatttaaaacttttgccctgcataagagcctgttaataaaaagacagggtaaaaactggaagaaaagtgcaaaccacacctgataaaccatatctgacaaggagctcatatctagaatattgtttaaagttttcaaaagtcaacaacgacaacaagaaaaaacaagccaattagaaaatgggctaaaggcatgaaccgatatttcactgaacaggatagattgatggaaaatgagaaaataaaawaacttttatcagaggaatgccagtccttttaaattatcaagcccagagagacattaaa

SEQ ID NO: 850615 - DNA, 587 bp, Homo sapiens
ttgaataaaccccacctgagcatggtgtattatccttttgatgtgctgttggattcagtttgctaacatttaattgaggatttttgcatctatgtacatcaggagtattggcctgtagttttcttcartgtgtccttatcttgttttagtatgaggattattctggcctcatataacgagttagaaagaattcccttctcttcagttttctaggctagtttcaagaagattggtaccagttcttctttgtacatttggtggaatttagctgtgattccatccagtcctgagctttcctctgttgggacactttgtattgctgattcaattttgcacctcactattagtctgttcaggttttatatttcctcctgattaaatcttcgtaggttatatgttttcaggaatttatttcctctaggttttccagtttgtcagtgtatagttgttcataatattatccgatgatcttctgtatttctgtggtatcagttgaatgtttccattttcatttctgattttgtttatttggatcttctctcttcttgcatagcctatctagtggtttatcagttttgtttatcttt

SEQ ID NO: 850616 - DNA, 563 bp, Homo sapiens
cttcccgctattcccctcaatgcactagcataagagcaaagctaccttgaacattcaagcctcagtcatcaatcacctacaacttcatgaaagaccctacgtaagaccagcatgagaatcttccacgtaaacccaggcaacccatagaattatgataaattcactaactttctattattacattaatagaaacccaaagaggggattaaaaaaatcttgcccaccacagaaattgttcccaaaagcgtatcaaagagtgcatattactgaaagaaaatgacacagcaagactctgaagaatacaagtgggctctgtggttctgcctcagaactccattccaggttcatttcttatgattgtccaggttactttttgcatgactccagaatacacattcattttttaatcatcatagatttaatttctgttagacaacagtaaagtatattgaagaaatagtacctcactctgattttcrcaaagttccaatttggattagagagagggatgtacaagtaacatattaattaatggaaaattctaccggggttaatcaattcat

SEQ ID NO: 850617 - DNA, 525 bp, Homo sapiens
tgcatccatcacccgagaagtacacactgcaccatatttgtggtcttttatccctcgccccctcactcttcctcacaagtccccaaagtccattgtatcattcttatgcctttgcatcctcatagcttagctcccacatatcagtgagaacagacgattgtttggttttccattcctgagttacttcacttagaataatagtctccagtctcatccaggacactgcaaatgctgttaattcattcctttttatggctgagtagtatgccattttatatatataaatatatatatgtgtatgtatatatgtgtatatatacatatatatatacacatatatacacatatatatacacatgtatatatacatatatgtgtatatatatacacacatatatatacacatatatatgtgtatatatatacacatatatatgtatatatatatacacgtatatatatatacatatatatacrtgtatatatatatatgtatgacagtttctttatccactcattgattaa

SEQ ID NO: 850618 - DNA, 525 bp, Homo sapiens
tgcatccatcacccgagaagtacacactgcaccatatttgtggtcttttatccctcgccccctcactcttcctcacaagtccccaaagtccattgtatcattcttatgcctttgcatcctcatagcttagctcccacatatcagtgagaacagacgattgtttggttttccattcctgagttacttcacttagaataatagtctccagtctcatccaggacactgcaaatgctgttaattcattcctttttatggctgagtagtatgccattttatatatataaatatatatatgtgtatgtatatatgtgtatatatacatatatatatacacatatatacacatatatatacacatgtatatatacatatatgtgtatatatatacacacatatatatacacatatatatgtgtatatatatacacatatatatgtatatatatatacacgtatatatatatacatatatatacgygtatatatatatatgtatgacagtttctttatccactcattgattaa

SEQ ID NO: 850619 - DNA, 456 bp, Homo sapiens
attgcaaagctctttagaacagtatcaccatttaggaagtactcagtgtgtaagatgtttttcattatgacctctgattatgcaatacatacaccatggcaccccaaccttgcctgcctgaaccatgagaagggtactccaagccttcacattatcctgcctaccttgtcttaaagctcaacttcctttaatgtttttctctcaaccagttgacagggagaacaggttgagcacggatcagagcaggacttctgaaatttgactgttcaggtaaatcaagcggaatccttattaaaatgcaagtctggattcagtaggtctagaatagagcctgaggttgtgctattkttgctggtctgtggactacactttgaaaagcaagaggttggcatcttctaagtctaggttctaatgcactcaagagctctcagactttggacaagttcctcaacttct

SEQ ID NO: 850620 - DNA, 579 bp, Homo sapiens
acattattttgatgagaatttcagctgaaggatgaacagaatggttgtccagtaataataaaagcttgcagttgtcatctagtctggcttccctgcagtgaacatgagccactggtacaaaatgtctgtgaaaccaaacagaaaagatgttcttggaagtatatgcctttttgttagcataatacaataatgaactggtatgaaattcactctttgaaaacagggaggatctaagttttcgcccgacacagcaagtttacacttcggtgtgcctgttgcattagcacactccagcacagtcattctatctttggtatcattagttcacgtcggggctgtctcatcagatatagtctatgtctttttggggcagttacaacaacagagtgatgtttcattcacatcatatacttgttctggcatcatttacatcagtgataatcttggcaaacccatcaatgaatttgtccactttgtgatcagcagttgctttatcacaagtctttacagatttaatgctaygtcttttcttaaatttctgcaaccagcctgttgaatagtcaccgttcccttcaattt

SEQ ID NO: 850621 - DNA, 529 bp, Homo sapiens
gttttaatttttttgttgttttgttttttgtttttgtttcgagacggagccttgctctttgcccaggctggagtgcagtgacgcgatctcggctcactgcaacttctgcctcccgggtttaagcgattcttctgcctcagcttccagagtagctgggattacagacatgcaccacgatgatcagctaacttttgtatttttagtagagatggggtttcaccatgttgtccaggctggtctcaaactcctgacctcagatgatccacctgcctcaacctcccaaggtgctgggattacaggcgtgagagactgtgtccagcctaaaataattttttttttttaaaaaagaaagaaaactcacctatacagtggagctgcatatatgtaggatttgtttctaaagtcaactcacaaaatattttaaatctattaaacattgaacacaccagaatttgaaattcattttgcagaataarcgaaggaatttaagaataacccatatgcagttgtctagtcgttccaactattc

SEQ ID NO: 850622 - DNA, 529 bp, Homo sapiens
gttttaatttttttgttgttttgttttttgtttttgtttcgagacggagccttgctctttgcccaggctggagtgcagtgacgcgatctcggctcactgcaacttctgcctcccgggtttaagcgattcttctgcctcagcttccagagtagctgggattacagacatgcaccacgatgatcagctaacttttgtatttttagtagagatggggtttcaccatgttgtccaggctggtctcaaactcctgacctcagatgatccacctgcctcaacctcccaaggtgctgggattacaggcgtgagagactgtgtccagcctaaaataattttttttttttaaaaaagaaagaaaactcacctatacagtggagctgcatatatgtaggatttgtttctaaagtcaactcacaaaatattttaaatctattaaacattgaacacaccagaatttgaaattcattttgcagaataaaygaaggaatttaagaataacccatatgcagttgtctagtcgttccaactattc

SEQ ID NO: 850623 - DNA, 371 bp, Homo sapiens
cattcagttttgttcattatatttaggcggctgtttgtcttttaggtccatgtgtgatagtcttatcaccccatactttccctaacactagggccatgtctcatatttccactagcatccaaggggcaggcacacaaactgctcgggaaataattgtggactaattatgacttttcttcaattcaaagatacactcttttttacatttaacactctgaaatcagtcattcaattgatggtgcatcagaattaattgrcaggtttttttttttcttttttagcagcctcatagattagataaaatatagtaattaacaatcttgatcctgaaccttcatttggtgacttggtgttatgagagtttattcagc

SEQ ID NO: 850624 - DNA, 580 bp, Homo sapiens
gaaggatccttacctgctaccagccaygtggatgtttctctgaaaggcaaaggagaggttcttcagggtgtgtgtgtgtgtgtgtgtgtgtgtgtgtgtgtgtgtgagaaacagatagacagacagacataatcagatttgaattttatttatttatttatttatttttgagacaaagtctcactctgttgcccaggctgcagtgcagtggtgcaattatggctcactgcaacctccatctcccaagttcaagcaattctcctgcctcagcctcccgagtagctgggattacaggtgcctgccactatacccgcctaattttggtagttttagtagagaaggggtctcaccatgttggccaggctggtcttgaactcctgacctcaagtgatccgcccgctttggcctccaaaagtattgggattacagacgtgagcccctgcgcctggcccgatttgcattttagaaaaatctttcttgctgctgtgagggccatgggtcagaaagggagcaaaggtggaggtaggcagagcagttgagaggctatggaaggaaataaggtgaagtaaggcagcagagg

SEQ ID NO: 850625 - DNA, 645 bp, Homo sapiens
tcagcaacatgttttcaccagaaggttacattgtttcattgttttgtctattttcttcttcatcttcttcatctatgatcatctttttactgataactctatctttctatctcccatccagtctattggaaaggctcagacacatgaccaaagtatgctatgtcttctcagcatatttctctgtctttattgttgatactgacttcctcgtgtaaactactggagaaccccatcaatcagaaaagctgtttatttaacttgctgaagcaagtgagaacaccatcttgagatattttagtactatgttaaaagagagaaaatagttaaggttacttatagggatttggggtctgagatcaagtggtttaaaggaaagaaacgggtttgtttttgacaaggtgtaagacaatattttaggattgtgagaaaagtgttctgtgacaagttttaaaaagccgattttgtgattttaagtaaactgtttatactgaagtgcaaactatcattttaattagacacttgattgcctagatgagaaaactgcccaaaaaatggtttccaataattttctaaaagaaacagtaaagttattgatgatgtgcaaccttgcctcttgtgcaaraacttcctggagcaagtagttat

SEQ ID NO: 850626 - DNA, 570 bp, Homo sapiens
cccacctctctggctcatggtctggcataatttcctgaccacagcacaaaaatctggaatagaaacagaagacaatggtccctttgagctgaggaggcagaggtcrgtgttcaacatgaagtgtctgaaagatttaaagcagggcaccaaggcagagggaagcatggtcagaagagggaaaaattctctgatttctctgccaagggctgtgtttgcagggagagacgacttaaggctaatcagaaagaagctacgggaacagagatagcagtgattaagcaatgatcaagaacattggagttctagccgacaccaaggaaaaactatctcattaccatcttactaactcatctagctgaggcagcagaaagcaaagaccatgctccagagtaagccctaatctagattctttggggaaaaaaaaaggctaaaaccaagtctaagcaagaccacaggagaaattgaatttggtaattgggtcttactgtattagaagagcttggtaaacatcttggacttctcacaaaatatgttcctaaaaatcacaaaactaagccaacacagtttcaa

SEQ ID NO: 850627 - DNA, 619 bp, Homo sapiens
caagtcttttgtacatttttcaaaatgaggttattttctttttattattgagttttaagagtttcctaatatactctggataaaagttatttgtcagatatttgtgttacaaatgtgttgtattttgytattttcttaattttgtcttttgatgagcacacactcatacacatacacacagtggcatactgtaaagtctcaaaaaaaagaaaatgctgtcatttacagcaacatggatgctactggaggacattatgctaagagaaataaaccaggaaccaaaagacaaatactgtatcgtcccatttatatgcagaatctaaaaaagtcagtctggtagaaacagagtagaaaggtgattaccaaaggctgggggaagggagagagatggggaaagggaagatgttgatcaaaggatacaaaatttcagttagactggaggaataagttttagtgatctattgcactgcatggtgggcacagttaataatgtattatatatttcaaaattgctaaaagaatagatttttaattttctcaccaccaaaagaaagataatttggcactatgatgtgaatatcccaaaaatgatgtgttgaaaacttgattcccagtgaag

SEQ ID NO: 850628 - DNA, 631 bp, Homo sapiens
gctgtggggttttgcagactgtggatcccaaactttgcagtattagccaagcctttgtatgaggtcacaaagtggggggaacaggaactttttgaatgggaatcccgacaacaacaagcctttcataagttaaaggaaaaacttatgtcagccccagccctggggctacccgatctgacaaagccttttacattgtatgtgtcagagagagaaaagatggcagttggagttttaacccaaactgtggggccctggccgaggccggtggcctacctctctaaacaactacatggggtttctaaagaatggcccccatgtttgagggccttggcagcaactgccctgctagtacaagaagcagataagctgactcttgggcaaaacctgaacataaaggctccccatgctgtggtgacattaatgaatactaaaggacatcattggctaacgaatgttagactcaccaagtaccaaagtttgctctgtgaaaatccctgtataaccattaaagtttgtaacaccctgaaccctgctaccttgmtcccagtatcagagagccctgtcaagcatgactgtgtagaagtgttggactcagtctactctagcagacctgacctctgagaccggcctt

SEQ ID NO: 850629 - DNA, 377 bp, Homo sapiens
ccctgtacctcaccttgagggacctgatgggacttgagcctaggtataggcctagaagcaaagggggtgggtcctgagaagaatcagtattgtcttccttccaggacaattgtcattacagtttcctcaggaaatgcagagttaactcctgagagagcgggatgcacctttcactgaaaatggaaaggcctctccactggcaaagaagacccattagaatttaggggctcaatgtctccagtttcatcagaatmttcccacatgtccccattctaacttataggatctcattttttcccagtcaatgccctcactttaacagtcaacctcagcaaggctgagagttcaacttacattcagccaatggaaagatgaga

SEQ ID NO: 850630 - DNA, 377 bp, Homo sapiens
ccctgtacctcaccttgagggacctgatgggacttgagcctaggtataggcctagaagcaaagggggtgggtcctgagaagaatcagtattgtcttccttccaggacaattgtcattacagtttcctcaggaaatgcagagttaactcctgagagagcgggatgcacctttcactgaaaatggaaaggcctctccactggcaaagaagacccattagaatttaggggctcaatgtctccagtttcatcagaatcttcccacatgtccccattctaacttataggatctcattttttcccagtcaatgccctcactttaacagtcaacctcagcaaggctgrgagttcaacttacattcagccaatggaaagatgaga

SEQ ID NO: 850631 - DNA, 610 bp, Homo sapiens
cctttgaaaactggcacaagactaggatgccctctctcaccactcctattcaacatagtgttggaagttctggccagggcaattaggcaggagawggaaataaagagtattcaaataggaaaagagggagtcaaattgtctctgtttgcagatgacatgactgtatatttagaaaaccccatcatctcagcccaaaatctccacaagctgataagcaacttcagcaaagtctcaggatacaaaatcaatgtgcaaaaatcacaaacattcctatacaccaataatagacaaacagagagtgaaattataagtgaactcccattcacaattgctacaaagagaataaaatacctaggaatacaacttacaagggatgtgaaggacctcttcaaggagaactacaaaccactgttcaaggaaataagagaggatacaaataaatggaaaaacattccatgctcatggataggaagaatcaatgttgtgaaaatggccatactgcccaaagtaatttatagattcagtgatatcccccatcaagctatcattgactttcttcacagaattggaaaaaactactttaaagttcatagggaaccaaaaaagagcc

SEQ ID NO: 850632 - DNA, 518 bp, Homo sapiens
ttgagatctttccagctttctgatatgggcacttagtgctataaatttccctcttaacactgctttagctgtgtyccagggatgctggtatgttgtctctttgttcttaccggtttcaaagaacttcttgatttctgccttaatttcattatttaccaaggagtcattcaggaccaggttgttcaatttccatgtagttgtgtggttttgagtgagttccttaatcctgagttctaacttgattgcactgtggtctgacagactgttatgatttcggttcttttgcacttgctgaggaatgttttacttccaattatgtggtcaattttagaataaataccatatggcattgagaagaatgtatattgtgttgatttgaggtggaaagttctgtagatgtctattaggtccacttaatccagagctgagttcaagtcctgaatatccttgttaattttctgtcttgttgatctaatattgacattggggtgttaaagtctcccactattattgtgtag

SEQ ID NO: 850633 - DNA, 605 bp, Homo sapiens
tacatttatcttgttttttttgagacatagtcttggtctattgcccaggctggagtgcaatggtgctatcctggctcatgcaacctctgccttccacattcaagtgattctcaagtctcagcctccctagtagctgggactagaggcacaccccaccatgcctggctaattttttttcagtataaatggggtttcaccacattggccaggctggtcttgaagtcctgacctcgtcatccacctgcctcgtcctcccaaagtgctgggattacaggcatgagccatgacacctggccctatcttctagcactatttggattatgagcttctggaagtcagggaggatatctgtatagagcctaggccagcactgtatcctcaacgaccaacctaccagccagggcagggaggtgggagaaggtgcacagagcaaatatgtggtctcatgcagagatgcacatctctacctccttattacccaggagacagcttattctgctttggcagatttacgggatttgttgaccaagattcgtgacctgaagggtcacttaycctgattcccgtagagtttatatattccttaacaatggaaaagagcaagg

SEQ ID NO: 850634 - DNA, 611 bp, Homo sapiens
ggaagcaaacaaaccaaaaacctacaatgagtagtactcacacagctacccgagtagctaaaattaaatactgatgatactgaatgcttggaagtggagcaatttgaactctcatacactggagtaaaaattggtgctgcttttttgggaaattctatggtctggcaattcctctcctaatgataggcccagcaaaaatgcaaccatatgtgcaccaaaaatatatacaatactgttcaaagaagttagtaatagtgccaaactagaagcaagcccaggtcttattagcaataaaatagattaatgatggtatcttcatacaatgaaatgctgtacaacaatgagaagtaacaaactatcgatacaaccaacaccttggatgttgatctcagaatcgtaattaggtgaaataagcaaaacacaagaatgcacttaattatggtagaaaacaagtcaaactaatatatggttatagactcagtaacaatgaaatcacagttactttgtgaagcatctcagaggaggcctgagggttttggtaactttctatttcttgatgtcrtgtgggaggtacaccggatatgtatactttgtaaaaactgagttgtaaa

SEQ ID NO: 850635 - DNA, 648 bp, Homo sapiens
ctagtgtctatttcagagaggatccaactgacaggatgtttaaggcagattatctgacagctatatctgagatagmttagagaaagtagacaccgggctcagagataaaaactaaaggatttcacagcaatgttggtatggtataagtgactgtgaaaataaagcagaagtgaaaaaggatcaaggatgacataattttgaaccatatatctggaaggatagtgtcaggaataagttagaggcaggctctgattaggactagaggttgatgtcaggttttgacaatgctgtgttggagtgtgtgatatccagtaggcagttgaagatatggagtcaattctgaagagtaggaagaactatttagtcatatttatagactattgtgatgggtttatagcagttaaaaggattaggtttttgagggtggcagtggtgagtaaaacacctattgttgggaaatgtcattgagttaaaactttttcctctaaggctctgattgcccactgagttagatgttcctttagcatcttgccgacaaaatacattgagctaatgactaatgcatcagtattttgttactgttcttagatctattgagatttaaaaagtaatgtggaatgcaaagaatgaaaagcttctcaattttgt

SEQ ID NO: 850636 - DNA, 334 bp, Homo sapiens
ttattgaggtcatttttattctttataagataaatctcaaaagtcttacagctttaaaggcctaatatgtttataaagtaagaaaacctttattacctttatcgtcgcatactttgactactgcccaaagtgacttaaacaaaatcaagacgatacacaatcacaactgtccacttcttcagaatgttctttccttctcccccaagcctttcctttcttccccttttcttctccttccagtgtgatggtgaagggaattcattttggaatcagatagttytggctggaatcctggctttgctattagctagctgtgtagtctcggctaagttaa

SEQ ID NO: 850637 - DNA, 320 bp, Homo sapiens
attatccttcactaaacaataaggatccaatcatgggtgcagagagaggacaatgctgttgtttctgattttttatcttccttgtcccaggaggtgataaggagargagagtaagtgatttcacactgctaaacaaggcataatcctggcaaggggtggccaaagggcccagagcatccgcacatccctcctagaaaagattcatctgggtcaataaaatgctgttttgaagaccagttacgcccaaggagggttaaatcaactggtcattcacagtttagatcaaaggttttttttttttttttttttttttttttttt

SEQ ID NO: 850638 - DNA, 616 bp, Homo sapiens
ggttgattcttgcttctgtagcccagaccctaatgatgagttgcatcaatacaaagctatcattcagtgggtgaatatgtgatgtcgttattgcaggttttatggaacataacattttgatggcaaaaaaggagatacaaatcgtgtgcacccaaatccccctgactctctctgcccccaaggagagtgactatgccatcaaaatcctgtttcataggccaggcacagtggctcatgcctgtagtccagcccttggggaggccaaggcgggcggatcacaaggttaggagttcgagactaacctggccaacatgatgaaaccccatctgtactaaaactacaaaaattagctgggcatggtggtgggcgcctgtaatcccagctactcaggaggctgaggcaggagaattgcttgaacccaggagttggaggttgcagtgagccgagatcgcaccactgcactccagcctgggtgacagagtaaggctctttcaaaaataataataataataataattctgtttcatagagaaagattctgataacagatttccgtaagttcatctgcatgttgagyaatttggctgggctggatgtggtcttaggcatatgtata

SEQ ID NO: 850639 - DNA, 645 bp, Homo sapiens
catcttttctttgctagattgaagcaatgtctaaaagactacctatgtgtattttagagaagcataatgaatttgacagaatgtatttaaatttccatatatatatttttaagaatgytcatcaaaatattgtgagtatgttaattatgtgaggatacattattaatgacataagttatttactttagaagttttttcaatattaaaaaggactaggtagagatcttgggacatttaatggctattcttcattcttccagcctactgacacattcagccaaactcacgcttctttcagtacagttacccacctgctttcgagcatccacatcagcagcatcttcaatgtaagtatcatctatttcacgttcttccagctccttctcggcattttctggtagaacaatttcaaaatcattcttaggggcaggaaggcccaacaaccctaaacggagatgttctcgggattctctttcctgtagaaaagaagtggtccttctcaattcatgcatattaaacattccaccagtattttatgagtctcttaaaaattgatagcacaacagggtgactctagtcaaaataactgtacattttaaaataactaagaataattggatggtttcaaacacaaaggttaaatgc

SEQ ID NO: 850640 - DNA, 645 bp, Homo sapiens
catcttttctttgctagattgaagcaatgtctaaaagactacctatgtgtattttagagaagcataatgaatttgacagaatgtatttaaatttccatatatatatttttaagaatgttcatcaaaatattgtgagtatgttaattatgtgaggatacattattaatgacataagttatttactttagaagttttttcaatattaaaaaggactaggtagagatcttgggacatttaatggctattcttcattcttccagcctactgacacattcagccaaactcacgcttctttcagtacagttacccacctgctttcgagcatccacatcagcagcatcttcaatgtaagtatcatctatttcacgttcttccagctccttctcggcattttctggtagaacaatttcaaaatcattcttaggggcaggaaggcccaacaaccctaaacggagatgttctcgggattctctttcctgtagaaaagaagtggtccttctcaattcatgcatattaaacattccaccmgtattttatgagtctcttaaaaattgatagcacaacagggtgactctagtcaaaataactgtacattttaaaataactaagaataattggatggtttcaaacacaaaggttaaatgc

SEQ ID NO: 850641 - DNA, 591 bp, Homo sapiens
cccctaaagctctgacaccgccttctctccgtgtgctccccccaccacctccaccctgatgtgcttcagtgtgcatgtctgtgaacagccctcctgccctgccaactcccctggctaaagtctccccagcagatttagcacccagggattgagctcacatttcaggctagagaggataacccttgggccacccacatctctcacccctgatgcttcttacttcgcctgagccatcagaactcctccttaccctccttcagcccctctcatcttccttcagcccagccaggcctgcaccaccaactgtgtggcctccacctatgcaacatcgcctctggctccccttcccttcttcctagcggggagtgcgaggggcccaaattgtggggataccatggcccatggcttctaaagggtttagctttactttcaggtagagatggctgagtgaggagggagaagaggctagagagagggaggcttgggcrggggaaacagctgcccaccaggttttcctggacagcagtgcccacctgcctactagcactgaacctgcctggaccctgagtctgtgctccttgggggcctggc

SEQ ID NO: 850642 - DNA, 595 bp, Homo sapiens
tttcatatcatgtattgttttcataatttaaaataactaccaatacatcataagcaatctttagtaagtttatcatttgattgctcaatttattccaaagcctgtatgactgtctatttaatattagatgtttgagacacagaaaacacaaaaaaactcattgtcctagaggagcctaaagtttatagaatttatgaggacttatgtttcatttctaaaagattttgggaagtttttctgttgaggttgggctgcctctgtgtctgataactaggaagaacaccaacagctccttttctacaagaggtgtattgttcccattctcttcagtgccacatccttgctttagtgcttccactgaccttgtgcttcctgaactcctacgtaaccttagtttgtgtcagtaatgtagtacttaataatacagcatcttctctccttagcccacctcctcaccatcagctcacctcctcaccatcctttctttccctagcccaccccaatcagkttctgtctgctctgttccactgaaaattttcttgttaaggttacaatgttgaagatgttttgctaaaaaaaaccaaaaggccaaaat

SEQ ID NO: 850643 - DNA, 669 bp, Homo sapiens
ttacaaaatcctgtttaaatcaagttcaataaagtctcatacattttgatagaatatgactcatgaaacaaaaatacgtctctaggactggaagcaggaaaccagactctcagggaaaactaagactactcccgtaattaatttgtgtgacctcaggcaaagcaaacatactttcattgtctattttccctttcccaaaatgggaccatctaaatgctataataataatgaacattgattgcatatgtcgtctgtgccagacactgctttttgtgtcttctgtggattatctcattgaatcctccccaagacttctgaggtagttgtctttatttttcacagtttatggaggagaaaactgaggctcacacagctcaagatcacatagctagaaacggggaacagaaatttaaatcaggtgaactgattcacttgttttaattatgttaaagggtggtttgcataactaaggtcggggtccagagaaactactggtaatgaaatatctttatgatctacaggcaggacaggaaaaactgcagaaaaatctgaaaaatagagatatgtctaacccccttaacttkgctttaacttagctgtgtaactttaaacagcattttctaaagtgtaatctacaacacgttgataggtactaatctgagggaaaaa

SEQ ID NO: 850644 - DNA, 643 bp, Homo sapiens
atttgagtttattgtcacttgcaacaaaatattactggatttccacaaattcacaatcagttggggaaaagtcgatatgtgaacaggtaaacactgaaaatagatggtttgtatgatacaggtgaacacgagggcctttaaccagtgtgggtgttgaggtgggggaaagtgtccacttccctccaggagacaatatctggtctgaatcttgaaatatacttagcagttgtcatgatgtatctatcaaacagaggatggcagagagacattccagggagaagagaaggcatgagtcaaggcatggcgtgaaatgggatgatagtttctgggaactacaagtcactcatactagctttaatgcagcctggatggtgaaggcaaagggagagatgctacagagaaaggcacaggccatactgtgaagtgtccaatagtttgtcctaacaagataatgttatcctgggaattttgagagagcattgagaaattaatttttccactttaaaaatgaacattctaatccttccccagcctatgtaccataaaagatgatggtgaaggtctcttagtaaaatgtctgtgaaaatgctytgaaccaggtataaattggctaattatactatggaaaacagaaactggaata

SEQ ID NO: 850645 - DNA, 441 bp, Homo sapiens
tggctcctccccgtcttctggacctctaaagccgggaaggcccaaggattccgatgaccacgctttgctctcctccatcctcactccacacagccggtctcttgacttccaatttcctgtctctccagatggaatctccagtaggtgccagtcctatggatctaactgcccctcaacaaaaccacctgaatgtctgctcacatgcagaaattaacttacccagaaccaaaccttgatttttttaccccacaaacctgctactctctgaggcttcctcagtctgagtaaacgaccacttcattcttccaggtctttgttaggccaaaggcctggagctttccatggctgtctttctctacactggcatctccctagactctacctttaaagaacatccaaartctgaccacctctcctgccaccatgaccaccctggtacaa

SEQ ID NO: 850646 - DNA, 474 bp, Homo sapiens
aataaatacatcggggagaagggacaggcgttttttatggaagaattacagagtacacatagacattcctcagggtggagattagctgctgtcttcttgactgctggctccctgggcactcgctcccgcagaaccgcgtgtggaaagggaaggcagtgggtttgcagtggagagatgtggccggcaccacggagccaacgggatcaaggttaacatcgctggtgaggaggcctgtccctgtcctgtatcccccatatgacgggacaagaaagcgcctcaccagggagctgtcctccgcaaacccacagccccagcctaatcatgagaaaacagcaaacaaaccaaaattaaggaacagyctacagactacggtgctcttcaaaagagtccaggtcatgaaaaacaaggaaaatgaaaagctgtcacagagcagccagaagatccgatgactgagtccaacagggaatccaggac

SEQ ID NO: 850647 - DNA, 474 bp, Homo sapiens
aataaatacatcggggagaagggacaggcgttttttatggaagaattacagagtacacatagacattcctcagggtggagattagctgctgtcttcttgactgctggctccctgggcactcgctcccgcagaaccgcgtgtggaaagggaaggcagtgggtttgcagtggagagatgtggccggcaccacggagccaacgggatcaaggttaacatcgctggtgaggaggcctgtccctgtcctgtatcccccatatgacgggacaagaaagcgcctcaccagggagctgtcctccgcaaacccacagccccagcctaatcatgagaaaacagcaaacaaaccaaaattaaggaacagtctacagactacggtgctcttcaaaagrgtccaggtcatgaaaaacaaggaaaatgaaaagctgtcacagagcagccagaagatccgatgactgagtccaacagggaatccaggac

SEQ ID NO: 850648 - DNA, 625 bp, Homo sapiens
catcagaaggacacaagagccaatgggaaagagctcaaagcagccacagaagaaataatgtggcgatggatggtgacccaaagtgtagagtaaatatatgagcccatgctgacgcagatcaatgattgagtaataaatacatcggggagaagggacaggcgttttttatggaagaattacagagtacacatagacattcctcagggtggagattagctgctgtcttcttgactgctggctccctgggcactcgctcccgcagaaccgcgtgtggaaagggaaggcagtgggtttgcagtggagagatgtggccggcaccacggagccaacgggatcaaggttaacatcgctggtgaggaggcctgtccctgtcctgtatcccccatatgacgggacaagaaagcgcctcaccagggagctgtcctccgcaaacccacagccccagcctaatcatgagaaaacagcaaacaaaccaaaattaaggaacagtctacagactacggtgctcttcaaaagagtccaggtcatgaaaaacaagsaaaatgaaaagctgtcacagagcagccagaagatccgatgactgagtccaacagggaatccaggacaggatcctggcacagaaaaa

SEQ ID NO: 850649 - DNA, 625 bp, Homo sapiens
catcagaaggacacaagagccaatgggaaagagctcaaagcagccacagaagaaataatgtggcgatggatggtgacccaaagtgtagagtaaatatatgagcccatgctgacgcagatcaatgattgagtaataaatacatcggggagaagggacaggcgttttttatggaagaattacagagtacacatagacattcctcagggtggagattagctgctgtcttcttgactgctggctccctgggcactcgctcccgcagaaccgcgtgtggaaagggaaggcagtgggtttgcagtggagagatgtggccggcaccacggagccaacgggatcaaggttaacatcgctggtgaggaggcctgtccctgtcctgtatcccccatatgacgggacaagaaagcgcctcaccagggagctgtcctccgcaaacccacagccccagcctaatcatgagaaaacagcaaacaaaccaaaattaaggaacagtctacagactacggtgctcttcaaaagagtccaggtcatgaaaaacaaggaaaatgaaaagctgtcacagagcagccagaagatmcgatgactgagtccaacagggaatccaggacaggatcctggcacagaaaaa

SEQ ID NO: 850650 - DNA, 529 bp, Homo sapiens
tactgtcctctacaaccaaatcaagagtcttttagtccgaattcccctccccaatctttcacgccattgtgttggcttctgccaggatttttactctaacttgattttcaccctcagtattagttatgattattaccgtggtgtttatgtaaccagtgtttactttaaactttctaaatttatgcagaatttggggctcttctttcttatattttgggcctttcttcttggcacaatttccttctacttgacgagcatgaggagacgggggcaatcagcccttttggctcatctgaaaatgtcctttgttttgccttgttcatgagtggtcgttcgtcctgatgcaccttctgacccctcatcccatagctattacatggccaccctgtggcagggcattgttttagggctagggatmcagcagtgagcaaatttgtgaaaagttcttatttcatgacattttattggagggaagcataaaataatcaggtaaaaataaatatcaatataaaaatcagtctctatgaaa

SEQ ID NO: 850651 - DNA, 634 bp, Homo sapiens
attgacacatatttcaaaattatgtaaaacacctataattctaatatgacttagtataagttatcagtaataattataattattatgttaaatgactgtgtgccacagaggtaacaaatttccttgccaattgtgtctttaactgtggctgccctaaaatgttttgtcatccacaggcaattgttgtctcatttaggtcctctttttttctttttttttttttttggagatggagtttcactcttgtactcttgtcgcccaggctggagtgcaatgacacgatcttggctgactgcaacctctgcctcccgggttcaagcaattctcctgcctcagcctcctgagcagatgggattacaggtgtgtgccaccatgctcggctaatttttgtattattagtagagacggggtttcaccatggtggctaggctggtctcgaactcctcacctcaggtgatccactcacctcggtcccccaaagtgctgggattacaggtgtgagccactgtgcctggcyagtcctctttaaaggatggttttataatcagctataaaatttaacaggggctcttcagtgcagatttctgattaataacctggagattgtgacgttagaatagagaaaaaaactttc

SEQ ID NO: 850652 - DNA, 644 bp, Homo sapiens
gaggggcatcgccattactgaggctttggtcggtggttttcccctgacggtactgaggctgggaggtctggactggacagaattcaccacagtgtgtcaaagcagctgtggccagactgcttctctagattcttccgcaatgggcagggaatctctgaaggaggttaacagccccagtcaggggcttacagacaaaacccccatcttctggggacagagcacctgggggaaggggcagctgtgagcgcagcttctgtggatttaatcattcctgcctgcctgctctgaagagagcagctggtcctgacaagagggattctcccagcacagcgcaccagctctgctaagggacagactacttcctaagtgggtccctgaccccccctgcctcctgactgggagagacctcccaccaggggtcaacagacacctcatataggagagctctggctggcatcaggccagtgcccctctgggacaaagcttccagaagaagaagcaggcagcaatctttattgttctgcagmctccactggtgacacccaggcaaacagggtctgggatctgcagtggacctccagcaaactgcagcagacctacagaagagggccctgactgttagaagaaaagctaacagaaagcaa

SEQ ID NO: 850653 - DNA, 619 bp, Homo sapiens
agcatgatttgccctgaacatcactcttctagaaaagaaataataccagtacccaaggacattatactggttaggataggctaagttatgttgcagtaacaaataatcctaagacatcagtgccttaatataacaaaagtttatttctcacattttatatgacaaatttttcattcacacatccttccttaatcactgcagcaagaggaaggggatgggtcaaattatgaactattttttaaagcttctgtccagaggtcatccaatcctttctatttcattaactgaatcaagtcatgcccacctaactttgaaatgggtaaggaagtgtaatcctacaatacacctgaaaagagagaagaactgyaatatttatgaacaattctgggggttattataggtataatcctttgtgagagaaattttctctttagattatttcagagttttagttaatagctaccatttcttggggtgagctgcttgactcacgtctttactcatgactcaagaggacacacgcatgacttaggagtgcaaagatgaaaagattatcctttttctcaagaatcttgcaggccagtgatgaggaaagaggtaatgatatgcatgtgaggag

SEQ ID NO: 850654 - DNA, 574 bp, Homo sapiens
tctctttgcccttttcccagttccactgacagccctctccaggtagccctatgagacaagtcagaaatggcttcccygggaacccagagatcccaaagggcttttcccaccacttcctctattcctgtatttcactcagctctctaaattgactcagctccaggtaaggtcagaatcttctcccatgatctagaccttcaagttcccaagtgagggtgtgtgtttgggggcagacagtccccctttcccacttccacagtttgggcactcacagtatttggtgtgtctcccaggtcctgcaggagcgatctcgtctgtgggttctcttggctttcctgaattgttcctgcagtagttctggagcaaaaattcatgatgcgagactccacatgctactctgtccatctgagtgggagctgaaatctagtcctgcctcccatccaccatgatcctcctttgtctattttttaattgagttatttgtttttctgctattgagttataagtgttcttcataaattttggatattaacccctcattagatatgtggtttgcaaatattttttccaattc

SEQ ID NO: 850655 - DNA, 511 bp, Homo sapiens
ctgtcttagaacaccttactcccccttcttggcccttgtaatgctactcctccattcctacctctggaagatcttctctgacctctcactgccccctaccccaaccctcacygctcccaaggactccagggtaatgtagtactgctctcttcaggacttcctgaccatatttgattatctcagttatgatgtttttctcactgtcttgcaattatttgtacacatttctgcctgccaaagaaattgtgagctcctaaaaggcaggacttacctagcatatttcctgccacattgcaggaatcaaaacatatttactgagccacctgggtaactatagatgattatgtcctttaaataaataaaccacagattaaaggataaacattaggtaatgagaacctcaactcaagcaattttttagagatattttacaactttaaagtctgctcaatgtaatcaattaaaatatcagactaaatgttacttacaacacaaatgcaaaactatcttc

SEQ ID NO: 850656 - DNA, 437 bp, Homo sapiens
tatagtttatgcacttttctatgtgtgttaactataattaaaaatataatgttttctcaaaaacaccatgttttccattgcaaattacaataaactaatttcatccaagtcattcctttttcctccaatagcttctgcctcaaaataaggaggaaaaaaaatgtacctgtctaaggtaagcataatcagtattatgcaacccactttctgtgtaagaaaatttacatttcttttaaaaagcctaaaataaaagaagacacatttaatctcatgtcctttagatccatttgggcttcttgcaccaactcttgccaagagtcaaacatatctatgatggctgtgttacatgtatgtctstgtgtgtgtgtgtgtttatgtgggtgtttagttttatgttatcttttattaatgattcttcccagcagctcagttaagaa

SEQ ID NO: 850657 - DNA, 632 bp, Homo sapiens
gatccccaacctttttggcaccagggaccagttttgtggaagacaattcttccacagaccgggatcagtggatggtttcaggataattcaagtgcattgcatttattgtgcactttatttctattattattgcattgtaatatataatgaaatattaataattatacaactcactataatgcattatagaatcagtgagagtcctgagcttgttttcctgcaactacatggtcccatctggggtgatgggagacagcaacagatcatcaggcattagattctcataaggagcacgagacctagatccctcacatgcgcagttcgcaatagggtttgtgctctcgtgagactctaaggctgctgctgatctgacaggaggaagagctcaggcggtaatgctcactgcctgaccactcagcataccctgttcagcctggttcctaacaggtcacagaccactactggtctatgatccagggtttagggacccctgctataatggaggtcacagaaaaaatggagacttgcttccctttctttcccaggttacagaatcttcacaagtgctagtagaagcaagcataggattcagtaascaaatttctaaaagaatatgaaatgtaaaaagggtg

SEQ ID NO: 850658 - DNA, 595 bp, Homo sapiens; identical to SEQ ID NO: 820384

SEQ ID NO: 850659 - DNA, 645 bp, Homo sapiens
caaaatatttgaatactgagctcaaaacagctttgatggaatcagattcctcctccctttctttattttttaccctggtgctaggaggtggtgtagaggaagggtgatcttttcacaaatggtgctaagacgattaacagtttacaaaaataaaataaaattgggtgtctacctccccatacaagaaatcaactcaatgtatgggtagtatagctcttaccagataatatagataatatagattatctggtgacctgtgggtaatagaagatgttttgaacagaacatgaatgcactagccacacaggatgaatgatatatttgcctgcaataaaactgatcactttatttcatcagaggaccttcatacaggagtgaaagggcaaggcacggagatggagaagatgtttgtaacatacatagcatttaattatatgaagttcctaaaaataaatatgtaaaagacagtgctattgaaaattggagttgggcgtggtggctcatgcctgtaacccaaacgctttgggaggccaaggcaggaggattgcttgagccctggaatttgagaccagtctgggcaacatrgcaagaccctgcctctagaaaatgaaaaattaaagagctaggcatagtggtacatgcctg

SEQ ID NO: 850660 - DNA, 298 bp, Homo sapiens
cgccgggcctcgcttcagccgggcgattcttcccctcatttgttgcattgtttgcattaatatgaatatcttgttctgtttgttttgtctcctgagagccaataaagctgtgttttttctttmcaccaaaaaaaaaaaaaaaaaaaaaaaggaataagtagcttatggcacagtgacacactggtagaattaagttatggtggtagcagtcgctgactggggaagccatatttacatcatcctgtttccttgatgagtcctgtgcctgccccctctccagctgattcataggaagtct

SEQ ID NO: 850661 - DNA, 641 bp, Homo sapiens
gaaagggaaaccaaaaaagcattagtatcaaagatgccacattttaagtgattctctgggatatatgaacttttgtcacacagatatttttaaagtacactgagaaaagatatattaataattgaaccttacatttcaattttaacttgaaagtgtcttacaaaaatgaactgataaatcttgattaaatctcttttagatgggtgagtataattaaatactataggtcagacatgcattggttatgattactgacaatagtactgctatagtaacatgaacaccacaggcccggcaccaaaattcttaacttgtacaaaatgttcagtggttctaatggacattctttgtgaatccagatccaaattgtgccccatgtgctcacatctttagaaaatgtttgaactcagtaatgcttattcttgttaactgtgtatagtacagcacatgtgagtcacccacagcagcatgaggtaatctgggctaatattgcaattacatttagattgcaccatctgggtcaaacaaattcattacaaataaacctagtccctaatgaggtgtggctttgtctaacaaagaawaaagatgatgaaagtcactttacttgtgcttttggtggttactattcagtgagtacc

SEQ ID NO: 850662 - DNA, 461 bp, Homo sapiens
ataaggctatttttaaacgggtatatattattaaattgagaccctggctatattaggtcaccctgcattcatataatttacgacttcatgtattcactccgttcggcattactatccctagtaaacagcgatttgcccttagctatgtaaacgattttagctatatagacgatatttatcagcatcataaagaaggattcactgaacattcattgaagacataattgtgtgtaacattgcgagtattaaatatagctttttagacatagcactggccttaggtggtaatgctgaatgttgttgatgcatgaatctataacctgctattaaatgtcctcatttctcagaacataaagttaataatgctatataagaaaccaacctcattatactgaacaccacttcagttttagyttgtgtttttgaaatgatgatacttcacatcaaaggcaaatgttgag

SEQ ID NO: 850663 - DNA, 598 bp, Homo sapiens
tcatggcccaggtggtgtggtttgggggcaaagagctgtcctagaagtttcctaatttggcaggtggttttcctgttcagcagcttcagcagcagtggtagtatactcatwcataatcagaaatattccagttatctgttgctgtgtaatgaaccatccccaaacttagtgacttaaaacaaaatttattattacttctcatggtctaagcataaactgggctcaagtaggtaagcttcccttgggctctcttatgacgttacattcagatgtgcaccgggctacagttatttgatggctcaactgggctggatgtcctggggtctcactctctggcagttgaagccagctattggctgggaattcaccagaatttggtggctgacgcacctaccgtgacacacctcactgtgttgttcaggctgcccatgacgtggtgtccaggctcagaggaggcacatcccaacagtcagcattccaaacagcaggaatcagaagctgccagaagccgcagttagggctacaccaggaacagacacagagtcatttctaccacattctgttagccaaatgataccactcaaccaactcacactta

SEQ ID NO: 850664 - DNA, 605 bp, Homo sapiens
gtataatcccagcactttgggaggctgaggctggtggattgcttgagctcaggagatgaagaccagcgtgggcaagatggtgaagctccatctctataaaaaatataaaaataggctgggcgcagtggctcatgcctgtaatcccagcactttgggaggccgaggtgggcggatcacctgaggtcaggaattcaagaccagcctgaccgatatgatgaaactctgtctctactaaaaatacataaattagctgggcgtggtggcatgcacctgtaatcccggctactcgggaagctgagacaggagaatcgcttgaacccaggagacagaggttgcagtgagctgagatcacgctattgcactccagcctgggcaacaagagcgaaactgtctcaaaaaaaaaaaaaaaaatatatatatatatatgtaaattagctgggcttggtggcatgaacctataatctgagctactyaggaggctgaggcaggaggatcgcttcagtccaggaagtggaggttgctgtgagcctagattgagccactgcactttagtctggttgacaaagtgagactctgtctcagaaaataaataaataaataaataa

SEQ ID NO: 850665 - DNA, 605 bp, Homo sapiens
gtataatcccagcactttgggaggctgaggctggtggattgcttgagctcaggagatgaagaccagcgtgggcaagatggtgaagctccatctctataaaaaatataaaaataggctgggcgcagtggctcatgcctgtaatcccagcactttgggaggccgaggtgggcggatcacctgaggtcaggaattcaagaccagcctgaccgatatgatgaaactctgtctctactaaaaatacataaattagctgggcgtggtggcatgcacctgtaatcccggctactcgggaagctgagacaggagaatcgcttgaacccaggagacagaggttgcagtgagctgagatcacgctattgcactccagcctgggcaacaagagcgaaactgtctcaaaaaaaaaaaaaaaaatatatatatatatatgtaaattagctgggcttggtggcatgaacctataatctgagctacttaggaggctgaggcaggaggatcgcttcagtccaggaagtggaggttgctgtgagcctagattgagccactgcacttyagtctggttgacaaagtgagactctgtctcagaaaataaataaataaataaataa

SEQ ID NO: 850666 - DNA, 620 bp, Homo sapiens
cttcgcacactgaagtccatgcaaatccatgtaagagtggcttggaaaacatcacattagccttagtctcttagttttctaggcccatctgattaagattaagaatggagttaagaaagggactcaggcactctgacagctctgggatcacctgcgagagcaggcagacgaccccgctggcctactgttgagcagctttgagtaggagctagcagctcacaggggcagtgatgtgtttattgctcagtgtgatgataactttaattgggaatatcagataaatattcaatatatggtatttttatgaacattaataaagattcagtatatttttggaaaatttccctaaaaacagaaaaaaaataaaaaggttatatgcataagtgactcagcaccaattatctggaacatttttttcacccagcaggcttttcttgagtaccctctagtgttaggcattgctctgagggctgctcacatatgagtgtgtactcyttccaccatggataagtatgattttaccatatttggaacttagcagattggctcagttcatttcagatttcaattcaccgtttaattcatccccagcacatgcctagtgctgtcataaaccaaag

SEQ ID NO: 850667 - DNA, 645 bp, Homo sapiens
ataaaaagatgtctgaattgcactgtcacatttaaaaagcaagttgcagaatgacatatacaactgtgttttgggataaaaatatatgtatgtatattcattgaagaaaaactctaagaatataccaaaaccattagtgtttattttgagagtggtatattgtttaaatgtattttttctacagactgcctgtttacacttgcataataaaaaacatatataattttggttttcaaagttattattatcattttatagattagataaagccatgcatgcataggcttaaaggaaggagcaggaggtgagttccgggtatgtatgtgtgcacgtgtggatatgtgtgctgttgtttttgttgttcctccaaagcactttgtaacatcagcagttttcttattttagaatagagaaaacagaggctcaaagaaactaatggcttcctgaagatcacacacatctgaaggatctttactcaggctttatgtaaaagattgtcaagcccttctctgccrgggctctattctacacaagcccccagcaggcagacatgagtggtggcctgatgggcccacaggggtgagcagagagagcagacagacaaaggcaatgagcaaaataacatgggatatgccttttattgga

SEQ ID NO: 850668 - DNA, 608 bp, Homo sapiens
ccttctagtcctcagaatggagagaaaataaatgtatgttatttcagccacccagcctatgatattttgttacagttgcctgagtaaacccattttaatacgggtttaaaatgtgtgttcatccatttgctaatgaaaggtgaatggaaaaggaaagatggaagatataggagaggtgcaataactggtggaacaacgtaccagaggagacttgaggtgatggtatccagaacacaggcaactttcactgaatagagcaattgttccagaattttctagatagggactttgagaacttcatgagcattctgacttctggcacgtacagtattttaagaaacgtttcaaagttgtacccgttcccctttagctcagaggaaatgatccctcttccaaaagtaagccctacctatgcctagggtttcaaaacttcccacaacctggagatctcttggactggtttcttcctcacctttctgcagtamctctccttgacctctatctcctgatatggtttcactgtgtccccacccaaatctcatcttgaactgtagctccataattcccacatgctgtgggagggacctggtagaagataattgaatcat

SEQ ID NO: 850669 - DNA, 632 bp, Homo sapiens
ttggataatcagaacagcgcccaactgtgcatgccacaaatgccgatgttcctactcacrggaaacttgagactaatttcttccatgtgaggtgattttagaaaaccaaatacttatttaccactcccaccaaatgaaaagggtaaatcctggattttgtgaatggcatgtactttacagtcacttcaaagagcatgatttgatctccctctatcagcaggggaaggaaattaaggccagtctttaatatgatcaaattccacgtaaagcctgagaaaacaatgactatttccaagtccttaatcctgtaaatatactggtcacattctgatgtatagtgcctctcaatctgaccactgtggtcactctcaagagcatagaatcacataagaaaatgtttcataatttaaaaataggtgtgttttattatacaatattaatccacaaaactaagcacagtttgctaaaggcataaatgctaataaaacttagtgaataattcattcatttaagaaggtcaagtgccttaccaatggctatttgacaagtcgctgtgttagaaactgtgactgatctcacatgccctaatttgccaaaaagacccactgctctgctcagactctggaaggagc

SEQ ID NO: 850670 - DNA, 547 bp, Homo sapiens
ctcgcagagccttacatttgttggtctagaagctgcaagcatttcatgctcaatgtatattttatgctcaggtaaatcctctggaaacataacggtccatttacaatagctacattcccagtgagagacttcagcttgtgagaaccatgtgtggttgttaagttttgatgtggcattgaaagaaaacattgtgaattttattttagaacccagaagactaagctatgttggctctcagcagatactgcagctgctggaaagaaagagaaggtgctgctcggagaatgtgagcgtgtgccctcccccagctgtcctggtgaagggggagtgatgccccccatgcagacatagggctgtggggagcccagggctgcgaggatcccagcaggcagcatgtgtggccagggagggtgtggtggggtccagtgggagctgacacagaagcaaggcggaacccacatggctcaacttaacaggtcttactgwtttttcgctattaccaaaaagtttgagaaaaaaaataaatggcatgttgagtggccgtttg

SEQ ID NO: 850671 - DNA, 558 bp, Homo sapiens
agactggcagagaactccttgatcccacaatgggaataaaaccccacttagggtgggtagcggcctgataggcctctggagggtggagagccacggctggcagagaatgggacagaaggcactggccaggggagtgaccacttatttgctgcaggacaaactgcggacaggcgagaaggcagtggtacgtttccgcttcctgaaacacccagagtacctgaaggtgggcgccaaactgctgttccgggagggtgtcaccaagggcatcggccatgtcactgatgtacaagccattacagcaggagaagcccaggccaacatgggcttctgaacccttcaggcagggacagttctattgctgtccctacaatatataaggtgacttctggccatgctgccctgccattggcggctctgtgtgttaataggctagggagagaggggtgctgwctgccacttgctccctgccaactttctggagaggtgccaaacttggtgtggccaggaaagggcagtcctgagggagaagacaggattcagggcagtgctccgaagctg

SEQ ID NO: 850672 - DNA, 590 bp, Homo sapiens
gcaggtatactacctgtacctggccaacatggtgagacactgtctctattagaaaacaaaaattagctgggcatggtgacatacgcctggagtcccagytactcaggaggctgaggctcaacagtcgcctgaacctgggagacggaggtcacagggagccgagatcgtgcctttgcacttcagcctgggcgatagatcgtgcctttgcacctcaacctgtgccttcttccaaaagagggcacaggtgcagtgacatcgtttctctctgttttgacatcgacaccttcaggagttggctgcactgtacctatctggactcagccagccaccagccgcagcagatggaactcatcgctttccatccctcctctctgcccttccacaggatgagctctcggatgacgcattccttcccaatttcttctcctagaacatttcaactcattcttcaatatccagctcaaatatgactttcttggcaatgctccctcttcttcccaacagtagaattaatcagtcgcctccccgtgtacccaccacatttttgtattcagctcttttgcagaactcgtaatgctggacttcacatc

SEQ ID NO: 850673 - DNA, 590 bp, Homo sapiens
gcaggtatactacctgtacctggccaacatggtgagacactgtctctattagaaaacaaaaattagctgggcatggtgacatacgcctggagtcccagttactcaggaggctgaggctcaacagtcgcctgaacctgggagacggaggtcacagggagccgagatcgtgcctttgcacttcagcctgggcgatagatcgtgcctttgcacctcaacctgtgccttcttccaaaagagggcacaggtgcagtgacatcgtttctctctgttttgacatcgacaccttcaggagttggctgcactgtacctatctggactcagccagccaccagccgcagcagatggaactcatcgctttccatccctcctctctgcccttccacaggatgagctctcggatgacgcattccttcccaatttcttctcctagaacatttcaactcattcttcaatatccagctcaaatatgactttcttggcaatgctccctcttcttcccaacagtagaattaatcagtcgcctccccgwgtacccaccacatttttgtattcagctcttttgcagaactcgtaatgctggacttcacatc

SEQ ID NO: 850674 - DNA, 585 bp, Homo sapiens
gcccccaaatctttcagaacatacatattttcctataaacttgtcctaaaacagaatcctgttmaatctcaccctgaaaatgtcaattaccagcttatcgtcataggtacccgacaaggacaagactagaaatcatccttccaccactccaagacaaattcaagattgacttttccctctactccctcttttcacatgtaaaatgtagattcactgagtgttaatcaaagcctcacaagaatgtaaccacttgcctcattgtccacccttcttcctttcttccccctctttcccctcctgcttgctcttttccttttaagtattagagttctcaaaacagtctttgcaaaaagcacagatgcacctgtgatttgtgtttttcccagttgcatcctcaaccttggcaaagtagacctaaattgattgagatttgccttagtcactttttgttttacagggggaatattattccagtctttgagtgtgcttgatgtgtttggaaaataacaaggaggccagcatgattgaaagggtgatttgaaatggattggtgggagtggaaggataacaggggatgaggtcaga

SEQ ID NO: 850675 - DNA, 651 bp, Homo sapiens
agaagaagtcataagaaaagtgagaaaaatatttcaaaccacaataaaataaaaacaacttataaaaactagtagaatgatgttaaagtggtgctttgaggaaaatttgtatcagtaaatgatattagcaaagaagaacaatttaaaatcaatttaaatttaaaatcaatttaaattgattaaaaacaatttaaaatcaattatttaagcttccatcatagaaaatttttttaaaaaacaaattaaatccaagttatgtagataaatataaatattaaagatgagaacaaatattaattaatgagaaaaataaaatagggataactaatagaatcagaagctgaatctgtaaaagactaataaacttgataaattcctggtgagattaatggaaaaaaagagaaagaaagcaatggatgaatgtcagaaataagagatgtgatatcactgaatattttatagataataaaaggataataagatattgtgaaaaacttgatgcaaataaatttgacagttgagatgaaatggataaattatttcgtgacacaaactaccacagctcacacacacamaaaataaacattatgaatttttctaaatctattaagtaattaaattagtaatcaaaactgttcctatgaagagaac

SEQ ID NO: 850676 - DNA, 513 bp, Homo sapiens
gtgtgctgtgactcaagcctgtattcccagcactttgggaggctgaggcaggargatcatttgagcccaggagtttcggaccagcctgggaaacatagtgataccttgtctctactatgcagtttcctagggagacaggatccaatatgtgtatatatatgtgtgtgtgtgaatatatatatatataattagctgggtatggtggcacatgcctataatcccagctgcctgggaggctggagggggaggactgcttgagcccaggaggtctaggcagcagtaagccatgatcgtgccactgcactccagcctaggtgacagagtgagatgctgtttatttaaaaaaaaaaaaaaaaaaaggaagaaagaaaaggagggatggctttccaaattattccatgaggccagcattattctgataccaaaatctaacaaagatattatgagaaaagataattgcagattaatatcttttatgaaaacagttacaaaatatttgaaaatatggcacta

SEQ ID NO: 850677 - DNA, 536 bp, Homo sapiens
cagctgggctgtgctgttctctttatcgaatgtaaaaagtctcagagactaccagcattagacaagattactctggaccacaatggaacaagacacaagcaagacctctcattaactgtatataagcacaaaygtaaacaaggtcattaatcaaaccacaaaaattatcaaacacccttctcctggctaataagagtgaaaaccgctttcttgccaatataactttagccgtatgctgttcttttcccctctagataagagccattaatagacccagtcataaaagtatcccaatttattaacatcactcaaacaaatgtaaattccacttcattggatctgcctcaaattcatctaatacaagccaaaattatacaataaacctcttgaacaccgccttactgagatgcccctggatcccccatgttgtactgtgttgtttctttcagtaagtcaataaaacaattttatttaattaaagatatgttttttatgacattaaattcatgagaattaccaatatatttctatacttt

SEQ ID NO: 850678 - DNA, 615 bp, Homo sapiens
tcttttttatggctgcatagtattccaaggtgtatatgtaccaaatttgatttatccagtccaccactgatagacatctaagttgattctatgtctttgctattgtgaatagtgctgcaataaacatatgagtgcatgtgtttttaaaaaatttttttctgtgatctgggtttacttctgttatcatttgattttatcttgcagagattccgtagatatttcttgtactttagatctgtttgcaatacattatctcagctttgtctgaaaaacgtatttatttttgcctttacatttgaaaacattttttctggatgaaaattctagattgaactttcttcctccagcactatattaattcatttcattgtctcctggtttgcattgtttctgataagaagagaaatgactaatgcttcttattattgttcccagtttataatatgcctttacctactttggctgcttttaaaattttctcattamcattttttttagttaaaaataaactttttattatagaaacatttgaatatattcaaaaaaataaagacaccagtataatgaactcccacttacctatcacccagcagtaataattactgctattatata

SEQ ID NO: 850679 - DNA, 583 bp, Homo sapiens
tatgttgggttattttaatttaattgaaagcagatgtcaaatgatacccgtcaatacttattaaaataagacagttaaacccctgtgaacctcagcaactcaaaatttgcagttcagtcatagtatacatggatttcattgagccaaaagttagaaattttataaattacagttctgcgatatgattaaaaagtaatacaaaaaacaaattataaactggaattgtgtcaattgagttgacatatttcttgcaagatgattatatttatataggaaaatgtttggaaaggagcattaggattatgtacagcaaagttactttatgtacgcattcattttcccttttgaaaaaaatattgacatttaagtggattttagtctgcaaatgattgtgaactaaaaatgacagaaaagtattgctgaatattttttgtgcccttgtgtagattgtaagctcctagaggataggatttttcttttttataattttttacttccttgttgtccccgtarcttgtacagtgtcctgtatctagtatttgttgagtaattagcagtttgttaattgattttgctaattaca

SEQ ID NO: 850680 - DNA, 577 bp, Homo sapiens
aaaaaatcacactagctcaccagcaatggatccaaactaagaagaaatccctgacttacttgaaaaagaattcactaggttggttattaagctaaggcaycagagaaaggtgaagcccaatgtaaggatatatatatatataaaaaagatacaagaagtaaagggagaaatattcaatgaactagatagcataaataaaaaacaatcaaaactttaggaaataatggacatacttatagaaatataaaatgctctggaaagtcttagcatagaattgaacaagtagaagaaggaaattcagagcctgaagacaaggtcttcttattaaccaaatccacttaagacagagaaaaaagattaggagaatatgaagaaagccttcaagaaatctggaattatgttaaatgaccaaacctaagaataacggccattcctgaggaagaagagaaatctaaacgtatgctaacataattgggggaataatttagaaaaacttccccagctttgctagagacctagatccaaatacaagaagcacaaagaacatctgggaaattcatcgcaaaaagatcatcat

SEQ ID NO: 850681 - DNA, 604 bp, Homo sapiens
aaactaagaagaaatccctgacttacttgaaaaagaattcactaggttggttattaagctaaggcaccagagaaaggtgaagcccaatgtaaggatatatatatatataaaaaagatacaagaagtaaagggagaaatattcaatgaactagatagcataaataaaaaacaatcaaaactttaggaaataatggacatacttatagaaatataaaatgctctggaaagtcttagcatagaattgaacaagtagaagaaggaaattcagagcctgaagacaaggtcttcttattaaccaaatccacttaagacagagaaaaaagattaggagaatatgaagaaagccttcaagaaatctggaattatgttaaatgaccaaacctaagaataacggccattcctgaggaagaagagaaatctaaacgtatgctaacataattgggggaataatttagaaaaacttccccagctttgctagagacctagatscaaatacaagaagcacaaagaacatctgggaaattcatcgcaaaaagatcatcatctaggcacattgtcgtcaggttatctaaagttaagatgaaagaaagagctgtgaaacaaa

SEQ ID NO: 850682 - DNA, 629 bp, Homo sapiens
taatagtaatcatcgatattaataattgcaatagagatagtaaaagtgaatatggatgaaaatattaacaattactattaataatarcaatatcactattaataataaaataatgatattattaatcaatgttacataaatcagtcataagtgatgttggtaataaaacaataattaatattaagattaataactaatattattgaaaaatgacattaatacagataattttaatcatgcataattgtacatttaaaataatcattaatgattaataacgttatactattaattaatattaccattgataattattaagactgatgtttaacaattaataatattattaagattgatgcttaataattaatcgtattatttctcctaataccgcagggggtgtacacctacccgtgatattgttcctaatatccagggatggagagcatgatattagttttaatatctcagtaggtgtacactcaccctgtgacactgatcctaatatccagggagtagagtatgacatgactcccaacatagcaatgaatgtacagccacccggtgatattgctcctagtattcacggaagaagcgtaggatattacttccaaaatcgcagggagtgt

SEQ ID NO: 850683 - DNA, 428 bp, Homo sapiens
taaacaggctgtgagtccaccgcggatcctaaaaaccagggagggaagaggggctggcacttactccccgcatcgcggggggtgtctcaaccccttgcgatgggggtcctaagagccagggggggaagaggggctggctattacaccccgcatcaaggggggtcccgtcgatgggggtcctaagagctagtgggggaagagggcctggctcttattccccgactcgcgagggatgcctcccccctctgctatgggggtcccaagagccacaggggaagaggggctgcctctcagtccccgcctcgcggggggtgcctcctcctcctgcgatgggggtcctaagagccagggggggaaaggagctggctcgcagtccctgtctcgcggggggtgcctcccccmactgcgatgggggtcctaagagccgg

SEQ ID NO: 850684 - DNA, 503 bp, Homo sapiens
aacacatgtttttgtgagctccaggttgggtaaaagtggctggggccaagcggctagggcaaagctacaaattaacaacatctcagcaaagcaattgtttaaaggacaggtctttttccaaatggagtctcttatgtctttcctttctacaaagacacagtgacagtctgatctctctttcttttccctacaggtggacacgcccccactgatattccttctaattgcagcgtgggagaggaggatatgacacgcgatatcgcagggagtagaaacaccccctgtgatactgttcttaatattcagggaggaagaggatgatattactcccaatacagacgggtgtacaccctctgtacaccgagggtgtacacctgtctgtgaaagagttcktaatctccagagggggagatgatattactcacaatatggtaaagaggctgtgagtccacggaggatcctcagagccagcgggggaagaggggctggctctcagtccccgc

SEQ ID NO: 850685 - DNA, 615 bp, Homo sapiens
tggggctctggaggaaatgtggggtggaggtgcacccctcacacaagcaaagggaacaggtgtggggaatgctgccttgtgccaggcactgagccctcacagccactctgtggggaggggttcctgcccatttacagacagggaaagagagtggggcaacttgcctgagccatcctacagaagggagcagtggccaagattctaatcctgcttcatccctgggttggggggactatccctgggagaggccagcactgtaccccaagaccctgagtgggtgtgaagagaggaagaaaggcccccacagagagcattccactcgccagttactgaacctggcagggactggggtggtggcctttacaccttaacgggaaccagttcatctgattccatgctgcccaacaggcttaagtgcagggctggggaaatggaatttacagggatggccttctgatgtatttggaagtccccagggcaggaaagaggagggggtacagaggctggcttgttcccttcacttccatcctcctcactcacactgcccaagccagctgccacttgccaggatgaggcagragattccagggatccttgaagtgggctcttccccct

SEQ ID NO: 850686 - DNA, 587 bp, Homo sapiens
ccccacctttgtcacaccaccttgcccaccgcattcctcttcagggaggctccagcgctcactcacagtgggacgctggtctagacacttcctgctctgagacttaraaacccaagtggagctcccagtgtcactctctgaggcctgtctcattcactgcaccttcccgaccctgggaactcctggaggaaaagaacggggttagacggcaccaggtgttggaatgagatggagtttgtgtttgacccttcctggggggtgggagtctatgctggaggggccagaggaggccttgctaagggaaagctgggcagaggaggtgagggcaggggagggggtgtcctggccccagcccttagggtcagcagggaagagagcacctggagacctggtctgtgctcagataccagctgcagagacccgggctttggtcctgatctgaaacttcagacttggccgcgtttgtccctgcatctcctccagtccactgggtcaccaggacccatctgttttatcaccggtaataaacaaccagagctatggcgtgtccagagcttactctgtgccaggaactgtgctgagcttta

SEQ ID NO: 850687 - DNA, 575 bp, Homo sapiens
atgaacagcaaactcagctttctaccaggtcactgaccgcaaagccctggctaggaaccaccgggattccagttctcgcttagccaccacctttctttgtgaccttgagaaagtcctctactgcctggacttagtttccatgttgatataaaatgtggaagctgccaccaaagccctctcctgaatgccactctatgcctatgagatccaggtctcctgccttccgagtcccctggcctgtggctcattatcccatttcccatggccgcgggtgccctgagccttccctttgatatttgttccatttctgagaatgtggtcaggtcagagtctcaggaatgtccctctttgaggctgatgtctggaccactgaggtcttcctatggtgtggaattgtttgcatggatggcaccaccatgtctcccatcccacgtgtagggcccttttcaatgtgaccctgcagctccactgaaagtggaggctgtttcctgccccttgcatctgggccagccttgagactggctttgakctgtagaaagtggtgaggaaggtggtgaaaattgggatctcacagc

SEQ ID NO: 850688 - DNA, 556 bp, Homo sapiens
accaatttcttggaagttgaaaaaktattaaacttactcaagaataatagataactagaacagtcctatatcaaatcgaaaaattgaattaatagtttaaagtatcccttaaaataaaacctacagcccaaatgattttaccggtaaattgtcgtaacatttaaggaataaataataccaattctacacaatttcttccagaatatagaaaaagagaaaatactccccaactcattttttgaggccagcattattctaatgtcaaagtaagacaaagacattacaagaaaaaaaaaaactacagaccaatatttgtaatacacagagacgcaaaaattctcaaaaatattgacaattttaatccagcaatatgttaaaaagttaacatgctgtgattcagtggggctcagcaaggatggtttaatatttgaaaagccaatcaatatgatttaccatgttcacacattaaagaagaaaaaacatagaatcattgcaatagttgcagaaaaagtattttgtaaacttcattattgattcatgataagatctttcagta

SEQ ID NO: 850689 - DNA, 569 bp, Homo sapiens
tttaaatcaataaagtaataaackttatcatgttatcagcccatccgcacataggcacagcttaatttagtctttcttttttttgagatggagtctagctctgttgcccaggctggagtgcagtggcatgatcttggctcactgcaaactctgcctcccaattcaagcgattctcctgtctcagcctctgagtagctggggttacaggcatgcaccaccatgcctgtctaatttttgtatttttagtagagacggggttttgccatgttggccagcctggtctcaaactcctgacctcaggtgatccgcccacctcagcctccaaaagtgttgggattataggcatgagccaccgtgcctggccctagtgtttacaaagataagacccctatataagaaaaactgaaaacacaggcggtgcattccttggcttgctttctgtggacagacgcccccactctgtaaaggagcagctttcaataaactctcttctcactacactctgcgactaggcttgcgtttcctcctgcacatgagccaaggatcctctcttagagactggatggaga

SEQ ID NO: 850690 - DNA, 432 bp, Homo sapiens
caggctggagtgcagtggcatgatcttggctyactgcaaactctgcctcccaattcaagcgattctcctgtctcagcctctgagtagctggggttacaggcatgcaccaccatgcctgtctaatttttgtatttttagtagagacggggttttgccatgttggccagcctggtctcaaactcctgacctcaggtgatccgcccacctcagcctccaaaagtgttgggattataggcatgagccaccgtgcctggccctagtgtttacaaagataagacccctatataagaaaaactgaaaacacaggcggtgcattccttggcttgctttctgtggacagacgcccccactctgtaaaggagcagctttcaataaactctcttctcactacactctgcgactaggcttgcgtttcctcctgcacatgagcca

SEQ ID NO: 850691 - DNA, 432 bp, Homo sapiens
caggctggagtgcagtggcatgatcttggctcactgcaamctctgcctcccaattcaagcgattctcctgtctcagcctctgagtagctggggttacaggcatgcaccaccatgcctgtctaatttttgtatttttagtagagacggggttttgccatgttggccagcctggtctcaaactcctgacctcaggtgatccgcccacctcagcctccaaaagtgttgggattataggcatgagccaccgtgcctggccctagtgtttacaaagataagacccctatataagaaaaactgaaaacacaggcggtgcattccttggcttgctttctgtggacagacgcccccactctgtaaaggagcagctttcaataaactctcttctcactacactctgcgactaggcttgcgtttcctcctgcacatgagcca

SEQ ID NO: 850692 - DNA, 625 bp, Homo sapiens
actggtcttactcttcccacccctccgctaggctagggaacacttaggggaggggggagcaaaggaggagtcctgctgaaccccttacgcctggcaaagacctcattcctgctcttcaatcccctagggtcttgcggcttagattcctgggagatgatggtcggggagattttcaggctgcctccatttatcctcccttgagtcagtgattacagaaaggaaaggaaaaacacaagaggaaaaccatataatgatacatcataaaaaatatctagccaacactcacagagcaccagttacagtgaccacctaatagatattaattcctacttttgtcacattcctccctcccttaaaggtctcacaaatgatctgtggagtgaaaccccattgggtcattaaggctgaccaggatgaaacaaccacttctcttaccaacttatctgtttccacaggactcacactgtggggtagcatgtaaagttctttctcccattagaaattgtccaaacaggcatccaggtgactyatccaaactccacttttgtatggagtttggataaatcctcctttttctctgcttcccagaatggtgctattgggtttgagatattcatatgcacaa

SEQ ID NO: 850693 - DNA, 643 bp, Homo sapiens
attaaaaaaaaaaaaaggaaataaccaaaggaaaagaaaaggctcttattttcataacacaaaatactcacttctaaatacctggataaaaaaaagaaaccttaatgataatgacaaaatctatatgcaaaatgtttcaacccaagaaagtaaaacaacaaataatcaccaccaacaacaaatagcccaaagtaaatccaaagaaaataataaagataaaagcaaaaatgaatgaaacaggcaaacttcttagaattgaaatttgatcctttaaaaaaactatctctgataaggttgattagagagaacaaataaacaacacagaaaaggggaaataattcagatataatattttcaaaaatataagaatagtagagctatctctaagctcacgattttggaaccttagttattaaaggaaagaggtatgactgacccgctgctgtctcctccacattcccttcaccgacttgttttttctggacttttcatctcagctcagaatgaccttattttttttcttttcttagctttacttccatgaaactgttggagggaacatktgagtagagttgccaaacgcagtaaataaaaatacagaatgctcagttaaatttgaatttcagataggaagcaagtaatt

SEQ ID NO: 850694 - DNA, 643 bp, Homo sapiens
attaaaaaaaaaaaaaggaaataaccaaaggaaaagaaaaggctcttattttcataacacaaaatactcacttctaaatacctggataaaaaaaagaaaccttaatgataatgacaaaatctatatgcaaaatgtttcaacccaagaaagtaaaacaacaaataatcaccaccaacaacaaatagcccaaagtaaatccaaagaaaataataaagataaaagcaaaaatgaatgaaacaggcaaacttcttagaattgaaatttgatcctttaaaaaaactatctctgataaggttgattagagagaacaaataaacaacacagaaaaggggaaataattcagatataatattttcaaaaatataagaatagtagagctatctctaagctcacgattttggaaccttagttattaaaggaaagaggtatgactgacccgctgctgtctcctccacattcccttcaccgacttgttttttctggacttttcatctcagctcagaatgaccttattttttttcttttcttagctttacttccatgaaactgttggagggaacatgtgagtagagttgccaaaygcagtaaataaaaatacagaatgctcagttaaatttgaatttcagataggaagcaagtaatt

SEQ ID NO: 850695 - DNA, 507 bp, Homo sapiens
agagaaacaaataacatacaatggacctccaatatggctggcagcagacttttcagtggaaaccttacaggccaggagagagtagcatgacatattttaagtgctgaaggaaaaaaaagttctatgttaccctagaatagtttatccagcaaaaatacctttccatcatgaaggagaaataaagactttcccagacaaaaaaaaaacctcagggattccatcaacaccagacctgtcccacaagaaatgctaaggggagttcttccgtcagaaagcaaaggatgttaacaagcaataggaaatcacctgaagatacagaatcactggtattagtaagtgcagaataaaacacagaatattctagcactgtaattgtggtgtgcgaactactcatgtcttaagtaaaaagactaaaagatgaaatgataaaatagaattacaacaacttttcaagacataggcaatacaataaaayataaattgaaacaacaaaaagttaaaaagcag

SEQ ID NO: 850696 - DNA, 507 bp, Homo sapiens
agagaaacaaataacatacaatggacctccaatatggctggcagcagacttttcagtggaaaccttacaggccaggagagagtagcatgacatattttaagtgctgaaggaaaaaaaagttctatgttaccctagaatagtttatccagcaaaaatacctttccatcatgaaggagaaataaagactttcccagacaaaaaaaaaacctcagggattccatcaacaccagacctgtcccacaagaaatgctaaggggagttcttccgtcagaaagcaaaggatgttaacaagcaataggaaatcacctgaagatacagaatcactggtattagtaagtgcagaataaaacacagaatattctagcactgtaattgtggtgtgcgaactactcatgtcttaagtaaaaagactaaaagatgaaatgataaaatagaattacaacaacttttcaagacataggcaatacaataaaacayaaattgaaacaacaaaaagttaaaaagcag

SEQ ID NO: 850697 - DNA, 658 bp, Homo sapiens
taccaaggatttagtctatattttcctaaaatggcttaktaccaagcaatacttgccaatgtttgaaagctcccactgggcatgccccacatataaatagaattcctgcaaatttttagaaacggtacatagggaggagcctcaccgctgttgatttgagttggtcaggtttttaatcactgttaattttcctttttaattataaattcctctcagtttagcatcttcattatggatttagtttgtgcagggttgttcagtagtaatagcaactactatttgagtgtttagtccaggccctaggctgagatctttacatgttcatttgctgctcttaacaccctttcaagacagataatagtatcatcctcattttacagatgaggaaactaaggcacagagaaactagacaacttgcctatgatcatacagatagacactgcagaagcaggacccaaactcagggatcttcacggtaggtcggaggtcagcaaactttctgtaaagggccagatactaagtatttggggctctgtagactgtagggtccctactgaactacgtcgttgtagccccaaagcagccttaaacattacataaacaaattggtatggctgtgttccaataaaactttatttacaaaaacagacagtaggca

SEQ ID NO: 850698 - DNA, 651 bp, Homo sapiens
tagcaaaacacccttgtgaaaggatcagcatttcatgaatccctcaaggatctcaatatacaatccaagatatcacaatgagaatcaagagcaggagaaaaacattttgattaccaatttaaaagaaggtgtgaaagaaaacactaagatcaagaatacatatacgaaacttacacggtgtagcggagggatacaaaatgtatggcactgatactctggtgcccactcttatgcccacagctaagccccaatcaaccccagagccagatgcagcctcagaatctatcttaacacatttcttcaaaaagccactccagataattggccctagaagcaagatagaattctttgctcctgccactgaaaactgaattatttcaagccatgatggctctcatatatattggagcctggctacactgagctacttagtcatctttaaatgtactgtgaaacttcaagccctgtgcctttgttttttctgtgtcctacctggaaatatcttttctctacttctctactggtggaaatcttattttttgtggctccatgcaacaatttcctcttttgtgaagtgtgcctcattcattgcctctaaccataatgaattgtttgtagttgtttatttwttccacgagtttcagtgagagg

SEQ ID NO: 850699 - DNA, 661 bp, Homo sapiens
acattttgaaaaatgctattgtagagaagcttttgtatgttaggagaaggaaatgtacaagaacactcactgaagcattgtttataattgtgtaaaattaaaagcaatctaagtgttcatcaacagaagaacagataaatatatagtggtctgttcatgaaacaaagcagttcaaatgaatgaactagagctaaatcgttgagatcttatgctaaattagataacaaacaaatggtagaatatgtgtggtgtgcttccatttattttaattttaaaaaaatgcaaaatgacagtacatattgtggaaaggtgcatgtgcatgcagaaaaggtctgaaagcatgtacctgcaagatagtgtttatctctggatggaagaaagggaaatgggattaagaagtctgcaaagaacttcaactatgtctgaatcaaacccatcaaaatgttaggattgcctcagactgggtgttgggacacagagttttgttatttcattctatttttttgttgattaacttcctatgtcacctgtgtccatgaactacgtgagttcattttatgcatttgcacatttaatgtyttttaaaatcactcacctagggccaaaaagctgattcgcagagtattctagactaaaccgagggtgggatcctaagtgattc

SEQ ID NO: 850700 - DNA, 509 bp, Homo sapiens
tttcagagatggcctgcccagagagaaggaatctagagaggcagtgtggctacggcagctttgcggtgctgtggtgggctctgcccagttcgaacttcctggtagctttatttacaccgtgagggggaaaactgcctactcaagcctcagtaatggcagatgctccttctcccaccaagctcgagtgtcccaggccaacttcagactgctgtgctggcagtgagaatttcaagccagtggatcttagcttgctgggctttgtgggggtgagatctgctaaattagaccacttggctctctggcttcagccccctttccaggggagcaaacacttctctctcactggtgttccaggtgccactgggggtatgaaaaaaaactcctgcaactagctcagtttctgcccaaatagccgcccagttttgtgcttgaaacccagagcccaggtrgtgtaggcacccgagggaatctcctggtctgcgcgttgcaaagactgtgggaaaagcata

SEQ ID NO: 850701 - DNA, 591 bp, Homo sapiens
attgctttttgctggttttactcttagggtgacacctgttttcacatagtagatttactttctgtgatctstatatcaatgacaatgtttgttttttagtcagttatggctactgaaattgtttcaggaagaaaggaggaagacattctctccttaactaccacctacctcctcaggagtataaaggcagtggcactcctggaatctggaataataatccctcttttttctttcattctttatgactatgatcaggaatttctggctcagtcaaatggaagagcccaatctctgtgggccatagctttattgcacaattaggaatgtttcctgaactaatttgaaactgaaacctggtaattttgtggaaattcaaggagcccaaaatctgttagaataaattaacattttggttttccatattgctttggaatgagtcattctgtagaaattagttttctaggtcgctatttcattacacagtgccctccttataagatcccaagggagaaatttctctctgatctcagaatgggaaatgcacgctgctttctagtacttagaatggtttggtggtgactcttattacag

SEQ ID NO: 850702 - DNA, 597 bp, Homo sapiens
tggacaacttaagataagcccactccttcttgcacatagcagcgagtcagctgtctratgccagtccttgaggcctccatatttctcttctccaagataaatgttcccatttccttcagctgtctctcagttggcaggaattcaagtcttcttgacttcttatcactgcccacctcccactgaagtagagcatatcaggtgggctcagagaaaaacccattcagaagttcaggtggcagttggtcatctattgaaaattagcgagtccatggttctttgtgttcttgcaccaacttggcctaactttttggggtctcaggtgctgtattaaaggtgctctatttcatgcatcagtgatggatgaaagcaggtctgcaggacacacatgcagttataatcagaacaccatggcgagctttcccaacacttataaaacctggctgatatatcaatgccaactcagcacaagaacagcaaggaaaatgtataaagggaatagtaggaaaatatgttcccctggcaatcagaagaattaacaatggtatagcgaagatatgcatgttatggcagcacatgaccaagataagagcacatagc

SEQ ID NO: 850703 - DNA, 473 bp, Homo sapiens
aggggacgcctggggagggggctgggaggagcttggaaaatgggagaagatggcaatgtcactggttgggctrtaagacagagccagaaaatggatggctccaccagagattctccccatcagctgggtgggagggagtagtgatctagcaggagctgacttccagctgccctggggagccccttgtccccatctccattggccaggacagcacagaggccagcatagtattgaggctgaagagggcagagggcaagttgctaggcctgaggacagcttcatttgcatgagtggcgggggtggggcctgcagagtggagctgctcctcttggccctgcgtgtgatggggcccaggtcaccttttcttgtcgtcctacaccaccaacaaaccttgtctatggctctagagcaagcttgtccaatccacagcccacaggccacatgtgacccaggatggcttgaatatggcccaa

SEQ ID NO: 850704 - DNA, 518 bp, Homo sapiens
ccagttcaagcttcctggccrctctgtttagctactgaagcctgggcaatggtgggcgccactcccccagcttcgctgccaccttgcagtttgacctcagactgctgtgctagcaatgagtgaggctttgtgggcgtaggaccctccgagccaggtgctggatataatctcctggtgtgccatttgtgaagcccattggaaaagcacagtattagggtgggagtgaccctattttccaggtgccatctatcacccctttctttgactaggaaagggaattccctgaccctttgcacttcccaggtaaggcaatgcctcgccctgcttcggctcacgcacggtgcgctgtacccactgtcctgtacccactgtccggcattccccagtgagatgaacccggtacctcagttggaaatgcagaaatcacccatcttctgcatcactcacactgggagctgtagactggagctgttcctatttggacatcttggctccatccccaccaaatatatttattt

SEQ ID NO: 850705 - DNA, 542 bp, Homo sapiens
ctatgatagaagagctcaacttaaaaaatttcatgatctgtataaaggaactgatttaaaggcaacaatgccaaaaattaagttgttagattggaaaattaaataataataaaaggggcacttttagttttagatttaggtaatctgagtttctaatttaacaacagaattggaaagggaataaagcaagtacatttttatgtgtttaaagtgagaagtctagattagattacttgggttagaattataaatatacataggacttaactttcagggacatgtgtgtctgaatgttcataaacagaaaaaatgacttgggaatagtagatgactgttagtatcttcacaatgctgagcccatttgctgctctctactagggagagagagtacagccaacttggaagcagagctaatagttggaaaatatttttgccrttggagaacatgcaggatcaccagtgcagggaaaaaacatgagccctggtcctctgatgtaataggaaggtcttctttgaatttctttctaggtagtccagcagta

SEQ ID NO: 850706 - DNA, 560 bp, Homo sapiens
cagtgcagggaaaaaacatgagccctggtcctctgatgtaataggaaggtcttctttgaatttctttctaggtagtccagcagtaggtatttacttgggcagtaatatttcagtygtatgtcactgaaattttgctcatgcacctacttcacttccattaaatatcccaggagattattaagccccctccttgatcacacttcagtaacaggaagtaaggtgatcttttgacccatggaaaggcaaaattggaatgtctgggaaaaccaagcccagcatatgtgtggtgaactcttcactcgttacacagagttaattatttttatagaccctagttcagcaaatgcctacattccttacagcctcttctgtctcatcttgattgtctccttcttaaatcccacaaatggtagataacgacctccaaattgggatgcaagtaactcagtcagtattcaagaaaatacaagtcattgtgggaaaaccatttgaacatttatttactcttttaaaatttatattttggtatatcttttataatgtccaaatatatttagatt

SEQ ID NO: 850707 - DNA, 643 bp, Homo sapiens
ctgtaattatttcttagccacctcctgttgctaatgcrgtgagctcaagtgttgcaagtatgttcttaaaatgtcttatgacactagttgtctctgtgtgagcagttcatctctccagtaaattggataacccagtaaaaagtgatcactcaccatccttgtgtgttttcaattgtgtttaatgcataccataaaccttgaataacaccatggaacccatacaaactgccactagtgatgctggaggtgctcccaagaagcagagaatagtcatgacattataataaaaagttgttatgatatgtaccatagattaagatctgtagctgtagctgcccatcatttcaagataaatgaattcagcacaaagacaaacgttaaaatagaaaaggaaatttgtgaagccatcactgaagttataccagcaggatcaaaaaccttacacttcttgcgaaatgcctttctatcttgtactgaaaatgcaccttctacacaggtgcagaattgctatgaaaagacatatttacagattctaatgtgattctagaaaaagtgaaatcattgtatgacaacttaatgctaaaggaaggtggaggatccaaatctggataatttaatgccagcaaaggatggcttgatattt

SEQ ID NO: 850708 - DNA, 571 bp, Homo sapiens
gtctgtcccagggaattgtaatcaccgctggcctcataattggatgccctcaccactactgcccttgagaacaaaataaatttttgatgagcctactttctaaagtttttcacttttgaattgaagttcttgagatgttttctgggttttccttgaaggggtcaactcataagtctgaaaattaatcaaacatagctaagatgttcaaaatgttcttggcagagaaaataaatgttcacaatctcatattctttccaacattcatactggaggtttagtggatctttatcaaccccaaaaaccaaaaccaaaataaattctgcacataggttctggaatgtcacaagaattctatgtgttaactagattctatgcctgaaaatttaaaattagattcatttctaatgggcatgtatacctgaatgtggcagcacatggctagtaatgacattcatrtatggaaaatcattttctacatccacattctcattttatctttacttaaactctctgatgttgttgctagttttacttaacagaacagaaaatacacatagagaggttttataat

SEQ ID NO: 850709 - DNA, 568 bp, Homo sapiens
ttatattacatcacatcacaacaacttgaaggagtataagtgctttgattttagaaagatctcrctttaaaacattcattttgctgattatcagctttctactttggatgcactaaactcttagcactagttttctcatctgagaaaatggacacttcaaagcttcattttggcaatgctataatgagtaaatgacaatattcagaaggactactcagagcaaataataccaaatggtattattactgttatcattatcaccattttctatgggataaaataggctactaaattcctacgcaattaaaatggaaaaagtctaaagaatactaatattgttctagtggaagatctcagtaagaaagaatagacacaaaatacattattctcaagccgcaaaatttccagctgacatggttccttttggaaaatgggacactaagtgatagggtttggctctgtgtccccacccaaatctcatcttgaattgtactctcataattcccacatgttgtgggagagacccagtgaaagataattgaatcatgggggcagtttcccccattct

SEQ ID NO: 850710 - DNA, 610 bp, Homo sapiens
gatgtcaaagtattataaaggttcaagcatttaaaattcttattttttggctgtgtacggtagcttgtgactataaccccagcactttgggaggctggggcaggcagatcacttgagctcaggagtttgagaccagcctgggaaatatggcaaaaccctgtctctacaaaaaaatacaaaaattagctgggtgtggtggtgcacggctgtggtcccagctacttgggaggccaaggtgggaagattgcttgagtccagaaggttgaggccacagtgagctgagatagtgcctgtattctagcattggtgacaaagtgagacccagtctcaaaataaaataaaataaaaatcttatttttactgacatcgtattatacatgataacttgcaccagatatattcacacacatacaaaaaaagaaaaaaaacacaaaacagaagagagtgggcctacctatcaactttatagagtttagaactttctctcttccatcgggtgttttgcgtaacataaaagtattatgtggaagaacttgagcccccayagcaacctgaatattaaatataaataatgcattttccaaatattttaagataaaaatgattggga

SEQ ID NO: 850711 - DNA, 529 bp, Homo sapiens
aattgtgttggaaaacaggaaaaattcctcacgttccatatttctctaaaattctgtgtttttctcgtgtgtgcaatggccacattggtttttatgcacacatagatccttcttcataatcaatgagatgtcatgcctcaaaatcacagaactaatccagctcttctattgtattttttcaataaaatctgggcccctcatcactcttgatctccacacagaagttctattgatgttgctaagagatgtgcacatgaatcaagtctactaaatgacacataataactaagagactgaattgctccagggattagtaatgggcctgtgacctacaggtcaacaatttgaaaccagactgggttaatagtagctaaaaattgctacaatctgatgtgygattgaaagtcagtgaaaggagagctacggtctctacggaattccaagttaacaggtgcccatcgcacagaatcacaaaaacaatggccaagttaagaggtcaaagataaaattggtgtggaaatccagctac

SEQ ID NO: 850712 - DNA, 455 bp, Homo sapiens
aacacagcaactaatatttatttagcttttaacatgtaccaagcgttttgcaggcttatttcatttattaggtatcatcattcattgtggccattttccagatgaggaaatggaagcttatgtaacttacwgaaggtaatactgagctgagatatgatttcagtatttatggctccaaagcctatgagcataccacttgtctctccttttctatgatggcaaaataattcctaaaacaatggtggtgtgattgggaaaagaaatgtttttctttacatcttgcagcaaatcaatgtctacaataaattcagaattctagtatcctgtcagatcactctgttcccatcatttctaccattgccaacacaccctgaaaactagtgtattcacctgggagagtttgctcagggaagcgagggtttttaaaaatccccctagtgacctcttgtggctga

SEQ ID NO: 850713 - DNA, 554 bp, Homo sapiens
aactattcccttcctttctgaactgtgaattcccaaaggagagggatagtgtctgtttcatttattcctgtctccaatgtctaatagtctcttggttcataatattttgggyggactgttctcgttaactctgtgaaaaaaacaagataataatgcacataaatacagagcccaacatttagcaaactcttaataaatgagatttgttagtagtattaacaacagagtattgtactgagtttacttgccttgagaaaactaatgggaagagcaacaaattaagataggtattgtgaatctagctccgtatctcacttgtgatatgcccttgacgaaatgtctgttcttctcatttttccactatttaaatgaacataagatattcatcctggtgtcccacttaacttggttgccgtaaagtctgccttttgccagaccacacctgaaatgctgtcctgcgtgcccccagtttctagattccatactatccttgtgcttctctgccttctcagctattattgacccctgacctttctcccttctatttctgtcta

SEQ ID NO: 850714 - DNA, 570 bp, Homo sapiens
gaaattggtttttaggttataaataaactttttctctgttaagtgtgtgcagtgcaaaaacctgaggatatcaacagaataatttctaatactatagaaaattaartaatggagtattaacctaaagagtactctgagtaaatattagattatcacagtattattaattctatttataggttgcctattctgaaatgataaaagaaattcctgaaaaatcatttaacttcaaagaaaagcagataagtagatataatgacagcattcatcatttagactaagctttttgatccctttaaattcccacaacctcagaaataaatgaaaattgtttaaagtttggaatatgccttgcaatatatgtcacatacaattgttcaagctgtttctcttttttttttttttgtatataatcatagctactggaaacattttgagtttgatgagagctggctactaggcccacagcttccctatgaatttacaataaaagctagtctcagaacaaattcaggcacgacacagacatgtatgtattgagtatttattagcatacaaataaaactttat

SEQ ID NO: 850715 - DNA, 633 bp, Homo sapiens
taacaagtcagtatgtctgacttatgtctaacatccctctacaacttaacgaatgatcagtaattaaaattattcttcacattttaacatcatctttaacttttgcttaaggcttttattctgtmgtaaaattgttgagatattgtttatatactttattaaaatattagaagtaaatatttctggtagaatatagaacctgaacaaagttctactaatatctcacacacacacacacacacacacacacacacacactttaataggtatgtttcatgcattaggaaaactttcaacaacacaggattttctacataaagaatatagacctaaatataaaggacttctttttccaggattagtgggtatagagtttcattttggacttaaaatggacttaaatatctcttgatgcattttttctctgttcttcttaacgtagtgagctagtcaggtttattcttctatactctacctctttattattctgtattctataaaatattctgaaagacttggcattttaaccattcaatgtgaagcttaaattgggtagatacaaatgttatatcttcacagttcatataacttctgttgtactatttttaaaaatgtactttattgatgctttta

SEQ ID NO: 850716 - DNA, 615 bp, Homo sapiens
aactgtgtgatcatgaatcagtattgtttttaagctgctgaaattgtactttgtgacaaaagaataagaaacaaatatatatacttgcatataactttgtaagtgtaggcagcaaatctatattgtcatgcattgcttaatgacaggaataattctgagaaatgactcattaggtgatgttgttgttttgtgcaaacatcatagagtatacttccacaaaccttaacggtagagcctactacttacctagcctatatgatatagcctattgatcctaggctgtaaatccagttattgtactgaatactctagggaacttaacgtaattgtatctgtgtatctaaacagaaaagggtacaataaaaataaaataaattataatattataataaaattataattttatgagaccactatcatatatgtgatgtcattgaccaaaatgttattattcagactgtagtatcttctacaatatccacattgtttagcataatatgttggatatatcmatgttaaataaacatttgccaaataaataaataactatgtccagacataaaaatattctagatatgattgtggtttctggttagaattaagtttctttgttct

SEQ ID NO: 850717 - DNA, 546 bp, Homo sapiens
aactaaaagtagaactaccatccagcaatyccactactgggtatctacccagaggaaaagaaatcattatgcaataaagatccttacacacgcatgtttacagcagcacaatttgcaattgcaaaagtatggaaccagcccaaatgcccatcaattaatgagtggaaaaacaaattgtgattatataaatatatatgtgtgtgtgtgtgtgtgtgtgtgtgtatgtgtgtgtgtgtgtgtgtgtgtgtatgtatatatatatatatatatcctggaatactactcagccataaaaaggaatgcaataatggcattagagcccattattctaggtgaagtaacataggaatggaaaaacaaccattgtatgttctcactcataagtggaagctaagctatgaggatgcaaatccacaagaatgatacaatggacttcagggactcaggggaaagggtgggagggaggtgaggaataaaagaccacattgggtacagtatacaatgctcgggtgataggtacaccaaaattttagaaatcaccactaa

SEQ ID NO: 850718 - DNA, 546 bp, Homo sapiens
ctgaagcttctgtcattacacacacatcgaaggaaaaccctgtgaaataatgaggacccatggaaacaatgggctagtgtgagcacacatgtgtgagttctgggtgctaagagagccgtatggctagcaggctctatggagtcataatattgacatcttgctgctttatggccttcttttcaatttccagcccctgtcctctgaacagcatgatgtgcaacagaagctcgaagcacacaggtgacatcggcattgcgtccatgctgcacatgcatgcagaaagccagtaaaggggccatcctgccatatattaacggcctacactctagcttaagtaggccagaggaatatggtgcagaatgggctatgagaaaatttagaatagtaggctcctttcttgcctctacccggtgggtgaaattcagagaattaacttagtgagttacaacaatccctcttgttttcctgcttgctgccttttctaccckacccctggctgtcactgaaatagccattgaacttggtgttcttctcaggtgtgaaaat

SEQ ID NO: 850719 - DNA, 603 bp, Homo sapiens
gtatccactacattaagcttttatcctttttttgtattacaaacaatccaattatactattttagttgtttagttgtatttattgttgtacaataaattattgttgactgcagtcaccctattgtgctatcaaatacaagatcttattcattctatctaattatatctttgtgcacattaaccaccgctgctcgccaaaccccgtactacccttccctgcctctggtaaccatgattctaactctctgtctccatgagttcaattgttttaatttttataaattagaagtgtaccaaagttctaatttataaaataaactcttataaataagtgagaacatgcagtgtttgtctttctatctctagcttatttcacttaacataatgattgccagttctatccatgtttttgcaaatgacagaatcccattatttttatggctgaatagtactcccctgtgtatatgtaccacattttcttcatctagtcatctgttgatggacactaagcttgcttccaaatcttcrctacagtgaacagtgctgcaataaacataggagagcagactcttcaggtttttccaaatataagaccatattatc

SEQ ID NO: 850720 - DNA, 577 bp, Homo sapiens
actttttggttaaaaaaaaaaaagatatatatatatacacccccygcccacacacatacgcaataaatatacttcgggaatacatctgaaaataaaagaatgcttgaatctataaattaaagggacacatgtaacagaaaaaactgacccagtgaacaattattaggacatatttttatttggttactatactttaaagatagagaaagagtcaccaagtagccaggctgaaagtttgtcacctatataagaagaacaaattgttatcatttgatgaagacagtcaatgcctgcagtgacctcaagaaaataaagtgcaatccagtgatttttattattgtttttttgagacaggctggagtgcagtggcatgatctcggctcactgcaacccctgcctccccacttcaagtgattctcctgcctcagcctcctgagtagctgggattacaggcgtccaccaccacgcccagctaattttggtatttttaggagagatggggttggtcaagctgttctcgaactcctgaccttagaagatctgcctgcctctgactcccaaagtgctaggattacag

SEQ ID NO: 850721 - DNA, 606 bp, Homo sapiens
tagtaaactacacttggtggtgctaccatgagattataggagtgttgatcacaaaagaactattaaaaaagcaatgtgtaagtagcatgtgtttacatatatacctatatgtaagtgtttttatatatacatagctttgatttaattttttagtttataattcagaattaagaatttagttgggcaacccgctcgggtccccttccacactgtggaagctttgttctttcgctctttgcaataaatcttgctagtaaaaaaaaaaaaaaaagaatttagttttaggtggtttataatctcaaaaatattatctgaaaaaatatttgtttaattgtggtccctaatatcctatataaaacttttgtataaatgagtaaaacaatttttaagtttatatattgtatgtttcctcaactgtcataacaatttatgcttgttataaaatgtataatccttggtgtgattgatgagctcagtaataggggtttatcagcttatccaatttaatgaattaatatattyataaataaactttattacaaattataaactagcttagatgccttggattacaagccacaaataatagaacatctaataatgaaa

SEQ ID NO: 850722 - DNA, 558 bp, Homo sapiens
tgctaactcaagacaatatctgaaggctgggggtgctgcttttgttcacatttttttttttaaataggaagaaaacttggaagcttgcagtaatcttcctgtaacattttattggctggattataccacatgcttatttctataccaatcactaggaaagcaaatgtaattactgtgattagcttagaataatgatttttcttttaagattggatgggggtaacggaatagtaaatatctaaatgaacttgtgtttctacagcaataaagaataaataatgactatgcataggaagccagcaatgttttctgcaggaacacagtggaaaagtttgagcaggggaatcacaagattagatttgagtatcagggcattctggtcatggtataaagcagagattggcaaacttttcctgtaaagtgccagataacgaatatgwtgggccatgtggtctctattacagctattcaactctgccattgtagggtgacaggagtcatagataatggatgggcaaagaggcatgattgtactccaataaaagtttgtataaaaaa

SEQ ID NO: 850723 - DNA, 558 bp, Homo sapiens
tgctaactcaagacaatatctgaaggctgggggtgctgcttttgttcacatttttttttttaaataggaagaaaacttggaagcttgcagtaatcttcctgtaacattttattggctggattataccacatgcttatttctataccaatcactaggaaagcaaatgtaattactgtgattagcttagaataatgatttttcttttaagattggatgggggtaacggaatagtaaatatctaaatgaacttgtgtttctacagcaataaagaataaataatgactatgcataggaagccagcaatgttttctgcaggaacacagtggaaaagtttgagcaggggaatcacaagattagatttgagtatcagggcattctggtcatggtataaagcagagattggcaaacttttcctgtaaagtgccagataacgaatatgatgggycatgtggtctctattacagctattcaactctgccattgtagggtgacaggagtcatagataatggatgggcaaagaggcatgattgtactccaataaaagtttgtataaaaaa

SEQ ID NO: 850724 - DNA, 590 bp, Homo sapiens
cattcagacaatcctagcagttttctggaatcctatgtaagggaaaaacattgaatcaacagcgggagtgttctggaatcctatgttatggacaaacattcagacgctcattgcagtgttctggaattgtaygtgagggaggaacactcagaacccagcagcagttttctggaatcctatatgatggacatacatgtagaccccagcagcagtgttctggaatcccatgtgagggacaaatattcagaccttcgtcgaattgtctggaatcctatgagaaggacaaacactcggaaaccagcagcagcattcaggaaccctatgtgagggacaaacattcagacaacagcaggattgttctggactccgatgtgagggatatacactcagaaaacagcaggagtgttttggaatcctatgtgagggacaaacattcagatcgtcgtagcagtgtcctggaattcttcatgagggataaacattcagacccccatagcagtgttatggaatcctatgtgagggacaatcattcagaccacagcaggagtgttctggaatctcctgtgaggaacagacattcagacccctaa

SEQ ID NO: 850725 - DNA, 641 bp, Homo sapiens
gagccagactctgtctcaaaaaaataaaaaaataaaaaagagaataacacttgaagattattgacatgaaaataaggaactgagttagttatggattagcactaacagaggacatatttgtgataggggactgctaaggaaaagtatctaaaactctgacataacacatgtatatttagtgtaatattacattattaaaagctatcatctaaaaggccaacccaaagattacttcattttcttttgacttggctatgtattagttgatttgatcctagacgctatgcaattatgtgataacttctaggtttctctctagtagaaaaagacaatgccagaccttatggatctgtttccatgaaggatattaatcagttttaattcacaactgataggagttcatcaagcatcagaaaaactgctcttgagtgcatttactgtatgcatttttgtgaattactgcattatatcacatttccaattccctttttctaataagtttaataaagtttaaattttwtgcttaataaccaaaaatacagtgcaattgggaatacatattttttctttatttttcttttttaaattatggtaaaatacacatactgtaaaatttgtcactttaatgaattttaaatgaa

SEQ ID NO: 850726 - DNA, 639 bp, Homo sapiens
tcaagcacaaactttcagaccctcatagcagtgttctggaatcctatgtgagggacaatcatccaggccatagcaggagtgttctggaatcccctgtgaggaataaacgttcagacagtcgtagcagtgttctggaatgctatgtgagggacaaacattcagacaatcgtagcagtgttccgtaatcctatgtgagggacaaacattcaaacaacagcgggattgttcaggaatcctatgttatggacaaacattctagaccctcatcgcagtgttctggaattctatgtgagcgagaaacactcagaacccaaaagcagtgttctggaatcctatgtgagggacaaacattacgaccccagcgacagtgttctggaatcctatgtgagggccaatcattcagacactcgtgccagtgttctggaattctgcgtgagggacaaacattctgactcctgtagcagtgttctgtagtactgtgtgagggaaaaacattgagaccacagcaggagtgttctggaattccctgtgaggaacagacattcagaccctcttaggagggttctggaatccggtgtgatggrcaaaaatctagaccctagcagcagtgttctgggatcctatgtgagggtcaaacat

SEQ ID NO: 850727 - DNA, 599 bp, Homo sapiens
ttttctttatctgtttaggtgtgagcattatagttgtttcataaaaaggattaggaagttttcctttattctgaatgctttggagcaatttatayagcattggaactagctggtatttaaaggtttggtagaattctcttgtgaaatcatctgtgcctagtgatgtttttgtagggggagtttcttaataactttttctatttcttagatggaaatttatctgatttgtaaccctaatgagatcaatatgtatttttctagaaaattatctactttaactaggtttttgaatgtatttgcatggaagtctgcaaattagactcttatgattttaagaatttgttctctttcaatgatgttttcctcttttcatatcttattttatatatgtgtacattttcccctttttgggtcaagttagctaatggtttacttattttgttaactttttcacaaaatcaggattttgatcttttaaaatctacttaatacctatacagcaatataggcatatcgacttttttcccttctcctacagtatttgtactttatcacaatacacaatagctgtattttagtctttcacctcagttccaatc

SEQ ID NO: 850728 - DNA, 634 bp, Homo sapiens
ataatccaattattattaataatccagttgacatgatcaaaagacaacctcaggtcacacacctatcaatcaagactgctttgctttcractgcacagaaaaagtatatatgactgctttgcatgtccagtcagataatgaaggcacactgtcagactgtctcagcacatatatctaaggcactcaatacttctatttatgctctgctgtattattccatgacattgtggaaaattctggttggatattttctcattcaaaacttagataatagtgtagacacagttttccactacttttggtccccgagttaagaatgtcttggaacctgaggccaggagttcaagaccagcctggccaacatgatgaaaccccttctctaccaaaaatacaaaagttagccaggcatggtggtgcctgcctataatcccagcttcttgggagactgtggcacaagaatttattgaacctgggaagcagaggttgcagtgagtcaagataatgccactgcactccagcctgggtgacatggcgagaatctatctaaaaaaatttttttttgcaaacacaatataaaaaagataaccagtatagggtttagtggcatattcaccctcattcatgttggaagtga

SEQ ID NO: 850729 - DNA, 509 bp, Homo sapiens
cagaacttaagccagaattaccatttgacccagcaatttcattattggctatatactcaaaggaatataaattattttaccataaaggcacgtgcaacaaatgtttgttggagaattagtcacaatagcaaagacatggagtcaacctaaatgcccattaactgtaaactggataaagaaaatgtggtacatatacactatggaatactatgcagccacaaaaaaagaatgagatcatgtccttgcagcaacatagatgaagctggaagccactctcctaagcaaattagcacaggaacagaaagctaaatactgcatgttttcatttataagtgggagctaaatattgagtacatatggacacaaagaacaaacaacagagacgaggccctacttgagggtggagcatgagaggagaatgaagattgaaaaactrcctattgagtactatgcttattatctggatgatgaaatattatgtacaccaaactcccattatacacaattta

SEQ ID NO: 850730 - DNA, 335 bp, Homo sapiens
cctgaaggaaaaaaatagcaattagctgccactttttatttaccaccaccactgtcacccctggctctatgtaacaactaacttaatttctgtatgtatatgttaccttatyctggatattacatgcatgttgaatcatgtaatatatatttttctgtgaatggcatttttacttaaagtgatgaaggtccatttctgtattaacattcatcagaacttcatttctctttatggacaaacagtattgcatagtagtgatacaccacattttatccattctcctgttgatgaacatgtggatcatttttaccttttggctattatgaataatgggt

SEQ ID NO: 850731 - DNA, 631 bp, Homo sapiens
taaatcaagaaagacctaagtactgaatgtgsatttttacaacgttatttcttgtggttattaataataaacccttttggaacattacattcctctcctttccaagagtgctttagggcatgggtgtactgatactattaaattgtaaactctaactgatacatcaggacaagtctgaatcacatctgcaccactcttattgtatctccagcaacaaacattacacctgacaaaaaatcaaaattaagaagataataataaagacttggatgaagttgtaatggatcagaagagacatacagaataatactgaggaatctaaatggcccacaggcccaaccaggccttgtacaataacataaactataaatagatgaataaagatatacttcagttgagaaaaaggtttggtcccattggaagggtagacagaatcacagagggaatgatatacaccaggaatgtattacagggtacagagctgtgtctcccaggataatagctactaaaagctctaacatcatacaacaaattgatcatgctttctgcttatgcttatcaagcatggtctaacaggaaaatctaagttaaatgcagtaagtgtgattcttcgtgggaggtaacacctccc

SEQ ID NO: 850732 - DNA, 568 bp, Homo sapiens
gaaaatatttatgtgcattttttctaattttgacacatcgtaaatattgcaaaataaaagatgtgtacatttccattaagaattgtatgagaatgcttgggttaccaaactataggcattattttgtraatctgatagaagaaaatgaactttcagcattgtcttagttggaatgtctactcctcagtgtaagtagtctcaaaatagtttgttaattgaacataaatacttcttggtaaatttattttcctggaaattttcccattgcatttttggcattgttgaattaatgggatttattgttgtttcaagaataattgtaattgctgatttgaaagtggtgctgtggccaaaaatgccatgtgtctcaattaatttgaagaattatttcagaaataatggacagtgtatacataaaaactgaaatatattttagctataattatttataaatagtgcttattaacacatttaataatgcatgcaaccattacagtttacaaagtagtaagtattattaatttcatttgtaaatcctaattatattaccaaataaattagtgagttt

SEQ ID NO: 850733 - DNA, 584 bp, Homo sapiens
acatacagaataatactgaggaatctaaatggcccacaggcccaaccaggccttgtacaataacataaactataaatagatgaataaagatatacttcagttgagaaaaaggtttggtcccattggaagggtagacagaatcacagagggaatgatatacaccaggaatgtattacagggtacagagctgtgtctcccaggataatagctactaaaagctctaacatcatacaacaaattgatcatgctttctgcttatgcttatcaagcatggtctaacaggaaaatctaagttaaatgcagtaagtgtgattcttcgtgggaggtaacacctcccagttgtgtcagatacattttaattctccaatttctgaatctgtcaaaatcagagttatgaacatgttaatgatgaattaataagacaaatggctactgagttttgaaagctcttgacagacagcaatttctttcttctgcagcagcattataacmatatttctattatttagggaaaaagtgcatttaaaatggtgaatgttattataaataagtaaatatcatatatctcaataatacagggaaag

SEQ ID NO: 850734 - DNA, 554 bp, Homo sapiens
cagtaagctctgccctgggtcaacagacatttattcccatttcacagatggacagaggacagagaggaaaagatcacctgcttcaggtgacacacaaggtaagaactggcatggaagctgacayctatgtctcttacatttcctacatcagaaacagatgtaacatcaaccagccctggttatctgcgctgtaaagtagagttcacaccaaggaaaaggagacactgacttaaagaaaagaaatattctttccctgttttttttgttttaaacataagacaatttaaagaaagggaggagtgcaaattaaagatttcctcgatcaaattttaaccaactatgtatttgtgaacccatttattcagggacacacagtgtttaaaatactcctctaaggaaacaattccagcctgggtctaggcagctttctagggttttgcttgggcaaacagtgttatttccaaagtgtcctgtaacctgctgagtttaggagaaggagaggaaattcagagctcccttgatccaggagccagaagattaatgtttcgggggtc

SEQ ID NO: 850735 - DNA, 602 bp, Homo sapiens
gactgtttctgctgcattggagagaagaagtgaagaactggagcaggcacaggtagggtgcccatgtgagttagagaaaacctgacctgaaggccacttgtgattcaaaacccagtgaatatgaggaattaagaaatgagctagggaagaactgaagacaaatgtgactgatgtgactgatttctgagtcactcctctggtccatgtggtgggtaggtccacactgtttgtgggtggaagccccaggccagaccccgaaggtttgagacacaagtgagagcactgtcagtgcactgaaatcagagacaagatcccatcaaatcaggctcagctgggtcacagtgcacagtggggctgcagaggcaaggcacacaagtgttcaagtgattaatctcttgtctccattactctaaatgagctaaacaaatcccttgctgggcctgtcgcacggatgttctgcatgcaaattgttcctaatgagcagggcacagggctggtcccctggttggtaaatccattcatttcacaacacattgtctgsttcacatatttctgtgacacaatccattggcagatgagctgttaaatgaaacactggccac

SEQ ID NO: 850736 - DNA, 609 bp, Homo sapiens
tttaaagatgtttaagttcaacacacattcaatgactattttacaagacaggaaatataaaaacaaacgaagttagatgctagacttatgttgtcaaatatggtagccgcaagtctcacgtggttattgagagcttgaaagatagccagcgtgataaggaacttgatgtttactttttttttattttaaatacagttgcccctcagtatctgaaggggattccaccccgaggatagcaaagtcctcggatgctcaagtcacttatacggaaaggtgtagtatttacatagaacctacacacatcctccagtacactttaaatcacctctagattacttatacttgatacaatacaaaggctatggaaatagtcattgtactgtattatgtttgtatttttattgctgcatttttatattttattattttttcaaatattttgatctgaatatttttaaagttaaaagctgataattcagttaatggaacaattttaagtatgtttggaaatcctgcrtatatgaatctacattttcaattgtataagctttataaaatctaaattctgatcaagttatttgatggaaattcaagaagaagaagaattaa

SEQ ID NO: 850737 - DNA, 592 bp, Homo sapiens
ggtgaggagccagggcagggatcctagcattggatcgtatatctccttttcaaatgtattccataatcttggccattttcaccacatcacacctccagctaagatcgctctctgcctgaacctctttcagtattatttttgcattgttcttctctccagggaatatcctggtttagactttcctcccaattgaatttgcctttctcccctctgagccaaatcctattttgttattttccattggtatctttaaccctctttgagacatctgcattacctctctgcccttcttggtgatagcaacacctcccaattaaggatcttatgcaaatttcattagcgtgctgttgactcatcttccagatcattattaaggatgttaaataagagcagaacaaacaccggtttccacacaccttcagggaggccgtgctgtgtcatttttcttgggtttgggtgtgtgcaccatttcatctgcaaagtaagttcttttccattccagtttgaatttatttcatgargaaagtttcataatatattataaccaatgttttaataaaaatcttatagctatccatggtacccctgcatg

SEQ ID NO: 850738 - DNA, 576 bp, Homo sapiens
ccactgcgcccggcccctgagcctttttacctgtacccttaggattggtgaacacattgaggtgctcaaagagggcctggaagctctgggtctctccccgatcccttactctgtgagtctcttctatctggctgttcctgaacttgataaacaggtaaatgtagggaaaatgcctttctgagttccgtgagctgttctagcaaactatcaaacctgagggaggggtcgtgggaacccccaatttacagccaattggacagaagtacgggaggcaggaacttgcaattgcgtcagaggtgggggcagtgtggtgcgactgagcccttcacctgagggttctgacgccagctctgggcagtgttacaattgaacggaatcatcggacacccagtggtgtccagagagctggagactaggttgttggtgtggaaaacccatacatttggtgtgagaagtgtcactgatggaaacaggccagagggatctgaaaatgtcactaacgtagtggtcyccagggtcagagggatgactaggccgagcacagggcatttttaggacagtgaggctatgccgtat

SEQ ID NO: 850739 - DNA, 645 bp, Homo sapiens
agctgttggtggatctaccattctggggtctagaggrcagtggccctcttctcacagctccactaggtagtgccccagtggggaccctgtgtgggggctctaaccccacattttccttctgcactgccctcgcagaggttctccaagatggctccacccctgcagcaaacttctgccttgacatccaagtctttccacattttcagatatgtttatagcagcaccccactctctgcggtaccaatttactgtattagtccattctcatgcagctatgaagaaatacccaagactgggtagtttataaagaaaagaggtttaattgactcacagttctgtatggctgggggaggtatcaggaaacttacaatcatggcagaaagcacttcttcacagggcggcaagagagagaatgagtgccaagcaaagggggaaaagccccttataaaaccaacagatctattgagaactcactcagtatcatgagaacaacataggggaactgcctccatgatctaatcacctcccacaaggtccctcctccaacacgtggggattacaattcagattacaattcaagatgatatttaagtgaggacacagagccagaccatatcacctggcaaccagcattatgttttctgt

SEQ ID NO: 850740 - DNA, 571 bp, Homo sapiens
agttgtttgggtattttccttgggtatatatctttgctacaaagtctgatgcaatagagaygaaaaattctgtatcaaaacaaactctggaccttcttgctacaagatatgaagcaaataatctcatgtaaaagggccagtacatataatgtacctctagttacttattctccctaaacaatgcagacacaagtaatatgctcttagattagactgaagagttaggattataaaagtatgtataaaggtaggttttatctacatatttattttgtatttgtgattttatattttgtaagatgattggggcaaaatataaaaattgtctgttaaaatcaaggataactgagataatacattaaaaatataaaggacatttgaaagagtaatatctttaagaaacctttttttctgtagaagaaagaaaaacacaagatatttaaaaagctggaaaagtgtcaatgggaaatattgaagaagataatgtcctgtaaaatgaaggatttcagaacttaatctgaatagtaactcatctagagctaggtatgggctcattaaatattaagtagct

SEQ ID NO: 850741 - DNA, 560 bp, Homo sapiens
ccaaagaagttagagtatagcattttccactggaaacaattattaaaaataaatctaaaggatgtttttaaggcagaaagataataattctggatgtaaattttgatatgtatgaaataatgaagagaaaaataaaaaagataaatagacatactattgagaggagttaaattgatatatatatatatatatatatataaacatataagctttatccttcaagaagtatgagttaaaaagcgactgagttctatataaagttttcacaaaactttatagtgttaaagttttacactatcagctctcagaaagcagcactgacaggaaaaggaaatctatgtctgcaatgtatgtattgattccagtcaagataattcactcttccttgtgaattcactgcttccttgtgctggaaagcatttgacacaatcaactcgccagcaacactagattctctcttcaagagttttttccatggttggcaagtyggactttggcagtcccagtggatagatccaccttggtgaaaaaaaatctatgctattgtaaccactcatagc

SEQ ID NO: 850742 - DNA, 616 bp, Homo sapiens
cccgcaggccgagagtagagggtgatgaatttatatctgaaaatgcagcacatgtcggtactttgagtgcctttaaattttttttttttttttgagacagggtctcactttgtcccccaggctggagtacagtggcacgatcatggcttactgcagccttgacctcccaggctccaagtgatcctcctgcctcagcctcctgagtagctgggatcacaggcacgtgctactatgcttggctaattaatttttttattttttttaatttttagtagagagggagtctcactgtgttgcccaggctggtctcgaactcctgggcccaaacagtcctccctccttgacctcctgaagtgctgggattacaggaatgagccaccacacctggccagtgaataatttctttttattttcatagtatgcacctatatgcaataaaggagtttatcaaaatgccttcagaagcattttgattattaaggaaaaaaaatggcattttcccaaatgctgttttytccttttacatttagaagctcatagtgtaattttaaatacaatatatgtaaagaatgtttacttttagtagtgtctaatgatttataaggttaccttaccg

SEQ ID NO: 850743 - DNA, 516 bp, Homo sapiens
tgggatccgcctccccagcatgcaaggagcctgtagaaggcaccaggggctgcgtcttctccagcctgggtggccytggccccagatcccccatgggtctctctgacgggccagcatacggtgacctgcttccaacaaggacacctgtggcagcttcagatccttatttaaaagacattaatgccaatttattataaaaatgtacatgtttagtatgtattttacttcaaagaatactgaaagtaaaaaaaaaaaaaaattgaagaaaagttaccccaaatccctgcagccaacatcttctacatccaggcccagtggaaggataaagacaggattccaggcacgactccggaaggaaaaagggaggaggtggagatggcatacacgaccgtcagtgagatgctctgccaggtgcagcggctcatgcctgtaatcccagcacttttagaggctgaagcaggaagatcgcttgaggccagaagttcgagaccagcccaggcaacatagcaagtcccc

SEQ ID NO: 850744 - DNA, 627 bp, Homo sapiens
gtagagatcaaatcacttggctaaggtcacatacctaattacaagtaaagcaaaaattaatctatggtttgtttattaatttttttcatgtaacaaatatttatttcaccagmgtaactgagataacaaaagacccattaatttggccaagtttatactaacggttagagccacagtgagaactgaacaaacagcaatgacaacaaaaacaaccacaaaacaaaggccttatcccacctgttcagctgtcttgcctctcaccctgctacccgtggtgcagcatagccctcagaatccccagcttggattttaatcagctccctgtctagtctcctttgaaaaacccacgcacatcatctgtggggtttgtgatattacatttggtgcttagatctcagtttttggttgatatgcaaaaatgaaaaagagcaagaaattcccccagagactccacagctgtgcatctggaaagaacacaaatctctttcaaccaagatctagcaaacaaaacaaaacaaaaaacaaaaaaacaagcctgcgaagtaatttatgctctaagatttccctcaggatccccattttctgaaagtctcagatgacatgtttgtgtttgtgtgtgctagtttc

SEQ ID NO: 850745 - DNA, 610 bp, Homo sapiens
atcttgactcccatgaagctgggaattacaagtaccctgctggaatgctgctgcagaaatatatctgcactaccatattttctagtgaaattcagccaaaagcarcaggaaaattatctctgcctcacttccactttccaaaccttgcacaagtgcatccaagtggggataagtaggtgatcagaaccctagctgcaagagattccaggaaatgtagtttttttatttctagactctctatgtggggagacacactggaagggagtgaaagagaatgttgaggttaatcacctgtatttgcttcctattgctgctggaataaattggaacaaactcagtggcttaaaacaatacacatttgttatctttcatttctggaggtcagaagtctgatggaggttttacaaggctaaaatcaaagtgtcagccaaggtgtgctccttttggaggctctaggggagaatccatccatcccctgcctttcccagcattagaagactttcccacattccttgctcatggccacattgctctgacttccgcttctgtcatcacatcaccttctatgactctaaccttcacatctccgtcttataaggactcttgtgat

SEQ ID NO: 850746 - DNA, 481 bp, Homo sapiens
agcacttaaaagcactgccttctcaagtgaagctagtgctgcagattaaaaatgccagggaatcccagtcctcaaccattccttttcttttcctatttaaggaagaattattaagaagctgaattatcaaggctattgtttctcaaatagaaagtttagttccacagaggagtagtgtgtgtcttccattaggaagcgtgaataggagctacaaaaccccccacagttgatagggaaatgatttttcaaacaggacgttttgactttgcttcttcccattcttgggcttgttcttgctatcttcctctgcctcctatctttaacaccaccactctaataagaagaactctaacccgctgttttgtaagggtggctcctggcaaaaacccactatgttttgttggggkcggggggattacttagaatgcagaagcaatgctggattgatgaggctgtagggagcggggcagactgaggaagg

SEQ ID NO: 850747 - DNA, 540 bp, Homo sapiens
atcaactcttctgtctttcaatgaacaggttttatcaattatctgctttttctttcgtatatactgcatacgaatctgtaaatgtatatctctctatatttaatagattcacagaaagtttgaaaaaaatataaagggagatcctgtgtacccttcacccagttttctcttatggtaatatggtgcataactatagtgcagaatgaaaaccaggaaactgacattggtgcaatcctcagagcttcttaagattttaccagttttacatgcacccatttgtgtgtgtatgtatatatatctagatttatataatttatgtaacactcaagaatgttaataatatagtatataaccttttgaaactggctttttcattcatcctaattcctgtgaaacccattccagttttctgtatcaagaatttgttcyttttgattgctgactagtgctccgcagcacagatgtgccacagtttgtttaggttgtttagctatttactcattgaaaaacatctgattttttcccactttttggctgtta

SEQ ID NO: 850748 - DNA, 356 bp, Homo sapiens
ggaacatgacctagactcagctgatttcctggactttgagtcagggrttattgataccaatattcagttcataggcaatggtagctgcagtatctggtctggggtggcaacagcagcagtagtgtaagttgggtatccgacactcatgggcagcaacagcagtgttctaacaggactggacttgtagtttgaagctgaaggcaatcttatctgttaccaaacttcatttgctcctgcacattttaaaacttggttctttatagttctcttggtgataccatgaactcccaataaatttacaacaaattagttctctgcttaatcaatctagagtgagttagtgtctgtggctcaca

SEQ ID NO: 850749 - DNA, 542 bp, Homo sapiens
ttccaaaagaaggtggaagtcacttgataatgtctttctaattgcttgaatgcacacttcatgcctcaactccacaggaaagctagttgttataattagaagttttataaagacatagtttatacaaattacagataattacttaactaaaactccagtctcttgccatcttagaagatatccagcaacatgtgatttaaacaataggttaaagtggaagatgtggtgattatattgggaaggatgctcaattgtttttataaaattttctttaaaaattggtagctgttatcgtgaactgaataagttctgtttccatttggagacttaattcaggatatatctggaaagacaaagcatatctacactccaaatagtttaaaaagaagagcatttatgcacattttgttactaacgtcttcctattccttttattgataatttttagggagraatgaaaaccagtcaaataggtgatattactctatgataggggtcatataacttttttattaaaggaatagatagtaaatattttaggc

SEQ ID NO: 850750 - DNA, 505 bp, Homo sapiens
tgtatttctgtttttcatattatttatgtccgctctttattttcttccttctgcttgctcttccctttctagtttcttaaatagaaggctagatcattaacttgagaactttttccttttctaatagaagcagttaatgctataaattttcctctatatgcctgtttagctacatccgcccccccgcccaaattttaacaggttgtgtttttaattttataaaattaaaaatgcttataatttcccatgtgacttgcctttttacccatgaattacttagaaagttctgtgttatttaatttccagatattggggaattttctagattgtttattactaatttctgcttgaatatgttataaccagaaaacattatttacatrattttaattctcttaaattttgtaagacttgttttatggcctggaatatggtttatcatggtgaatatttcttgggcatttgaataaactatgtagtctgccgttattggatagagggttct

SEQ ID NO: 850751 - DNA, 618 bp, Homo sapiens
gtgcagcgaataggctgcacgtggccgcagccctttttggcacgaccattgttccttcttttctttgtcatcttggaggcacggaccggagasagctatttaaagaaatttttaacctgtcatcattgtcaatggaataagatatcattgagatgtcattaagagttatttgaagaatgcagcaactcagctaaagaggatgcaacttgaaatcactgatgttttgagtaaggacattgtctttgttcaagagtcatcattagttttacctcacttaggaagatgaaaatgttttttaagtttgtatgaaagtgccaggctgccaactattattgttatctgaagcttctgcccttcatccaaaaataggcttataaaaattgcaataatggccactgaagacctaataacgctgacatattcactactcaatctgtggaaatactagaatgattataaatatataatatctaacaagccattacccatgtggtacaatctcagaatgatgttctgattaaagacacacagctcacaataaaaagcaattcaataatcttcaaccatcaaaaaataataaatcctgtcatttgcaccaatatagatggaactggaggt

SEQ ID NO: 850752 - DNA, 696 bp, Homo sapiens
ctcagccttccaaaatggtgagtttacagatacaggccactgtgccctacttctactcctttctaaatatgcttttatattcctcaggtgatctcaatgcacagttaagttyggaaccagaactatgcaggattaaaaggtatagaagacagtgataaatgtgctcactgagtgcactgatgtatcacaaggtcatatttatatggcctttcaaaaaagaaagaaaaaaagtgtcctgtctatttgtcttttcagaaaaatacatttgattttccccttttcacaaatgacaaaacattcaaaaatgtcccggtgatctttccaaaatatagatatgatcatatctccccaaccctctcttctacagaaaactccttaggacaatgctccaaattctcaacgtggcttagaatggcctgtgccaactgctcccacctcccaccagccccaacctcatctctcatgatgctgtccattactctctgcccctcagccacagagggctcacttccattcctctgacttgcagttctctcttcagccatggagtctccgcaagtcctgttacctcagcctggactctctggatagcccactctagaccatgctctttctcaatagcttacttagaaaatacatataattgctttatatttcagttcaatagttgttttcataataaactaccttgatgtc

SEQ ID NO: 850753 - DNA, 362 bp, Homo sapiens
atatttaaaatgatacaattgccaaaaaygtggtaaattcccttttgggttgctgttagtttatcccaaccagacctcccatgttaagggagtttcctgaaccccctgacttttcaagactatgaaacgtgctccgggtacagctccctcaagtctccacaccctcccactccatgaaagagacagaacatctgctcctcatctctgggaaagtatatttaattattggatgctttccttttcaaaatgatgctggcttattgtgggtttttttctttttttttttagcctccagggcacaaacaaaataaaatcatcccttcgatgtttaaatcagataatagcatctgcatcaacaaaaa

SEQ ID NO: 850754 - DNA, 604 bp, Homo sapiens
ggagaaatcccgtctcaattgaaaatacaaaactagccgggcgcggtggcacaggcctataatcccagctgctaggaaggctgaggcaggagaatcgcttgaacctgggaagcggaggttgcagtgagcygagattgcgccatcgcactccagtctgagcaacaagagcgaaactccgtctcaaaaataaatacataaataaatacatacatacatacatacatacataaattaaaataaataaataaaataaaataaataaatgggccctgcgcggtggctcaagcctgtcatcccctcactttgggaggccaaggccggtggatcaagaggcggtcagaccaacagggccagtatggtgaaaccccgtctctactcacaatacacaacattagccgggcgctgtgctgtgctgtactgtctgtaatcccagctactcgggaggccgagctgaggcaggagaatcgcttgaacctgggaggcggaggttgcagtgagccgagatcgcgccactgcaacccagcctgggcgacagagcgagactccgtctccaaaaaatgaaaatgaaaatgaaacgcaacaaaataattaaaaagtgagtttc

SEQ ID NO: 850755 - DNA, 531 bp, Homo sapiens
tgtgtatgtgccacttgttattaatctcttcattggtcaagggacagctgggttgtttctgccttttggcttgtgttagtaatgctgcaataaatttgggtgtgcaaatatctcttccggatcatgtgttgtatattttaaatacatagccagaatggggtttgctggattgtataataatctcattttaaattttttgaagagctttcatactattttaaatataggtttgatgtgatagattattgtgacttttctttgtatttttatagaagagagttgtcgagtatccttttaaatgcctagtcatttctatgtcttctttggagaaagtcatttcaaacatgtgccattctaaatcaagttattaactttttttgttgttgagttttaggaatttatatattttgaaaattaacacctaccaaatatgtgattagaaaatatttttactctttttwgttttatgtatgtatgtatgcatatatataaccctatacaagacagggtcttgctatgttttcatggcta

SEQ ID NO: 850756 - DNA, 531 bp, Homo sapiens
tgtgtatgtgccacttgttattaatctcttcattggtcaagggacagctgggttgtttctgccttttggcttgtgttagtaatgctgcaataaatttgggtgtgcaaatatctcttccggatcatgtgttgtatattttaaatacatagccagaatggggtttgctggattgtataataatctcattttaaattttttgaagagctttcatactattttaaatataggtttgatgtgatagattattgtgacttttctttgtatttttatagaagagagttgtcgagtatccttttaaatgcctagtcatttctatgtcttctttggagaaagtcatttcaaacatgtgccattctaaatcaagttattaactttttttgttgttgagttttaggaatttatatattttgaaaattaacacctaccaaatatgtgattagaaaatatttttactcttttttgttwtatgtatgtatgtatgcatatatataaccctatacaagacagggtcttgctatgttttcatggcta

SEQ ID NO: 850757 - DNA, 503 bp, Homo sapiens
atcccgcggccgtgttttcctggtggcccggccgtgcctgaggtttctccccgagccgccgsctctgcgggctcccgggtgcccttgccctcgcggtccccggccctcgcccgtctgtgccctcttccccgcccgccgcccgccgatcctcttcttccccccgagcggctcaccggcttcacgtccgttggtggccccgcctgggaccgaacccggcaccgcctcgtggggcgccgccgccggccactgatcggcccggcgtccgcgtcccccggcgcgcgccttggggaccgggtcggtggcgccccgcgtggggcccggtgggcttcccggagggttccgggggtcggcctgcggcgcgtgcgggggaggagacggttccgggggaccggccgcgactgcggcggcggtggtggggggagccgcggggatcgccgagggccggtcggccgccccgggtgccgcgcggtgccgccggcggcggtgaggccccgcgcgtgcgt

SEQ ID NO: 850758 - DNA, 363 bp, Homo sapiens
tgtctgtggcggtgggatcccgcggccgtgttttcctggtggcccggccgtgcctgaggtttctccccgagccgccgcctctgcgggctcccgggtgccsttgccctcgcggtccccggccctcgcccgtctgtgccctcttccccgcccgccgcccgccgatcctcttcttccccccgagcggctcaccggcttcacgtccgttggtggccccgcctgggaccgaacccggcaccgcctcgtggggcgccgccgccggccactgatcggcccggcgtccgcgtcccccggcgcgcgccttggggaccgggtcggtggcgccccgcgtggggcccggtgggcttcccggagggttccgggggt

SEQ ID NO: 850759 - DNA, 419 bp, Homo sapiens
gcgccgcgggaccgccctcgtgtctgtggcggtgggatcccgcggccgtgttttcctggtggcccggccgtgcctgaggtttctccccgagccgccgcctctgcgggctcccgggtgcccttgccctcgcggtccccggccctcgcccgtctgtgccctcttccccgcccgccgcccgccgatcctcttcttccccccgagcggctcaccggcttcacgtccgttggtggccccgcctgggaccgaacccggcaccgcctcgtggggcgccgccgccggccactgatcggcccggcgtccgcgtcccccggcgcgcgccttggggaccgggtcggtggcgccccgcgtggggcccggtgggcttcccggagggttcsgggggtcggcctgcggcgcgtgcgggggaggagacggttccg

SEQ ID NO: 850760 - DNA, 633 bp, Homo sapiens
ggtctggagagaagcagggactggcccagagatgatgaagtgggcagagtccaagggaaaaaagagcattctgacctcctaggccagggctcaacactctcatggggtttgttttgggaatgagtccctgagatcctggggatttttgccaattttctcgtcatatgaagcaaactcatgtctgcatcattagacttccacaggtttgtgcatacacacacagacttctcaggctaaaggtcataagaggagttaacgctgatggagtgatgagaagaaaaaagatagaggataggggcagctttgtcatggggtagaagcaccccatcttctggtaacatgcccaggacccataacatgggcaggggaaggcaataggctgatggcttgagaggctcaaggcttccatggatctgactgggctgcagccaacaccaggatagctttccaaggacaaaaccttactttctccattcattaatctgcataattaaaatggtaaggaatccccctacacccaatatggagaggaatacagtagtgaaaaccttcaatttttccctgtamaaattgacataattgaactgtgtgacccttaaatttgaaaggcttaaagaagtgagttgaccttgc

SEQ ID NO: 850761 - DNA, 633 bp, Homo sapiens
ggtctggagagaagcagggactggcccagagatgatgaagtgggcagagtccaagggaaaaaagagcattctgacctcctaggccagggctcaacactctcatggggtttgttttgggaatgagtccctgagatcctggggatttttgccaattttctcgtcatatgaagcaaactcatgtctgcatcattagacttccacaggtttgtgcatacacacacagacttctcaggctaaaggtcataagaggagttaacgctgatggagtgatgagaagaaaaaagatagaggataggggcagctttgtcatggggtagaagcaccccatcttctggtaacatgcccaggacccataacatgggcaggggaaggcaataggctgatggcttgagaggctcaaggcttccatggatctgactgggctgcagccaacaccaggatagctttccaaggacaaaaccttactttctccattcattaatctgcataattaaaatggtaaggaatccccctacacccaatatggagaggaatacagtagtgaaaaccttcaatttttccctgtaaaaattgacataattgaactgtgtgacccytaaatttgaaaggcttaaagaagtgagttgaccttgc

SEQ ID NO: 850762 - DNA, 511 bp, Homo sapiens
ttgcttgattgctttcgtgctttcttgctttctagttttctttctttcttttgtttctttctttcttgcttccttgttttcttgctttcttgcttgcttgctttcgtgctttcttgttttcttgctttctttcttttgtttctttcttgcttgctttcttgcttccttgttttcttgctttcttgcttgcttgctttcgtgctttctttcttgctttcttttctttctttcttttctttttctttctttcttgctttcttttctttcattcattcattctttctttctttcctttctttctttctttctttctatctttctttctttctttctttctttctttctttctttctttctgtttcgtccttttgagacagagtttcactcttgtttccacggctagagtrcaatggcgcgatcttggctcaccgcaccttccgcctcccgggttcgagcgcttctcctgcctcagcctcccgattagcggggattacagggaggcacccccacg

SEQ ID NO: 850763 - DNA, 643 bp, Homo sapiens
ggtctcactgacttcaagaatgaagccgcggaccctcacggtgagtgttacagttcttaaaggcagcgtgcctggagtttttcccttctaatgtcagcatgtgtttggagtttctttcttctggtgggttcgtggtctttctggctcaggagtgaagctgcagacctttgtggtgagtgttacagctcataaaggcagtgtggacccaaagagtgagcagcagcaggatttattgcaaagagcgaaagaacaaagcttccacagtgtggatggggacccgagagggttgccactgctggctcgggcagctgcttttattctcttatctggccccacccacatcctgctgattggtccattttacagagagccaattggtctgttttacagagagctgattggtcccttttcacagggtgctgattgatgcatttacaatccttgagctagacacaaagttcaccacgtctctactagattagctagatacagagtgttgattggtgtatttacaaaccctgagctagacacggggtgctgatttgtgtgtttataaaccttgagctagatacaaagtgtcgaytggtgtatttacaatcccttatctagacataaagtttctccaagtccccaccagactcag

SEQ ID NO: 850764 - DNA, 617 bp, Homo sapiens
acatacttggcatcacagaattaatacattaaacataaagactttaactcagcttgtatcctcaaacttgtggctctggctgcattccatttcctccggcactggtgcaggaggtgctgtatttgcataattgtgcacaagtaatcagatgacttgggagagaatggtgagcagtcagcagtgcagaaaagcctttgagtaggtcttattgaaggaagataggtcttattgaaagaagaataataccttcaagaagtgacctcatttctttggtgaaaggtcctaacagtactaagtattctggtaaccaaaaactcacattctaaagacagtccaccatacagcactgttggccagaatctctcaagagagaaagatgttctgctgtataacaactttctgaggctctttcttgtgaggttctgttcctcacaagtagcaccttctagctatgtcttcacacgacagaaggggcatgaatattcctttcaacctccgtcacacgggcactattattttctcgttaacatgcagccctcctgacttaataactttctcaaagttcyaataactaatagtatcacactgaatccacgtgtggattaagtttttaaata

SEQ ID NO: 850765 - DNA, 547 bp, Homo sapiens
atatttttcagaggcttgggggtttttattactcttttttatttctgtctgtatgtctgacttcacataaacagtcttcaaactctgagattcttycttagctttgtctattctactattaatagttgtgaatttcttataaaaaaatttagtgtgatttttttagctctctcaggttagttatgctcttaatactggctcttttgtctctcagctcctgtatcatttcattatgattcttaacgtttttgaattgagtttcaagttacttctgcattttaatgatctttatttctattcatattctgaatttgatttctgtaattttagctatcttggactgatttataaccttactggagaggtagtgtggccatttgaaggaaaagaggaactcaggttttttgagttgtcagaggttttgtgcttgttctttcttatctttctggggtgatatttctttaatatttgaagttgtcaacttttggatttttccttttattctgcttgatgaccttaagggtttaattgtgttataaggttggct

SEQ ID NO: 850766 - DNA, 520 bp, Homo sapiens
aagggattttcaaccaaaaagtctatagaaaacaaaaaattttggtttttctgaactcaggatgtgaggccagcttttaaagcactgaatttaaaaagccctcaagaccctaagcttgataarcaagtcaccagcaggtctcatttttcagctctgtgcaccaggtggcatgtctagcaaaatgtcccctctcatgtcaggttttttctatgaactcagaatgaccactgtcccttagtatgcagccctgcagtggacccaaaaatgacaatcaatcaggtccagagttgctcattatggcctttccagaatgtaattatctaaggacaattctcccccttgtaaaattaagaaagtatcagaatatttgcctaatttttgataacatcatactgtgagccacaaaaaagcaagaatttaaaatgtaagagattatctggatcctagggcacagaaatacacctcaaatagaatagtttcacacacgattttatatgtggacttcctgtgtggaagaaaa

SEQ ID NO: 850767 - DNA, 520 bp, Homo sapiens
aagggattttcaaccaaaaagtctatagaaaacaaaaaattttggtttttctgaactcaggatgtgaggccagcttttaaagcactgaatttaaaaagccctcaagaccctaagcttgataaacamgtcaccagcaggtctcatttttcagctctgtgcaccaggtggcatgtctagcaaaatgtcccctctcatgtcaggttttttctatgaactcagaatgaccactgtcccttagtatgcagccctgcagtggacccaaaaatgacaatcaatcaggtccagagttgctcattatggcctttccagaatgtaattatctaaggacaattctcccccttgtaaaattaagaaagtatcagaatatttgcctaatttttgataacatcatactgtgagccacaaaaaagcaagaatttaaaatgtaagagattatctggatcctagggcacagaaatacacctcaaatagaatagtttcacacacgattttatatgtggacttcctgtgtggaagaaaa

SEQ ID NO: 850768 - DNA, 520 bp, Homo sapiens
aagggattttcaaccaaaaagtctatagaaaacaaaaaattttggtttttctgaactcaggatgtgaggccagcttttaaagcactgaatttaaaaagccctcaagaccctaagcttgataaacaagtcaccagcaggtctcatttttcagctctgtgcaccaggtggcatgtctagcaaaatgtcccctctcatgtcaggttttttctatgaactcagaatgaccactgtcccttagtatgcagccctgcagtggacccaaaaatgacaatcaatcaggtccagagttgctcattatggcctttccagaatgtaattatctaaggacaattctcccccttgtaaaattaagaaagtatcagaatatttgcctaatttttgataacatcatactgtgagccacaaaaaagcaagaatttaaaatgtaagrgattatctggatcctagggcacagaaatacacctcaaatagaatagtttcacacacgattttatatgtggacttcctgtgtggaagaaaa

SEQ ID NO: 850769 - DNA, 275 bp, Homo sapiens
caccgccatcctcgaggctcaggcccactttctgcagtgccacaggcaccccccccccccccccccatagcggctccggcccggccagccccggctcatttaaaggcaccagccgccgttaccgggggatgggggagtccgagacagaatgacttctttatcctgctgacyctggaaagcccggcgccttgtgatccattgcaaaccgagagtcacctcgtgtttagaacacggatccactcccaagttcagtggggggatgtgaggggtgtggc

SEQ ID NO: 850770 - DNA, 556 bp, Homo sapiens
aaaaattacctgaatttttcacatcataatttatagattctgcttctacaaattgtctgtagggaccattatttctacacggtctactttcctgggttaagtggtggatacccaaatgtttwttggaataatgttttcttatatcagtttttagtcagtgatacgttgcaccatgtttaattttaagcattatcagttttcttttttttttttaattgatcattcttgggtgtttctcgcagagggggatttggcagggtcacaggacaatagtggagggaaggtcagcagataaacaagtgaacaaaggtctctggttttcctaggcagaggaccctgtggccttccgcagtgtttgtgtccctgggtacttgagattagggagtggtgatgactcttaaggagcatgctgccttcaagcatctgtttaacaaagcacatcttgcaccgcccttaatccattcaaccctgagtggatacagcccatgtttcagagagcacagggttgggggtaaggtcacagatcaacaggatcccaaggcagaagaatttttct

SEQ ID NO: 850771 - DNA, 596 bp, Homo sapiens
tggtaacaacattgttgtatgtaatagaaacatgcttacactacacatgggcacaaaaactttcctctgggcatagacatttgcarcatttgcagtaataacataacaacggaacaatcagtattgacagaattgtaactatggttataaattgtattcacatttacttatctggacatggtcctcttagcttcggctgtgtgtacactagtcagcttccgggatgtgactagagcagagtttgaagaatccttaagcttcagccatgcttagactgaccagcctccagtgtggtcagagcagggcggttgtcctttttaccggtggctgagatttgccatagggctattcgagtggggcaatctgggtcttgttggctaatccacaggttgtcatcaggactcgctactgtcactggttttagatggctatggtgaatccaaggtgtggcacctgcaactttaacagcagtgggagtggacatgattacaatatggcgcctatcgtatatgggtcctagagtggttgaattccattttttacctaaacgaagtccctaggtttgaaagggtgtactgggtctgttagacttatag

SEQ ID NO: 850772 - DNA, 584 bp, Homo sapiens
cgtgagccatcgtgactggccggctacgtttatttatttatttttttaattattttacttttttttagttttccattttaatctatttatttatttacatttatttatttatttatttatttacttatttatttattttcgagacagactctcgctctgctgcccaggctggagtgcagcggcgtgatctcggctcactgcaagctccgcctcccgggttcacgccattctcctgcctcagcctcccaagtagctgggactacaggcgcccgccaccgtgcccggctaactttttgtattttgagtagagatggggtttcactgtggtagccaggatggtctcgatctcctgaccccgtgatccgtccacctcggcctcccaaagtgctgggatgacaggcgtgagccaccgcccccggcctatttatctatttattaactttgagtccaggttatgaaaccagttagtttttgtaattttttttttttttttttttttttttttttgagacgaggtttcmccgtgttgccaaggcttggaccgagggatccaccggccctcggcctcccaaaagtgcggggat

SEQ ID NO: 850773 - DNA, 633 bp, Homo sapiens
ctttttggttttgccttgcgttttctttctttctttctttctttctttctttctttctttctytctctctctctctctctctctctctctctctctgtctctctcccctccctccctccttggtgccttctcggctcgctgctgctgctgcctctgcctccacggttcaagcaaacagcaagttttctatttcgagtaaagacgtaatttcaccattttggccgggctggtctcgaactcccgacctagtgatccgcccgcctcggcctcccaaagactgctgggagtacagatgtgagccaccatgcccggccgattccttccttttttcaatcttattttctgaacgctgccgtgtatgaacatacatctacacatacacacacacacacacacacacacacacacacacaccccgtagtgataaaactatgtaaatgatatttccataattaatacgtttatattatgttacttttaatggatgaatatgtatcgaagccccatttcatttacatacacgtgtatgtatatccttcctcccttccttcattcattatttattaataattttcgtttatttattttcttttcttttggggccggcccgcctggtcttctgtctctgcgctc

SEQ ID NO: 850774 - DNA, 608 bp, Homo sapiens
cctatggttgagttttacaatttttttgtatactttggatcayagtccgttatgtaatatttcctttgcaaatattttccccaacctgttacttttaattctattgacaatgtcttttattattattattattattattattattattattattattattattatactttcagttctgggatacatgtgcagaacatgcaggtttgttaacatatgtatacactggctatggtggtttgctgcacccgtcaacctgtcatctatattaggtatttctcctaatgctatccctcctctgtcacccccacccccaacaggccctgttgtgtgatgttccccgccctgtgtccatgtgttctcattgatcccctcccacttatgagtgagaacatgtggtgtttgattttctgtttctgtgttagtttgctgagaaggatggtttccagcttcatccatgtccctgcaaagaacatgaactcatcctcttttatggttgcatagtatttcatggtgtatatgtgacacattttctttatccagtttatcaatgatgggcatctgggttggttctaaatctttgctattgtgattagtgttgcaataaacat

SEQ ID NO: 850775 - DNA, 633 bp, Homo sapiens
agcaacattttggtttattttttatttcaattatagtttgtcccaagattgtattctgtgtgatatggattatttggaatttattgaaacctgctttatrtcctaaactatgatcaatttccaaatttattcccaatgtaattgagaacactgtattcacaaaaatcaagagtattaattatgctgtttaaatcctccaaattgttactaattatcttattgttgatatgataataaataagagagaactatgtgaatggctttcaattataaagtgttgtttaattcctttctgctaggctggcattttgatttatatatttgaagttattgttactgtagtttggtttgtgataaatggctggaatttgacaatggatttcttctcttttccatttctcttaatctattttatattttattctatgcggaatttattttttcctcagatttgtgttctggctgactaatcggaattttgtgtaatacgaattttaacttattgaataaataattatgtttaatttaatggttatatatattttttgttttgtaaccattatttgtatatgcatattttaacatttttcttttattcaatccattttcttagatcttctggcacccaatact

SEQ ID NO: 850776 - DNA, 546 bp, Homo sapiens
cgatcataaatatcttgggctttgtgaactatgtggtctctgtcacagccactcaactctgccactgtagcacaaaaacagccacaggtaatacacaaatgaatggtgttccaataaaactttatttacaaaaatagcctgcaggccagatttggtctgtatgccataattagctgattctgccttaagccattacaaatatttcagaaaacccacatagaatatacctttacagttatgataagaccactcctaggctaatgaattccaaccaaacatctctggctgagcaactcaggctgcaaggggccactcatggtggtctagagcttgattggcagcttcataaaaaagggaaagttgctgccaggaaaaaagacattcttaatctgggaccacaaagaggttatgtcagaatgctttyagctccaagcgatagataccaaagcaaacaaccataagaaaaataaggaattttttagttcatgtaagtggaccagtttcaggcacggctggatctaggggctgaaacagtcagggtctgtg

SEQ ID NO: 850777 - DNA, 580 bp, Homo sapiens
gaggttgatgtcgctactgtgttaaataaccagtactttggttttcattccsttactaagtactttaaggtcttatatgtcataattttattgctaacatcaaatatttattttattttttagaaaaataactaaacatgggcaaaggagatcctaagaagccgagaggcaaaatgtcatcatatgcattttttgtgcaaacttgtcgggaggagcataagaagaagcacccagatgcttcagtcaacttctcagagttttctaagaagtgctcagagaggtggaaggtaagagggcttaaaacatgctaacaaggtaattaaaagacagtttccaattgaggatgcaaaaaaaagcctagttggcattctcgtagtgggacgctattacatagcaaaagacattggttttgaggataatttacttaaatgttacaacttaaacttacaaataattattttgtagaccatgtctgctaaagagaaaggaaaatttgaagatatggcaaaagcggacaaggcccgttatgaaagagaaatgaaaacctatatccctcccaaaggggagacaaaaaagaagt

SEQ ID NO: 850778 - DNA, 653 bp, Homo sapiens
ttattttttgcctataaatgtccaattgttttagcactatctgttgaaaggttatctttcctcttttgaatctttttttcaactttttcaaaaataagttgggcatatttgtgtaattctatttttygattttctattcctttcaattggtctatgtgtctgccattgtctattgaccaatattacacaatcttgattattgtagctatataataaattttgagattgtggaagctggttaatgcaactttattgtactttttcaaggttcttttagctattttagtttacttgccttttcatataaattttggaataaagtcttaataaaaaatcttgctaagattataatagatattgcataaaatctgtgtatcaatttggttcatttggataattttcatcttcactatgttaagtcctaagtctttcataacatgaacatggtatgtctctccatttgtttggatcttttttcatcagcattgtttagttttcagcacataagtcctttgttaaacttatacttaagtatttttcaaatgatattaaatgatattgtattgttaattttggtgccaatatgttagtagatttgtctcttggtatccatggggaattggtcccaggatcccagatggataccaaaattt

SEQ ID NO: 850779 - DNA, 576 bp, Homo sapiens
tggcatggactcagctcactgcaacctccacctcctggggtcaagcaattctcgtggctcagcctcccaagtagctaagacgacaggcaagcaccacyatgcccagcaattttttgtatttttagtagaaacaggatttctccatgttggctaggctggtctggaactcctggcctcaagtgacctgcttgcctcagcctcccaaagtgctggaactacaggcgtgagctactgcacctgaccaatatcaatgtacttttgtttgtacctcttctctacacttcacatgatttaaaacgacaactatataaaacaataattatgaaggtattgaagaacgtacgatgtataaaaatgtactctgtttgacaatagtagcacaaaagaaggggaagaaatagaggtgtatacaagaaaagtttttgtatactttgaaaattaagtaggtattaatcagaactagattttttaaacttttatttttgactgacacatagtaattatacatacttgtggggtacaatgtgatgttatgatacatgcatacattgtgtaatgattgaatcagagcgatta

SEQ ID NO: 850780 - DNA, 639 bp, Homo sapiens
ttattttaagttcaggggcatatatcaggctcgttatataggtgaacttgtgtcatgggkgtttgttgtacagattatttcatcacccaggtattaagtctatacctggtagttattttcctgattctctccctcctcccacccgccaccctttccttccataagccccagtatgtgtttttcccctctaaagaaaatatcacaatttatttgtttcttgttgataaacatttgagtttaaaaaaaatcgttattattttaaataatgctgttatgaatattgctataggtgtctgtgtctacaaaagtacacatctaaggatttctctaaaacatgttcctgggaatagaattactagggtaattatagagtattcagagcttcaatttaaaagtataaagctgtattattttatttatttatttatttattttgagatggagtctagctctctctccggggctggagtacagtggtgcgatctcagctcactgcaacctccacctcccgagttcaagccattctctgcctcagcctcctgagtagctgggattacagagtggcataccactttaattttctccagcagtgtataagaatttctttggatctgcatccttgcctatactttatatagt

SEQ ID NO: 850781 - DNA, 580 bp, Homo sapiens
gtatggaaggcaaatagtgtgttttaaattctaccagacttacattaacatatttttttttgagacggagtctcgctctgtcatcaggctggagcacagtgcatgatctcagctcactgccacctctgcctcccaggttcaagcgattcttctgcctcagcctcctgagtagctgggactacaggtgcgcaccaccatgcctagctaatttttttttagtagagacggggtttcaccatattggccaggatggtctgtatctcttgacctagtgatctgcccacctcagcctcccaaagtgctgggattacaggtgtgagtcacccgcacccggccacattaacgttttaatagaagtttagtcctttgcttttctaaattttctcccattgcccctctcctcattgcccccaaagattaccacttttctatcagtttaatatggaattttacacaaaaaattattttcattytaaaacagaataaaaaatagtacacatattaaaaaagatgaaattttgctttctgtttttcattctgttactgtatcataataaaattatttacatttgtgagaata

SEQ ID NO: 850782 - DNA, 621 bp, Homo sapiens
cccatgataagattagcgtccttataagaagagaaaaagactagagttgtttgtttgtgtgtgtgtgtgtgtgtgtgtgtgtgtgtgcaccaaataaagcaggtaaagccatgggaggacataaccaagaagagggtcctcactaaaacctgaccctgatgacaccctccagaactgtcagaaataaatttatgtttttaagctacatagtttgtattagttcattctctcactgctataaagaattgcccaagactgggtagtttaataatgaaaagagatttaattgactcacagttctgcatggctggggaggcctcaaggaacttacaattatggcagaaggcaaaggagaagcaagcaccttcttcacaaggcacggagagagagtgcaaaggagaaactgccaaacacttataaaagcatcagatctcatgagaactcattcactatcattagaacagcctgagggaaagtgatcccatgatccaatcacctcccaccaggttcatcyctcaacacctggggattacaattcaagatgagatttgggtggggacacaaagccaatccatatcacagtttataatatcctgtcttagcagttggaactaagacagt

SEQ ID NO: 850783 - DNA, 526 bp, Homo sapiens
tgtttgtttgtttgtttgtttgaataaggattcaaaccagctgcagtctgcatttgattgatttgcctcrtaggcctcttttaatctatatgtttccattctctctttttttttattttgcaatttatttgttgacaaaactgggtcatttctcccctagagttctcatgttctggactttgatgattgaatctctatgatgttgtttaatgttcttctatcttttatatttctactagttgaatcttgagatgtgttctatttcaggttcaactttaggcaataatgcttcattaaggatgttgtatatttccatcaagaggcaaataaggtctgctttccttgccttttcttgtgtttttcactactgatggtcattgcttaaacctgttattttgtaaacttaattttcctctacaaataatcagtaaacttaattccccgctacaaataaaacttaatttttatcgccaagcccttgtatccacactagagaaataaatggtattaagatatagtgattcat

SEQ ID NO: 850784 - DNA, 609 bp, Homo sapiens
aactgttacttgttttagaaagaaaccacgtattgtcctccaaacatatttaataacttatcagctgcaaagagtatagagaagatacactgcataatcctttttcaaaatattcaaacacccacatctaatttttttgagtgtatgtcagtgtctctaataatatgactgctattttagtcacaataatgactgtaatctttgattctgtaggtggtatacttccatgtccatattattggaaaaaaattcttaaccagtaaaagcatggcactgtggattaagtaccaggctaacatcaaggaaatcaggtgatgatagcctactgtatgtccccaggtaggtttttgacttgggcattgagtttggttgttgttattgctgtttttattcaattaggagtgttggctttttagggtttgatacttacatatatgtttaatggagctctagttcaaaagttgaaaactggtagatttgggtcaatctagcctgccaatgtgttttgtttaacctgcataatattttaaacttttaaaaaaatasctgtcaatttttcttttttaaatggaggatggcttatgaaagtctagattgaagacttcttgt

SEQ ID NO: 850785 - DNA, 605 bp, Homo sapiens
aatttgttttattttgtttagtttttgagacagagtcttgctctgttgcccaggctggagtgcagtggcacgatcttggaccactgcaacctctgcctcccaggttcaagygattctcctgcctcagcctctggagtagctgggattacaggcacgcgccaccacgcccggctgattttttttgtattttttttttagtagggactgggttttactacgttggccaggctggtttcaaactcctgacctcaggggatccacacccctcggcctcccacaatgctgggattacaggcatgaatcaccgcgcccggcctctacttagtatttgaaaatgtgcttgccttatacttcaagcagtccactcttgcaaaaacaccattgagaaacacttgagtacatgcagtaataaacaggtttttaaaaagtgaataggatcattatttgtaacagtaaatattccaacccaaatgccaatcaacagcagaatggacacatatttgtaatacattaatatactgggaaactacgcagctgggaaaatgaatcaattacagtaactagcaagttagaggaatttcacatacttaattctgagttaaaga

SEQ ID NO: 850786 - DNA, 623 bp, Homo sapiens
tatcactttgaaagtctttttgatattcattatgttatagtaatcataatagatttattacgtttatttaactgtaatatagatggttgtttttctataaaatgaacattatactaaagyctcaaagggtagacctatggacttgatttactgtagattctagaataaaagtttggagaaaatatttgacattctgtataagaataagaaagttgagttccaattacaaacagtaaaagaattagaaagagagacagacaaaaatgaaaagaaaattgaattagaaaagcgtaaagtacaaggaaaattagaataatagaaagaaaattggcattttcattagtgaagtatagaagcagcaaaagagaaaatcaaataattactatgatagttcaacttcagttgccctcccagacaggaaagaaataaaaaaaactacataaaaaagtgattaaaatgggttataaatacatgaacaattttaaatgtgtattcaaaccagaaaaacaagaccctttcatggtttaaaattagaacattgaagccaaagaaataatctaaatcaaaatctattaaattgaacttgggctaaaaaatcaatcctgattttgaaaattaaaaga

SEQ ID NO: 850787 - DNA, 623 bp, Homo sapiens
tatcactttgaaagtctttttgatattcattatgttatagtaatcataatagatttattacgtttatttaactgtaatatagatggttgtttttctataaaatgaacattatactaaagcctcraagggtagacctatggacttgatttactgtagattctagaataaaagtttggagaaaatatttgacattctgtataagaataagaaagttgagttccaattacaaacagtaaaagaattagaaagagagacagacaaaaatgaaaagaaaattgaattagaaaagcgtaaagtacaaggaaaattagaataatagaaagaaaattggcattttcattagtgaagtatagaagcagcaaaagagaaaatcaaataattactatgatagttcaacttcagttgccctcccagacaggaaagaaataaaaaaaactacataaaaaagtgattaaaatgggttataaatacatgaacaattttaaatgtgtattcaaaccagaaaaacaagaccctttcatggtttaaaattagaacattgaagccaaagaaataatctaaatcaaaatctattaaattgaacttgggctaaaaaatcaatcctgattttgaaaattaaaaga

SEQ ID NO: 850788 - DNA, 623 bp, Homo sapiens
tatcactttgaaagtctttttgatattcattatgttatagtaatcataatagatttattacgtttatttaactgtaatatagatggttgtttttctataaaatgaacattatactaaagcctcaaagggtagacctatggacttgatttactgtagattctagaataaaagtttggagaaaatatttgacattctgtataagaataagaaagttgagttccaattacaaacagtaaaagaattagaaagagagacagacaaaaatgaaaagaaaattgaattagaaaagcgtaaagtacaaggaaaattagaataatagaaagaaaattggcattttcattagtgaagtatagaagcagcaaaagagaaaatcaaataattactatgatagttcaacttcagttgccctcccagacaggaaagaaataaaaaaaactacataaaaaagtgattaaaatgggttataaatacatgaacaattttaaatgygtattcaaaccagaaaaacaagaccctttcatggtttaaaattagaacattgaagccaaagaaataatctaaatcaaaatctattaaattgaacttgggctaaaaaatcaatcctgattttgaaaattaaaaga

SEQ ID NO: 850789 - DNA, 605 bp, Homo sapiens
tatgttgtcatttaaaataatgaatttatcagcttaattagatagagcaaaagtttttatgtaatttggaaagtttgggttaattgtcccacctcgagaacgtggatgtttatcayaggaaatatttgtcagagtgtttgttgtagaaatccgtgatgctcacttcaagctataatctgtgtttgccacagaggtttgttctaattccccaaccttgccacgactgacctgggtcatcaccatgtgcttattgaagagccttggaatactgtatagacccgtacagagttgttcaaataggtaagcactttccttctggtgaatttttttttttttttttttttgagatggagtttcactcttgttgcccaggctggagtgcaatggtgcgatcttggctcactgcaacctccgcctcccaggttcaagcgattctcctgcctcagcctcctgagtagctgggattacaggcacctgccaccacgcccggctaatttttgtatttttagtagagatggggttttctccatgttggtcaggctggtcttgaactcccaacctcaggtgatctgcctgcctcggcctcccaaagtgctgggattaca

SEQ ID NO: 850790 - DNA, 574 bp, Homo sapiens
tcaaactcctgtcctcaagggatccactggccttggcctcccaaagtcctgggattataggcgtgagccactgtgcctggcctacatgcacaaattcttatcttgacaaactgtgaaatgactctcacacctttttcttttccctgtgtcctctcccacttctctggaagaatatgttgaacaggagatgagggaggaagtcaagtgaccactttcctcagagtccagcttctctgtgggcctggggtttaccccagaaccctactggctgccttacaattctacagtctcagcaagaattttagagtgacgcctgtgactttcagaccatgagcttgctgcttctcagtgttcttaatagggacaggagggatgagtggtactaagggtccatgtagacaattgggcggctgctactctcatctgtattgtcatgttatccagaaagttcagctgtaagtcaatagacggattctaagagggagccaagaatgccatatacttytaaactctcatcataaaaacattgtgaaatactttatattttttggtgcctggattatataagtcataa

SEQ ID NO: 850791 - DNA, 214 bp, Homo sapiens
cgtatttcaacttttatttttattgcaaagagaaataatggcaccttccactcattgttttgagattaagaacaataatctggattatttaacaggctcatagatttctgggcagcccagctcagcgctgaccaaggtggggaggggcagcggggtgccggcctgggcagtgtccctcaggccstcccagctctgtctggggtcggttggggag

SEQ ID NO: 850792 - DNA, 642 bp, Homo sapiens
ggtactgagtgtccagcatatgtgcgtcctcgtggtaccgctcgaacagagaccggtccagacccaggttttgcagccgctcattcttgacyacaggccgcagctgcttgtggtctccgagaagaaccacctggaggaataggcaggcctggccctgacacccctagacccagagggaccccagccccacacgacacccgcgtctgcacacacagggcaccccaggtgggagactgtgccagggacgcctgctcatgctgcccacaccccccgccgaccaaccttctcggcctgtgggaactgcaccagggggatgagggtttcaggttccgtggccatgcctgcctcgtcaacaaggatctgcctcacgtccaggattttgaggctggcagaggctgcacaggagcaggtgcagaggatgacctcatgccggtccagctcgaacttccgagcctcccacaagaccttcttgtacctgccggggacactgcttgtcaccccagggcccccatgctgcaggcagctccaccccctggcccctgccacttaccagaccaggtcctccctggagaagagctcccctctctgcagccgggtgtcaaaggccttgatttccgacgagtaagggttgggggcctgccg

SEQ ID NO: 850793 - DNA, 372 bp, Homo sapiens
acatgctgtactctcatgagtggctccaggagcttcagcatgtcacgcttaccagagctgccagagcccagagctaacgcggccactcctgaccccccagagctaacgcagccgctcctgaccctccagcgctaacgcggcccgctcctgaccccccggagctaacgcggccgctcctgaccccccggagctaacgcggcccgctcctgaccctccagaccacagccacgtggccctgctctcatctctgaggccctccagggcgtctctctcgatgctgaatagacaggactggtcgggtgacccacgtttccccractcttcacacctcctcacagcacagcgcttccatctggaggcctcctatctccg

SEQ ID NO: 850794 - DNA, 584 bp, Homo sapiens
aaaaggcacaagacagatatctatacacagcttgtcctcgtggtgactcagcaggcaataaaacctgtcactagagatggagccctccatacccagctaattgagtttccagggaatgaatgggcctcatcctcatttgcaggagctgcaagacccttctagggagcggatggctggagccagcatttaattaggcacaggcagcccgccctccatgccaccaacacccagagctccgcctggccctgctacaaccagtcagcagggccttggtgtcccccgcagcccagtcttcctcaatagccacagcctcactaaaaacaggcaggcggaagacaggaatgcatggagtggcaagacagaagcagctctcgcctctcgccctggcgatctgcttgtccctgtttgtccccagcaactggccattccttctccccacccacagccggaggacacttttaaaaawtgtaaacctgaccacatcacttccggctgaaaacctcctacggctgcccactgctttttggataaactggcatctcctcgccagggctgccaagaccttgtttggcctgggtgtgctc

SEQ ID NO: 850795 - DNA, 590 bp, Homo sapiens
aaatatagagtcagtatataaaaatcaattacatttctctataccagcagagttttaaaaaatgatttttttaaagtatcatttatgaawtcatcaaaagtacctagaaataagtacatagaaataggtctatgaaactatctgaagtcctccatgtagaaaactatgaaacattattgagagaaattaaagcagacctaaataaatggagaaatatatcatgttcatgtattggaatattcactatttgacatgattaggctttctgtccccacctaaatctcatctttaattgtaatcctcattatccccatcatccccacttgtcagaccaggtggaggtaactgaatcatggggggtggttttccccatgctgttctcgtgatagtaagtgagttctctcaagatctgatggttttataaggggctcttccccactttgctcagcacttctccgtcctgctgccttgtgaagaaggtgccttgcttctccttcaccttctgccctgactgtaagtttcctgaggcttcccaagccgtgctgaactgtgagtcaattaaacctctttcctttataaattacccagtc

SEQ ID NO: 850796 - DNA, 590 bp, Homo sapiens
aaatatagagtcagtatataaaaatcaattacatttctctataccagcagagttttaaaaaatgatttttttaaagtatcatttatgaaatcatcaaaagtacctagaaataagtacatagaaataggtctatgaaactatctgaagtcctccatgtagaaaactatgaaacattattgagagaaattaaagcagacctaaataaatggagaaatatatcatgttcatgtattggaatattcactatttgacatgattaggctttctgtccccacctaaatctcatctttaattgtaatcctcattatccccatcatccccacttgtcagaccaggtggaggtaactgaatcatggggggtggttttccccatgctgttctcgtgatagtaagtgagttctctcaagatctgatggttttataaggggctcttccccactttgctcagcacttctccgtcctgctgccttgtgaagaaggtgccttgcttctccttcaccttctgccctgactgtaagtttcctgaggcttcccaagccrtgctgaactgtgagtcaattaaacctctttcctttataaattacccagtc

SEQ ID NO: 850797 - DNA, 593 bp, Homo sapiens
ttgctgctttggatattaaatcaaccaaaaactaataaacacttactgagattctacattaatttaaaaaatatacagtgaagctaatagaaagtccaaaatsggacacaagaagcactttatagaaagaatttcaggctggatgcaatggctcacacctggaatctcaacactttgggaggctgagtgggaggattccttgaggccagaagtttgagaccagcctgggcaacatagtgagatcccatctctaaaaagaaagaaagagtttcagagtttgaaactagaatctgagttcatgtataggggatttgtttatttcacagccttaggtatttgaagatcaaattattttggtttagcaactacagtggatgatcctatcatgcaacatagaagttcaggtttaatatgatcttgcatgaaaattatttagccattaatcaaaagcaaagaggctggtaataagctattttggcctttccatttatttatttagcttagcttgttttcttaaacttacttcaccttcactgtgtaatgcctgggctaaaaatgcatattacaattttttattttattattttattgca

SEQ ID NO: 850798 - DNA, 638 bp, Homo sapiens
gcatggtaactcacacataggaagtgctcaagcagtgttagattttcctattatttgttttgtgtgatacatcatttcaagattaataaccataccctcagatggtgaaaagatgccaatgacgcaaaaaaattccatgatatattataatttgagtttaaaagaaagtttcaaacagtataattctccaagaatcataagaaaatacagatgcagaatggcagaggttccttctgagttatattcatcttctcctttatgattaatctattttctaaatttttttacatgggcatgtaaacaggaaaaaaagttatctaataatattaataatgaaaaagactataactgtattttattcatccgtcttctcttggctagaatcgaggcttcatgaaggcaaaggcagtggcatctcagaatttgacaaacctcctttcatcagtgactggttccatttcaggctggcccaaagtcaaagtaagagctgggccaagcttttttccattccaatctcctctttcattccctcctgtctccctttttaggtgcccatgtagggggctgattccttccttcattcaactaataggtattgagggtccacrgggatccaacactgtgcaagggactgaatg

SEQ ID NO: 850799 - DNA, 554 bp, Homo sapiens
tgtttaatgcttgatttgaaggatgtaaaaaaataagcagtttattataccttacaaccttataaagggttgctatctagtacaaagataacatttatcttataacaaaaatttgatagttttaaaggttagtgttgggtagggtattttccaaaagactaaagagataactcagtaaaaagttagaaatgtataaaacaccatcagacaggtttttaaaaaacaacatattacaaaattagacaatcatccttaaaaaaaaaaacttattgtatcaatttcttttgttcaaaatgactgacttaagtatttttaaatatttcagaaacacttcctcaaaaattttcaagatggtagctttcagatgttccctcagtcccaatgttgctcagataaataaatctcgtgagaacttaccacccaccacaagctttytggggcatgcaacagtgtcttttcttttcttttctttttttttttttttttttacaggcacagaaactcatcaattttatttggataacaaagggtctccaaattatattgaaaaataa

SEQ ID NO: 850800 - DNA, 549 bp, Homo sapiens
aaagaacaatggtaccatttttcagctttgaagaactttttcatgcccacttcaagcacttcttacacttctggccctctctgctcagataccaacctcactggagggactggctttaagcttcatgragggccccacccttcctgttcactcagtgggaccattcatgaaaggaaataatgacattacattatgcaatcttccctatatgtaacctctcctaatagagcctttttgatggaatttttaggatccacggccaccaggattaagctacatactctaagctaaggaccacactggactggagcaaatataacagatctcagcacggattgccttggtaccagagtccctaacaagcccacatgctgccagtcacactgtccacacagaatcttgggggatctggaacactccatcctggctttaagttaccaccactaccaaactattgcccttttctattaaggcttaaattgccaatatagcaatacagaagaacctatactcacaagcattcacttctgtttaaagggatgtttacaa

SEQ ID NO: 850801 - DNA, 575 bp, Homo sapiens
attctggaagaaataaaaacattttccctatgaagaaagagttgttagcattgtattcctataaaaaggrgagcatagtattatttactataatttattaattatatttattattaataaatatattagcaaacaaaaaggggtgttctagagcattactttacagccctttaaaatactgaattataggggcgttgattcctatttctgtatcataagcctctcgtgttttacttgtaatttctttataggaaaagtcactattttgccagtctttaaattctagtaattcagttcacttagattgaacaaacttttgatgagcatctctgtgacaggacctttgccaaggacctgagggatgcaaaggtgagtaagacagcaaaatgacccccaggaaattcacaggagagtctgcatccatatcagaatctttcacaattggcctgtggggctttagcatcttctcatttctacatgaagttattaggctgtgtttcaaggtagccaggagtcatttggctcctttttattttccttttttcctttgtcgcccaggctggagtgcagtggag

SEQ ID NO: 850802 - DNA, 671 bp, Homo sapiens
aaccttttaaagtaactactattattcctacttaacaggatctacaaccaagcataaagctggtagctaaatggaagagcctggatttgaacccaggcagtctgactacagattctatgctcttaaaccactatctattagattatgatgaacaggttgcagttaaaatgcagaaaaacttataagaaatcagattaagatttttacacagcaaattacacaaagagccacttcatggttctttaacaatatcttaagtatagctcaatttacaaaaatttattttgcacacttaagagaaacagacctattatataaagcaacattcacataggacaggaaaaaacaaaatctttggctttcaccccaaagcactagagctaaacagtatctgtgttaatgtccaaggtgagagacacactaaaagtaaaaaagggggaaaagagaggtctaacgtgctaacaccagaattttagagaagaaacataggaaagagcccctggtcatactcaagccattcaaattcaaacaacaaaagagaagcctagaaaggcacatgacaagaagttactttacatcctgagccagctgctgtgcctcagatagacatatggggggatcactgggcttsctttctaccactaatggaacaatgagaaaagagcagtggc

SEQ ID NO: 850803 - DNA, 575 bp, Homo sapiens
tatttgctctggatctcttctccacctgaagatttctatgtgccatttcttgcaagtttccttccttttggcctggtgcaaactcaagggccaaaactgcctggctttgtattccagctgtaccttttactaggaaacctcaggaaagtcagatttatctgttcctcagatgtctcatctataaaacggagatgctaacactagtacaggcatgcctcattttgttgtgcttcactttattatacttcacagatgttacatttttttttacaaattgaagatttgaggctaccctgtaccaagcaattctatcagtgccatttttttcaaacagcatgtgttcacttcatgtctctgtgccacattttggtgcttctcacaatatttcaaactttattattatgtctgctagtgtgatcagcggtctttgatgttactattgtaattgtttsggagtaccacaaaccacaaccatagcaagatagtgcataaaggtcaactctgtgagctttaattcaagaaggaaaatgggaatccaccagaaccgtgaaggacaccccaaatcccagggagga

SEQ ID NO: 850804 - DNA, 508 bp, Homo sapiens
aaccattccttggcgactttttgtgattattccgaaaatgattagagaagcagtagagakcagaggtcgagatcaaagttatagaaatcaggattacctggttttcaatcgaagtcctatcattttttttggttgtgtgatcttgggccttagtttccacttttgtaaaattgggaaaacaacagaactttcctcctccagctgttgtgaggatttgacaatgctctgttcctgtaatgacggaaattgccagatgaattgcacctccagagttggagtattctggtctatttaaatatggctttagaaaaataatccagaaacttctgcataggacatttaaatctgggatgagtttgcaaatggtgtcagtgtcccaaatgaagttaagtccaggtcaaggcaatcataatacttcaaattcaacaagttctctaggctgcagacaccactatttttttgtgcaagtttacattattaggacttaacacagtacttggcatatagt

SEQ ID NO: 850805 - DNA, 508 bp, Homo sapiens
aaccattccttggcgactttttgtgattattccgaaaatgattagagaagcagtagagatcagaggtcgagatcaaagttatagaaatcaggattacctggttttcratcgaagtcctatcattttttttggttgtgtgatcttgggccttagtttccacttttgtaaaattgggaaaacaacagaactttcctcctccagctgttgtgaggatttgacaatgctctgttcctgtaatgacggaaattgccagatgaattgcacctccagagttggagtattctggtctatttaaatatggctttagaaaaataatccagaaacttctgcataggacatttaaatctgggatgagtttgcaaatggtgtcagtgtcccaaatgaagttaagtccaggtcaaggcaatcataatacttcaaattcaacaagttctctaggctgcagacaccactatttttttgtgcaagtttacattattaggacttaacacagtacttggcatatagt

SEQ ID NO: 850806 - DNA, 508 bp, Homo sapiens
aaccattccttggcgactttttgtgattattccgaaaatgattagagaagcagtagagatcagaggtcgagatcaaagttatagaaatcaggattacctggttttcaatcgaagtcctatcattttttttggttgtgtgatcttgggccttagtttccacttttgtaaaattgggaaaacaacagaactttcctcctccagctgttgtgaggatttgacaatgctctgttcctgtaatgacggaaattgccagatgaattgcacctccagagttggagtattctggtctatttaaatatggctttagaaaaataatccagaaacttctgcataggacatttaaatctgggatgagtttgcaaatggtgtcagtgtcccaratgaagttaagtccaggtcaaggcaatcataatacttcaaattcaacaagttctctaggctgcagacaccactatttttttgtgcaagtttacattattaggacttaacacagtacttggcatatagt

SEQ ID NO: 850807 - DNA, 627 bp, Homo sapiens
ctatacaaaccttaacaaatttaaaagaatggatactatacaaagcatgttatcagaccacartggaattaaactagaggtcaataaaaattatcaggaaaattcaaaaatatttggctgttatacaacatacttctccataacataggtattgaagaggaaatcttaagagaatttttgacagattttgaactaaataaaaatgaaaatacaacttatcaaaatttgtgggatgcagcaaaagcagtgattagagggaaatttatagtattcattgcatatattaaaaaagaagaaagatctaaaatcaataaactcccacattagaaaatgagacaaaaagaacaatctaaacctaaaacaagcaataataagaattatagcagtagccaataaaatttaaaatgtgaaatcactagaaaatacatcaatgaaaccaaatttggtgggtttttatttgttttgttcttctttttaaatcaatcaaatagacaaaattccagctaggctatccagtaaaaacttggagaagaaataaataaattattaataccagaaatgaaagaatggttatcactactggtcatatgaacagtaaaaagattataaaggaatattatggaaaac

SEQ ID NO: 850808 - DNA, 627 bp, Homo sapiens
ctatacaaaccttaacaaatttaaaagaatggatactatacaaagcatgttatcagaccacaatggaattaaactagaggtcaataaaaattatcaggaaaattcaaaaatatttggctgttatacaacatacttctccataacataggtattgaagaggaaatcttaagagaatttttgacagattttgaactaaataaaaatgaaaatacaacttatcaaaatttgtgggatgcagcaaaagcagtgattagagggaaatttatagtattcattgcatatattaaaaaagaagaaagatctaaaatcaataaactcccacattagaaaatgagacaaaaagaacaatctaaacctaaaacaagcaataataagaattatagcagtagccaataaaatttaaaatgtgaaatcactagaaaatacatcaatgaaaccaaatttggtgggtttttatttgttttgttcttctttttaaatcaatcaaatagacaaaattccagctaggctatccartaaaaacttggagaagaaataaataaattattaataccagaaatgaaagaatggttatcactactggtcatatgaacagtaaaaagattataaaggaatattatggaaaac

SEQ ID NO: 850809 - DNA, 627 bp, Homo sapiens
ctatacaaaccttaacaaatttaaaagaatggatactatacaaagcatgttatcagaccacaatggaattaaactagaggtcaataaaaattatcaggaaaattcaaaaatatttggctgttatacaacatacttctccataacataggtattgaagaggaaatcttaagagaatttttgacagattttgaactaaataaaaatgaaaatacaacttatcaaaatttgtgggatgcagcaaaagcagtgattagagggaaatttatagtattcattgcatatattaaaaaagaagaaagatctaaaatcaataaactcccacattagaaaatgagacaaaaagaacaatctaaacctaaaacaagcaataataagaattatagcagtagccaataaaatttaaaatgtgaaatcactagaaaatacatcaatgaaaccaaatttggtgggtttttatttgttttgttcttctttttaaatcaatcaaatagacaaaattccagctaggctatccagtaaaaacttggagaakaaataaataaattattaataccagaaatgaaagaatggttatcactactggtcatatgaacagtaaaaagattataaaggaatattatggaaaac

SEQ ID NO: 850810 - DNA, 538 bp, Homo sapiens
tgtgaccgaagtcaaatgctatttctggttcttgatattttatgtgagtcctcttttcttcctaattgatcctcaaagttttggggatcctctatgtgtcsctggtatcaatgactctctaccttggtggtttttttgttgttgttttcattacggtaaaatacagatgaaataatttaccatcttaaccagttttaagtgtacagttcagtggcattaagtacattcacacaggtatgctgttaattttaaattcacagttttaagcacttagtgggacctttcaaactggagatgtatattcttatttaataatttcatcctctattttctctcttttctctttctggaatttctattaaacagatgtttgatcttctgcactacacatctaactttatgtccttcctatcatctctctaatcatttgttctactttctggggtttctttaacgttttctttcagttatttactgagtgttttatttctatattttacttctctgtttttcttgctttgaatgtattttaaaaata

SEQ ID NO: 850811 - DNA, 619 bp, Homo sapiens
atggataagttctttagtggtaatttctgagattttggtgcacccatcacctgmgcagtgtacactgtactcaatgggtagtcttttatctctcaccccttcctacctttctccatgagtccccaaagtccgttatatcattcttatgcctttgtgtcctcataattcagctcccacttataagtgagaacatacaatatttggttttccattcctaagttacttcacttagaataatggtctccaactccatacaggttgctgcaaatggcattatttcattcctttttaagtctgaatagtattctgtggtacatatttatcacattttctttatccacttgctgattggtgggcatttgggctggtttcaaatttttgcaattgtgaattgtgctgctataaacatgtatgtgcaggtatctttttcgtataatgacttcttttcctctgagtaaatacccagtagtgggattgctggatcaaatggtagttctacttttagttctttaaggaatctccaaacggttttccatagctgtactagtttacattcccaccagcaatgtaaacgtgttctcttttcaccacattcctgccaacgtctattattttctga

SEQ ID NO: 850812 - DNA, 583 bp, Homo sapiens
ttgaggtggggtctcactatgttacccagattggtctcaaaatcctggtttcaagtgatccttctaccttggcctcccaaagcgctgaaaataactactttctttactaataatgtgctgtggcrgtctttccatgtctatcttgcttttttgaaggttggcaaagtattccatcttatgagtgaactaacatttatttaaattctcctttattgatatgaattttccaaatttattgctgtatgcaaattatagtacaatcaacacctattacataaatatttgcacatatgggtgagcatctctgtagaatggaatcctagagtagaattgaggggtcaatttaaaattgaaatatttaaaataataacaggtttaccaatctatatctaatactatatctatatttatactaatctgattagttgttagtaaccctccattttcttacatgtataattctatgttaaaagagtttgatactgtataaaagtgccaggtcctcaaacttttaaatttttgcaaatgtgatagagaaaaagataggttattatgggtttaatctgcatatctctgattacta

SEQ ID NO: 850813 - DNA, 613 bp, Homo sapiens
agcaaagatttttaagacctagtacaatcaagccaaactccttagagttggaattcatctgataatcagttttgcttaaggattttgtagrcattgctgagctctaccaaaagaaagggacaaagcatgattcctacattctgagagaaatgtagcatttggggaggcagaaggcggccttatggatttcaagcctgacaagtgggtcccaaaataatatcccctggccatgttaggatctatcatttcagaggctcaaccatattgtatgggacacccccaaaacattcatacagatatacatacacacacatacatgcatagatgtgattttgagaatggaaaattaagttatctaaaccaaaactttaagtaaaagcaatttaattttttaaaaaatctttaaaatatcaaacaggtcacatgataaaaatgaactacagtctaagtgaaaatagaacttgggaaattaagaagaacccgaacgagttttatataccatgttctctgacacgttgcaattaatctggaaatcaatagcaaaaagaaaattagaaaattcttgttaatatagaaactaggaaatctacttccaaataatctataggtcaga

SEQ ID NO: 850814 - DNA, 650 bp, Homo sapiens
ggatccccattgaatttggattaaagtttaaataaatggcatactatatccatcataatttattatttagccttatctcctaggcaaccaccatccttaccatgagccctaggtgcccttcttttcctggcacaaagggcacttccttcagaaagtctaccctgaatttccatattgggcctagggcctcttctctctattcccccattacagtctgtatagctgtcttattcattaatgttactaattatactataataatagtaattaatattattcaatagtaatctggttccatgtcagtctttttctccaaactgtatgttctccaagtatgtggacacaatggctctaggacatagcccctcaaagtgtaagttcaaaataattacttgttaaactgaatagaactacatttattaaaacacttattgtatataagtggataaacactacccaagtggagtggacactaagacgatcttcccaacactgggcaaattctcatttggataggccacctgtcaacatgtacacctgagctasaataaagaaggactggggacagggcagaactggaactgacaggtgccatgtttttctgtttcttctcttgtgtcttgcccttttatctctcctgcttcctgtac

SEQ ID NO: 850815 - DNA, 456 bp, Homo sapiens
ccaaaactggccataaaaaaattctctgcagcactgtgacatgttcatgatggccatgatgcccacactggaaggttgtgggtttaccggaatragggcaaggaacacctggcccacccagggcggaaaaccgcttaaaggcgttcttaaaccacaaacaatagcatgagtgatctgtgccttaaggacacgctcctgctgcagataactagtcaaacccatccctttattttggcccatccctttatttcccataaggaatacttttagttaatctataatctatagaaacaatgcttatcactggcttgctgtcagtaagtacgtgggtaaatctctgttccaggctctcagttctgaaggctgtgagacctctgatttcccactccacacctctatatttctgtatattaaatgtatatttgatttaaagataattttgtctaatatgaatat

SEQ ID NO: 850816 - DNA, 456 bp, Homo sapiens
ccaaaactggccataaaaaaattctctgcagcactgtgacatgttcatgatggccatgatgcccacactggaaggttgtgggtttaccggaataagggcaaggaacacctggcccacccagggyggaaaaccgcttaaaggcgttcttaaaccacaaacaatagcatgagtgatctgtgccttaaggacacgctcctgctgcagataactagtcaaacccatccctttattttggcccatccctttatttcccataaggaatacttttagttaatctataatctatagaaacaatgcttatcactggcttgctgtcagtaagtacgtgggtaaatctctgttccaggctctcagttctgaaggctgtgagacctctgatttcccactccacacctctatatttctgtatattaaatgtatatttgatttaaagataattttgtctaatatgaatat

SEQ ID NO: 850817 - DNA, 632 bp, Homo sapiens
atactactactttcttttctattctttcctacttgcatataatactttccattttaggtcactcttttcagactaatgagcatcctttaaaatgtcctttagtgaatatctatcagtgacaaactttcaaatttttgttagaattaagtttaaaaggtttctaaaccttttgttagaattaagttgaaaaggtttaaaaccttttcaggaggtgaattagaaaccttttcaacttaattctaacaaaacagtttcataccatacaggaggcaattttaacagtacttagaaatttatagccttgtatgcttgtattagagaagaagataggttaaaaattaatgagcaaagcatccatttcaaaacttcaaaaagaaaaactgtaaaataaacccaaagaaatagaagaaatgaaatcataaagataagaacagaatttaattaaatagaaacaaaaacaaagaagatgaaaaaaccaaatgttgttttattttaaagctaatgtaattaacaaatctctggcaagggcaatctggaaaacaagagataaggcacaartaaccaatattaggaatgagagaggtcaccaccagagatgctacagttattaaaaacataagttattctgaaca

SEQ ID NO: 850818 - DNA, 526 bp, Homo sapiens
ttctagggatgttgatcagttccagaggttaagayagattccaaatatttaagtctttcagtcaaaatctgagccctgtgtggtgatgccctatatctgttaccaacttaacagtattattatgagtcttctttagttgggctagcaatgagcaagtcacctacatactgaataattgtgtccctttccaattgtagatttgttaagtccttagctagggcattttcatataagtgggggctatcccagaacccttcagagataactgtccaggttagttttgaggcagaatgcatatctggatcagtccattcaaaggcaaatatattatgaatctggatgcattgagatccagaaaagtgcatctttcagatataagaatgtaaaccagcttgcatcccctgggacttggtaagtattggggacaatgaggtctatggagacaactgcatttcttaatgctctaagcgttctgacaaatctgtacttgccattaggctttttatctggtaacatgcgagtattg

SEQ ID NO: 850819 - DNA, 526 bp, Homo sapiens
ttctagggatgttgatcagttccagaggttaagacagattccaaatatttaagtctttcagtcaaaatctgagccctgtgtggtgatgccctatatctgttaccaasttaacagtattattatgagtcttctttagttgggctagcaatgagcaagtcacctacatactgaataattgtgtccctttccaattgtagatttgttaagtccttagctagggcattttcatataagtgggggctatcccagaacccttcagagataactgtccaggttagttttgaggcagaatgcatatctggatcagtccattcaaaggcaaatatattatgaatctggatgcattgagatccagaaaagtgcatctttcagatataagaatgtaaaccagcttgcatcccctgggacttggtaagtattggggacaatgaggtctatggagacaactgcatttcttaatgctctaagcgttctgacaaatctgtacttgccattaggctttttatctggtaacatgcgagtattg

SEQ ID NO: 850820 - DNA, 585 bp, Homo sapiens
gtgcagggtgttggatcccaggcagaatgagaagggcatgcattttgggaagtggcgtggcagagggagcagtggtgactgcgtagcctgaagtgttggagcacaaaagagtgaggagggcattcgtataccaagagaggggtgttagatcctcagtgggttgcaggggaggagggtgagcacatctgtttggggagcaacagtggcaacagcctagtataggatattggtacctgagcagagggaggaggacatctggaagaaggatggtatgaggcagtgaggcaagtggtaactcagagcaagatgtcagaacctgaatgaggtgaggcaggtattaatgctgggatgtggttgtggtgacaggagatgggttatatatagggagattggccaaatacaggcatacctcagagatatttcagaattggttgtagaacaatgcagttccaaaagtattctttggttytagaccaccaaaacgagttacacaaattttttggcttcctagtgcatataaaagttatgtttacactgtgctgtggtataagtgtgtaatagcagtgtaaaagaacgatgtatatg

SEQ ID NO: 850821 - DNA, 626 bp, Homo sapiens
gctcagcctttagggatgggcaggcattcatctagctgataaggaaaaggaagtctcagagtggaaaacagtaattccttgacaaataatacacacaagcaargtatttgatcgatacttgtctaggttcaatactcattgactctctgaatagagaaaagagatttaaagcatctataaagccaagaaaataaaattaagttttagacaaaattgagggtaggagaacaagggagaaatcaagtttgaaaaagagataaaagctaacatgacaaacagatggaaaaaaaatacagctattatatttgaccataatatttagccttgagtttcccaagagacatggggaagggagaaacataaaacattactccaaccttgaagaataatgggaggaaaattatgtttctcagtgaagacaaatttatctttatcctaaactcaaggaaaatatctgtcactgggaattagatctgggagatatagtagagaatgttctcacagatacttttacagctaacacaaaagtgaatgcatataaatatttcttacatttttacatatctgtacatttttatctacaaagaaaacactctgagtttttgtagaataaatgcatgtaagtc

SEQ ID NO: 850822 - DNA, 587 bp, Homo sapiens
attctacagatgaacacaaagacgtgtgtccttgttcccactgtgcacacacgcttctcctcacaagttctcattggattctcctaaaatatattttagytcagtcctcaccctaaagctgcctgtatagaacttactagtcagtgtgctgcaagactaaagggaaatttcatatgtatctccacctctggtatattactcactagaggaaaacaaagctttctgttcttgtttttatagacccagaggcatatcagctccctcatgggccatcgtgtggtcaagacagttctccttatggaaaagcaatacttacgtttcacctttctctacaaagtcaggaaagatgttggtttttaaaaaaatcaagcatatgtcatgtaggtgagaagatgagtgagctaatgcttatgaagtactttcctttgctttggaaaaaaaatcaaaagaacaactcactgaaaccccttcaactgagtagacctgttctgacccactcatcagagctcaaccccagtatggagattcttgaaagcttattaaacaactcgcaatttaccagagatttgtctccatatttgaaaata

SEQ ID NO: 850823 - DNA, 404 bp, Homo sapiens
ttttcacttaatgttgaatattgtaagccaacgttatttgacaatgtctatcattctcttttcagatcctctttttgaagtaaaaatagtgaaatagctttctttttaataatgcwcttaattttttttttttttttgagacaggctctctcacttggttacccagactggagtgaagtggtgggaacacggctcactgtagcctcaacctcctgggtgcaagtgatcttcctgccttagccccccaagtagctgggatgacaggggctccaccatgcctggctaatttttctatattttggagagacaaggtttcaccatgtttcgcaggctgaaatacactttttcaaaataaaaaattatgctatttccatgaataaagagatttcacagaatggctaaaa

SEQ ID NO: 850824 - DNA, 532 bp, Homo sapiens
tttgacaatgtctatcattctcttttcagatcctctttttgaagtaaaaatagtgaaatagctttctttttaataatgcacttaattttttttttttttttgagacaggctctctcacttggttacccagactggagtgaagtggtgggaacacggctcactgtagcctcaacctcctgggtgcaagtgatcttcctgccttagccccccaagtagctgggatgacaggggctccaccatgcctggctaatttttctatattttggagagacaaggtttcaccatgtttcgcaggctgaaatacactttttcaaaataaaaaattatgctatttccatgaataaagagatttcacagaatggctaaaacatctagcaattaaaataatactatttctccacaacgttcaatttaaataacccgtcaaactcctttcagtgaacttaaattattcacaaacaaggaatttttaaaaccacatttattgaaggaaaccataaataagaarctcaatttcgttgtgtatccaatg

SEQ ID NO: 850825 - DNA, 543 bp, Homo sapiens
gatggcaataaatgcatcgtaaagtctttttccctgactacaaagcaatctgttgtgttagaagcaggactagcaaaacaattgagatgctgacaagagtagcaggcaaagtaagggcttgtttagatcagaatatctaaatcaatattgtgctttaatctaattaacacatactttgatattgccaggtaggatttattagtacaaagcataataattccatcagtcaaacttgtaagtaatgttaaattaagggcaggtgagccttgatagttacatgtacatttctgtggatttgccaagtgctcagaaattcaacagtatgatcatattgaatattaaaagaaaaataatgccagtttgataagatactaaaataatgctgtcctcaaaaactgactggcaaaagtggwctttattttctagtatcactgtgaattaggatgagctcattcttagcctacagatgggagtaacctagccaaaccttggaaatggaccacacttgtctaccaagagattgttagaggaccccaaacctgg

SEQ ID NO: 850826 - DNA, 658 bp, Homo sapiens
aagcttgtacaattttaggatcccttktaaggaaaacagtacaatattatgaacacgaaatagggtacaaaagtaaatatcttaagaaacacattaaaaattagaaactccaaaagctgacaaataccacaaatgtatctacaatgcagaaaagtaatatcctatcattaactgcttgtcacagccctctaatactaaacttataattttatacatttgatgactgggagaatttccatcaccagctagcttctggctctatactcaaaccttgctattcctccactacccacattcttctggtgctgggtgccatgggttccatttgcatggtgaggcaacttggcctacatcactacatagggtgtaggagcgcccctggaagccattcctacgtggggatggtgtattagtccgttttcacactgctataaagaacttccctgagactgggtaatttataaaggaaagctgtttaattgactcacagttccgtatggctgcggaggcctcaggaaacttacaatcattatggaaggcaaaggggaagcaagcaccttcttcaaaagggagcaggaaagagagggtaaaggcacagaaaaagctaccatttataaaaccatcagatctggtgagaattcactcaccatcacaatag

SEQ ID NO: 850827 - DNA, 612 bp, Homo sapiens
cttccccaagtcaaatttccaaatgttcattgagcttttagccttgagttggaggacccycagccacactggggtgaccatttatgggaccttgaggaacagccaggtaaagactgacagggaaagctgggggttgacttcattcagccacccagaacctggcagaaatgccagatgaaaggcaagattctcagagaggcaggaagatgcttttcccaacctcaagggagccaatattgatgaaaacgtgagtctacctcaaacacgatgtgcttttaagaaactgtatttttgctaatacataactcaaataatgagaggcttggacatttttaggagtttgtatagatgcatatggtttttaccttcataaattcattcaaacattaaacattaatgttcagccctgagctgttcaattcacaagagggacaaaagacacagcctttgctcttaaaagatttaggatctgtatgggaaggtgagtttcctgtgttacgtctttctagccccacatgtccagccagcatgccctgtatctttcaaccatattgtacttgttaaaaattccttaactgcatcatgttctctctcattgccaagatgttgcca

SEQ ID NO: 850828 - DNA, 626 bp, Homo sapiens
tccccccacctctcatcttggtggggtgcttctcatcaagtaacaatcctctcacacccctgaaggtgtaaccagaacagctgcaggtggggccaggaagggcamgagtggatcccaagatcctccaggttgacacgtcactcctgaaaacattctgctttaaacagaagccacttcgctgctctgacgtgaatttctataaccaagacatactcttcgacctagagagatcaaggcatgaaaaaatggaacttctcaagggtaagctgtgttttcagtagtaagccatttactgttttacatgtacattttaaggtgttgcagggaaataaagcttctctagcagccaggatgtaaaagagcaaaaactttgcaagtagctgtaacaggattctcgagtgtgctgcccagagcagaggagacttacagagtggtgagtttgggggtgaagggaaggggaaggctgataatttgtaacaaagacacttaaagaatttaggactttaacaattttactgtagtaaagaatgtattagttagggtagaggctaagctgctgtaacaaagaaacattcaaaattcagtgggttaacttttctcttatgtggccatccagagagaggcag

SEQ ID NO: 850829 - DNA, 606 bp, Homo sapiens
cattactgcccctactttagccttcaaatgtcctagattgccagtttaatgtatttgggacattgccattaatgatcttagctggaaagcatccactcaaatacacatgtcctttgtgaaccatatgcaaataaaatatgggaaacttggaatgccgaatatagagaactcttattacaataaatctgaggtaagccaggtagtcttcctccaagtaattatgagaatttttcttttttcttttttttttttgagatggagtttcactcttgtcgcccaggctggagtgcaatggcatgatctcggttcactgcaacctctgcctcccgagttcaagcaattctcctgcctcagcctcccgagtagctgggattacaggtgcctgccaccacgcccagctaatttttgtatttttagtagagacagggtttcaccatgttggccaggatggtctcgaactcccgacctcaggtgatccacctgcctcggcctcccaaartgctgggattacaggcatgagctgccacgcctggccaagaatttttcatcagtacctagctttaccctccaagagtccctccggtgagattttgacagtttttacca

SEQ ID NO: 850830 - DNA, 486 bp, Homo sapiens
aatgaaataaagtgagaagacaagattagagaaaaaggagtgaaaagaaataaacaaagcctccaagaaatatgggactatgtgaaaagatcaaatatacgttgattggtataccagaaagtgatagggagaatggaaccaagttagaaaacactcttcaggatattgtccaggagaacttccccaacctagcaaggtgggcaacattcaatttcaggaaacacagagaacacacaaagatactccttgagaagagcaaccccaagacacataattgtcagattcaccaatgttgaaatgaaggaaaagatgttaagggcagccagaaagaaagggcaggttacctacaaaggcaagcccatcagactaacagtggatcgctcaacaaaaaccttacaagccagaagaaagtggrggccaatattcaacatttttaaagaaaagaattttcaacccagaatctcatatccagccaaactaagcttc

SEQ ID NO: 850831 - DNA, 574 bp, Homo sapiens
tccaattactggctgataattcacccctaacctggatcagatattatgctctttttcaaggattttgatacataatgtcaaactgatctccaaactaaaattcccaaaaccatagcaggaagttacctatttcccaaagtcctagccaaaactgtgtattattattctattttatttttccccaccacgttggagaattttattgttttaatttttttaatttgttaccaggaaggttaaaactttttatgtttattggccatttttattttttctgctgtgaatttgcaatttagatccattgttaacatatggagacatcttttccttatttgtttgcaagaactctttatatattaaacatgttaccttttaaaatttttatcatttgcctttctgcttgataaattccaaaatatatcagaatatattttttaccattcagaaattttgaatctgtgtgtatgtgtgtgtgtgtgttttaagcccttragtctagcaatatttttcactatgactttgtcctgagatccccagttataaagtttttctctattttcccccaaatcataac

SEQ ID NO: 850832 - DNA, 609 bp, Homo sapiens
tgaatgaatttactgaataaatgaacgaatgagtgaacgcctagtatactaaagcccagggaatgtcttggaagacaggaaacagaccacacrctgctgctgctaattcactagcctggctgtcgttatttctcttctttgtttctatttgctcaattgcaccttttctcatttgactgcctggccggcagtttagctctgggggaactcagagaaaagtcaggctgtttgctccacagtgtgctggtgctgactcagccagccggttctgcctgctggggcctaaacacactgatcaaaatcctggggaaatgatttgctggagccgctaacctttctctctcctgcagatgcttcctggtttgtactgcctgacctccctcaaggttcttccccatttcccagaagtttaggactcccctgccagccttaagttaagaggagacgcaggaggacaggatggccacctgataggtccattgtttactgtgccagggtggaggagggaagaggagaggtctgctgagttctgaagattgggaaagggctcctctttttagtaggcaacctcttgaagaattgtggtctgttttcccaatcccttcactt

SEQ ID NO: 850833 - DNA, 667 bp, Homo sapiens
gggaattgactaattcatcgaatatagtatccttttgaaattctgtttcttgagtggctgtctctacagcttcagaaaatagacagatataatcaatggtcttaagattctaaaagagaaagtgactccagaaggtttggggcttccccggggttgaaattcagaggattccccagcagcttgtccagatgaagaggaaaggagggaagtctaaggggagctcgtcagtgaatctagattgttaaaccacttgtgtaaaaatggagaccagatattgcttaagcaagggaaggagggaaaaaatggtgggggcgattgtgctggggactttcaaacccaacacaagctgaaatttgaaagagggttgtctttttagccatgttaggagccaaaaattagaaaagtactttaattttaaaataatgaatgcaggcttgacagcactgtcactaatatctagcctctgttgaggttattatgtgccaagcattgagtcttttacatgcacgtttgtgttaatcctctcatcaactctgtaggagagatacaattattgtctccattttatagatcaggaaactgaggcacagaaaggttgatgaacttgccaggcttcccacagctagtaagtgctggaaccaggatccsagcacaggagagccacgct

SEQ ID NO: 850834 - DNA, 548 bp, Homo sapiens
ttcatcctaaacatttcttcttcaggctactgttacagttatatagatggcactttcattacagtcagatgataaaatttcccagttacggactcactgggatagctagtaactcagaaatctggaatcttgtagccttgtactttttggaaatctatcacatactatggtgggaaaaatgaatgaaaatgactaacttctttgtgttagtcactgtcctagtgctttgtgtcctcagaacagccactttaggcaggtatcattgtccccatttcactaatgacaaaactgagccccagatggcttgttacttgcgcaaggtagcagagataataagggtaagagcagggggctaagaagccatttctgcctaactccatagccatggtcttaccaatactccacttttcaatatcttgaacscttttaagatgaaatttttgtttgtttgtttgttttgagacagagcctcgctgtgtcacacaggctggagtgcagtggtgtgatctcggctcactgcaacctccacctccggagttcaagcaatt

SEQ ID NO: 850835 - DNA, 637 bp, Homo sapiens
tgcaaatgccttacacatgtgagttattattcagtggtgagtcctgatttccataatgtttgatttgtcagtggtttggggtaatcagtgccgasgtctttctcccttcaaagcttgcgccatggctgtgattcacagagagtttgtggaaggcagcactagtttagtggcaagcaggctcagtttctgattctagccccgcagtcattggcgggtcctgcatggaatgacttcaggccaaataaaacctctctctgggatttagagtcttctttcaacacagtgggtggcatagagttgacaatcagcaaatagtggtgtccttttcttcctttctaagtctggtattgcctgtgtgtctagaaacccatttaacttccctgggcctcagtttccttgttaagaaaatgggaataatcatcttcactggatactttgtaggattattttgaagctcaaacagcagttgggataagatggtgcaatgctttgtaagctgaatcactttacaaacatacgggatcattattataaactgagccaagttcaaatggttccactgaaattctgagtccctgaggctaaaatgagttaatatttggagtggcctcctgagctccaaggaagaataacaatg

SEQ ID NO: 850836 - DNA, 268 bp, Homo sapiens
aaagaagagtatgttctgtgtcaacaatcctttgcacagagtccaaatggctttttgtacatacttcttttgacccaggcccataatttttttaggttagaattttatgagcccgatgcaaagtctatcaacattttytttgtgagacatactcagggtacagcatgtttctgaagtgtgcgaatatttggggatatttctatcattccatgccaagagaagacactgggaaaaaagagggaggggagatgtggagaggcagtctaat

SEQ ID NO: 850837 - DNA, 559 bp, Homo sapiens
ccacattttgcttatccattcatctgttggtggacacatgggttgttcaaacattttatctattgtaaatgatgctgctatgaacatgggtatacaaatattcttcaagatcttgcttctcattattttgtggtatgtacccagaagggatattgctggataactggtaaatctatctttaagtctttgaagaatcaccgcattgttttccacagtggctgtgccattttaaatcccattaacagtgtacaaagtttcaaatttcttcaagttcttgccaaaacttgttatttttttattaaaaatattgatttcaatagctttaggggtacaagtggattttggttacatggatgaattgtataatggtgaagtctgggattttagtgtacccattacctgagtagtgttatttgtacccaacaagtagtttttcatytctcagcccacttctccctcccctcttctgattctccagtgttcactacattatactactttgtctgcctttgcatactcatagcttagctcccacttgtaagtgaaaaaaaaaaaaaaa

SEQ ID NO: 850838 - DNA, 597 bp, Homo sapiens
tctcattgtggtttgaatttgcatttctctaatgatttatgattttgagcatcttttcatgcttaatgattaattggccatctgtatatgttcttttaaaatatctattcaaatcctttgcccayttgtgaatagggttgtttatctgaaagcccaagccagggcaattaggcaaaaacataaaataaaaattaaaaaacatgcaaattgaaaagggagacgtaaaattattcctgtttgcagatgataggatcttacatgcagaaaactctaaagtttcttcccaaatctgatagaactagtaaatgaattcagcaaaatagcaagacacaaaatcagaacacaaaaataagttgcatttctatagtactaattataaatctgaaaataaaattaagaaaatagctccttggatttttaagagtttttattaaatatatttggtagcaaaaaagaggcaatagcaatgacataaaatatgcatttaaaatttagattttcattaagaaatctaaatttcataataaaattttaactcaccttaaatgataagttcactttacccttgagcaatataggtttaaattgccttggtct

SEQ ID NO: 850839 - DNA, 597 bp, Homo sapiens
gggcttagcatataggaagcatttaataaatgcaaatgatcagaggctgcagcctcttgattataagggaactttcttgattacaaggaaatttttgattgcaaaaggaaatgtctgtgctgtttcaacatttaacataatctttaatatggtttgaggtagcctttatatcaagttaaaaactgtctttgaaaatgtggaatgaatatttttgatttcaacaaatgtgtttttagtaccaatcaaaatattcatacacatttttcctcctttgatctataacatgatcaattactgaagtcattttctaattttgatcagtccagagtaagtccagagtaacatttccagagtaaatccctcataattaaagcatattattattttactaaactgcagaattaatatgtcatatatttttttctcctttgtagtcttttatgttacttttatagttcgtgttgttttactgtcagatttaggctaacttaaggaaatgaatagggrtgtttccatcattttttccgatcagcaaatagtataaaagctatttgatcttccagctttgcttagttttgaaaacttcttgaatttttg

SEQ ID NO: 850840 - DNA, 504 bp, Homo sapiens
gcattgagaggtgaagccagctggacttcctgggttgagtggggacttggagaacttttctgtctagctaaaggtttgtaaacacaccaatcagcactctgtaaaaatgcaccaatcagcrctctgtgtctagctaaaggtttgtaaacacaccaatcagcaccctgtaaaaacacaccaatcagcactctgtgtcttgctaaaggtttgtaaacccaccaatcagcactctgtaaaaatgcaccaattggcactctgtgtctaaaggttttaaatgcaccaatcagcactataaaaacgcaccaattggcgctctgtgtctagctaaagatttgtaaacgcaccaatcagcactctgtaaaaatggaccaatcagtgctctataaaatggaccaatcagcaggaagtgggaagggccaaataagtgaataaaagctggccactggagccagcagcagcaacctcctgggggccccttccacgttgtagaagcctttttctttt

SEQ ID NO: 850841 - DNA, 658 bp, Homo sapiens
agaaatgcaaatttaaacaacgaagtgaccattttccacccactgtgaaatactatggggttaatacttcctgtgatgatyagggaaggattctggttggaactggcttagagtattagaaagagttcctaagaaggcagagttctgaattacattaggcattatgttaaattatgggatttgatttacagatgtttaatgttcattctattttcagttctaagattctacatccgacatatttgcagtgggcagatttttaaaagtaatacctattttgaacatattgaaggcatctgttgaagaatcaatataaataattacttaactaataccatacttgaagtagtgcttagtttataaaattaaaacgaatggtctatggtgtccaaaaagcagtcagtttaattttgcagcattattttgttggaagcaaataacagtggcaggtccacctacatggacacaatggagctgaccacggaatgcaatgggggtgtctgaagcagacagagtgactctattgtgaccctttggcaccggaaagaccagcccaagatacaattatacctttgcactatagcctattttgtgaagagaattaatttatggggattcagaagaacttggatccaagtgctagctctgtctcttatga

SEQ ID NO: 850842 - DNA, 537 bp, Homo sapiens
gaaggattctggttggaactggcttagagtattagaaagagttcctaagaaggcagagttctgaattacattaggcattatgttaaattatkggatttgatttacagatgtttaatgttcattctattttcagttctaagattctacatccgacatatttgcagtgggcagatttttaaaagtaatacctattttgaacatattgaaggcatctgttgaagaatcaatataaataattacttaactaataccatacttgaagtagtgcttagtttataaaattaaaacgaatggtctatggtgtccaaaaagcagtcagtttaattttgcagcattattttgttggaagcaaataacagtggcaggtccacctacatggacacaatggagctgaccacggaatgcaatgggggtgtctgaagcagacagagtgactctattgtgaccctttggcaccggaaagaccagcccaagatacaattatacctttgcactatagcctattttgtgaagagaattaatttatggggattcaga

SEQ ID NO: 850843 - DNA, 418 bp, Homo sapiens
tgcttgtttttttttttttgctctaacttacatgcaatgatgaacaagttaagcatattattgccaagtggcccatgagctcttaggtttaaggcaatgataacaagaacacagcaacmtcaaaatatattactccctttggctccataacttcaggatgatagaaaatctactagtatcttcttaatttctataagctgaaaggcaatgaaattgtcatagcaggaaccaatttcctacctgaaaactagtcagtcattgaccttcttatattatcttttatttctaaaaactggagaaaacaaatcatatgcttgcttatatctaactacttagtaactatacaaacatggacaagttgcctagcatctttaatttcagattcttcaatttagctggtaactctgtctataagaat

SEQ ID NO: 850844 - DNA, 584 bp, Homo sapiens
tgaagaatattccattaaagtaatgacctgccttcagatagaagacagaagtcgaaatatgacttggtaagaatgcacatgaraaggcatttctgatggaagaatgcagccacttaactatacagttccaggaccaggtctaaaaaatgaaataatacaaacaatatcatttattttaataagtcaagattatatttaaccattaaaagcttatttttgctactacaacactattagtaataatgaagttttacctatttttcaccccacccaaattttccacctgtatttttgttctgcattaagcctgtattagtcagggttctcttagagggacagaactaataagatatagatagatagatagatagatagatagatagatagatagatagatagatagatagatagatagatagagataaaagggagtttattaagcattaacttactggatcacaaggtcccacaataggctgtctgcaagctgaggagcaaggagagccagtctgagtcccaaaactgaagaacttggagtctgatgttcaaaagcagaaagcatccagcacaggagaaagatgtag

SEQ ID NO: 850845 - DNA, 629 bp, Homo sapiens
ctgttgtttacttttataaagaaactaatcctatttgatcagggccccaccattatgacctcacttaaccttaatgattatcttagaggcctcatttcyaaatacatccacactgagggttagggtctcaacatataaattttggtggggggacacaaacattcagtctctaatactgaagaacaggtagtgggggagatttcaaagttattatctgcatgagttactgagcataactctgggatgtgggagtatagggaaacaattcctaagaagagagagaattgaagcatgtttgcttcgtggtcgatggatgaaatccaaccaatgcagagaatatactcatagaatattatctctttctcaaatacttcctagtcatgattcacgagttaatgtttgaaactttaggataaaggactaagaaaagtgaataagaacatcaaatgtcttatagttggacttccctgggagaaaatgatagtgtaagatatgaatagcctcaacattcgtgacttctagtctgaaagacaactgcgctagacctttgtccaaagattaaaaagtgttttggggcagggcgcggtggatcacgcctgtaataccagcactttgggaggccgaggcgg

SEQ ID NO: 850846 - DNA, 629 bp, Homo sapiens
ctgttgtttacttttataaagaaactaatcctatttgatcagggccccaccattatgacctcacttaaccttaatgattatcttagaggcctcatttctaaatacatccacactgagggttagggtctcaacatataaattttggtggggggacacaaacattcagtctctaatactgaagaacaggtagtgggggagatttcaaagttattatctgcatgagttactgagcataactctgggatgtgggagtatagggaaacaattcctaagaagagagagaattgaagcatgtttgcttcgtggtcgatggatgaaatccaaccaatgcagagaatatactcatagaatattatctctttctcaaatacttcctagtcatgattcacgagttaatgtttgaaactttaggataaaggactaagaaaagtgaataagaacatcaaatgtcttatagttggacttccctgggagaaaatgatagtgtaagatatgaatagcctcaacattcgtgacttctagtctgaaagacaactgcgctagacctttgtccaamgattaaaaagtgttttggggcagggcgcggtggatcacgcctgtaataccagcactttgggaggccgaggcgg

SEQ ID NO: 850847 - DNA, 594 bp, Homo sapiens
cgcaaactatgcatctgaccaaggtctattatccaacatctataagaaacttaaaaaatttacaagaaaaaaacaaatcaccacattaaaaagtgggmaaaggacatgaacagacacttctcaaaagacatacatgtggccaacaataatatgagaaaaagctcaacatcactgatcattagagaaacacaaaaccacaatgagataacaattaacaccagtcagaatacctactattggctgggcacagttgttcacctgtaatcccagtacttggggggctgaggcaggtggatcacttgaggtcaggagtttgagaccattctgggcaacatggtgaaataccatctctagtaaaaatacaaaaattagctgggtgtggtggcatgcacctgtaatcccagctactcaggaggctgaggcaggataatcacttgtacctgggaggtggaggttgcagtgagccaagatcattccactgcactccagcctggatgacagagtgagagtctgtctcggaaaaaaaaaaaggctattattaaaaagtcaaaaaacaacagatgctggtgaggttgtggagaaaaaagaccgtat

SEQ ID NO: 850848 - DNA, 647 bp, Homo sapiens
aatcaaatcttgatatttctttttttaagatattctttcttcagtgctgttcctcagagaatagscttttcatgcacaaagtattctatgcagaggacaaatatattggcttgagtaagactatctgatggtatggaaagtcatggtgtgagattatttgtccagtaaggttattaatgtggccccatgtccactgaagactggaatccaggtactaagaccatagagacatctttatagccattctgtggataccatctttctgccctcacctttactccatggatggttttcctgacatgcatgctaagattcagcttgtatatgctaccattggagtgaaaatttattcaaatatatacatagttgcataggaaggagcagacagtgaaagagaaggagataagggcagaagtagcatactatttacaatattacatgaaatcatgataattctcattctatgaaacttggccagtgtaccgaacactaaatgccacagacaataggtgagcatttgcaaaccacagacttctccttccggcttgcaattttcctgctctgagcatttcattggacaatctaagacaactccttggattttttttttattagcagagaaaaattttaaaatcgtttctgcaggg

SEQ ID NO: 850849 - DNA, 610 bp, Homo sapiens
taatttattttctgtgatactgcttcttctcacccttcagggcttctgaatrtttcattcattgcatttctctttccttctacaacaatttctcttcctggcataaccacatgctaataagcacaggtttgcacataaaactggagaagagagaggcattgttttttgaaggtatatttaatgccatgtcttgtgaaatggtttctagagcacatctgtcttcttttccctcctttgtggtcattcttgttcattcaccctgtttctgcaccctggcttattacttatagatactgagtatagaagtctagtggtaatggtattagttttagaatcctgacaactatttgctagtatcataaccttggttaaattacctaatcatactgagcatctctttattcatgtgtaaaatgagctaatgcttattattcagcactgatatgaaattaagcaactatgtagagattagtatattggaaacagtagacactatgtgagttaccatgttattctttctctactacttaatagacttaccaaaacaactttaaaatgtatattgagtgcatacatcggcttacaactaagttggattactttaggaata

SEQ ID NO: 850850 - DNA, 572 bp, Homo sapiens
tatcatcctttaaaaacctccatttttataaagctcccaaatrggtgaattatttctgcaaaaatgctgatatccagccctagctgtaacaataataagaaaaaaaaaattatcttatcctaatgacactcctttacccaagaactgcaattaggagtctcataaatttacaaagctttctcccttatttagccagtattccatcttcgtcaataccatatacattagttacacatttaaaacatttttattaaatatacatgtcttttggcaggcccaacggtgatcttaacccacttgaacatttacaattactgctttaaatttttcatgagctatctttatagcaaacgattctaacatttttctgaggattaaagtctaattcacaattttatggtttgatatatgagactgcatgttttctcatttatgataacataagagttcaagcaaggggtggttagaggtgtaccactgggaagaagatctgctaaatttatttttttggtattgcttttaaaaagtcttacttaacctgtatgtatctatggtaatatagatccaagaac

SEQ ID NO: 850851 - DNA, 605 bp, Homo sapiens
attcaggaggctgaagcaggaggatcccatgagcccaaggagactgaggctgcagtgacctatgatcataccactgcactccagcctggacaccagaaaaaaaycctgtctctaaaataaaacaaaaaaacaaaatgtagtacaaagctatagtaaccaaatcagcatagtactggcataaaaagagacacaaagaccaatggaacagaatagataacctagatataaatccatgcatttacagagaactcatttttgacaaaggctccaggaaacacacaatggggaaagaacagtcctttcaataaatggttctgggaaaactaaataaccacatgcagatgaatgaaactagacccctatctctcaccatataaaaaaatcaaataaaaatggattaaacatttaaatgtaagacctgaaactatgaaactactagaagaaaacattggagaaatattccaggacattggtctgggcaaagagattttttgtggaagacctcaaaagcataggcaaccaaaccaaaaatagaaaaatgggattatgtcaagctaaaaagcttcaggacagccatggaaacaatcaacaaagtgaagagacaa

SEQ ID NO: 850852 - DNA, 637 bp, Homo sapiens
ctgaattcctcttcttcacaaccagattttattktcacatgacttttttctatttcactaccaaaggacatataacctggggcttttttataggcatccatttaatcatctaacaaatatttattgagcacttactttgtgcccggaaccatctttatctcagagtagacactagtaaatacaataatatgcatgtctgaaaataataataatatgcatgcctgtacttgtgtatgtatctattgaaaagcttgtgatattttaatgtattctcagttgttaatatgttctttccattgaaatggaattattacaaactgtctcataaaataaagatgaattaaatttatctaaagttaacatatatgtttttaaataccaaagccacatgttgtcatctattcagagagcatgtgtcccagacatttttatattttaatttattcaaatcagtattgctttcctgtgaaatacttataagcttagaaagtttattgtatgtctttagaaatttaattctgttgcttttgtgcaagatgttcttgaaacagaattgtttgctttttgaatgtggaaggagaagtgaggctaagggagtcatattcctctatcagatgcaaacctttatttgtatcta

SEQ ID NO: 850853 - DNA, 498 bp, Homo sapiens
ttggattcaaaagcttttttctatatctttgatattacattatttcattttwaaaaaatatacctgaacattgaagggaagatttttaccttgttaagaaaacaaacatgttctttttgggtgtctaaatggagataagcttgggctgcttaaaggtaaaccaataattagtatattccatggttaactgttataaggaaataaaatcagtaaaaacaaacacattatcagggaatgcttttacatggttttagatttctaaagaaacagtttcataacacgtctatttagaagctgttgtaggttcacttgttcatgttcttgcttgtttcttgctttttctatccttaatgtttttgatagatttttgccatattttgattgtgttattacataagaaaatactgaactaaactctgaaagtcttgtatcttctgaagtccaatttctccttacttattttaattaaagaataattttataaaaaagaatgatctt

SEQ ID NO: 850854 - DNA, 539 bp, Homo sapiens
ttgccttgcagactttctggggccttggacacctagaacattttttktgaatcttgaaataagaaaaaaattttggagggaaatagctgttataaggtctctccttaattctatgtctttattctatgagatatgaataaactataattaaccataatctattgacttattattacatatgattattttaaacgtagatataataggcttggttatctgctttcctggcctccttcaatttttctttggttaagtatctcacaaaaaaagtcagccactgaaaagtaatagtgcctgtgaagatgcttgaagaattacaaattactcagctgttaaatagaagcatctcagtggtatagtgtagaacctcagtgttccctgggacatcagtgtatttcagtaggacacatgcagttaccattcttaacaatggcctctgttgtaacagtagcataagattttatgttatataccatgtttttagacaagaaaatatgcagtattttaataaatttaaaattaactatgaaatgtcatat

SEQ ID NO: 850855 - DNA, 602 bp, Homo sapiens
tctcttggttgtcaattaggatcctttgtattgtaagcaacataaaatccaatcaacctgtttaggcaataaggaaatacagtrgcttaagtttctgttaagcccagagagtgtcttcaagcacagtttgcgaacaaggagttctcttgacttggcactcttctgtcagtttcataaacaagctagattatcagctggtgacaacatggctgccagcaactattgaggctatagaaagaaggaaaaagagcatttattttcatgatttttttaagtcatgagctttgctctgactgatacatcttaggtaatttgcatactataaatcacagtagacaggtaaatgtcctttgcaccaatagttttgacaaggcacaaaatacttaaaccaactagggatcttgcctgcaaataggaacaggtggaatcaatacaacccaagcagcagggccactgcagaatggagccatgtgatgcactcagaatgatcaccaccactgtctacacctcagggcacctgacatctcccacatggctcttcctgtgtgatactgtcagaactgcccacctatgcaacgtacatacataactagtaccttata

SEQ ID NO: 850856 - DNA, 641 bp, Homo sapiens
tggccagtgtgaccaggatgttcctcctccatgatggcatytgtagaccccagtagctctgcaccaagtgctgcggtactgtagctagactgagattccacagcgttttttggggtcctgtaggggtttcctgaaagacttagctggaacatagctgtgtgcgtatgtgcatgtgtgagagagagggagaaggaaggggattaattcgtgcaaatagtcattgtgagcaaaagaaaaatcacaaagccagcctcctcagctaagggggtgggggtgggaggtgaaggtgagtgtataggacacatggatggtgactttttgtttttaatgaaatggagtaaattctaatttcacataagataatcacatctggaaagaaatagtcctctttggcctcctttaatttctttttcttatatcttatacttaaataaattctacctcttgcttaatacacgttaaaggtaagattagagaatcaactttgaacatggatattcattcagaaaggtttaattgggcctctgtgaggcactgagctgcgctctgaggaagctggcttgccagtgtgcatgtgcaggataattagagacgtgcaagggctctgcggccaacataaaggtgagaggctacaagtgatt

SEQ ID NO: 850857 - DNA, 460 bp, Homo sapiens
tggaagccccaagttctagttgtcccctaaaatgtataaaatgaagctgtagcccaaccatgttctcaggatctcctgagggctgtgtcatgggccatggtcactcatatttggctcaraataaatctcttcacatattttacagtttgactcttttcattggcaataattagtgcccaacatggggcctcagagaagactcaggacccttgaaggagttgcctgaaaccagagctatggtgcatgttgaaagctcctgccaacctccccagtttcagcttctccctggctgcaactgttgttaagtcctcctgagtcccagatatcctgttttggttgatggtccttggtttattctgagcctttgttttttctactaggaagttgcttaagatcctaattttggtttgcaagtgcattctaaagggctttctccattgccttttctcccaaattaatc

SEQ ID NO: 850858 - DNA, 655 bp, Homo sapiens
tatacattgtctggattttgggagaatattttaggatattgattttgttgcrttattcgagtttagacaatagttaacataagtattcatatgtagaggtctttgtgcttcattagaaatatatccaactaaacataacaacaaaaagccttgcgaaactacatatctcttatacttttgtgctgtttttctgtgtgtaactaaacgtgggatacagcaaaaatattttcacattgtttaaaattaagagtatgtacaattccatttcttccatttaaagacccactaagtcactcagtgtatttggaacccacaccatacgagggaaagcacatcacttttagtggtttctaaaggcgaatagaaaagtgattcatacaaccaaagcaagaagattttgaatgtagaagcaaagagaagcagaagcagaagcagatgtctaagccaggggacacccaccgcgctgtggccccagggccctgctagaaggtgtttctcacccagaatggctcacggctgccttggcatctccagtgctgaggcttttcgtaggtgactgcctcagaaacagaaaatgaatgtctagtcgtgcctatttttcataaaaaaagaccagcaaaattacgttaaattaacatttatgaaaatagcagca

SEQ ID NO: 850859 - DNA, 589 bp, Homo sapiens
tcacattacctgacttcaaattatactacagaggtatagtaaccaaaacagcaaagtactggcatgaaaacagacacatagaccaatggaacagaatagagaacccagaaacacrtccgcacacctacagtgaactcattttttgacaaaggtgccaaaatcatacatggggaaaaaggcagtcttttcaataaatggtgcagaaaggacttgatatctgtatgcagaagaatgaaactagatccttatccctcatcatatataaaaatcaaataaaaaatggattaaagacttaaaaccaagacctcagactatgaaactactacaaaaaacattgaggaagctcactgggacattggccttggcaaaattttcttgaatgataccccacaagcacaggcaaccaagcaaaaatggacaaatgggatcacatcaggtaaaaaagcttctgcacagcaaaggcaacaatcaacaaagtgaagagacaacccacagagtgggagaaaatatttacaaactacccacctgtcatgggattaataaccggagtatgcaaggaacttaatcaactctatagggaaaaaaaaaa

SEQ ID NO: 850860 - DNA, 488 bp, Homo sapiens
aagccatggatgatattggggatcctttattcctggtgggtgcccataagagtttgcaaactatacccaaaagggcacgggaacccctaaactttccaggctgtcttggcacacggctcactagaactgttaaygccgtcaaagtatctctgacacgtccttagcctgtgtttgaaaacctgcagagatgggatacgcccctttaccagagacagtgcattccgtccactgggagtgacacacggccaagccaggcttcaaagagagaggttcaccgtattccagtagtgactactgggatttagggttggatcaccttaccagagcttggaagctgctagaagttaacattaattttattgttctttaaaatgaaagtccagcaggagggccaggatttgggcatctcggtccttcacgaaaagaaagggtgatgttgattagccatgttccacatcccccgagttaaatataggaatagttctgac

SEQ ID NO: 850861 - DNA, 403 bp, Homo sapiens
cccagtatctttttaatataccatttctaacatttataaaaatataataggaaaaaagatgcaaattagaacaacaaaatataagacaaaactaacatattaaaatcacttggaaaatagtgttggaacaatatacaattagttaattacctaagaaagaaaaaagttagattcctacatcatatcatatgtaaaaatattttcatagattaaagacttaaaagaataaaaccataaaagtactaaaagaaaatacaggccaggtgcggtggctcatgcctgtaattccagaactttgggaggccaaggctggcagatcacttgaggtcgggagctcgagactagcctggccaacatggygaaaccccatctctactaaaaatacaaaaattagctgggcgtg

SEQ ID NO: 850862 - DNA, 530 bp, Homo sapiens
aaatgaaggaggtcagagtgtggactttagttggtcagactgcaccaacagtgtccatccattgtgacaaatgggctacactgacataagctgttacccctggagtgtgctaagttggtcatgtggctggatgtgatttaagatgataaatggattagaataaacagatgggggcctggtgcagggctcacgcctgtaatcccagcaatttgggaggctgaggcaggtagatcacctgaggtcaggagttcaagaccagcctgaccaatatggtgaaagctgtctgtactaaaaatacaaaaattagccgggtgtggtggtgtgcacctgtagtcccagctacttgggaggctgagacaggacaattgcttgaaaccaggaggcagaggttgcagtgagccaagatcttgccactggaccccagcctgggtgacagagtgagactttgtctcagaaaagaaaaaaaaaagaatggacagatgggytataaaaactctgaattacctttgcagtttttctgaaaatctaaa

SEQ ID NO: 850863 - DNA, 449 bp, Homo sapiens
gagcgacaacacgtccacactgggacagaggcwgaaggagaagcagtcaccttggggctggcatcaccaaacgagggctcccatggacaaggtagagaactgggcccctgcttctcagtgtacctcctccttggtccaagtgggttcccagtgagatcagcttggctgtctcctattgtagcaggatgagccgtggacaaaatccctcagacaccgggttaaagaaggaagtggctttactatgttgccctgctttcttcccctgcccctgccgtccctgggagagagaagggacaggcttagaaaaggccaggactcttctctaggagtggaggagtctgaccagtgagtgacattacctgggaggagtcaggctgggtcactcctgtgtccccagtgtctgccataaaaccacactgcgaatggtccaattgccatctgccaggccc

SEQ ID NO: 850864 - DNA, 639 bp, Homo sapiens
ttccagggtccatgtgctcaacatcaggctctacttaaccttggggtaatggggaaagtgatgagtaaaagtggcaatgttctactaaaaagggaataatttaaaagaggcacacaaagtgagatttgacttgttgtctgtgaagttcagtcataattggcatcggctgtgtatattgtactggtgcagtggagtcctgtcataatgtcagtgttagagtgggtaggcagacataagcaggggaggagaggccccctgtcatcccttaccaccccctccactccccaccaccatccccattctacacccaccaccctgcccaggaatgtcaggtgaccatcagatgatggtcaggcaggtgttaaactctttaaaataataattgctcgcagccagcaccagggaaaaggagttacccaatagacagaaaacacctgaaactggtgatctcagcttccccataagatctcaagagtgagggagcgggctcaagcatgcacactaagaggcaacatggtggtgtttaactggtatgtgaccttcctctgggaacacccgactgcaaagaaaaacacctcaaatgagcatgtgcacaacttcagtgaacacactgcacwtgtggcccctcccaagtgctgg

SEQ ID NO: 850865 - DNA, 645 bp, Homo sapiens
ggagaaataagtacctcattcctaaagtcaaacctgggtacatcacagatttagtagggaccacaccttgtcactcaaaaccaatagctgcctatagtgagtatactycatcagaaaacaactcccatggaatctttctggtttgtgtctattcctgtggacactttcaggttggcagttattgagacaaattagaacttctgcgattgtagatggtcatggggtgtacacctggtactcactgtatcctttctgcaccatccattctaaattccccttaccttctgctagcacctctgcagggtttgatggtttaccaatcggagacacaggccctcatccctaaggggtctgaacccctggtccacatgtccttttcaggctgtagctgctgcacttgtccatttactattaaaattgtataggagagaaccaagaaacatcccattagagcacctggatgccaaaggcactctgacatgcctccattgtataaaagcagccctgtcttatcctaaggttcaggatcaatgactcttgctgggacgaggactcattttctcaccttctgatctcgtagcacaagcagcccaaagtgactgggtggcagcctagtttaaaatgtagtaggatccttgtcatgtc

SEQ ID NO: 850866 - DNA, 495 bp, Homo sapiens
gcaacatctccccattccccaacccaacctctgatagccaccattctactctctatwtctttgatttagattattttatattcaaaataaaagtgagattattcagtatttttctttatgtggctggcatatttcacttagcataatgtcctccagttttatccacggtgtcgcaaatgacaggatttttttccttttcagggctgttactccattgtgtatacatactgcattttctttatcaattttttttgatgggcacttagattgattttatatgctggctattttgaaaaatgatgcaatgaatataggagtgcagacatcccttctacatactaattttaaatccttttgatatatacacagaagtgggatttctggatcatatggtagttctatttttagtttattgaggaaccaccacacacttttttataatggctgtaatattataattcacattcccaccaacagtatacctgagttcctttc

SEQ ID NO: 850867 - DNA, 620 bp, Homo sapiens
catggggttggagctctggggggcgtaggtctgtgtgcattctttttgtgccacagatatgggtggttgctcagggtggaggagaattccttkttctttatgcttagtttttctcctgtgacagtgttggtgcaagggtgggccttgctgattctgtgcttgccaaggctctgactgcaatggtggtttgtggagagagggtggtggtttgtatatttgctgtagcagtggaagggcagggtgcatgcatagaggtgcactgacaaaccaaggaaagcaaacatgcccacgtacacacttgtcatcaaagtgatgtgcggggttgctgttggcccacgggaagctgcattgtgaggaggtagcagaaagtctcttgtgtggccatgggggcagcactgttggagctctccattggtcagaaacgtttcaccagcacagaagccatgatgcaggtccctagggcactcaaggcttctttgaacaagtgtgactaggctggggccaactggagaggccaggaaattaaggggtgctcatgtcagaccagccccatgtggtggacaagaacaccctgcagagttaaggttcaatagttcctctagggctaacgtctcctatgg

SEQ ID NO: 850868 - DNA, 602 bp, Homo sapiens
ccttggcctcccaaagtgctggaattacaggagtgagccaacgcgcctggcagtratgtttaacatttgttcatgaactttttggccatttttatttcttctttggaaaaaaatcttctcaagattttggcctattattggtctgtctttttgttattaaattgtaggtattatttacgtattctgaatattacagccttatcagatatgtgatttgaaagtaccctcttttttgtagattgtcttctccttttttgataatgtactttcatgcacagaagcttctaattttcatgaagtcccacttttatatttttttcctttttttgccttttgtcaccttttggtgtcatatcgaaaaatacattgccaaatccaaggtcatgaaattttacctctatgtgatcttctaagagttttatgttttagattatatatttaggtgattgatttcttttaattaatttttgtatgttttcagatggtgatctgacatcattttttaatatggaagtccagttttcttagtaccatttattgaaaagattatctttttactattgaatacccttggaacccatgtcaaaattagtttatctata

SEQ ID NO: 850869 - DNA, 602 bp, Homo sapiens
ccttggcctcccaaagtgctggaattacaggagtgagccaacgcgcctggcagtgatgtttaacatttgttcatgaactttttggccatttttatttcttctttggaaaaaaatcttctcaagattttggcctattattggtctgtctttttgttattaaattgtaggtattatttacgtattctgaatattacagccttatcagatatgtgatttgaaagtaccctcttttttgtagattgtcttctccttttttgataatgtactttcatgcacagaagcttctaattttcatgaagtcccacttttatatttttttcctttttttgccttttgtcaccttttggtgtcatatcgaaaaatacattgccaaatccaaggtcatgaaattttacctctatgtgatcttctaagagttttatgttttagattatatatttaggtgattgatttcttttaattaatttttgtatgttttcagatrgtgatctgacatcattttttaatatggaagtccagttttcttagtaccatttattgaaaagattatctttttactattgaatacccttggaacccatgtcaaaattagtttatctata

SEQ ID NO: 850870 - DNA, 581 bp, Homo sapiens
gtacttttgtggtaccgacaataaccagtgccagctgattcctggttcgaaggagtatgtgtcctttggggaatgaccacaaaactttcaacttgaggttgggggcaagaaggggctttggagagataaggtgataataaatttagttaattagaattctttctggaactcattttgatgctcttatctgccagctcagcgtgcgttatggatgttaactcctttatcctcataacttttctctgaattcattatagaacagagacatgatagtatttcaaaagacaaagtatttcagagagaaaaaagaacaattgtggtgaatgggtgaaaatctctcagattcattgttcttatggaagtggtggtgccttgatgagacaatgttgagaaaaaaaaatcagacacctatcaaggttttcattaaaatattacttggcatttgatgtattatgaatataataataataataacatgtctccttagtgycatgtattgaaacaagcatttcaaatcctcatagcagtgcaaggtaggttctatcatctcattttacaaatgagaaaaaccaggctccggg

SEQ ID NO: 850871 - DNA, 625 bp, Homo sapiens
cagcctggcacagtggctcacacctataatcctgggagcagtttgggaggctgaggtaggagractgcttaagcccaggaattcaaggctgcagtaagctatgattgcaccactgcactccagcctgggggccagaatgaaaccctgtctcttaaaaaacaattactttataattatttaaatcttcacatctagaattatgaggatttatctttctattttcatttgttttcattttcttcttgattagattttccaggaatatttcttacagttttgtttttgcaaagcataggttcttagatttgctcattaattctgctgcttttctctaatttttaatgttatttttattggctctattccgatttccttaaatttcatgtgtatgtatgcttatgagtgagtatatactttaactcttcagtggaatgtttagtttctttgatgtatgtaagggctaagaatgtaccattttggccatatcacagaagctttggtaactcgcttattttcatcatttcctaattaggaatgactgagttcattttaatgtaaagtttccagtattattgcttatactcagagaatgagaccccaggattttttgctttcgggaatttaa

SEQ ID NO: 850872 - DNA, 505 bp, Homo sapiens
gttgtgggaacaataaaatatgacaattattggaaaacaagccaatgcaatatacacatttcaatttggtgacatatgcccaacaaaagattgactacaaatactggcaggaactcataaagggatttgaactttctgctggccacaatcaaagagatgccagaatcaaaggaacaaggaagggacacatggagtgggagagaactcaaagtgaggtatcaatccaaaggatcacaggaggccaggaactgcaggattctctgccagagatgcccactgccccctcataaagcctggaatgttagagatgggtgggcttcagagtcatctgaaccattctcctccttttataggacaggcctctagtatggtgcagaagtttcctttcagcaagggacacctctgtttactgcaattgggttgtttctagtgagtgaaagagkaagacggaaagcacaaaaagggaaggagatataacactgagcacagatataaaataggcagc

SEQ ID NO: 850873 - DNA, 648 bp, Homo sapiens
ggcactggcaccacagtgaggagttcgcagtctactgcacactctcattggctctgaaaccttgagtgactcactagatgtctctaagccttgattctgcacacctgaatggcttctctcccatccttcatttgctcatttgaccatttgcaaaatgtttattgaggagctgttatgtgtgctgggccttggggacacctcagtggataagacagccttagtcccaggtggcttttttttttttgagacggagttttgctcttgttgcccaggctggagtgcaatggcacaatctcagctcattgcaacctccgccacccaggttcaagtgattctcctgcctcagcctccccagtatctgggattacaggctcacacgaccatgcccagataatttttgtatttttagtagatagggggtttcaccatgttggccagactggtcttgaactcccaacctcaggtgatctgccttccttggcctcccaaagtgctgggattatagctgtgagctactrtgcccagcccagcaggtggctttcaaggccctgcagaagacagacagtaagccaaggactcctcactcagggatacacattgcggaggagtgcagggcactcagaggctagggaagccccacctggaaga

SEQ ID NO: 850874 - DNA, 632 bp, Homo sapiens
tgaggcaaccttgtttgtgcagagcgagattcccccgcccctgtacccactttccatcactgtttgcctaagaaagaagactctctcaccctctgtgctaccgaattcatttggggcagtggtttatggtgacatttttctttcttaaagcaaatattgactcaccatggggaaattaaaactccattaggcatcgctacattgtcgagcagcctgcattacagcagtcaagctactattaattggtttcttcctcaggaataattcagggagggcagagggaatggagaaagagaagatggatctcagccgtaattccttaaaatgacaccatctaaatcagcaaaggtgatcattatgtggttattaatcgaaatataaagaagacactgcctaataataggatgaatttatccatataagaagcctgcagctaagttatttctgggctggagagaatacattttaagacacaggtgggccagccttggccagatttgggccagaaccggcttccccagagcacgagaagccccgattcttctctcctctatctgggtgaagaagtttttgtttcctgcaatraggtaattagctgttcctgcagcccattcacggcttccttctcagca

SEQ ID NO: 850875 - DNA, 621 bp, Homo sapiens
gacatgcgtgccagtcatctaaactgtggtgacagtggggccaccaggcagtcatttctcaggggatggaagaatagaatagaactgctatttctcagggggagtgtgggaggtttctggggtgccagatttattctatatctttatctcagtagtagttgcttgagtgtgtccatttgtaaaattgcattaagctgaacccttcacgatttgtgcatttcactatgtataagtgaaacctcaataaaaaattttaaaaatttcatagctcttggatctacaactcacattacatcatatcttaacatgaacagtagctaatacttgttgagtgccctttgtaggccaggccctgtgctcaggtttttatatgcattacgtcactgaaacctcggcatacggtgaaacaggtgctactgttatctccattctacagatgtggaagctggggcaaggatcccatggccagttatggccagagtccacgtttgagcccaggctccagagcctctctcctggcttcccgggggtggtgccgtgcttgggtaacttggcaggctctcccctctstcactccatgaagacagagacaggtttttttttttttttttggagacaggg

SEQ ID NO: 850876 - DNA, 614 bp, Homo sapiens
ttttcaaagtacagattttggaatggggaaaaaagttaccaactacaaacttaagttcatttcataaactgaatggacctagctcagcattctcatcaggagtgatgtcaccctcaaagagatctaaaactagttagtgggacgtgaaaaagccctcctctttttagatataaagctcagataaacatacagtacataaagagagacacaatatattggtggtaataaaattcacaggagaggcagtttttaaaaatgtttaaaaactctccactcagggagaaaggttagaaggaggttaaaaaacctaagtaagctgggaacggtggctcatgcctgtaagcccagcactttgggaggccgacgtgggcagactgcttgaggtccgcagttcgagaccagcctggccaacatggtgaaaccccatctctactaaaaagaatacaaaaattagctggtggtgcgcatctgcaatcctagctgcttgggaggctgaggcaggagtactgcytgaacgtgggaggcagaggttgcagtgagccaagattgcgccactgcactccagcctgggtgacagagtgaaactctgtctcaaaacaaacaaacaaaagaaa

SEQ ID NO: 850877 - DNA, 624 bp, Homo sapiens
aaactgctataattcagatgatytgattgaaaatacaggaaatctaaaagaatctttagaaaatgtatgggaattaataattaggtaaagttactagatacaaaaacagaaaataaacattttaaagtaaatctctactaaatgtctatgctgccataacaaatatcacaaactcagtggcttaaagcaacagaagtttagtatcttacagctgtgcagctgagaagttctagatagctctcacagagctacagtcaagatgccaacagggctgcattcttttctaaggctctaggagagaatgttctctgctcatggcttggtagaattcagttccctgtgattgcaggactgttttcttgctctctgtgaactgaaggctgttcccagcttctagaggccactgcatttcttggcttgtggctccttccagcttcagagccagcaaggccattgaatccttctcaggtggcacctcttaggcccattcttctgcctgtctttcacttttaagggttcatggaagtagactgggcccacctggataacccaggctagtctccctatcttaatctctctgattagcaaccttcattccatctacaacccttatttccttttgtg

SEQ ID NO: 850878 - DNA, 624 bp, Homo sapiens
aaactgctataattcagatgatctgattgaaaatacaggaaatctaaaagaatctttagaaaatgtatgggaattaataattaggtaaagttrctagatacaaaaacagaaaataaacattttaaagtaaatctctactaaatgtctatgctgccataacaaatatcacaaactcagtggcttaaagcaacagaagtttagtatcttacagctgtgcagctgagaagttctagatagctctcacagagctacagtcaagatgccaacagggctgcattcttttctaaggctctaggagagaatgttctctgctcatggcttggtagaattcagttccctgtgattgcaggactgttttcttgctctctgtgaactgaaggctgttcccagcttctagaggccactgcatttcttggcttgtggctccttccagcttcagagccagcaaggccattgaatccttctcaggtggcacctcttaggcccattcttctgcctgtctttcacttttaagggttcatggaagtagactgggcccacctggataacccaggctagtctccctatcttaatctctctgattagcaaccttcattccatctacaacccttatttccttttgtg

SEQ ID NO: 850879 - DNA, 480 bp, Homo sapiens
atggctggaaggctgtggatggtcaaagrgtgattgtttctaaacttaccaatgtgtaatctaaacgagtatctcctttttaagttggtgatcacagatttttcctcaggatatctgtccgtgtacagcagcttgtctgcactctcaatgcctgtcagggctagaaagtcttccacatttttctctaactgcttattttcctttacagaaaacttgccaaatttaatagcgacacctagaattgggaaggaacagggagaaagtgtgtattgttaataatgacaaaagcaaacctatgacttggtttttcatcagcaatgacagtacctcggcccaacagtcccaacacctgacattcgccctcctgcccgcacttgcagatttggcctttccttcagggttcagcccaagccacacctcttctgtcaatgtcttcccgggtcatcctattccaaagtgacctttcctgtttaatctatc

SEQ ID NO: 850880 - DNA, 480 bp, Homo sapiens
atggctggaaggctgtggatggtcaaagggtgattgtttctaaacttaccaatgtgtaatctaaacgagtatctcctttttaagttggtgatcacagatttttcctcaggatatctgtccgtgtacagsagcttgtctgcactctcaatgcctgtcagggctagaaagtcttccacatttttctctaactgcttattttcctttacagaaaacttgccaaatttaatagcgacacctagaattgggaaggaacagggagaaagtgtgtattgttaataatgacaaaagcaaacctatgacttggtttttcatcagcaatgacagtacctcggcccaacagtcccaacacctgacattcgccctcctgcccgcacttgcagatttggcctttccttcagggttcagcccaagccacacctcttctgtcaatgtcttcccgggtcatcctattccaaagtgacctttcctgtttaatctatc

SEQ ID NO: 850881 - DNA, 605 bp, Homo sapiens
ctgtcgcccaggctggagtgtgcagtggcgygatctcagctcactgcaacctctgcctcctgggttcaagcaattctcctgcctcagcctcctgagtagctgggattacaggcgctgccaccacgcctggctgatttttgtatttttagtagagacggggtttcaccatgttggtcaggctggtctcaaacccccaacctcatgatccacacgcctcggcctcccaaagtgctgggattatagacgtgagccaccgcacctggccaagcatgcttttcattgaagtgtaatacatacagtgcataggccttaagtgtgctactctgtgggcttttccacttggatactcttctggaatcacctcccagataaagagagaaaacttacagcactgcaccaggagccttcaataggcaaccttccagttctcaccaaggtcaccaatcatctgacctctgataccatggactcatttccctctcctgaatttcgtgtaagtggaatgagatcgtgtgtcctttctcctgtctggatccttttactcaacacttctgtgagacccatccatgtttttgcacatagtgttagcatgtttattttcatta

SEQ ID NO: 850882 - DNA, 589 bp, Homo sapiens
gttgagcaccttctcatgagcttgttggcaatttggatattcatttttcggaaatgcctgttcaagttttgactcattttttaatgggccgtatttctggatatatagtttttggagaaaagacctttgttgatttgtaataagttctccctgctgggcatcacctgaattcctaacccacaaaatcaacaactatttgtgataacacagcttgggaactgctgagtgggagaaccttctggtgaagcagctcacagtagagcttgggtcctagagatctaagctgtgatggagtcagtcagtgtggaagacagaaggatcctggttctctgtgatgggaattccaccacctctgggcatctaagatgtactcactgagacctagctctgcctaaccatggaaagcactgaataatactgaatacataaaaataaatgaagatctaggcccagaaagaggcatcctttctatagagcactttatgtggcttcctgctctaaggcagtcagaaaagagatcaagaagttggaaacagggccaggcrtggtggctcacacctgcaatcccagcaatttgggatgccaaggt

SEQ ID NO: 850883 - DNA, 622 bp, Homo sapiens
agcagtcctacagagcatcatgtgtgtaatgattttgaccagtttaccttcaccatacctgtctttattttgaaggagcaccatttctatgtgaaagcagatttgaggttccttcccacactgacccagcacacctccagaataaatgcttctctagacctcagagaggagaagtagaaagaagagcaaaaagggggaaagaataaagaattgtagaggttttggaatcacagggcagatttaaaagatatttagaaggcaccagtacttaggtgcatccccaaatattccaatttaattgatttgggtagggtccagcctttgttttttcaggcaattctgtttatcggttcaagtccagtccagttattttgctgctgagggccccaaggccccaggaggtgacatagcctgttgttgacctgctcagatggttgcatacctggccccaagaccagttcagccacttgccagcttccatcctgccaactgtaccacagggcgcaatccacttgcttcattttttggtaatctaatgtttggccaaaccaagatctcattttttaaaaattcmagggctatacatttacttgtcatgagtacaacttattctcaaaattcc

SEQ ID NO: 850884 - DNA, 568 bp, Homo sapiens
tgattgctggtcatataaagcaaggaaaaaagatgtttcctctttttattcatttctacatcctgccagtttccctacacatatgcattatagatgacgaataattgagaaaatctgcaaggacaaggctcrtattcttcctgacccatttcttgttcagagtataaggtaacttgtgccgcacgtgtacccaatatgccgtggggttataggatgttaaattggacatttacatgatacaataaatatgacattccagagtgatgttctagaccaagattcaaatctttaaggaagggatttaaccaaaagttgattacataaacattgttcgcatcacccacactttgttatgtgcatctgtgtgaagagaccaccaaacaggctttgtgtgagcaataaagctttttaatcacctgggtgcaggctgactgagtctgaaaaaggagtcagcaaagggagatggggaggggcagttttacaggatttgggtaggtagtggaaaatttacagttaaaggaggtttttctcttgtgggcaagggtgggggtcacaaggtgctcggtgg

SEQ ID NO: 850885 - DNA, 529 bp, Homo sapiens
aatgaacctgacaatggagtacgggaaaaacagcagataggaggcaggactaacttgcagctcccacttggatggacrgagcagcatgtggagacccacactgtgaacttttgctccaggaagtactgcaggaacataccaggaaagccaagagaatccacagaccctttgaaggaggtggattgctgctccaggctctgggacagccaaggaaatgtgagtctgcttgctttctcagcaggaggcttgtagcctggggcaagttctcagccctgctcacactccaaccctggggcatggtggaagtgagactggccttttgggctgtgggctgcatgagagctgggtgagtcctgtggctgctggcttcctcccacttctttggcaacctgtgtgacgcagtagaggcagccataatccccctgggaacaaaactgcattggcctgggagccgtaccaccatcacccacagcatctgcagcaagccccacccaaggagagtctgagctcagacatgcctaaccctgcc

SEQ ID NO: 850886 - DNA, 537 bp, Homo sapiens
tgagagctccatggctccacccaccacctgatcctccctatacaatcacagctgatgcactcttgaaagcaccacctcctggctggaggccaacaaacaaaaccagctcacttaacaaaaatacaaccaaagaccctcacagagtccacctcagtctcctgctccctccaccagagcaggtgctggtatccacagctgagagacctgaagatggagcacatcacaggactctgtagacaccccacagtaccagcccagagtccagtagctcagctgggtggctagatccagaagacaaataacaatcactgcagttcgactctcaggaagtcccatcactaaggggaaaggggagagcagcacatcaagggagcacccccatgggacaaaagaatctgaacagcagccctygagtcccagatcttctctttgaacctatcagattaacagcagatttctcagcagaaatcctacaaactacaaggaattggagttctatctttagcctccttaaacaaaacaattatcagccaagaa

SEQ ID NO: 850887 - DNA, 485 bp, Homo sapiens
gatgtgggaaagggccaggcatggtggctcacacctgtaatcccagcactttgggaggctaaggtgggcagatcacttgaggtcaggagttcaagaccagcctggccaacatggtgaaaccccatctctcctaaaaaaaataaataaatacaaaaattagctgtgcctgatggtgggtgcctgtaatcccagctactcagggaactgagacaggagaattgcttgagcccgggaggcagaggttgcagtgaacagagatcatgccattgcactccagcctgagtgacagaacaagatttcgtctggaaaaaaaaaaaaaaaaagatgttggaaattatggaacttcctagagacttgttgaatgaccttgaccaaaatgctgagagtgatatagacaataaagtttaggctgaggtggtctcagatggagaygaggaacttgttgggaactgaagtaaaggtcactggtggcattcctgccctgg

SEQ ID NO: 850888 - DNA, 556 bp, Homo sapiens
cctgtaatcccagctactcgggaggctgaggcaagagaatcgcatgaacctgggaggtggaggttgcagtgagccaagattgagtgagactccgtttcaaaaaaaagcaaatgcaaaaaaggtcactcaagttggaacttttcaagttggagttactgaatattgagtgtcagcaaagggctctttactgtatcaacatcaacatttaaaaaaaatttttttttttttggttagaaacaatagctacttttctctggaggtaaaatataaaagattttattgctactactttttcctgacttccagacaattgttttgtgaccttagcttagccacattttgtagctataatctcagaccacattaacaaacagtggctttaggatttctatgcagaaaagcagcagtgattgatttgtaagagacagggatgacatctagaaagctgagttatttaaaaatattaattggatgagtttgttyaaaaacaaacatttaaaatgatttgacaccagatgaaaacagtgaggaaggctgggtatggtggctcacgcct

SEQ ID NO: 850889 - DNA, 618 bp, Homo sapiens
tctataacccaccctcggttttccctgccattaaagtcttatattggtattgcacrtttgtcacaattaatgaatcatgattgatacagtattattacccaaagtccatacatcatttagatttcctttatttttcgctaaggtcttctttttcttctaagattgcatccaggaaaccgcattgaatttaatagtcatgtctccttaggctcctcttgtgagagtttctcagactttccttgtttttgatgaacttgacaattttaaggagtaatggtcatgtattttataaactgttcctcaatggaatgtgactgttttcttcatgattaggttgagtaatatgtttttgggaggaccaccatagatgtaatgtgtcattttcaccagatcacactaaggctccatgctattgacatgatttgtgattgtcgatattaactttgattacctgactgaaacagtgtttgtgaaggttccccattgtaaatttagtatttctctcattttcatactgtacccttgggaagaaactcactatttgcaatccacaaataaaaagtgggaagttatattctgcttgctgaagaagaaagtatctactttaattatttagaa

SEQ ID NO: 850890 - DNA, 563 bp, Homo sapiens
catagttcagtgaattatggaaaaaaaaaaaacattcgggtctcccttctgaagagrcagacacttcaactatgctgagctaagtgaacagtctctttctggaatctgcatcttaaccaaagtaaaaaaaaaaaaaaaataccacattggaactcattcacccaaagaattactgcctgctatcaagaacaccatctgtttgggtgcctatcattcttaagcttggctttttcatcctttcattcagatctgggagcactctcatgagtggggactctcatgaagtccccttttcttcagttatctcaagttagcttctgttacctgaatgagaaaaaaaaaatcctaacaatacaaactacacaaatttataagtcttcagacaattaacatctgtgtatggctatcctcctgcttctttcaataatccctatcatccgtatgccaactgagagtgaaaatactctttgccaagcaaaagaattttcccgaatgaggcattaggagaaatgagggggatttaactatgcagggatactcttcctgcaactgagaatcagctg

SEQ ID NO: 850891 - DNA, 446 bp, Homo sapiens
aactggagctaagctaggaaagtttgctgatctcgggctgggtttactctcagtgttaagtttcaggtaactgtcagttcacttaggatggtttcagctggggtaacatagtttakttccctttgtctcttgtctgacatttacctggtgctggcatgttctgtggtaatagcagagtaagagagagtgttccaatatacaatgccatgttaagcctctgtctgtgtcatatttgttgacatcccctgaccaaatcaaatactatggccaagttccaggtgacaggatggggcaaatctgcatgtccatgatgagaggccagtgtaaagtaaaatgtgtaaacctgtaatgtaatccaacattgcccaacttcacatgtgcatttattcacatccttctcatgagcaaacatgctcaactccccaagtctcatttaatcatgggat

SEQ ID NO: 850892 - DNA, 620 bp, Homo sapiens
ggacagattctttcctaggacctccagaacacacacctttatgttagcctggttagacccatgtcacacatctaacctacagaactgtaagatgatgaatttctgttgttttaagccactaagttcgggagaatttggaagctaattcaccaataggatactaataaaattacctttcctatttgatttataatcactagttctgagatctcttggtaccaatttttaattacatattcattgatctaacttatgtcagcttgaaaatggaataactgaatttgaaaacagaacaagtggctttatttattaaattaaacataaagttatttggttaaattatagataatatagcattttcccaatggttcttggatattgaaaagagcattgtgctcgaaataaactaatgattattggtacaaataaaatagcttcaaggatttcataataaaattagggagactatatgtaacacaacattatgaaatggaarcatgttatctgaaagttttcattttaatttaaagcaatgattgtaaaaacttaaagacagaaagtgtataaatttggtctttaggtctttttgcctatgattagaagtcattagtgttatggga

SEQ ID NO: 850893 - DNA, 531 bp, Homo sapiens
tgtggccttttgtacctgcatattatctatgttctaacattaattttactatcattatctagcaagataattatattgatagaggcctaatataaaatataaaattgattgaatcggagaggaggaaaaaatgtttcagggttattgggctgatctttataagtgtagtttgatgcaggtattctattgtccttagaagttgatgagatttactacaactttccttatgtgtgtagaatttctgcctttaaattgttactgagatagcactttcaacattccattatcttgtaatctagaatatattttctacatatttcctctagatatacagactggagtctgagtgtctaggtttaagtccaaagtccacaattcactttttaaaattggaaaagtgcataaactccttctgccttaattttctcatgtttcaacaaagacrataatattacattgttatgtagattaaatagtattacttatatatggttttaaaaatcatggtgttattcctcttggaattacttg

SEQ ID NO: 850894 - DNA, 467 bp, Homo sapiens
attagtggtgataacatgtatagctatttgtcttcaaccttaatttaggttataaacacccctttatatttttaagactgatccatgttgagtgttgctgaattattaatgcrcaccttttgtgcattaatgcttcagattctttgaggcacaacttgttcctggactcttatcccccattccagctgagccaccctggttgtgactgacactgagtatgcctgttcatttgcccagaagctgcctatagaccaaattcagttacacagaagtgtggtggggttacttaccggtcagacaaattctgagcagtgaaagagtgcacaggggaggtggttataaagtaaactcctttttaatgtcttcatctaatggatttttccaaggatagtggcagtctttgtaaaggaaatagaatttggtaacagatgaactaatatcttctttcaactctttaccacatttta

SEQ ID NO: 850895 - DNA, 559 bp, Homo sapiens
atgtgtcttaaaatacataatacatattaattacctttttaaatttttaaataaattagccatatgcttattttgggggatctatatttgaaataaaaagtcaattaagataaagagatacagatcagtaagatcaccattcacaaattaatgatcacagaagtgggtgataaagccaaaatgaagacaaaatgatttacatttgtaattgaacactttatagcagataaaacaaatacagtattctataacgagcattcatattctcatccaatattacaagagtcgttggaattatcatatttatctttcaatactaaaaaaggtctttcacttcttaaatgattaataaagagctcaattttatgaaaaacatatagaataagtatatgtttaactgaaattaaatagcattatactgcaaatattcagcratatcttacctatccccaaataagcatttttatatttaaggcagctttttgattcacctggaatccaatctatgctgaatcaaacatattatgacttatcccagaaaaaaagtgtatttccttaa

SEQ ID NO: 850896 - DNA, 624 bp, Homo sapiens
acaggcttgacttcttgcactttgcataatgcttttgaatttctcccatgctgttactaattttttcttttctattgctgagtattatttcattttggctataccaagactcatttatccattcatgagtcaacagacattttagtgtgtcttacataaagctgctatgatgattcatgtcttgtatgcaaatacttttttttaaacaaaatttctcttggctaagtacttaggagtgcaattaccatcccatttgatatgtacctattcaactttacaagaaactgccaaattattttccaaagtagctgtgccatttttcattcctgcaggcaatgcatgagagttcaaattgttatgctcatcagtattgtatatggatatttatatttgcttcctttttagtcaatctagtggctacatagtgctatttcattttggttttgctttaaattgcacttttatgatgtatattattgaatagtgaagtcggagagcttttttcttaaagggttaaagaagaaaaaaaataagcttgytggccatgcattgtatctccaacctactcaaccctgccattgttgttcaagaacagccagaggcaatatataagagagtggttgt

SEQ ID NO: 850897 - DNA, 623 bp, Homo sapiens
tccaaggtagaaacatgtaagaccaacttaacttggtcttctccttgtcaaccgaccaccaagtcctataatttatacctcaaaaatatctcttaacaactctccatccctgttacccctgccttagctcaagttctcaccattcttccctctacaattgcaggtctccaatctggtctccctcctttccatctctggaaggatggaaaatacatttcacaatcttccaatgtagaatgatgtgcttaaaatcaaattagtaaaaaaagaaaaaaatcaagtcatgtctgccactccccttcttaaagggctggtggattatgaaagcctacacaataaagtccagatttcttatttggcaaatgatgataataatagcaatagcatacaaatgcctatttcacatatgagcaaactgaggaccaaaaaggttaaatatctttccaaaggtgaagctgggatttgaacctagactaaatccaaatgaagaccatactcaattcaaatgtcacttccctgacctaatgtaggtgtttacagatttttccctccagataagctgtgaactccccaaggacaggaatggcrtcttattcatctttgtgtctcaagtgtctagagtg

SEQ ID NO: 850898 - DNA, 642 bp, Homo sapiens
tctgtctagttaccactgctatattttgattaacattggatatattgtgtaaagaataggttctgcatcatccaggccctgtgactaggggccgatttgaaaactaatttctgctctgcaagtttttgtatggtttcagaaaatactgtgctttttcttgtttggtattatttttaccagtgtttactgtttatatcttaaatatattggttgagcagtaaatgattggaatttgaggttttaacatctttaataaaaacttatctgtcatgtttcttgtgttacagttttactggtttaaatattgtgcaagataatagtgtctttagttgggacttggagatatttttgttatatagatagttttgtggtaggatgtatacattgttattgaagctatactgttgtcacttggggaacaaagtattctgaaaggttacctagattacatgataaaggtcttcataattatgtgtacttatggttggtattagaccacataccatagaaaactttcatcatcatatgttactgacagtagaattctatcctccccamtcctaccttttaaagactgtttactgtaagagggggagaatgtcacccatttttatctacctaacattttaattttttcatatt

SEQ ID NO: 850899 - DNA, 642 bp, Homo sapiens
tctgtctagttaccactgctatattttgattaacattggatatattgtgtaaagaataggttctgcatcatccaggccctgtgactaggggccgatttgaaaactaatttctgctctgcaagtttttgtatggtttcagaaaatactgtgctttttcttgtttggtattatttttaccagtgtttactgtttatatcttaaatatattggttgagcagtaaatgattggaatttgaggttttaacatctttaataaaaacttatctgtcatgtttcttgtgttacagttttactggtttaaatattgtgcaagataatagtgtctttagttgggacttggagatatttttgttatatagatagttttgtggtaggatgtatacattgttattgaagctatactgttgtcacttggggaacaaagtattctgaaaggttacctagattacatgataaaggtcttcataattatgtgtacttatggttggtattagaccacataccatagaaaactttcatcatcatatgttactgacagtagaattctatcctccccactcctaccttttaaagactgtttastgtaagagggggagaatgtcacccatttttatctacctaacattttaattttttcatatt

SEQ ID NO: 850900 - DNA, 479 bp, Homo sapiens
gggtctcactttagtgtcataaatctcaagtgcatccttaatgctgctgagcaattacacaacagtccttcagtccaggaatcatccaaatccatgctacagcctatttttgtatagccagtgagccaaagatgattcatacacttttagagttgtttaaaagaaacaaagaggaatgtgtcaggaactgtatatggcctgcaaaatgtaaaatatttaacttactacatgtccctttccaaaaaaaaaaaaaaaaggcaatgttctcaaagtatgagaaccttattgaaccctagtctatctgagtggttctcaaactttagtattcattagaatcacctggagagattattaaaayatcaaactgtagaatgggagaaaatatctgcaaactatccatcaatcatacaggggactaatatccagagtttacaagaaactcaaacagcaacaacaaaaaactcaactccattaaaaag

SEQ ID NO: 850901 - DNA, 617 bp, Homo sapiens
agtgtagaactgtgcagattttggtgttaggcagtgcgatggattrgatgggatttatcttcaacaatactcatgttgaaatttgatccccaatgtggcaatgttgggaggtgaggcctagtgggaggtgtttagttcatgggaacagatgccttatgaatagactaatgccttcctgagagagtgagtgagttctcactcttgaggaatgggttagtttccatgagagtgggttgttaagagtctggcttccttggtttccctctcttgcttcctctgtcatcatatgatttctttgcacatacgtgcttctcttttgctttctaacatgaatggaagcagtatgagaccctcactggatacagctgcccaatgttggactttccagccactgtaatcatgagccaaataaacctcttttctttataaattacccaatctcaggtatgcttttatagcaagactgaacagactaagacaggcagacctctctcaaaatctcaaatctttgctttcttagctgtgtgactttgagtaaattgtactgccaggctaagcatcaggtttcttcaattgtaaagtgatgagtaagttctataaaactattaaaggaggta

SEQ ID NO: 850902 - DNA, 379 bp, Homo sapiens
agttgtagattcccaagtcctataatcaatgtcactctttgttgatggaaaaagaatgctacagctcatacatgtttaacrtgttcagttttcattatataagaccccattcataaaacaagtgcaaaaggatggtgtacagcactggcgtattaacagagtaaaaggtttaacaaatcattgcccatatcctgtaatcaagcacatagaatatgacctagttatctataaaaagcatgataactggatcaagataaaggaacaatatttatagcctttccaacacaaatgtagaatataagtgtattagaagaacactaataaattaaacatagagttatatgattcaaggttagcaggattaagaaaattacaaact

SEQ ID NO: 850903 - DNA, 641 bp, Homo sapiens
gtattagcgttttcccttccttgcttttatttcctttgccccctagattataatacaagctaaagtcccaggctcttctttctgaaaaacctatggtaaggcacatgggaaaatcatcatggtataaagttatgtgaaaaaaaacaagatacgaaattctatattagaatgattccagttttatataattgatgtctagaaagaagtattaagaataatatattgaaagttagagcattgacaagtattactacagggaagcaggactaaaaatatttacttatttatttatttttacattctctggttcccaaatttcttacagtgaacatgcgtgctttcaaaacctgaaaaaaatttctatgggagaaactgtcagtagatttctgcaacaaaaagggcatagtcatggtaaggtacacagcaaaccaaatgtcatgggaaacaagtatggaaatcaaaaccaagaaaatccaaggtcaaaatgtcagaagctaaccaagggataaggctaagggataagagaagataaggagtttggtcctgtatagtttacagtggctgtcttatttggaggactgggtcccttctgatatattgcctgttgcatgaaaccwaccatctgggtgaacacctaacag

SEQ ID NO: 850904 - DNA, 641 bp, Homo sapiens
gtattagcgttttcccttccttgcttttatttcctttgccccctagattataatacaagctaaagtcccaggctcttctttctgaaaaacctatggtaaggcacatgggaaaatcatcatggtataaagttatgtgaaaaaaaacaagatacgaaattctatattagaatgattccagttttatataattgatgtctagaaagaagtattaagaataatatattgaaagttagagcattgacaagtattactacagggaagcaggactaaaaatatttacttatttatttatttttacattctctggttcccaaatttcttacagtgaacatgcgtgctttcaaaacctgaaaaaaatttctatgggagaaactgtcagtagatttctgcaacaaaaagggcatagtcatggtaaggtacacagcaaaccaaatgtcatgggaaacaagtatggaaatcaaaaccaagaaaatccaaggtcaaaatgtcagaagctaaccaagggataaggctaagggataagagaagataaggagtttggtcctgtatagtttacagtggctgtcttatttggaggactgggtcccttctgatatattgcctgttgcatgaaacctwccatctgggtgaacacctaacag

SEQ ID NO: 850905 - DNA, 644 bp, Homo sapiens
tattgaaaaggttagccttttccactgaattgtctgtgtacctttgtcaaaaataaattgaccatatatgagtgagtctgcatctagacttsttactctgttttgttcatctatttgtccaattttagaccaatgacatactctgttgattaccgtagcttcataataagtcttcaaatcaggtagtacagcaactttgttctttctttacaaagtttttttggtcattaccggtcctttgcatttccatatgattcaaaaactaatccaaaatgaatcaaagacaaatgcaaaactaaaaagcataaaattttaaaatgaaatccataagaaaatttccatgatcctggtattaggcaaataatttttagatataataccagaagcatgatgcacaaagtaaaacatcaataaattagattttatcaaaattaagaacttctgctcttcaaaacatgatgtaaacacaatgaaaagtcaaagactaagtgaaaatatttgcaagttatatatctgataaaaaaattttaatccagaatacataaagaactctcaaaactcaatagaaaacaacccaataaaaatgggcaaataacttgaaaagacacttcaccaaagaagatatgtggatgacaaataactac

SEQ ID NO: 850906 - DNA, 626 bp, Homo sapiens
attatgatacagtaaagtatgtgtgatacttcaattgtcratacatgtcactacatatttgtcaaaattcatagaatatacaccaccaagagtttatcctcatgtaaactatgggctttgggatataataatgtgtcgacgtaggttcatcaattgtaacaaatgtgcctctggtagcacacgacatcctttcagattgccttcttttacttagtaatatacatttccatttcttctatatcttttcatggcttaatagcacatttctttttagtgattaataagattcccttgtctagatgtaccacagttttatttatccattcacgtacttaaggacatcttgattgcttacaatttttggaaatatgagtaaagctgcatttttataggattccattttcttttctttcttagcatataaattctcctttatttttaaacctttttagtgattgccctagagtttgcaatttacatttataactaatccaaatccactttcaaataacactataccacctcacaagtagtactagtaacttataataaaaaaaccctaattcttccctcccatcctttgtatcagtttgtcactcatttcacttatatacaagcatgtatag

SEQ ID NO: 850907 - DNA, 605 bp, Homo sapiens
aagaattcaaattgtgagtaagaataattcataggtgatgtggtgccctgtgaagcctttaattttaagttggggactttggttcagcttttgtgtttctgatcttgaaatttgagatgtaatcaaaagcaccaaaccattccttgaagagttctttctctggatatgaacagaagagactcaggtatgtattttctactaagttacaatttaggtcaaccaaatagctaagctctcaaagtcagaaggtgtgtgatgaggtgaaattagcacagtttgaaagaggtggcttatgctcaacactgattctgttgccacttacgaattattccatcctggataacttgtatggattattccatcttggataacttcttttggtttcattctctcatctgtatatagtgaatgatcctgagtcttcctagctcatagagatgtcataatggtccaatgagatccatatgtccattgtacagttgaggtgtgtctctgcctgtatgtccatgtgaaggaaaccatccccagagagaacactgatcccctgttaattgatcaggaccayacttagtgtccagaggatggtgcaaacatttcttactgtt

SEQ ID NO: 850908 - DNA, 588 bp, Homo sapiens
acgtggtgctgggcgaggacagcgcccacgcgcggctgcaggacctgctgctgcactacaccgcgcacccgctcagcccctacggggagacgctcaccgagcccctcgcccgacaggtacgcgccccagaccctgaccagagagcccagggtctcgggccagcgcccctcccgctcagagcccaggcgcaggacgcggcaccaggcactttctcatcccgaaacaccactcgggcatgcctcccttacccaggcatcttcatcttcatgggagggtggcaggcccttcgagaaatatgagtgctgggggaccgtccttaagagaccagcccagccacacggagtcagaggggcaaggagaggccaggggcacacagagtcatttggggttttgttttttgttttcttttgctttgttttagacagagtctcgctctgtcgcgcaggctggagtgcagtggcgcratcttctctccctgcaaactccacctcccgggttcaagtgattctcctgcctcagcctcctgagtcagcttcccccctctaggccccattatcctcctatccctaaggcctcgaatgctggtat

SEQ ID NO: 850909 - DNA, 644 bp, Homo sapiens
gcttcataatgttccaaagtcttatattttacttttccatttttcctagatgtggatagtttgcttctaatgctcagctatcacaaataatcaagaatgcctcctctgggtataagcaagtttccttaggacacatcctaagtagtagactctagtgcatagggtatgtgagttttgccaggtgcagcaggaggaaactgtaccagtgcacaaaatgatcatccacacagaaaacctaatatgatcaaaagaccaaccattagaaacagagttcagaaaaatagccatttatagcattatcctaatatctttgttcaaatcaatctatatagtcaatataactccaattgaaatccaacaaaaagatattatattttgaaaactaaatttcaaaatatctaagagaattttgaaaatgagagtaaatatagtgacttaccttacaagattttataaaatccttaaaagcaaaagcaattgcaataacagaaatcagtaaaaatctgcagaaaacaactactgacttattaacagaygataggccagtataattacatgaacttagaatgagtgtgaggtgaaagaaaagaacacaaagggggaaaggatggactgttttagggttttttggggaaattggatca

SEQ ID NO: 850910 - DNA, 549 bp, Homo sapiens
aaaatcttagaaaaaaaattacccaaaaaagtaattgtgatggccaaaggcagtggtccccaaacttatgtgctcatcagaatcatctggagagctccttaaaacatagaatctgggaccctactctcagggtttcttattcactagaggtctgagttggggacctgagaatttggggaccacactttggagaccactgcacttgaggcttgggaaatcagtaagcataagttcttaaaagttttttccttgtctccttcgggagtgtcgcattgcatttctccttaatcttatataatgtaattggtatttcttttaaatatcttccttcttctctaataaattaagtgacattgaaggaaatacctatattcttgacaaattaattagatgaaataaaaaaattataagggaagagtagagttcttatatcaaaaccamatatggcaaaccaatatgtaaacttctcaaaatgagcccaaatgtatgattatgtactgacaataacattcctgaatgtatggatttatataaagaatttcagataca

SEQ ID NO: 850911 - DNA, 495 bp, Homo sapiens
aaaaaaaaaaccctacaagatttgttttgaactctaattagagcaagcctcagwgaatacgttttgcatatgctttttaaaaaccaaaacgacttttaacttagttattaggcaaataactggttcatcctaactttcaaatgtactaagctttcctttgcaacactctttgtccattccaaaattcttgaaaccttacctgtgaagcccgtatgtgaacattaaaaaggaaaacaaaacttcagtgactaaaaggaaggtgaggcagagtaaatcactctcaaaacattcattttctactgccttctctttatgtagatatcttttatctctatatttgcggaattttcattacataaccccctcattcttaaaagagagctagtcaatcttttaacattctttggtccaagtataactaccacctatttttaatctcaaatctcaaattgttgaaacttctctgtaaactatctagtatccaaagtatttaga

SEQ ID NO: 850912 - DNA, 634 bp, Homo sapiens
tagtgagggcaatttagcaatgtctttcaaaatcttaagtgcacagatcagcttaccaagcaaatccatttccaggtatttgtactgcagatattcttttttactcactttttttttttttttttttagagatagggtctctctatgttgcccaggctggacttgaatttctgggctcaagagatccttaaccccctaagtagctgggcctacaggtatgtgccaccataaccagctgtcacgtgggtattctttcacatgtgccaaatgatatgtgtataagaatatccagggcagtattattattattttagtattaattggttttaacaaaggacggcaaaaccctagatgtcatgggtatggggtttctttctggggcaataaaaatgttcttgaacctgcttggcaatgtagtgagacccaatctctacaaaacatttaaaaattagttgagtgtgctgatgcacacctgtagttccagctacttgggaggctgaratgggaggattgtttgcttgagcgtaggaggtcaaggctgcagtgagctatgattacaccactgcactccagccaaagcgacagagccagactctgcctcttaaaaaaaaaaaaaagagttcttgtattaaac

SEQ ID NO: 850913 - DNA, 592 bp, Homo sapiens
gccttgtttgattttgcgcacttctcggtacatggtgaaggccttgatgtctaaatgagtgtggtgaaggatggtscctgctggggcctcgcagatacctcaggacttcattccaatgaagcggttctccacgatgtcaatacggcccacgccgtgcttgcctgcaacttcattcaggtacacgaaaagctccaaggaggtctggtgggtggtgccatccttgacgttggtcaccttcacggggaccccttttttgaacttgatctcgagaatgtcaggggtgttgagggctttggctgggtcctgggtcttcatgtagagacctggaggcacttggttcttggggttccaggattccagcctcatagctgatgtgcatgaggttctcgtctatgcttcacgggctctggggagtgactggaatgggaacctgatgttgctttgcctatttcatcaggtcattgcagcccttgaaccggttgtagaactcgggcatcctccagggagcggtgacctttatctggggggccagcaaatagcaggtgagctcaaaccggacatgatcatttccttttcccgtggtgccgtggaa

SEQ ID NO: 850914 - DNA, 559 bp, Homo sapiens
aaatatttattctttttttttcttcttcttttttgagacagagtctcactctgttgcccaggctggagtacaatggcgtgatcatagcttactgtagcctcaacctcctgggctcaagtgatccttccaactcaacctcccaagtagcaggtgtgcaccaccacccttggctaattttttgtattttttgtagagacaggttttgccatgttgcccagactgggatccctaaatatttactcaaggggaaaaaaataaataaagtacatatgtctatgatatacacaataacacacatgaatctcaaaattatgctgacccaaaaaagccagaccaaaaaagagtatgcaatgtatgattccatttatacatggtagctctagaagagacaaaaactatctatgctgaaggaaataaaagcaatgcttgagggaggattaactggaaaggggcacaagggaactttctgggatgaaaggatagacatcttctgtatcttaatcagaatgatagtgraaagattatacacgcttatgaaaactgatcaaactatgcatct

SEQ ID NO: 850915 - DNA, 544 bp, Homo sapiens
atatctttcattctagagttgaggggatccgtcagaaagaaattctgattattccttaaagaactcaagtgatctgatagaccacacaaggccagaaatcaggtaacctcaaatagtgctgtccaatagaattttctgcaatgacggaaatgttctaaacctgaactgtccaataaattacccaccacgtgacaatcgagcatctaaaatgtagctagtacaacagagaaactacattttttacttaatagttaaataactccacgtggctggggggctaccataatatccaccacagtcctggaaacttgccctgccctgatccatctcaagtccctcaggcctgaagttaagctcatcatactgtaactccacagtgcttatgtatttcacctcccgttcctcttcacagaactagtcccacttgcccatccctctctctcctctcttccccaagaaacacatacatactggcakacctgctttgtgctctgctctattacatttgaaagatattgcattttttacaaattgacagtttgtg

SEQ ID NO: 850916 - DNA, 638 bp, Homo sapiens
aaggaatcacatgtttacctcaaatcagaggttcttgsccatagctacaagctttggctcttattctcaccttacatgaaatattttgggatgtttctcaccgtttcaaagatttgaaatttaatttcaagtagctgaatagaaatgacatttcctaaattaaaaaattagcactaactgtatgacacccttcatacaaatactttttaatcttaaaataaacaaagctcctctgactacaaatgaaatttaaatcagaaactggaacaccacctctagtaggccagtctttccttgccatccctgagtgagaggggtctctggtaaagggtatcaatcctacatatatgttattagcagcattgctttctgtttcttaagataggatgacaagaaatcttgctttctcaaccctgtttggaggtgagagtattcaattcagcacacatgtgttgagttcctgctttgtgcaaagacttggtctcaatactgcgagggcgtagagttcatactcaggaaagaagagacatattcatttaaaaaaaagatgttaggaagctcaatattatgagttactaactattgaaagcgtttagttccaaaattctaaatcattaaattataacatttagtcagca

SEQ ID NO: 850917 - DNA, 638 bp, Homo sapiens
aaggaatcacatgtttacctcaaatcagaggttcttggccatagctacaagctttggctcttattctcaccttacatgaaatattttgggatgtttctcaccrtttcaaagatttgaaatttaatttcaagtagctgaatagaaatgacatttcctaaattaaaaaattagcactaactgtatgacacccttcatacaaatactttttaatcttaaaataaacaaagctcctctgactacaaatgaaatttaaatcagaaactggaacaccacctctagtaggccagtctttccttgccatccctgagtgagaggggtctctggtaaagggtatcaatcctacatatatgttattagcagcattgctttctgtttcttaagataggatgacaagaaatcttgctttctcaaccctgtttggaggtgagagtattcaattcagcacacatgtgttgagttcctgctttgtgcaaagacttggtctcaatactgcgagggcgtagagttcatactcaggaaagaagagacatattcatttaaaaaaaagatgttaggaagctcaatattatgagttactaactattgaaagcgtttagttccaaaattctaaatcattaaattataacatttagtcagca

SEQ ID NO: 850918 - DNA, 336 bp, Homo sapiens
gcgagcctgttgtcccagccactctggatgctgaggctggaaaatcacttgaacctgggagacagaggttgcagcgagccgagatccagccactgcactccagctctctcactccagcgaccgagcgagactttgtctcaaaaaacaaaacaaaacaaaaacaaaaacgtaataatttccagttctatccatgttgttgcaaatgactgaatctcattcttttttatggctgagtagtactccattgygtataaataccacatattccttatccattcatctgctgatggacacttaggttgtttccaatcttagctgttgtgaacagtgctgcag

SEQ ID NO: 850919 - DNA, 563 bp, Homo sapiens
aaatataagtagagggcagttttcagtcccaccgttagtccttcttccccagattccttattccacttttgtctgtctgatgagtcactttcattctttaaccctgccctttgtatttttttaaaaaaataattaattttatggccagatatggtggctcacacctcccagcactttgggaggccacagcaggcagatcacttaaggccaggagttcgagaccagcctggccaacatagtgaaacactgtctgtactaaaaatgcaaaaattagccgggcatggtggtgcatgcctgtaatcccagctacttgggaggctgaggcatgagaatggcttgaaccagggaggcagaggttgcagtgagccaagatcatgccaccgcactccagcctaggcgacagaccgagacaatctcaaaataaaaataaaaaaaaagtmtttttttggatacatagtaggtgtatatttatagggtatctgagatgttttaatataggcctgcaatgtgaaataatcacatcatggagaatggggtatccatcccctcaagcatttatcctt

SEQ ID NO: 850920 - DNA, 552 bp, Homo sapiens
ctggtaaccatccttctactctctatgtccatgagttcaattgttttgatttttgatcccacaaataagtgagaacagagcagtgagtttttkatttacatcaccgataccaatctctgactattatcaaagaatacattgcttctggagggagattctcctgagagcaaagtaaagagagcataattaaatattaaaggtgagagagccttatttcatttaagtggcacatttatggcaaggtttgtggcctatctctcttgggactatgatatgtaagacttacaatttttatttttatgctgggaagtaataaagggcaatgatccctctctggtcagaaacaagaaaaagctgagtaatactcctcatttactcatgtctcgacttgagtttcaattttatattttgcattacttctaggagaagtatggggaaagtacatgtttacatgttttcacagatcaacattatgccatcaagtaaaaggaaaatatgtcaaaaacaaatttgtcttttatattttcttgaatgtttattcaggcttgcagt

SEQ ID NO: 850921 - DNA, 623 bp, Homo sapiens
tgagcttcatttcaatttaataaatactactagaagtcttggaaaaatgggtaaatccccacaactcttgttcccaaaatgaaataaaagtttgccaaagctgaacattttaaataaataatagccaagcattgttctaagcattattcatgtcatgtcttatttgcatcccaagattctgaggcaagataatattatccccactttacaaatgacaaagaaaaaaaacacaaatataagtaacctgcccaaggttatatagcaggtaaatggcagtcagtattcaaaaacaaacttctgatctagttgctctacataaacgttggctaatggacagcaaatgcataatcaacaaatgactttatctagtgcacaaagctttcaatcaccaaatatttatttaacagctactaagtgccaggcacttaagttaatgatgacaagatagacaaggtccctgctgatccagctcttcgagtgtgggtgaaaaaaagagaaaaggggaaaaaaaaaaattcagtcactgttgcartggggaaaataaacacgaggaggaggatgtgagctaagatctaaatgacttcaaatatccgaaggcataaccttccccgcaaagggaaaac

SEQ ID NO: 850922 - DNA, 621 bp, Homo sapiens
gggaaacgacatttgatgcctgaagggaaaaacctgtgggaagctttgggatgtattgctgtagcgggagaccttggtggggctgacccttcaatacaggataygcgttaatggacccaaaatattgaaagcaaatattgactccagctcctgaaaagactttaattatttattttgaataatttgatactcaagtaaattaatgctaaagcatttctctgtttgtgccaaatcagtgcttctcagtgggaactcggcccatctttgcaggcaagcgctcactctcagtaggcagtccatttctgcagagtgccattaagttaatttcaaaaagaaccagtaaaggtatatggagcaggcagtaatagcatggaaaatatccaaaattactagacccagcaacagaacttggatgccattttcatgcactaataatttgtagtctacatattgaaggtaactataaactgactactttccctgctaaagcattcgggtaattaaaaatacgctgttagttgtctacgtttcaacatgggggaacaagatgccttttttctcttccttggtaaatgcagtttgcagactattatccaaagtgacgctgaagtcctttgtcac

SEQ ID NO: 850923 - DNA, 621 bp, Homo sapiens
gggaaacgacatttgatgcctgaagggaaaaacctgtgggaagctttgggatgtattgctgtagcgggagaccttggtggggctgacccttcaatacaggatacgcgttaatggacccaaaatattgaaagcaaatattgactccagctcctgaaaagactttaattatttattttgaataatttgatactcaagtaaattaatgctaaagcatttctctgtttgtgccaaatcagtgcttctcagtgggaactcggcccatctttgcaggcaagcgctcactctcagtaggcagtccatttctgcagagtgccattaagttaatttcaaaaagaaccagtaaaggtatatggagcaggcagtaatagcatggaaaatatccaaaattactagacccagcaacagaacttggatgccattttcatgcactaataatttgtagtctacatattgaaggtaactataaactgactactttccctgctaaagcattcgggtaattaaaaatacgctgttagttgtctacstttcaacatgggggaacaagatgccttttttctcttccttggtaaatgcagtttgcagactattatccaaagtgacgctgaagtcctttgtcac

SEQ ID NO: 850924 - DNA, 561 bp, Homo sapiens
atatttcaacaaagtttctggaagacaaaaagtgaaacaagacacggtsactgggaaagctgagccaaaccaaagctgagagggcacctgcagagagaatcagccccgaggggaccagggtacccaaagggggccctgagacaacgcaggcaacaaaaggcatgaatgacccttgggcctgaaaacaagaggattagttttcaattactcacctggaagaggagagctagcagcaggcatttatctactgacacctgaggatgtttctctcaagaatgaaaatgaacctagggagaactaggcaattatgcagatattagagatccccctcaaaaccttaaaattctggcatagattcttccagtcagtatctgacctgccacccaacaagcctgccagacaccaatcaatgagctcctggtcagccttgctgcatcctgtcctgaaatatgattagacaacccagaactgccagaaagatcattctgtcattcagcataacaaacacaatcaccataggaaatcctgcagtacaatacaaagatgaagggccagataaac

SEQ ID NO: 850925 - DNA, 602 bp, Homo sapiens
ctcttaccacccccacatgggaccatctagttgcaggaaaagcagctcaggactctcactgattctacattatggtaagttgtgtaattatttcattatatattacaatgtaataataataatagaaataaagcacacaataaatgtaatgcactcatatcatcccgaaaccaccccacccctggtctgtggtaaaattgtcttccatgaaaccagtccctggtgccaaaaaggttggagactgctgctctataggacctagtacagtgctggaacaagtgtttagtagagacttcctgaataaactgcttgggatacaacaggatatagagtcctctcatatttctactaattataaggctattgactggcaaatgaggaaactcatatgaagcagggaatctttagttattgctgatgatctagaaaccaggtgtcaaagagtaaaaagcctgagcaaacacaatcctgtccagccatcccagaaagctttatrcttctagtccatttccccaggggttccaatttttgctgagactaatttattaaatgtatttgaggggtaaagcattaatgactgataatgtatttaatgagtgtcc

SEQ ID NO: 850926 - DNA, 522 bp, Homo sapiens
ctctaccagtctcaccacttcatgaccatccatgcaaggctgattgtctgaggttgtctggctgtcttacacgactaatgtgaggcaaataaacatacaggcaaagcttctaagagaaagaaattatatctttaccagttgcttcaaaagagaccagtaggaccaatcacggattggtggttaagatgtctatttgcccctactaattcatagttgatgggccttgcaagattccaagtttaaatacaactttgtctttacaaagcctctgtctcttaagaccatcagttgtcctacatttcatttgattatttttttaaaaataaacaaaccctcatcaaaaacctttctttagactagtagaagatattggaatctacatttcacaaacattaaggtacattccataascatttgtttaaaagcatgggtgagtgattgcagccaatgtttactaagtccaggataattcatgagaccaccacaaacatcatgaatgacagattctggttgtaaacaagg

SEQ ID NO: 850927 - DNA, 539 bp, Homo sapiens
tgatgggaagtttcaaaggaatttcatcaggactatccataatattctttagtttcctctgtgatttagggctgaaacaaaaaaaagtcggaagcagtgctttaattgacacaggsaagtcgagaagcatggaatacttaccttaacagcagtgcaattttgtctgtgttccagtatttcccataattgcaaattgagctgttatcctgggataatcatagttcaagattttataatcagaagaataaatcttcatttcttacatggcactgcttacttctctatgtatatctcttcttctagttcttggagagaagatggaataggtggttctgatactggcgtagtcataggtggttgctttcacctctacctcatcacttctggcttacccattagtctggttagttgtgattggggtaccatgcttttatatggagaagaattgcctatgggtcttttccttagaaagagactgggagtaaagctagctcgcaattagagtttcaggtataatttctgttattcctttctgttca

SEQ ID NO: 850928 - DNA, 600 bp, Homo sapiens
aagcaacagagtgagaccccatctcaaaaaaaaaaaaaaaaaaagaaaaaaagaatcaatagagatggccaggtgtggtggctcatgcctgtaatcccaacactttggaaggccraggcaggtggatcacttgagacaggagttcaagaccagcctggccaacatggtgaaaccctgtctccaccaaaaaaagaaaaaatacaaaaattatccggccatggtggtgcatgcctgtaatctcagctactcgggaggctgaggcaggagaatgacttgaatccaggaggcggaggttacagtaagccgagatggcgccactgcactccagcctggacagaagtgagactccgtctgaaaaaaaaaaaaaaagtaaggaagagaactgttttagcttgcaaagactggaaaggactctatgacaaggtgacatttgagtggaaacctgaaaaagaatgatgataaaccatgcaaatacctgagggaagaatactcaagacagagtgaggctcagagattttaaccttgcactatctactacccaactactatcaaaaaagaccagagaacaattatatttctgaaggattttttaaagaaatc

SEQ ID NO: 850929 - DNA, 213 bp, Homo sapiens
aaaacttcatctcaaataaaataaaatgtttaaccaaagatgtctcagacctatgtggagaaaattattacattttgggggccacgtaatgtttcagtcaacaacaaaccatatataacggtggtctcataagattataatagagctggaaaattcctatcatcttgkgacatcataaaccatcatgatatcatactttattttttgaaataa

SEQ ID NO: 850930 - DNA, 310 bp, Homo sapiens
tgggcatggtggtgcacacccgtagtctcagctactcggraggctgaggcaggagaattgcttgaacctgggaggcggaggttgcagtgagccaagatcgcaccactgcgctccagcctgggtggcagagcgagactccctgtgtggaaaaaaaaaaaaaagatactcagatgtagctgtctctgcctgggttgttttctaaatgcgtttggctggagatagaacagatcctgcctctatccacggcgtaagggagttagcttcatggcaagctctctggagaacacaggccattgtacctgctcatgag

SEQ ID NO: 850931 - DNA, 310 bp, Homo sapiens
tgggcatggtggtgcacacccgtagtctcagctactcgggaggctgaggcaggagaattgcttgaacctgggaggcggaggttgcagtgagccaagatcrcaccactgcgctccagcctgggtggcagagcgagactccctgtgtggaaaaaaaaaaaaaagatactcagatgtagctgtctctgcctgggttgttttctaaatgcgtttggctggagatagaacagatcctgcctctatccacggcgtaagggagttagcttcatggcaagctctctggagaacacaggccattgtacctgctcatgag

SEQ ID NO: 850932 - DNA, 609 bp, Homo sapiens
tgctgtgtccggctccttaagctcagcatgacgttaccgagactcatccacgaggctgtgtgtgtctgtggattattccttttcaatgctaagttcacagataggaacaggctctacatggatatccctcaggtaatttatccactttcctacagatggacatacaagcaattcccaattgcagcaattataaataaagcaagcaaagctgctgtgaacactcttgaatacgtttttgtggacgtaggttttaatttctcctggataaatgccctagagtggaattgttgggtagcggggtaggagaacacttagttttataagcagctgctagaccttttgcaaagaggttacaacattttaacacccaccaatgtatacgagaggcgaggctgcggcagtctctgcgacacttggtggtgtctgatctgagctgccctgggatatatgcagatgtctttcactgtggttttaacctgtacttccctaatgactgatgaygccgagcactttctcatgagctcaggggccaatctgtgtattatgtgtctttgcgatgaaaatgtgagatattttgtccagttatttactgggttgttggtcctttta

SEQ ID NO: 850933 - DNA, 333 bp, Homo sapiens
tacagacctttaaggttgaggtaaaccaaagatatttaaatggyttccaaagcacagggggaaagggaaacataaaatttttatgtagtcagcataatgctgacaccaaattctgaagtggatagcactaagaaataatctcataagcaatttgaagtataattactaatgcagaaattcaaagtaaaatagtaggaaatcgaatccagccgcattttatatcatgataaattgttttcataagtggaatacaaggatggctcaatactgaaaatctatcaataaaattaatcatatttatagataaaattggaaaaacataatcaactccat

SEQ ID NO: 850934 - DNA, 333 bp, Homo sapiens
tacagacctttaaggttgaggtaaaccaaagatatttaaatggcttccaaagcacagggggaaagggaaacataaaatttttatgtagtcagcataatgctgacaccaaattytgaagtggatagcactaagaaataatctcataagcaatttgaagtataattactaatgcagaaattcaaagtaaaatagtaggaaatcgaatccagccgcattttatatcatgataaattgttttcataagtggaatacaaggatggctcaatactgaaaatctatcaataaaattaatcatatttatagataaaattggaaaaacataatcaactccat

SEQ ID NO: 850935 - DNA, 333 bp, Homo sapiens
tacagacctttaaggttgaggtaaaccaaagatatttaaatggcttccaaagcacagggggaaagggaaacataaaatttttatgtagtcagcataatgctgacaccaaattctgaagtggatagcactaagaaataatctcataagcaatttgaagtataattactaatgcagaaattcaaagtaaaatagtaggaaatcgaatccagcmgcattttatatcatgataaattgttttcataagtggaatacaaggatggctcaatactgaaaatctatcaataaaattaatcatatttatagataaaattggaaaaacataatcaactccat

SEQ ID NO: 850936 - DNA, 547 bp, Homo sapiens
tcttattttaatgtctctctgggcttgataatttaaaaggactggcattcctctgataaaagttattttattttctcattttccatcaatctatcctgttcagtgaaatatcggttcrtgcctttagcccattttctaattggcttgttttttcttgttgtcgttgttgacttttgaaaactttaaacaatattctagatatgagctccttgtcagatatggtttatcaggtgtggtttgcacttttcttccagtttttaccctgtctttattaacaggctcttatgcagggcaaaagttttaaattttgataacatccaattaataaattcttagaattgattgtgcttttctggttcatgtctaataattattcatcaagtcctaggacctgaagaatttctcattaaatttcatatttttacattgagatgtgatcttttttttttttttgagatggagtcttcctccatcttcatatctgaccaccattggtatctaattggttttcttattgtctaccatccccaggtgatatctgatcact

SEQ ID NO: 850937 - DNA, 547 bp, Homo sapiens
tcttattttaatgtctctctgggcttgataatttaaaaggactggcattcctctgataaaagttattttattttctcattttccatcaatctatcctgttcagtgaaatatcggttcgtgcytttagcccattttctaattggcttgttttttcttgttgtcgttgttgacttttgaaaactttaaacaatattctagatatgagctccttgtcagatatggtttatcaggtgtggtttgcacttttcttccagtttttaccctgtctttattaacaggctcttatgcagggcaaaagttttaaattttgataacatccaattaataaattcttagaattgattgtgcttttctggttcatgtctaataattattcatcaagtcctaggacctgaagaatttctcattaaatttcatatttttacattgagatgtgatcttttttttttttttgagatggagtcttcctccatcttcatatctgaccaccattggtatctaattggttttcttattgtctaccatccccaggtgatatctgatcact

SEQ ID NO: 850938 - DNA, 421 bp, Homo sapiens
tgtccaatgtcacttttgagttcaaacacttaaaagtcagtgtccagccctcgagtgcactcttccctaacacagcaactgagactgcatgttccatacagtaaagccacaagatagtagagcctttgtcatgctgggtctctgagtgcctgcatggagcagagtgccctggccagagttggacatgtagtatgagcaagaaataaatattgttaagttattaatttcagggttgtttatactacaacatagccagtcaagcctttctcatacatgggtttggagcagtcttttcagaacttgwagctcaggaactagacatgaagaaggactgagaacaccacgatcaagttttttccctggcgttattgggacagcacatagaagtacttagagattttagaaagtggttgctattttt

SEQ ID NO: 850939 - DNA, 623 bp, Homo sapiens
  misc_feature 599, 600: n = A,T,C or G
caccaccgagcattcaattatgccctttcttctgctcagagcaggttccttctatgagtaattaattctaactaaacctccagagtccgtttgaagtaccatttcctcaaggcagccttcactgcctgcataatctagatcaaaattttgtccattttagcaatagcacaattgtaaataactgattgtgtgagttgttattagtatctgtttctcaaaaaaaaaataagttccacaaattctgggacttcatcttggtcattactgtattcctacttcccagcacagagaagtactcaatctcagtatctatatgaatggaatttacaaataaaatttataatgagtacaatttataaatgaaataaaagcgggagtacatagaatgttttcacatagattatcatatttaattctaacagaaaactctatagtaaataacaatattatcatcttacagagaagaaaaggagaaaactgagtcctctgctgtattatgagagtaagyatatgcctgtctttcttggtgagaccaatggttcactctgcacaatttctccaattttattttttaattgatccgttaatttttgtttgtnngggaccactaagataagtaatac

SEQ ID NO: 850940 - DNA, 618 bp, Homo sapiens
tatgataaaatgtttaatgacaggtgctgttggtattccaaggaagaagcaataacttatccctgaaagaagggtaggggccctttcttacaggagacctatagctttccaaaggggcatgaaacagggatgtgtgtcttaggtccttaggtctatgtcagcgaaggtctttctccccttaatagaaaagacaaaccaataacttcctaacctagtacctgatgtaagccttgatggacttaaactaattttcatcttgccatcacaacctgaagtctgtctctggccacctaaggtatttgtttgatgtgaaatccaacataaaagtgatatggcttgaaactgataatgaggctctgggattatatttctctcttttttgagtttatcaaggttgtttgcttttaatgagttctaaaaattgcatgaatagagattatattggtgaataaaaattaaggtacgttttaaacctagatataaaaggtcttaagggatagttctattaaatcagacggtttggatatattctgatacacstttctaggataattatttgtgattaagaagaatactattctttatccaaaatcagtttttttggtagttgatgtaagt

SEQ ID NO: 850941 - DNA, 438 bp, Homo sapiens
tcaacctaggattgaaagtctagctactgcaataaagcaagaaaaataaattaactccctacagattgacgaggcagaaataaagctgactctacttgcagatgacatgattttccatatagaaaatcccaaggaaactaaaaaaaaattaagttcaaaaaagagcttataagattagtatgaaacaatcatatttcatattctaacaagaaacatgtaaacaaaaatgtaaagcacaacagcacttataatcaatcaagaaactaactaaatgcctaagcatacttataaaacatataatctctggatgctaagaattacaaaatgctgaggcaagaaatcaaagatccaaataaatggaaagatatctcatrttcatggattggaagactcaaaacagtgaaacaccaattttcccttcattgagctattatgttt

SEQ ID NO: 850942 - DNA, 581 bp, Homo sapiens
agtgggcttgagaatatcacacacaatattatacgtaggctaccatagaatctgcaattattataatacccgaatgcctcctacagccyttctacctcttgaagacctttaagaatttgctttttccactgaaaattagaaagaacaacatagctgaaggcagtccttgttctattgggtcatttgttgggattgtgcttatcctgcaactttggggaagggaggcatttcaacatgaaatgaggctgcctgtaagtcagaaaaagagtgaaggaaaattgaatttagctcttgccagcattgcttgaggtatttgggtgatataaatttttttttaaaggccacaatgcttttagaattttctttgcttgtgattagtcattgttggcctctttatgcttctcccagaatcattacaatgccatgcttccccactcttttctaaggactctaaagcctggatttattttttctgacccaagaggcacaaccaaatgatgtttaagcatccgcaacccagccaatgtgtgaggccatttcctccaaaatacattctcctttcttacctgccctctctgatt

SEQ ID NO: 850943 - DNA, 514 bp, Homo sapiens
gctgtgagccgagattgcaccactgcactccagcctgggcgacacagctagactccgtctcaaaaaaaaaaaaaaaaaaaaggtgggcattttttctaggaactgagagaagtggccagggaargcatctattcaggctttacaaagaaactgtcttggagggtgttctgccatcagcaggcaggataacattggccaagactgaagatccatcaacaaatgtgactgctgtctgtggtgacacagaccccctaatcctcctgacgttctgggatggaacactttgaaaacgtggaaagcgtgtgttaccacctcccagtgggactttatcacacatgggggaagtttcatacttaatccattccatgggactctcactttttcaaagcagaacagtgagatgcctggcttccagcattttgttcagacagttagcccttccgtacacccagaacacattttccataataaactgtggcttttttccttggattgcttcctttctgattctggc

SEQ ID NO: 850944 - DNA, 584 bp, Homo sapiens
ttttccataataaactgtggcttttttccttggattgcttcctttctgattctggctgtgaaaccctrggaggatgcccacgaaatgctttcttgggtcctgtgcctttgcgttgctttgactggattgcatctgatttcattaagaccatctatgatgctgcgtgtgcagccaatgccctatgctaagtgctgcttttagaaatacagtgggatatgaggaaaatgtagatgcagtgctgtttcatccctggcaggtaatgatttccgctagggcattgtcggccctggagcccatcgattcttgaaacatatagtcataaatgagattttctcaaaacctgcataataacgcaggcaaaacacattgaaattttacattctgaatataaattctgaaaatgaatatgtctacttgcttttacaatgagaaaccatatatagtccggagagttttcagttttgatatctgtgtgtgtgtgtgtgtgtgtgtgtgtatgtgtgtgtgtaaatgatcatcacatagatatctctggctagaagaaactttgtcatatttgttctaagattaaatgtttgtcccat

SEQ ID NO: 850945 - DNA, 584 bp, Homo sapiens
ttttccataataaactgtggcttttttccttggattgcttcctttctgattctggctgtgaaaccctgggaggatgcccacgaaatgctttcttgggtcctgtgcctttgcgttgctttgactggattgcatctgatttcattaagaccatctatgatgctgcgtgtgcagccaatgccctatgctaagtgctgcttttagaaatacagtgggatatgaggaaaatgtagatgcagtgctgtttcatccctggcaggtaatgatttccgctagggcattgtcggccctggagcccatcgattcttgaaacatatagtcataaatgagattttctcaaaacctgcataataacgcaggcaaaacacattgaaattttacattctgaatataaattctgaaaatgaatatgtctacttgcttttacaatgagaaaccatatatagtccggagagttttcagttttgatatstgtgtgtgtgtgtgtgtgtgtgtgtgtatgtgtgtgtgtaaatgatcatcacatagatatctctggctagaagaaactttgtcatatttgttctaagattaaatgtttgtcccat

SEQ ID NO: 850946 - DNA, 593 bp, Homo sapiens
tctcgatcaggatcctgaccttgtgatctgcccgcctcggcctcccaaagtgctgggattacaggcgtgagccaccrcgcccggcctcaactagttctttatagcggtgtgaaaatggactaatacatattgtttattttaactttgtatttctccttcagctgatgtataagttctaagttataggttttgtgtttaaattttttatttcttcttgatccattatttatacgtatatttaaaatgtaaaaaaattaggattttgattttgttgattgattactaatttaattgtattgtagacaagagtcttgctctttagccagtgaatgctcaattttaatgaactgtccatgtgtacttgtgaaaaatgagtagtcactgacttggaggttcagagttctgtgcatgtttattatatcagtcttattcattatgttccttaaattacttgtattcttctttacattatgtctaattaaactctttattcatgagggagatacattgatatctaccatcatggatagatttgtcaaatttgtcaatttctccttgttattccactgcacagtttgtgtttgaattggact

SEQ ID NO: 850947 - DNA, 593 bp, Homo sapiens
tctcgatcaggatcctgaccttgtgatctgcccgcctcggcctcccaaagtgctgggattacaggcgtgagccaccacgcccrgcctcaactagttctttatagcggtgtgaaaatggactaatacatattgtttattttaactttgtatttctccttcagctgatgtataagttctaagttataggttttgtgtttaaattttttatttcttcttgatccattatttatacgtatatttaaaatgtaaaaaaattaggattttgattttgttgattgattactaatttaattgtattgtagacaagagtcttgctctttagccagtgaatgctcaattttaatgaactgtccatgtgtacttgtgaaaaatgagtagtcactgacttggaggttcagagttctgtgcatgtttattatatcagtcttattcattatgttccttaaattacttgtattcttctttacattatgtctaattaaactctttattcatgagggagatacattgatatctaccatcatggatagatttgtcaaatttgtcaatttctccttgttattccactgcacagtttgtgtttgaattggact

SEQ ID NO: 850948 - DNA, 593 bp, Homo sapiens
tctcgatcaggatcctgaccttgtgatctgcccgcctcggcctcccaaagtgctgggattacaggcgtgagccaccacgcccggcctcaactagttctttatagcggtgtgaaaatggactaatacatattgtttattttaactttgtatttctccttcagctgatgtataagttctaagttataggttttgtgtttaaattttttatttcttcttgatccattatttatacgtatatttaaaatgtaaaaaaattaggattttgattttgttgattgattactaatttaattgtattgtagacaagagtcttgctctttagccagtgaatgctcaattttaatgaactgtccatgtgtacttgtgaaaaatgagtagtcactgacttggaggttcagagttctgtgcatgtttattatatcagtcttattcattatgttccttaaattacttgtattcttctttacattatgtctaattaaactctttattcatgagggagatacattgatatctaccatcatggatagatttgtcaawtttgtcaatttctccttgttattccactgcacagtttgtgtttgaattggact

SEQ ID NO: 850949 - DNA, 529 bp, Homo sapiens
atccttatatcctgttgagttcaattcatgaaataaaaagtaaccagtatartttagccatttttattctactttatatgtaacttgatatttatcacatatattatttctttgtatttttatatgatctgtctaaaatgtacaaaaaatttccatgttactaatttttcagatattactgttaagtggtagcatgctgccatgacatagctgaatttccacactgccctaactctgcttatctttaaaaaacatgacacttgctctaggaagttccctttgtaaccagacccactgacacttgttagaaccaggatagctaaagcctcaggcttcattataatctcatttccatgctaaatggcactcctggccaggcatggttgtacatccctgtaatccgagccctttgggaggccaatgtaggaggattgcttgagcacaagaatttgagaccagcctggtcaacagaataagacctggtctccacaaaaaaaaaaaaaaaaaaaaaaaaattttaaattaccca

SEQ ID NO: 850950 - DNA, 529 bp, Homo sapiens
atccttatatcctgttgagttcaattcatgaaataaaaagtaaccagtatagtttagccatttttattctactttatatgtaacttgatatttatcacatatattatttctttgtatttttatatgatctgtctaaaatgtacaaaaaatttccatgttactaatttttcagatattactgttaagtggtagcatgctgccatgacatagctgaatttccacactgccctaactctgcttatctttaaaaaacatgacacttgctctaggaagttccctttgtaaccagacccactgacacttgttagaaccaggatagctaaagcctcaggcttcattataatctcatttccatgctaaatggcactcctggccaggcatggttgtacatccctgtaatccragccctttgggaggccaatgtaggaggattgcttgagcacaagaatttgagaccagcctggtcaacagaataagacctggtctccacaaaaaaaaaaaaaaaaaaaaaaaaattttaaattaccca

SEQ ID NO: 850951 - DNA, 670 bp, Homo sapiens
gtggatcacttaggcccgggagttcaaggctgcagcgagccatgattgcaccactgcactaaagcctgggcaacagagcaaggccccatctcttaaaatagaaaagaaatcctagcactttggaaggccgaggcgggcagattgcctgagttcaggagttcgagaccagcctgggtaacacagtgaaaccacatctctactaaaaatacaaaaaatatagccaggcgtggcagcgtgcgcctgtagtcccagctatttgggaggctgaggcaggagaattgcttgaacccgggaagcggaggttgcagtgagcccaggtcgtgccactgcactccaaccttggtgacagagtgagactccatcgccaagaaaaaaaggaaagaaaagaaaaaaagacacttccactggtgtcatgacacttgacaatcatcatgacgctgaccagaagtcataaaagttcaaaaaggaaggtggcactaggagttctgtgaagttgctgctcattcctggaaaatgcatgaatattcttccccttgcttttaatgtccaatcccttcattagagaaaccctgtattttattttaacctcctcacctctcattagtcgagaagtgatttgtgagccatgcttctscttctcaagtccacggccatcaagtaaagcttgcac

SEQ ID NO: 850952 - DNA, 607 bp, Homo sapiens
aaatgtatcatgcattacttttgctaacctgtcttttgttataggagtgtcrcctgtgacctttatgatgggtaaggaaagatttcacatcttttctacccctacattatcatactgtgaaattttattatatgctgtcttgccctcatagaaagagaattttggagtttgaaagaatcctgctaatcatgaaatctggtcctttatttaacagaaaaattcccagagacatgaaatgattagtactgtttcacagagaagcagagggagagccagaccctcagtcagtccaggctctgctgtctttggaggtggggtttcaggtctccccagcagggttgtgaggtcccagagaacgggaggcaggccttgggccatagtctcctgcatccctccagagcctgcagcaggagctgggcccaaggatgctgctgagtgagtccacatgactgacatacactgctctggaagcaccattccggcagactagccctcttcttcccatataatccaggaaggttgttatagatagtccagatttttctagataatcttgtaacatattcacattcaacatacatacaaaaattcacacttggtatgggta

SEQ ID NO: 850953 - DNA, 628 bp, Homo sapiens
atctgaagagatgtccaatcaccttttcacgtggctgcccattcttcattgaacctaagcattaaaatagacagtttcccctgggtctttgggtcttcatttctgaagactccatgtcatgtaaaactttgattaaataaatgtatcatgcattacttttgctaacctgtcttttgttataggagtgtcgcctgtgacctttatgatgggtaaggaaagatttcacatcttttctacccctacattatcatactgtgaaattttattatatgctgtcttgccctcatagaaagagaattttggagtttgaaagaatcctgctaatcatgaaatctggtcctttatttaacagaaaaattcccagagacatgaaatgattagtactgtttcacagagaagcagagggagagccagaccctcagtcagtccaggctctgctgtctttggaggtggggtttcaggtctccccagcagggttgtgaggtcccagagaacgggaggcaggccttgggccatagtctcctgcatccctccagagcctgcagcaggagctgggcccaaggatgctgctgagtgagtccacatsactgacatacactgctctggaagcaccattccggcagactag

SEQ ID NO: 850954 - DNA, 607 bp, Homo sapiens
aaatgtatcatgcattacttttgctaacctgtcttttgttataggagtgtcgcctgtgacctttatgatgggtaaggaaagatttcacatcttttctacccctacattatcatactgtgaaattttattatatgctgtcttgccctcatagaaagagaattttggagtttgaaagaatcctgctaatcatgaaatctggtcctttatttaacagaaaaattcccagagacatgaaatgattagtactgtttcacagagaagcagagggagagccagaccctcagtcagtccaggctctgctgtctttggaggtggggtttcaggtctccccagcagggttgtgaggtcccagagaacgggaggcaggccttgggccatagtctcctgcatccctccagagcctgcagcaggagctgggcccaaggatgctgctgagtgagtccacatgactgacatacactgctctggaagcaccattccggcagactagccctcttcttcccatrtaatccaggaaggttgttatagatagtccagatttttctagataatcttgtaacatattcacattcaacatacatacaaaaattcacacttggtatgggta

SEQ ID NO: 850955 - DNA, 581 bp, Homo sapiens
tttttgtattcctatgaaatgtcatagatatgaaatactacattctagggaatattttaaaacaaaatatgacagcttttctagcattaactattaatggctataaaaaaattagcattatctttgtgcttggctgctcagctttgtgttgagataaactacatgttaggtaggaatgacagccaacttacaattaacatttttcatatatatttgctcaagggtatattttaccaaaaattgtaatgcttttaatgtaggtttcaattttcttccaaaatgaactaaaaggattttttttctggtaatcagaaaaagagaatgtgataagtttcatttatattgagtaataaattatagtaggcaggtgtttgcttgctatctgtccttcactgacacattagtcaattgattcatgcatagtaaattatcagttaatgtattctggcccacaacatactcaaaatgctttagactgtgaagwttctttctatataaccctaaaaagccctagtttaggagaaaaggtacatgcctttggcatggcattatattcataaagagatgtgattttttaaaaa

SEQ ID NO: 850956 - DNA, 618 bp, Homo sapiens
tttaacaggaaataaataacagaaayagtttaccacaagtaataccctatagtgacatttgttgttgtacagtctctattatctcttagaaccaaaaataaccagatattgtgacctaaaatctaatctttcaagatgcttcaataaaagaattagcaatggtcaagtaaatgtagtaactgctgcatttctacattatttttggagattttaaatgtttaccaggttaagggttcaaagaagacttctgtttcaaattagcgtttaccagatgtaattgactgtggacacgtttttacataaaatttattagcacacacatggtagaattagttcagaagaaaagcacatctgtcagtaaatgttcagtacaagcaggccaaatatgaaatatctcattttatatccaaacctctagaatcagttaaaatctggaacttgctcatttagttgctttaataacctttctaaagatctacatttttttttagaattgcatctatcacctggtgacttttgaaatcattttatacattttatattttaaaaatatgagaccatttattgtttttacctacagaccatgacattcaatgttgcctatggctgatcacccac

SEQ ID NO: 850957 - DNA, 517 bp, Homo sapiens
atttcccactgaagtgtctgtaaagactgtaagaggtgcctacttcttcaaatatgaatacaccaaggcaaagccacaaggaacataaataatcmgggaaacatgacatcacaaaaagaatgtaatacccataaccaatctaaagaaatggagatctatgaacttcctgaagaagaattcaaactaattggcttgaagaagctcaatgaactacacaagaagacacagccaaccaaacaaaatcaggaaaacaatgtgtgaataaaatgaaaagtttgacagagagaaaacataaaaaataaccaaacagaaattctgaaactgaagaacataatgactgaactgaaaaatttcagagatcttcaacagcaaacttgataaagcagcagaaagaggcagtgacctcaaacactgcttatttgaaattaaccagtcagaggaacaaaagaaaaaaagaatgaaaagagtgaagaagaccgacaggatttatgggccaccatcaagcaaacctaatatg

SEQ ID NO: 850958 - DNA, 517 bp, Homo sapiens
atttcccactgaagtgtctgtaaagactgtaagaggtgcctacttcttcaaatatgaatacaccaaggcaaagccacaaggaacataaataatccgggaaacatgacatcacaaaaakaatgtaatacccataaccaatctaaagaaatggagatctatgaacttcctgaagaagaattcaaactaattggcttgaagaagctcaatgaactacacaagaagacacagccaaccaaacaaaatcaggaaaacaatgtgtgaataaaatgaaaagtttgacagagagaaaacataaaaaataaccaaacagaaattctgaaactgaagaacataatgactgaactgaaaaatttcagagatcttcaacagcaaacttgataaagcagcagaaagaggcagtgacctcaaacactgcttatttgaaattaaccagtcagaggaacaaaagaaaaaaagaatgaaaagagtgaagaagaccgacaggatttatgggccaccatcaagcaaacctaatatg

SEQ ID NO: 850959 - DNA, 531 bp, Homo sapiens
agtaataaccactatatctgattttattttttatcttacactatttatttcacattatttctttttttccttttattttgctgstttaatcagtttccttcttatttcctgctttcccttttgtgagtttgagagctcaacttccctagccctcacaatcaaaatcatgccttcacactgttatatgaaaacaagatcctctttttccaactttcccccattcccaacagtgagatgagcgattgcatgtgttttttcttacccacccttcctccacaacaccgcgggggttccccacaacagttcttccctaaatgagaggcttgggaaatttttctttttcttctctcacttttccctttttctcttctttggtttactcaagaacatttagatccgaccaagatgacaatttctcttacatttctatttttctatgatgtttccagttcaaggatctttacataatttattttttccaagaaagaactttgacatgatggacaaagattctccctatgaccagatgtt

SEQ ID NO: 850960 - DNA, 531 bp, Homo sapiens
agtaataaccactatatctgattttattttttatcttacactatttatttcacattatttctttttttccttttattttgctggtttaatcagtttccttcttatttcctgctttcccttttrtgagtttgagagctcaacttccctagccctcacaatcaaaatcatgccttcacactgttatatgaaaacaagatcctctttttccaactttcccccattcccaacagtgagatgagcgattgcatgtgttttttcttacccacccttcctccacaacaccgcgggggttccccacaacagttcttccctaaatgagaggcttgggaaatttttctttttcttctctcacttttccctttttctcttctttggtttactcaagaacatttagatccgaccaagatgacaatttctcttacatttctatttttctatgatgtttccagttcaaggatctttacataatttattttttccaagaaagaactttgacatgatggacaaagattctccctatgaccagatgtt

SEQ ID NO: 850961 - DNA, 579 bp, Homo sapiens
tatgcatgattgccaagtgagaggttaagtgtggaggtatttttccaggaacgcccttgcacatctcacaggtagcacttagtcatgattatatgtacactcaggcaagagtacagtttgcaccttgattgtcactcactgtgaaattattattcaagtaagacaaggagcttctttcagcatgatgaatgcttccagagtttgtgacatgacacttatttgggaaaaagctctttctcctacttacctaaaacctttcccaatatgagagatttgacggcgttgaattctgtccctgaggacaagatgacttgtttctttgtgctctggttaacctattagatgtcccatgagaagcaaacatcaacagaaagtacaattttaatgataaggaagcaaaggaagatgaggaaaggaaagatgaaaataaatcacttttaagtaccaytacaaaagctcaagaagccaccttcaaataattaatcatttagaaagagaagctattttataagcaattcctatgatgccatcagctaccactctatccacgatgtacccacttgctggctttactcttct

SEQ ID NO: 850962 - DNA, 287 bp, Homo sapiens
ttgacagaattgcattgctaaacaaacaaaacaaagcaatacagaataaacaaccacctcctctctcccagatcctggccatatttggcttcttcttgacttatggaagagcagcactgaatgggttgctcttctattaatattatcaaattttttcattagattatttgttcttaaaataataatattagttagtttgacttytgcatttgtgggattacctctaccatgaccacagcttcttctctgttaatcttcacttggtgaagttgcccatcagccatgtt

SEQ ID NO: 850963 - DNA, 641 bp, Homo sapiens
catcagcaggggcaggctgcatcttctgaggaagctgatcaacttgaagagacgctcctttaacatttctctctgccctcacgtgrtgccactgattgtcattaaagggagtgggtgactgcaccgtgacctcacaaggtccattccccacatcgaaggaaaaggtcacttctgtgggagctagaaatattagatatgaatattgctcaagcaaattcacagaaaattgagtcttgtgcagacacaggaaaacatgaaggcacgctcaggatggaaggagataatgacggcgatgcagaaaaacgggactgtgagttggggtgggggcagaataaatctgtatcctggaggaaaacagaacggattttaacatatttatcctcagagttcacaattcaaccttgttaagtcctaaatagtagagatatgtacccatagctggactacccatagctatgtacctatagctagaataccaaatagtatttgtttttgaggtttcagtaattttatttacaaacggctcaaagtctcatctaattctataaacactgaatgtaaattttgacagtcataaattaagctttgggtacataaaaaacaatatgtctggtcaaatatttttggaattcagtaaacaa

SEQ ID NO: 850964 - DNA, 585 bp, Homo sapiens
agaggtaacagataaatcggaaatatctggaaatggagaacacagctgataacaaattactgacattgggagaagcttagaataatcatattgaatgcataggagaaggacaaagagattaaagccattggaagaaacagaaaaaatgtatggggggcaaaggaaacaagtcaacagtcccagatgcagagaatccaacaaatgaaacaaagtattcaaagcataataaaaaccattttttcttaaaagagaacagaatatttcggtcaaaataagcatatttcattttagaaaaaattaacagaataattaatgccaaggcatattctggataagtttttgaaattgaaggataacatatctgtcaagagctgtgaggagtctgagatttcaccctacttgcaagctaacaatttagcttgccacagattaatggatgctgatagaaaacacaaaatttccgggtcagagttaaagaactttaytgctcacagcacagcatgcagcatgagtgtcagaatatttgcattggttccccctatctccaaatttcacagggcaacacaatccatcagcccaggtgga

SEQ ID NO: 850965 - DNA, 464 bp, Homo sapiens
ctaacctgaccaaaaaagagaaaacagactgaatataaaaagaactgagccatagggtcctatcagacaatatcatccgaatctcaaaaagagagaasaaagtgtgctgaaagagtactgaaaaaatactggctgtaaacttcccacatgtggtgaaagacacaaacccagagatttaggaagtaaagtttaagtccaaaaaaggataaacccaaaaatatcgacaccaagatccatcataattgaactttttggaaacaaaacaaaacagaaatcttgaaagcagcctgagagaataacacattacctgcctgtaaaagaaccctaatttgaatgatagtagattactcatctgaaattacagaaccagaaggaatggcatatttttttcagggctgatagaaaagaattgtcaactataaattatatatccagagaaactatccttcaagaataaaatggaa

SEQ ID NO: 850966 - DNA, 371 bp, Homo sapiens
agttccagaccagcttaggcaacatgacgaaaccccatctctacaaaagtgcaaaaattagccaggcgtcatggcatgcgcctgtcccagctaatcaggaggctgaggcacagaaggatcgcttgagccttggaagtggaagttacaatgagctgagatcacaccactgcactgcagcttgggtggcaagccagactgtcaaaaaataaaaataaaaataaaaaacagaaagagaaaaagaaatcagagtgctcatactttgaagtattcattttgcaggtggggaaaagagatgttaatscactaagtaagaagttaataggtaatatttttcctttctgtctttctgagaaggcttgcataaataaaaa

SEQ ID NO: 850967 - DNA, 589 bp, Homo sapiens
acaacaatgagataccacctcatatctgttaggatggccagtataagagaaaataaatggctgggtgtggtgcctcatgcctgtaatcccagtactttgggaagcgcaggtrggtagattacctgaggtcaggagttcaagacaagcctggccaacacggtgaaacctcatctctactaaaaatgcaaaaaaattagctgggcacggtggtgggcgcctattatcccagctactcgggaggctgaggcagggaatcatttgaacccaggaggcagaggttgcaatgagccgagttcaagccactgcactccagcctgggcaacacgagcgacactccctctcaacaacaacaacaacaacaaaaataaaaacaaaaataaataaacccaaaagataacaagagttggcaaggatgtcgagaaaaagaaacacttgtacatgttgatgggaatgtaaattagtgcagtcactctggaaaacagtatgagggatcctccaaaaattaaaaatagaacttctatatgatccagtcccacttctgaatatgtatcctgtgaaccccaaatatctgagacaggtctcagtcaat

SEQ ID NO: 850968 - DNA, 610 bp, Homo sapiens
ttgagttctgtctgtccttcacccacaaggaatttccttgtgggcaaattgtgagggaggtatgtagcagttttatctttgtagctatcttatttaggaatggaatgagaggcaggtttgcccaatgaagttcccagcttaacttttccctttggcttggtgatttttcagtcccaaggtttactctcctttcacaatccaaaaaaactaaaaccagcatctcaaaaagtttctacactcccattttcattgaagcatcattcacattaaccttaaatgtccttaaatgtccattgatagataaatggacaaagaaaatgtagcatatacaaacaatggaatgttattcagcctttaaaaagaaggaaattctgccatttgaaacaacatggtgaatgtggaggatattatgctacataaaataagccagatacagaaggacaaatatgaggaattatttgacaattatatgaagaattttaaatattggaactcttrgaagcagagagtagaaaggtggcttccagcggaaggggaagagggaaatggggaggtagtagtcaaagggtacagggcttcagttatgcaaggtaaataagatctggagatc

SEQ ID NO: 850969 - DNA, 610 bp, Homo sapiens
aagaatcagagaacctgcagatgagtcaattgagattgtccattctgagaaacagaaagaaaataaaataaaagtagagactcagaaaaatgtgggacattgtcaagcatatataccaacayactcataaaagataaatggtggtggggtggaggcacagggagagaagagacagaaataacattttaagtaatatgaaaaatatttatctacattgaaaaagcccaacaactctaggaagaaaaaactcagagatccacaccatggaaagacaaagagaaaatcttgaaagcactaagagagaggtgacaattcacatacatatgaccctcaataacgttaacagatgatcagatgatttatcattagaagccatggagatcagaaggaagtagaattacatatttaaagtgctgaaagaaaaataataccaaccaagaattttatgtctagcaaaatcatccttcaaaaatgaaagagaaattaaaatgtacccagataaacaaagactaagcaaatttgttagtagcaaacctcccttcctgaaataacaaacagagtccttcaagttgacatgaaggtctactaaataataatttgattccacatg

SEQ ID NO: 850970 - DNA, 532 bp, Homo sapiens
acattgtcaagcatatataccaacatactcataaaagataaatggwggtggggtggaggcacagggagagaagagacagaaataacattttaagtaatatgaaaaatatttatctacattgaaaaagcccaacaactctaggaagaaaaaactcagagatccacaccatggaaagacaaagagaaaatcttgaaagcactaagagagaggtgacaattcacatacatatgaccctcaataacgttaacagatgatcagatgatttatcattagaagccatggagatcagaaggaagtagaattacatatttaaagtgctgaaagaaaaataataccaaccaagaattttatgtctagcaaaatcatccttcaaaaatgaaagagaaattaaaatgtacccagataaacaaagactaagcaaatttgttagtagcaaacctcccttcctgaaataacaaacagagtccttcaagttgacatgaaggtctactaaataataatttgattccacatgaagatataaggtatacat

SEQ ID NO: 850971 - DNA, 511 bp, Homo sapiens
aatgaaagcacttatatgtctttggtcctgtctcacttttcaaaacaagtgctaatcactctcattctggaatctgaatgtcaaattcaatcatatcaagatttacccttgtattagtccatttttgcattactataaagaactacctgagactgggtaatttattttaaaaaacaaacattttaattggctcatgattccacagcctgtataggaagtgtggctatgaagccgtaaggaaattggcaatcatggcaaaaggtaaagaggaagcaggcacatcttacatggtcagagaaggaggaagagagagaggggtgaggtactacatacttttgaaaaagcagatcttgtgagaactcactattacaagaaaaaggagaaaatccacccccatgatccaatcacatcccaccaggttcytcatctaacattggggattataatttgacacaagatttgggcaagaacacagaccaaaaccacatcattctgcccctggcctcttcca

SEQ ID NO: 850972 - DNA, 557 bp, Homo sapiens
acttttgtggatgaataacatggattgatttaagaaactgactttacatgctcttagtttattgtacttgatgtaagctgttgaaagttgcttaagggagactgaaatttcagttcaaagttttcccatcacaaatttatgttatctaacttaaagagagtacactgttcccagaacactgtgactattttatttcagtattttaaaacactagaggtttaatagagggaaataaatacataaataattccagttaatactaggtcttttattttttggcttctagccgtaaacagaattctatacatttgtctggaaaatgctagttaacagaaggttctctctgtccttaaaaattgtgaaggaagacactttaagtaagggcagataaattaatagaggtcattagctttgtcatatttgaattagctatgattggtgtttcytgatataacataatcagtaagaactcatatgagtttagattacaggcaatgataatatttaataatatacccaggtaaatagacataaaggaattcaagtttttacctgca

SEQ ID NO: 850973 - DNA, 657 bp, Homo sapiens
atcaaatcctgacctccctgatggcttgcaggcaatgatttttaaaggcagaggtaaatttcaggaaagcagaagctacaggcaaaatcataaatcaatatatkcaagttacacattggtttaagcttaaaagggcaggatatgttgaggtgggggtaggggggcttgcaagtggtaggtagattcaaagattttctgatttgcaattgttaaggaagagaggctttgtttaaaaatttggggtcgtagaaaaatgttaactggctagggggagtgactttctccaagcaccccaggaagaagtttagaacaaaggaccatatagttgagtcttcacttcctccttagctggaggctgatccattcagctgatctgagtgccggctgatcctttcagtggtttctcagtggggtctgaagctcagaaagaaactcaaggacatatattaagacgttatgtttagtttctataaagcaaacatctcttgaactttaacttccttggttattgttttaggctactattaccttcttgtttaagttacttatttatttctggggctagctaggtgcctagaatttctcttgaaggaacttcagaattttctattatttccatgtctggggagcacaggcctctaaaaagaggatccttgc

SEQ ID NO: 850974 - DNA, 542 bp, Homo sapiens
agattcctggatctgtggtttggtgtctgtcagttaattttggaaaattcttagctattattacttcaaatatttcttctgctcttttctttcttcttctgttatgcctaattacaccttttgtaattgttccacaagtcttggatattctgttatgattttttgttttcatttttcttcctttgcatttcagtttggggaatttctattcacatatactcacattcactgattttattttcctcagccatgtccagtcaactgataagcccatcaaatgaattattcatttttgtttgtgtttttgatatctagcatttccttttgattctttcttagagtttccatctgtgcttacattacccatctgttcttgcatgttgcctactttttctgtaagagtctttaacataattatagttactttacatttcctatctgataattccaaaatctatgtcatatcttagtctaggtcttatrgtagctttgtctatttggactatattttttcttgccttttagcattctttatagccctt

SEQ ID NO: 850975 - DNA, 623 bp, Homo sapiens
aaatctttttttctgagcagctctcaacagtgggcttaaaatactcagtaaatgatgctgtaaacagatgtgctgtcatccagacacattgttgttccattgatagagcacaggcagagtcaacttagcataatatttaagggccctaggatttctagaatggtaaatgagcactggcttcaacttaaagttactggctgtattagcccctaacaaaagaatcaccttgtcctttgaaactttgaaaccacgtattgacttctcctctctagctatgaaattcctagatggcatcctcttccaatagaaggctgttttgtctacactgaaaatctgctgtttagtgcagccaccttcataaattatcttagctatatcttctagataacttattgcagcttctacacaagcacctgctgcttcaccatgcacttttacattaggctccttctcatgaagcaacctctgctagcttcaaacttttctcctgcagcttccttacctctaagacttgayagaattgaagagagttagggccttgttctggattaggctttggcgtaagggaaagttatggctggttggtctgatcttccatccagacccctaaaactttctctttt

SEQ ID NO: 850976 - DNA, 615 bp, Homo sapiens
gattccctctcttaaaatggtaagtatggaatcatctttggcaaatcatctctttagtaactggactctgttctgttgactgcattatcctcagtaccaggcctagtgtacttattcaagaaatagtttttgctgaagcaatttatcatactttctctttatactagaaggcattcatgggtgaccaagctattttgtttccatcatggccatatttgttaggattataacagacaatggctaatatttccactctactcttactaagtgtcaataatgattatagaatgtattgccaaacccactggatatctaattcctttaaggtatatacggcactgggaattcaaatgcaagcacaacataattttcagcctttgcgtagcactatattaaactatattatgacctcatgtctaaattgccctctacattttataatataaattaaccagcctggtgtcataatatcgagccaaatgtccaaactcaaactctccctgattcacacagcttacagcaatcagacaacaaattacactacattttgtgggtagtayccctgtgatccccaagtcatcaatcttctaactttcctgccgttgtttaataagg

SEQ ID NO: 850977 - DNA, 322 bp, Homo sapiens
gaggaacttttgtgattgtcaaggggaagctcagctattgcatactgcagggccaatgtcactgctaatgccaacgacaggctctctagtggttagattgaggtcctracttaattcctcagagatcccacatcttatcagaagtgagctgaccacacaggacaagagcagatgtaactgcagcatatcacaacacagcatcccttggctcccggggatcctgtctgtacacatatctgaatagctctgttttgctacaccactgccttttatcttcctggtcatacttacaccgcaatgccaggagaacttacacttacaa

SEQ ID NO: 850978 - DNA, 673 bp, Homo sapiens
cacaacaaagaattatcgggccccaagtgtcaatcaatagtgccagttaagaaaccctgatctaggtarttgttatctatatataagccttatttccaattatgctgtaaacttattgaagtagaaaccatttatttttctatagatttttctttctttttaaaaacatagtgtaggctgggtgcagtggttcacgcctgtaatcccagcactttgggagaccaaagcaggaagattggttgagccctagagtccgagacctgcctgggcaacataaggagaccccatctctacaaaaactgaaaacattagctaggcatggtggcatgtagtcccagctactcaggaggctgaggtcgggggattgattgagcctgggaggtcaaggctgcagtgaggcatgtttctaccactgcactccatccagcctgggtgacaaagtgagaccctgtctcaaaaaacatggtgtagtgggttgaatggtggccctcctccacaaaagatatgtccacattaaatccctggaacatgtgaatgttaccatattttgagaaagggtctttgtagatgtaattaagttaagggtcttaaaaatgaagatatcatcctggattatttagacaggcaccaaattgaatgatagacaataaatagaaggacaataaatgatcct

SEQ ID NO: 850979 - DNA, 512 bp, Homo sapiens
aggagctggtaccattccttctgaaactattccaatgaatagaaaaagaaggaatcctccctaactcattttatgaggccagcatcttcctgataccaaagcctggcagagacacaacaaaaaaagagaattttagaccaatatccctgatgaacatcaatgtaaaaatcctcaataaaatactggcaaaccgaatccagcaacacatcaaaaagcttatccaccatgatcaacatgtgcaaatcaataaatgtaatccagcatataaacagtatatgcatataaacatataaacatgtgcaaatcaataaatgtaatccagcatataaacagaaccaaagacaaaaaccacatgattatctcaatagatgcagaaaaggcctttgacaaaattcaacagyccttcatgctaaaagctctcaataaattaggtattgatgcgacatatctcaaaataataacagctatctatgacaaacccacagccaatatcatactgaatgggcaaaaac

SEQ ID NO: 850980 - DNA, 592 bp, Homo sapiens
gcattcacgggagagcttaattacatggtttcaggtctaaaacgaccctctgtttgtattaatgccactttctcgttccaaacagaacagcatgtggtcccagcycgtgtgtgacactggccgacggtgtgggcagacacagggaaataagagaacaaggtcgccctggcctcgccctcttctttagccaaaacaatggtggggtcgggggccacagacagagagtgaccaggcccagggctcctttgtggtggaagccagtggctgggagcccacctggagagtgtggagtgggtgtgggagggagagacaggtgggcgaggtgtggacactcaacataggaaagtatttggagacagtcacagttacacactcaacatctgctggcacctacccaagcccagagctcccagagccccgcgggcccccgaggcactcccagtcaagcatgggagacaggccagcacacaggtgatccgtggtcgtgataaatggtcacaaggggccgtgggcacccagaaaatgagctcctactcggccttggaggtgagcagggaaggtgtcctcgggtgaccctggatgaacagtaaag

SEQ ID NO: 850981 - DNA, 592 bp, Homo sapiens
gcattcacgggagagcttaattacatggtttcaggtctaaaacgaccctctgtttgtattaatgccactttctcgttccaaacagaacagcatgtggtcccagctcgtgtgtgacactggccgacggtgtgggcagacacagggaaataagagaacaaggtcgccctggcctcgccctcttctttagccaaaacaatggtggggtcgggggccacagacagagagtgaccaggcccagggctcctttgtggtggaagccagtggctgggagcccacctggagagtgtggagtgggtgtgggagggagagacaggtgggcgaggtgtggacactcaacataggaaagtatttggagacagtcacagttacacactcaacatctgctggcacctacccaagcccagagctcccagagccccgcgggcccccgaggcactcccagtcaagcatgggagacaggccagcacacaggtgatccgtggtcgtgataaatggtcacaaggggccgtgggcacccagaaaatgagctcctactcggccttggargtgagcagggaaggtgtcctcgggtgaccctggatgaacagtaaag

SEQ ID NO: 850982 - DNA, 665 bp, Homo sapiens
gagcaggtggtacaggaaaaatctttcctgtttttcccagaattggcaataagcatcgcaacttagaaaaaaaggttgctacrgacaaccttagtttggagaccagcccctgtgagctagtggtgctggggcctgtttccccatcctatggacagaccgctggtgggtacatgtcagaagtttatgggtacccgctaaaataatggcaatacagtaagcaacttccaaaccaacagaggaaaataagggcataagaaaaattttatcattcagttggaagatactaaggagagagaacaacataagcaaagaaaaatactggtaaataggaaacatgggtaacagtaagtgtaaatattagtaaccacataatagaaatagattatgctccactgttttaaaaaacagatattctcaaattagacttactttagcttacttagatatactttaccagcctatctaaaatatgaaaatacaaaataatggaaaataaagaggtcagaaaagacatatcaggaaaacaccaggaaaacaaaacttccatagcaattttagtttctggcaaaacaggaattaaaacaaagtattattaggaattaagaaaaaacaacaattaaccttgaagattcagcaatcctgaacatgtacatacataacaaaaa

SEQ ID NO: 850983 - DNA, 284 bp, Homo sapiens; identical to SEQ ID NO: 815017

SEQ ID NO: 850984 - DNA, 613 bp, Homo sapiens
acatttacttgtggtgttcctttagattccttttatctagaactgttccyctgccattttttcatctataaatttatgttggtgaagaatccatactagttgttctgcagaattcctccttttggacttatattatttcccctttattagattatggtgaagtttttttcttttttcttttttgcaaggacaccgtataggtgatcttgtaccctgctccatcatgatcaagaggctcatgatgtcagtgtgtcccatttttggtggctttgagtgtcatacaatgttttaggcagtatctgacagatttcttcatttaatttttttataattaaagaagaatttgttggatgatagatggctttgctttcaaatatgacaacatggttaatagataaaaaagactattatattttatttatgactttcactgaaagtaagacagtaaagaaatctaaagcatgcctccaagcataaaagtgagctgatgaaggaaaaagaagagcagatacactgcagaaaacaggttggaaaatacagtgattagagtaatatgaaaatatgtttattatatattaaaatatagatttgaatgattttaagactgattaca

SEQ ID NO: 850985 - DNA, 551 bp, Homo sapiens
cctgagagagaacttacccatgagttgctggaagctctacatttcaaatctcacttctgatgccatctgttaaaagaaaaacttaagacaaattgaattaaacagagtttgagtaaagaatggcttgtgaatcgggcagcatccagcaccagaatggttcagagtgactttgcttagcctcctttttaaacaggactgtagataggaagacatattacttatatgatgatatagtctgttttttttaaattaacctaatcccatatctcagtccttttttctgttaaattgtcttcaaactttttgtgaacagcataatactccaaattttgagggatctgacaatttattttcatttctctcaacagacacttactctgttttgttctattattggttctttggagttttattagattgatgcaaaagtaattgcaatttttgccattcaaagtaatggccaaaaccacaattacttttgtgccaacctatgctrttaaaaatgatgctgaaaatttatacataaagcttttctatgctttccttaggat

SEQ ID NO: 850986 - DNA, 284 bp, Homo sapiens
gctttttggcgatatcttgtgcaaatttgaatccagccatacctgaacaaggtactcatggtgttagtggtggaagttattcactttacctgtggtgaatckgtataggtctgcagctacctcagttcttgcctcctcagaaaaaagaattctactgaggggcataaggtagaaaaagagactgggccaggtgtggtggcttacatctgtaatcccagcactttgggagtccaaggcgggtggatcacaaggtcaaaagattgagaccatcctggccaacatgg

SEQ ID NO: 850987 - DNA, 573 bp, Homo sapiens
ttaattttacttgtatgagttatatttcttaatcagtttcaaatttatcccttgtttgkcttgtttgttcatctataagctctgacagaggttgatcataagttggtagaccactatgcaatgtcagatatgttagttccttggaacttatcttgttgatatgcttcccaattctattggttgcaaaattcattctgagttgcctaaggtcatacaactaattggactcagagtagaaattaaaattcagttctttagtgtactagcttttcttgctgttatttactaagaagtttaagtaagagtagttaaccatttacttttattaaaaatgctaagaatctactgtgtgtcaggcacttgggatgtagaaatttattagataagcataatgttttaactctcattatttataatataatgtatgggacactaaaatataaactaactgtgttgggaatctatctcatggtctttcgcaaaatcttgatacgatccagtggtattttagtagagtcatttaaggggcagtgtaaagaaggtacttgaagagccagagtgaaatcacacaga

SEQ ID NO: 850988 - DNA, 653 bp, Homo sapiens
ttcagggcttttccttgtcagaagatttttcattactaattaaatctttttactagtcataggtctattcagattatttatttctccttgatttagtcttggtaggctttctgtttcaaggaatttgtccatttcatctaggttatccaatttgtcaatacccaattgttcatagtactctcttataatccttcctatttctgtagaattagcagtaatatccccacttttgtttctgattttagtaatttgagtgttctctctttttttcttaatacaactaactaaacatttgtcaattttcttaatctcgtcacagaactaactcttggttttgttgatttttctctttatttctattctttattttgttacctctgctctaatatttattatttccttctttctgctacctttgagtttagtttgttcttcttcttcttttctttcttttcttttctttttttttttttttcaacaagatctcactctgtcacccaggctggagtgcagtggtgcaatcatagctcactgcagccttgacctcccaggctcaagcawttccccaacctcagccccctgagtactgagaccacaggcatgtgccgccatgcctagataatgtttgtattttctgtagagattggatttca

SEQ ID NO: 850989 - DNA, 515 bp, Homo sapiens
gtaggagactgatttcatcttgatagcctgggtcaatcatcccagccaacactataactcccttcttagcctgttgacttaaaggtaggaggagtccaaartgtccaggtggcaatcttaacttccagtttaatggaatcattgttttgtctcctggtggcagagtttctccctctggaactaagacctctaggccagcagaacgtaatgttgtgggaacagaaagctaaaatgttgctagtgactcactaagggtgatcgtgagtggtgtcacacttccacaccttgattcctggacccgtgaatcctggctatgggagaaacagtaccatatattgggcattgattcagaggatacacagccttttggagaactttgccctagccctgcaaagtattgtcacctagttggccttgtaattgtgacttcaaaaggctttcccaccattctatcaatccagctgcttcaggatgatggggaacatggtaggattagtgacttccatgagcatgag

SEQ ID NO: 850990 - DNA, 671 bp, Homo sapiens
gtaacttgatgacccatagtctaacgttcggtttccaccaaagcccagtaataggccaagagctgtctctcaaaaggakagtagttatctgcagaagatggcagggccttgctccaaaatcctagaggcctccactgtgactcacctatgggagcctgccaaaggctccaaacaacatccctatctgcgagtgacacctcaagtaccatctgatctgctgggtcatatggcccaagtggcagagcagcttgcacagcagacaggacctgttgcagagccttctcctggaccccactcaaaactggcagcctttcaggtcacttgacaaatggcctggagtaacacacccaaaggaggaatgtgttgcctccaaaatccaatgagacccactaggctttgtacctctttcttggttgtaggaggggccaaatgcagcaacttatccttcaccttagaaggaatatctcaacaggctccacaccactggacccctagaaattttgccgaggtagaaggtccctgaaagtcagatttatttcccatcctctggcacgcaaatgtctcaccaatgattccagtgtgtttgctacttcttactcactggatctagtcagcatgtcatcaatgtaatggaccagtgtgatatcttgtggaagcaaaaagcgatcaag

SEQ ID NO: 850991 - DNA, 609 bp, Homo sapiens
ctgtctctgatttcttttagcagtgttttgtagttctccttgtattgctctttcacctcctgggttagatgcatacctagatatttcattayttttgtgtggttatggtgaacgggattgtgttcttgatttggctctcggctagaattttattggtgtacagaaatactactgatttttgtacattgattttatatcctaaaactttactgaagtcatttatcagttctagtactcttttggcagagtctttagtgttttctaagtatagaatcaaataatcagcaaacacagatcgttttacttcttttccaatttggatgccttttatttctttctcttggttgattgctctggctaggacttctagcactatgttgaataggagtgggcatccttgtcttgtaccagttcacaagtggaatggttccagctattgcctgttcagtatgatgtgggtttgttatagatggctcttattattttgaggtaaattccttcaatacctagcctactgagggtttttatcatgaaaagatgttggattttgatatggtttgtctgtgtttctacacaaatctcattttgaattgtagctcccataatccc

SEQ ID NO: 850992 - DNA, 621 bp, Homo sapiens
gaggaaaaagtaagttttgacacaattatccttcctgatacaatgaaatgaacaaattctttccagtaatgtgtatttggaccatgaaaacacatacaggtaagtgacaaaaatgccaccycatatttgaatattttaatcaaattatactgactataatgatggtggaaattttttttttaaaaaaaggaaacttaaacacagaaaataagtgagctgagttgaaagttatctacctaaggagtcagaatgatcagatcaaggttctggtgcaggtacctgttagatgtttgattctgagtaaaagtcattgaacaccttcttgccacccaccagtatgggcactgacagtacaaaggtgaaaaagacacaatctcttctcttgaaaatattacttagttttgaataaccaaaattatcaggtaatgacctactccggataccaacattggtagattggaatatgcttactttcacttaagaatttcagaatatcggggtcttggttccaagatggctgaataggaacagctcaagtctacagctcccagtgtgagcgacatagaagacggtgatttctgcacttccacctgaggtactgggttcatatcactggggcta

SEQ ID NO: 850993 - DNA, 533 bp, Homo sapiens
ccaagtagctctaactgggtggagcccaccgcagctcaaggaggcctgcctgcctctgtagactccacctctgggggaagggcatagctgaagaaaaggcagcagaaactyctgcagacttaaacattcctgtctgacagctttgaagagagtagtggttctcacaccaccaagtctgagatctgagaactgacagactgcctcctcaagtgggtccctgacccctgagtagcctaactgggaggcacctcccagtaggggctgactgacacctcatacatccaggtgcccctctgagacaaagcttccagaggaatgattaggcagcaaaatttgccattctgcaacatttgtggttctgcagcctccactggtgataaccaggcaaacagggtctggagtggacctccagcaaactccaagagacctgcagctgagggtcctgactgttaggaggaaaactaacaaacagaaaggacatccacaccaaaaccctatctgtacgtcaccatcatcaaagaccaaaggtagat

SEQ ID NO: 850994 - DNA, 483 bp, Homo sapiens
ttttgaagtgaacatccacatagttatatatatctattatacatacatacatacatatatacacatacccctcacaaagaattaccgcaagagtgattccacagtagtgttgtagtagtaagtagttttggagagagtgatagcagccctagtactaaaatctttaatctatgagtgaggggttgaattcttcatattaggctgcacagggacatcagtggtttaatatgttaactcttgcaaatatcacatttcattaaacagatgcttttacgttttatgttgttaaagtgagatttctaattgcttctctctgacctctcaaattacgatggtaactgcattcttttacagaagatgcccatctgtctgtattataatccagacacatgccaggttttccawtttaaatgacagtgctttaaatcttggcatagactactctgtcctacctccaatgtgtattccgagtacatacatcga

SEQ ID NO: 850995 - DNA, 580 bp, Homo sapiens
gtgattcatagaaatagccaagcctcagaaacactacactagatgatgcttatggtcacttccagtctgaatgagccatctctgcgttaacatttagcacacagcatgcaatccctctctaagtggraaaatgactcttgttggaactgggcaggagcactgagagcacagcctttccttttatctggtttcagtgttagggtcatgctgggcttatacaataaactagaaagtgttatttgggaagctgaggagggcagaccacttgaggtcaggagtttgtgaccagcctaaccaatacggtgaaacctcgactctactaacaatacaaaaactagccaggtgtggtggcaggcacctgtcatcccagctactcaggaggctgagacatgcgaatcactttaacctgggtggtggaggttgctgtgagccgagatcgcactactgcactccagcctggccaacagagtgagactctgtcttataaaaacaaaacaaaacaaaacaaaacaaaacaaaacaaaacaaacaaaacaagaaagtgttacctctgcttctatttttgaggagactgtggaaa

SEQ ID NO: 850996 - DNA, 540 bp, Homo sapiens
ttaacaaacttgacctgttgttgttgcatcataatacattactaaacagatgaaagtcactgaacactatattttgcctcttgtataacagtaacactgataaccctagaagcacttaaatggatttactctatgccagaattcattcttcaaacaactttacacatatcgatgtatttattcttacactaaagcatccccattttacgggtgaggaaattgaggtatagagaagtaacttgtccaagatctcgcaagtggtggttcaagcatgcatactctggaatttggctgtagttcattatcttacctaccatgactgaggcatagtccaaataatgcctaaaattacctgaagcaataacaatctcttgtgtgccagtttattgaactacacataatcacaaaaaaattattcagcaccttttatttgtagggagctacggcaaatactggggaagcaagcatgggtggaatacarcatgtaaggtgcaagtctgtctaatcctacaggtggaggcagacaacccatgtttcacc

SEQ ID NO: 850997 - DNA, 516 bp, Homo sapiens
aagaatttagctgccataaatttttgcctcaatatgtctaagacgaaatctcatgtgtccaggattggccccaaaagtatayaggagtggtgggccatatccaattaaagaggaaatcaaacttaaagaacataaaatgattcataaatggaggttttttcttgaccactcacttatttgttatttattgagcaggtgtcaaactgctaggcaccaagaattcagagaagaaaatagtgtttgtcttttttctctcaaaactgttttcatcactcatgctatatttgaacttctgttattgactctcttgaccggtgttttaagataatgaagctaagtttaggcttatatagaaaacataccaaagagcttatattgaacagaattagaaggcttcaggttggtagacttttaacatagcttttccacaactaggcaggtgcaatgccatcatataaaatctttatttcatcgattctcatctttcactttagcagcttttcaagctgctctacc

SEQ ID NO: 850998 - DNA, 485 bp, Homo sapiens
gtccctctctgacccacccccttgtgagatatactggaggatcagctccatggggtcttagatgggctgaacattccatcctctatacatttgccactctttgaaaacaaactattaaaacatgtgccaagcttgagtccatgtgctaatcagcatgagataaggtgaactattttcatcctgggagactttttcaaaaccattttccttctttcactgcattttgactataaatcaaatgttgaatgattatcactcccttccttataaactaaattttgccttctttattttttttgctgctattagcaaaacagattgattcattagaagctagctgcagtctcttcaatttctccatagaatgcagttgcagcaaaggcaaattactaatartttatcttgaacaatgaggctcagtgtttgaccgggaagccttcactactaaaaataagtctgaatttcaaaaactgctgaattggaag

SEQ ID NO: 850999 - DNA, 619 bp, Homo sapiens
gtctttgcatggaattggccagatttcttaggagccatgcatagctttgtgaggaggtgatctattttcttgcaacattgtttctgccctacatcactgattcttgagaatacatatgagactctcttatttaaaccaaaacagaggagagaaacatttgctgtttaattttgatctttttcaaaagatcttttttttttttttttttttttttgagagctaggcaggaagacaaattcctcatcctcgcaactgcaataagtgaatagaaccaaaccatgactttccttgcacaggtgctaaagtgagacatggctggtttgccacaatattaaactatccctgagcctttcagtgatgtgattgagaatttctgtggatgggatttgggattgagaatttctgtggataggatttgggaattttgtcaccagtgagggattccatctttttatggttctttcacagcttttgaggtttgaggacagtagagtgtttttgagaaatctacaggaatgtggggccgctcttagagagatgagtctggaaactcagcttggattcttaccagtgttcagcactcatgggckgacattggatcccacagttagaatctcaa

SEQ ID NO: 851000 - DNA, 550 bp, Homo sapiens
ttttttttcatttttaggcttttttttttttttttttttttttttttttttttaraatagttgctaaatcactttatttatttattttcacataagttactggggtacaagtggtatttggttacatgagtaagttccttagaggtgatttgtgacattttggtgcacccatcacccgagcagtatacactgcaccatatttgtattcttctatcccttgcctcctgcttctctccttccccgcaagtccccaaagttcactgtatcattttcatgcctttgtgtcctcatagcttagctgccacatatcagtgagaacatacgatgtttggtttttcattcctgagttacttcacttagagtaatagtctccaatctcatccaggttgctgcaaatgctgttaattcattcttttttatggctgagtagtattccatcgtacatatataccatagtttctttatccactcattgattgatgggcatttgggttggttccacgattttgcaattgtgaattgtgctgctttaaacatgcatgtgcaagta

SEQ ID NO: 851001 - DNA, 504 bp, Homo sapiens
atatgtgtgagaccacatattgccctctaaaatcatgccctctgaatcctaagcaaagaggacaaagctgaaggcaccacactgactgacttcaaacyatactatagcgatccataaccaaaacagcatggtaccggtacaaaaacagacacatagacaaatagaacaaaatagagagctgagaaataaggccacacatcagcaagtatctgacctttgacaaagatgacaaaagcaatcaggaaaggactccctgttcaataaattttactgggattactggctaggcatatgcagaaaattgaaactggatcccttccttacaccgcatacaaaaatcaactaatatagattcaagacttaaatgtaaaaccacaaagtattaaaaccctggaagacaacctagtcatgatcattctagatataggaatgagcaaagatttcatgaagatgccaaaagcaattgcaacaaaagcagaaatcgaccaatgggatctaattaaa

SEQ ID NO: 851002 - DNA, 520 bp, Homo sapiens
tagaagcctcctagttaatagtatttttgttrcagtagcctgaaaggactatgataacagtattgaaacttcttattcgtgaacatacgcaatcatggcatctgtgaacaaagacagttttgtttcttccttccctatctgtatacacttttttcctttcttatctttttatattatctaggacttctagcatgatgttgaaaagtagtggtgagatagattttcctttccttgtccctgatcttagtgggaaagcttggagtttctcaccattatgtaatgtaagctataaagttcttttttaaaaatagattcccttcctcccttcctcccgacagcctcgttggagtgcagtggtgcaatcgcagctcactgcaacctctgcctctggggttcaaatgattcttgtgcctcagcctcccaagtagctgggattacaggtacgtaccaccacacctggcgaatttttgtatttgtagtagaaactgggttttgccatgttgaccaggctggtctgaaa

SEQ ID NO: 851003 - DNA, 520 bp, Homo sapiens
tagaagcctcctagttaatagtatttttgttgyagtagcctgaaaggactatgataacagtattgaaacttcttattcgtgaacatacgcaatcatggcatctgtgaacaaagacagttttgtttcttccttccctatctgtatacacttttttcctttcttatctttttatattatctaggacttctagcatgatgttgaaaagtagtggtgagatagattttcctttccttgtccctgatcttagtgggaaagcttggagtttctcaccattatgtaatgtaagctataaagttcttttttaaaaatagattcccttcctcccttcctcccgacagcctcgttggagtgcagtggtgcaatcgcagctcactgcaacctctgcctctggggttcaaatgattcttgtgcctcagcctcccaagtagctgggattacaggtacgtaccaccacacctggcgaatttttgtatttgtagtagaaactgggttttgccatgttgaccaggctggtctgaaa

SEQ ID NO: 851004 - DNA, 520 bp, Homo sapiens
tagaagcctcctagttaatagtatttttgttgcagtagcctgaaaggactatgataacagtattgaaacttcttattcgtgracatacgcaatcatggcatctgtgaacaaagacagttttgtttcttccttccctatctgtatacacttttttcctttcttatctttttatattatctaggacttctagcatgatgttgaaaagtagtggtgagatagattttcctttccttgtccctgatcttagtgggaaagcttggagtttctcaccattatgtaatgtaagctataaagttcttttttaaaaatagattcccttcctcccttcctcccgacagcctcgttggagtgcagtggtgcaatcgcagctcactgcaacctctgcctctggggttcaaatgattcttgtgcctcagcctcccaagtagctgggattacaggtacgtaccaccacacctggcgaatttttgtatttgtagtagaaactgggttttgccatgttgaccaggctggtctgaaa

SEQ ID NO: 851005 - DNA, 556 bp, Homo sapiens
cacagcattccttcattatccttttaatgtccatgggatctgtagtaayggcccccttttgtctccccttaaggagggcttccctgtgaataaagccaataaaggaatacagagtaaagagagatagtttactaatgtaccacttaagcatctatatccagcctttactgaggtttactatctggagtatgtgagtaataaattcaattttttgtcatctaaaatattttgaattaggcttttatacctgcagacaaaatagccctaagtgatatactttatttttttatacaaagaatctaagacccagaaaaagtaaggcttacaaccctgggtcagaatctaaatctcaatccatttagtctacaactctttccattttacaccctccctctttagaaggggtctcttaaacttgcaatttgaatagctgatgttttccatcttgctacatgttcattttgcgttcactgactttatcaacttcgttgtgtcacatacagaatgaagttcccaatcattcatgctcctgacacggagaaaatagaattgacag

SEQ ID NO: 851006 - DNA, 622 bp, Homo sapiens
aagcccaatgatattgatatttatattaaatgtatatcatcaaaacattctaattaaaagagattatcagattagatagaaaatgccaacmatatgtattcaataggaaaaccacttaatccttatggtagtatgttgtaatttttactttaaagtcatatatcttttaaagaaaaagaaaaaaattctctatctatctatgtatctatctagatatctatatagatagatagatagataagctaaagtttctaattttaatgaagtccaatatgtcaccttttcacctttttcttttatggttagtgtgtcctgtgttctgttgaagaaacatttgtctatctccgagtggcacccatcttttagggggaagccatagtttctgattttaactccggccttgtcactataccatgacgaaattctgcatatggtagtgctatgctcactgtcaagtgccatcacattacttgacttcaaattgtactacaaagctatagcaacaaaaacagcatggtacttatctaaaaatagatacattgatcaatggaacagaacagagaacccagaaataaagccacatacctactgatctttgacaaagttgacaaaaatatacaac

SEQ ID NO: 851007 - DNA, 603 bp, Homo sapiens
atctccaggttattaatcagaaatctgcactgaagagcccctgttaaattttatagctgattataaaaccatcctttaaagaggactrgccaggcacagtggctcacacctgtaatcccagcactttgggggaccgaggtgagtggatcacctgaggtgaggagttcgagaccagcctagccaccatggtgaaaccccgtctctactaataatacaaaaattagccgagcatggtggcacacacctgtaatcccatctgctcaggaggctgaggcaggagaattgcttgaacccgggaggcagaggttgcagtcagccaagatcgtgtcattgcactccagcctgggcgacaagagtacaagagtgaaactccatctccaaaaaaaaaaaaaaagaaaaaaagaggaccaaaatgagacaacaattgcctgtggatgacaaaacattttagggcagccacagttaaagacacaattggcaaggaaatttgttacctctgtggcacacagtcatttaacataataattataattattactgataacttatactaagtcatattagaattataggtgttttacataattttgaaatatgtgtcaa

SEQ ID NO: 851008 - DNA, 632 bp, Homo sapiens
ttcttttttctgtgccaggatcctgtcctggattccctgttggactcagtcatcgkatcttctggctgctctgtgacagcttttcattttccttgtttttcatgacctggactcttttgaagagcaccgtagtctgtagactgttccttaattttggtttgtttgctgttttctcatgattaggctggggctgtgggtttgcggaggacagctccctggtgaggcgctttcttgtcccgtcatatgggggatacaggacagggacaggcctcctcaccagcgatgttaaccttgatcccgttggctccgtggtgccggccacatctctccactgcaaacccactgccttccctttccacacgcggttctgcgggagcgagtgcccagggagccagcagtcaagaagacagcagctaatctccaccctgaggaatgtctatgtgtactctgtaattcttccataaaaaacgcctgtcccttctccccgatgtatttattactcaatcattgatctgcgtcagcatgggctcatatatttactctacactttgggtcaccatccatcgccacattatttcttctgtggctgctttgagctctttcccattggctcttgtgtccttctgatgggc

SEQ ID NO: 851009 - DNA, 632 bp, Homo sapiens
ttcttttttctgtgccaggatcctgtcctggattccctgttggactcagtcatcggatcttctggctgctctgtgacagcttttcattttscttgtttttcatgacctggactcttttgaagagcaccgtagtctgtagactgttccttaattttggtttgtttgctgttttctcatgattaggctggggctgtgggtttgcggaggacagctccctggtgaggcgctttcttgtcccgtcatatgggggatacaggacagggacaggcctcctcaccagcgatgttaaccttgatcccgttggctccgtggtgccggccacatctctccactgcaaacccactgccttccctttccacacgcggttctgcgggagcgagtgcccagggagccagcagtcaagaagacagcagctaatctccaccctgaggaatgtctatgtgtactctgtaattcttccataaaaaacgcctgtcccttctccccgatgtatttattactcaatcattgatctgcgtcagcatgggctcatatatttactctacactttgggtcaccatccatcgccacattatttcttctgtggctgctttgagctctttcccattggctcttgtgtccttctgatgggc

SEQ ID NO: 851010 - DNA, 487 bp, Homo sapiens
ttttctgtgccaggatcctgtcctggattccctgttggactcagtcatcggatcttctggctgctctgtgacagcttttcattttccttgtttttcatgacctggactcttttgaagagcaccgtagtctgtagrctgttccttaattttggtttgtttgctgttttctcatgattaggctggggctgtgggtttgcggaggacagctccctggtgaggcgctttcttgtcccgtcatatgggggatacaggacagggacaggcctcctcaccagcgatgttaaccttgatcccgttggctccgtggtgccggccacatctctccactgcaaacccactgccttccctttccacacgcggttctgcgggagcgagtgcccagggagccagcagtcaagaagacagcagctaatctccaccctgaggaatgtctatgtgtactctgtaattcttccataaaaaacgcctgtcccttctccccgatgta

SEQ ID NO: 851011 - DNA, 620 bp, Homo sapiens
tccaggccctcagggttggacagaggagacacctgcctgtgttctgcctgtgtacacacatctgtgttcatgtctgtctccagctgctttcgcattgcaatgcatgcaagttcatacggatgcctggccccatccagcaccacagggcttattctagcccccactgcgtagctgtcactcctttctgcagcagccagaagcctggttcccactaggtatgactgcttccttatgtgttcaatcttgtacacatgtacagtcatttcagaattgttgaaataccgttttcagtctactttcctttttaaaaaatgtctttccccactatgtcattagctgtgggtatttccttgcaattacaaacaataaatgcattgctctctttatgtttggattaacataggagccaaatcttgagtaattccctgaaaagcctgactttagttatgactggcattggcctctcctcccctagcctgggctgctgtcattcacacatgtggcttcccctttcccragtgggtgaatggttccccccattcctcctccttgttttcttgaaggcagttccagcagcatcctctgggtcctaggcatctccctctgtgggtgtggaccct

SEQ ID NO: 851012 - DNA, 620 bp, Homo sapiens
tccaggccctcagggttggacagaggagacacctgcctgtgttctgcctgtgtacacacatctgtgttcatgtctgtctccagctgctttcgcattgcaatgcatgcaagttcatacggatgcctggccccatccagcaccacagggcttattctagcccccactgcgtagctgtcactcctttctgcagcagccagaagcctggttcccactaggtatgactgcttccttatgtgttcaatcttgtacacatgtacagtcatttcagaattgttgaaataccgttttcagtctactttcctttttaaaaaatgtctttccccactatgtcattagctgtgggtatttccttgcaattacaaacaataaatgcattgctctctttatgtttggattaacataggagccaaatcttgagtaattccctgaaaagcctgactttagttatgactggcattggcctctcctcccctagcctgggctgctgtcattcacacatgtggcttcccctttcccgagtgggygaatggttccccccattcctcctccttgttttcttgaaggcagttccagcagcatcctctgggtcctaggcatctccctctgtgggtgtggaccct

SEQ ID NO: 851013 - DNA, 442 bp, Homo sapiens
ttgtaccagggtggtcatggtggcaggagaggtggtcagaytttggatgttctttaaaggtagagtctagggagatgccagtgtagagaaagacagccatggaaagctccaggcctttggcctaacaaagacctggaagaatgaagtggtcgtttactcagactgaggaagcctcagagagtagcaggtttgtggggtaaaaaaatcaaggtttggttctgggtaagttaatttctgcatgtgagcagacattcaggtggttttgttgaggggcagttagatccataggactggcacctactggagattccatctggagagacaggaaattggaagtcaagagaccggctgtgtggagtgaggatggaggagagcaaagcgtggtcatcggaatccttgggccttcccggctttagaggtccagaagacggggaggagccag

SEQ ID NO: 851014 - DNA, 629 bp, Homo sapiens
ttttcttctaacagtcagggccctcttctgtaggtctgctgcagtttgctggaggtccactgcagatcccagaccctgtttgcctgggtgtcaccagtggagkctgcagaacaataaagattgctgcctgcttcttcttctggaagctttgtcccagaggggcactggcctgatgccagccagagctctcctatatgaggtgtctgttgacccctggtgggaggtctctcccagtcaggaggcagggggggtcagggacccacttaggaagtagtctgtcccttagcagagctggtgcgctgtgctgggagaatccctcttgtcaggaccagctgctctcttcagagcaggcaggcaggaatgattaaatccacagaagctgcgctcacagctgccccttcccccaggtgctctgtccccagaagatgggggttttgtctgtaagcccctgactggggctgttaacctccttcagagattccctgcccattgcggaagaatctagagaagcagtctggccacagctgctttgacacactgtggtgaattctgtccagtccagacctcccagcctcagtaccgtcaggggaaaaccaccgaccaaagcctcagtaatggcgatgcccctc

SEQ ID NO: 851015 - DNA, 532 bp, Homo sapiens
ttttcatagagactgatttttatattgatatttatttttacctgattattttatgcttccctccaataaaatgtcatgaaataagaacttttcacaaatttgctcactgctgkatccctagccctaaaacaatgcctgccacagggtggccatgtaatagctatgggatgaggggtcagaaggtgcatcaggacgaacgaccactcatgaacaaggcaaaacaaaggacattttcagatgagccaaaagggctgattgcccccgtctcctcatgctcgtcaagtagaaggaaattgtgccaagaagaaaggcccaaaatataagaaagaagagccccaaattctgcataaatttagaaagtttaaagtaaacactggttacataaacaccacggtaataatcataactaatactgagggtgaaaatcaagttagagtaaaaatcctggcagaagccaacacaatggcgtgaaagattggggaggggaattcggactaaaagactcttgatttggttgtagaggacagtaagg

SEQ ID NO: 851016 - DNA, 588 bp, Homo sapiens
gttaatgaaagccagaattgtaagagaaagcttgatggcgaagataaacatacacacacagggatataaaggaaaatttccaggagaaaaacaatgatgaaacattacaaaaacctacataaraaatattaaagtactctaaagcttaaaatatacattattttttctaatttttaaaattgcacagctcagccactatatgtacagttaatgtagtaagttaaaacagacttttatacatgatatgtagtaagaatggcctaccatggcaattcaggagacatattaaaagtttaaaaaaggctgggcatggtggctcatgcctgtaatcccagcactttgggaggccgaggtgggtggatcacgaggtcaggagttcaagaccagcctggtcaatatgatgaaaccccgtctctactaaaactacaaaaattagccgggcgtggtggcgtgtgcctgtagtcccagctactgaggaggctgaggcaggagaatcgtttgaacccaggaggcggaggttgcagtgagctgagatcatgccactgctccagcctgggcaacagagcaagactctatctcaaaaataaa

SEQ ID NO: 851017 - DNA, 471 bp, Homo sapiens
tgccaaaagaaaggtataaagtgcaattgcttcacggaagaaacggtatttaaattatgcttgaccgttctcatttaagagtgggagctaaaccttgggttcacacagacatgaagrtgggaacaacagacacaagggactccaaacagagggtgggaaggaggggcaagggctgaaaattttcctgttaggcactttgttcactacggggtgacagaatcaataaaaggccaaacctcagcactacacaatatacccttccaacagatctgcacatacacccctgaatctaaaataaaagggaattctttttaattataataaaataaataacacttgacaacatagtcttacaataccatacatttcatagcaatgtgatttcaaaatgccattaagattaataaaaatgtaaaagttaccaagccaattaaattttattcattcattaatttattcacttggtaaaat

SEQ ID NO: 851018 - DNA, 640 bp, Homo sapiens
gaaatcctcttattagttccatggtcctgctttaccacctgccttccccatccttttgcatgcttgcctgcctgcctgcctgcctgcctgcctgcctkccttccttccttccttccttccttccttccttccttccttccttccttccttccttccttcctctctctttctctctttcacttttcttttcttgtgagcccagtaggaatgataagtgagatataaatattaaaagttggtgctaattgtttgcttgttcctcctttaggaaacagtctgttttaatgtgtgaacttctaggtcttttctatacttcttgaaaaaagttcacctaggcttcacacttgtcactagcagttggattagtgcttagatgaaagcttgtgccaaagtgaggcatagatgaagtaattttatgaccgtttgactctttctcccttataagttttgatccacaaaagaattaatttctatttcaaatgtgtggttgaacttttggatgtttttttcatttccgtagtgcaaattcatctttttcaggattagctctcatgggaaaaaccaagagctgttgggcatttttagtttatttatcaatcatgacatttgagtgctggatgacaatgaagttttgccaagg

SEQ ID NO: 851019 - DNA, 566 bp, Homo sapiens
ctgttgctcaacttctggtctatggtrtgacacttccttcatccaataatgccccagctctttccactgttgctaataatttctgtggtgccacccaaaccctgtttgtcttctcagcaatgtcattacctgtgtaaccatgtcctctgtttgcaatgcctagagtggcttctatttcctgacatggcctgagttgacacaggtctctaaaaggcatctcaaaaccaacacatctagaacaaactcctaatttccctctcaagttgttcttcctggtagtttgtccattcaaattcatggcaactccattagtgccatccttgatgctactgtccctctcatacctgtattcaatccaccagcaagtcctattggttcaactttataaacatacctagagctgcctatttttctccactttcactgctatcaccatcctggtccaagtcattattaactctcacttggactattgtggtagccttctgatatggtttggctgtgtccccacccaaatcattatcttgaattgtagttcccataatgcccacatgttgtgggaggga

SEQ ID NO: 851020 - DNA, 560 bp, Homo sapiens
attttatatgttatatgtattatattccatatatacaataagtaagctagagaaaagaaaatgttataaggaaatcataaggaaaakaggatgtatttactattcattaagtggaagtggatcatcataaaggtcttcattcttatgttggaacaggctaaggaagaggaggaagaggaggagttggtcttgctgttgtaggagtagcagaggtggaagagggggaggaagtggaaggggagacaggagaagtgggcacattcagggtaactttatgaaaatacattgtaatttctgtccttttttcatttccctagaaatgtttctatagaatagcaattcttccatcatttgctttagtttcagtgcctgtgtcatagaagcgtcagtgttgtaaaggaagtcttgaataattgcaattgccacccttctcctgaattgtctaatatcagtttgttttctagcactgcatctcccatgtcttctttcccatcgtctggtgctgttttagaagcactcgtctccatcaaatcatcttctgttaattcctctggtgtgtc

SEQ ID NO: 851021 - DNA, 560 bp, Homo sapiens
attttatatgttatatgtattatattccatatatacaataagtaagctagagaaaagaaaatgttataaggaaatcataaggaaaatagratgtatttactattcattaagtggaagtggatcatcataaaggtcttcattcttatgttggaacaggctaaggaagaggaggaagaggaggagttggtcttgctgttgtaggagtagcagaggtggaagagggggaggaagtggaaggggagacaggagaagtgggcacattcagggtaactttatgaaaatacattgtaatttctgtccttttttcatttccctagaaatgtttctatagaatagcaattcttccatcatttgctttagtttcagtgcctgtgtcatagaagcgtcagtgttgtaaaggaagtcttgaataattgcaattgccacccttctcctgaattgtctaatatcagtttgttttctagcactgcatctcccatgtcttctttcccatcgtctggtgctgttttagaagcactcgtctccatcaaatcatcttctgttaattcctctggtgtgtc

SEQ ID NO: 851022 - DNA, 573 bp, Homo sapiens
ggctctggaaatactatagtagatgggagtaagatatgataaatagtggtaatttccattcacataaaccatgttattttagtttttwtgtgaattataaaaattaagaaaaatatccagatccaacactcaatctacaatgattatatttatattcatccttcaaaaaatattctaactgtcaactttattatgactttggggtattttttaaacaaaaaactcattttattttttttttttaatttttttgtgagacagagtcttgctcagttgcccaggctagagtgcagttgcacaatcttggctcactgtaacttctgcctcctgggttcaagtgattctcctgcctcagcctcctgagtagctggaattacaggcacctgacaccatgcccagctaatttttgtatttttagtagagatggggtttcaccatcttggccaggctggtctcaaactcctgacctcatgatccacctcccaaagtgctgggattataggcatgagccactacagacggccaaaaaactcatttttaaaaatccagatgcttctaaagtaagtgttttta

SEQ ID NO: 851023 - DNA, 574 bp, Homo sapiens
acacagttcagctctatgacagcagaaagcacactgggcagcactcagccagcacctatagaaggagaatttggactgccttaaccagaggggaattgcccatccsaacagttggaacgtgagttctggcaagcctcacctctgtggactaaagttctctgggtcctaaataaacttgcaaggcaatctaggccataaggactataattcctgggcaagtcctgatactgtgctgggttcagagccagtggacttgggggcacatgatgtagtgagacaccagctggagaggcaaagagaatgctccaggcagtacagctcgcagctctgggagatattcctttactctgcttgaggagagaagagggaagagtaaagagaactttgtcttgcaacttggatgccagctcagccataatatgatagggcaccaggcagagtcctgaggcctccattccaggctctagctcctgaacatttctagacacatgttgggccagaagagagcccactgtcttgaagggaagggcccagtcccaacaggattcatcacctgtgcactaaagagcccttt

SEQ ID NO: 851024 - DNA, 716 bp, Homo sapiens
aaaaaatcatgaacatcataaaatacaggggaatatcatgtaaaaataaataaaaattaaaatcctgacacatcttaataagattttccttcctacattgttggctgcatactttttgaccatctcttcatatgataaagatttcataatatacaacataagagtaaatatctttaatctagcctggatgattaaatttttaagtcaggctgggagcagtggctcacgcctgtaatcccaacactttgggaggctgaggcagctggatcatttgagataggagttcaagaccagactggccaacatggtgaaaccccatctgtaataaaaatacaaaaatcagctgggcgtgatggcatgcctgtaatcccagctactcgggaggctgaggcaggagaatcgcttgagcctgggaggcggagattgcagtgagccaagatcgtgccactgcactccagcatgggcaacagagcaagactccatatcaaaaaaaaataataataattagtcagtagtgtagacgattccttcagtatcacaaccgcttttgatgatgtcatgtaagtttcttgggattgtgttcagcatttggcaaaacttctatcmaatttccctcacacgtaagttttaccatttggaggagttttccagagactggcttcaggctccatagctttcagacgatgcctctcccttgcctctcacacagttagggt

SEQ ID NO: 851025 - DNA, 634 bp, Homo sapiens
ttgagccaccgcacccggccaaaacaaaccatctttaagcattatattttagttatctattgctgcataatatattgcttcaagacttagtgacttgaaacaaccataagtatttctcatctcccatggtttctatgagtctggcattgagtggcagcttggttgggcagttctggcttggggtctgtcaaaagttgcattcaggtcagctgaggctgcagtatctgaagggttaatggaaatggaggatccacttctgaggtagctcactgccgaagctggcaaatttgtgttgacaagtggagtcctctctgtgtaagcatctccacagggctgcctgagtgttctcataacatggtggctagcattatcccacggtgtgtgattcatgaagccaatgcagaagctataatttctttacgaactagctttggaagtcacatgctgttatttcctctgtattctgttggtcacacagagcagtcctggtacaacatggcacaacaaaagtacatgaacactaaaaggcaataacgattgggggccaactcagaggctgactacyccacctactagcactctctttgttctcctgtgactttgaaaaggttgcccaccatggctccaatttctc

SEQ ID NO: 851026 - DNA, 623 bp, Homo sapiens
aagtatcttccatcaggcaacactcacgtaaataaattatattctaaccgaccactggaagaaaagaaacaaaagtaattaggaaagcagcagagaattaactataagtaaaaatggagagaacatatcctgatggatctgaatttgttttttaaacaatatactcccggaaaagtgagaattggtttctaatatacagtagttccaaagtacaaccaatgactgatgagaatttcatgctcaaagaagaaggaatgatggacttgggatcagagttttatgattccctactcataagaatgagttcaaagttaaacctctattcagtaatgtaatgggaaagacatgtctttagagcgagtccttaaagcaagttttgttttatgccaatacctacattactatttgtatactaatacaagccgttttcatttctcctaattatctaatttttttaaagatgctcacctgaaatccctaaaaataaatttaaatatgcaaaacttggggtcgaaagtagttcagtaatctctgggccarccaaaacccaggggtcaggcgtgataaaagaggcaaagaatttttaaagagcaatttataatggaaaaagtacaaatagttta

SEQ ID NO: 851027 - DNA, 559 bp, Homo sapiens
tttttaaaagctcacctattattaaaaacatgtcttttgcaagtttaactgccttgaaatttccattaaaaagaaaattatgtgttaaacatgatgttagttattataaacaaagtgtaataaaattgggagacatataggtatattagcagatacactgacatatttttagaatgaattcagttcttgcattcttaaaattaacagacatatttatccaacttcatagctaactaaaatctacatgtgacgctgatgagttacagcagggtgatggtgcataaggctaattacatgattcattctacttttgtataagacagctttatgcatgtatgcaacttaaaacatggtcaaaaatagaaatacatacattaattacctgaaggagattcagacaaagacataatgtaataatccattaacaaaggaaactgtctagctcactgaaagcaaggtttctatcttytaaagaacctgaacaagtcactcctgggtagcatccaaaccaaacactttgggttaagaggtggagctacactaaaacatttacaatcca

SEQ ID NO: 851028 - DNA, 615 bp, Homo sapiens
gttgatagtgggggaggctgtggagggagcaggcagtgggtgaatgggaaccctcagtactttctgttcaattttactgggaactcaaaactgctctaaataataaagtctattaagaaaaaaaaaaaaagatgcagctcaggtcctaccctcttctgatatgccaatccatagaaatctctgctttttcttaactctaaaagaatttgctgacatttgatccttaatcgtataatgctttaaactgtaagagaaatccccgtcttatctccccaactagaagctcccagggatgacattttatagcttttgacagaccccacaatgcctagtaaattacaaaaaagaaaaagagaaatgaaaaatttcaattaagcaaggattgttttacttcaggaaaatattgttactgtgcttgtttcattcccagagtcttgaaagcaacgcgcacacagctaatgctctgtcttcagggcccgtcttccttgttgtcccctgggttcacgtgttatttgaatactgtggttagagtcacgtcttctctctgttttacgatacaaycacactagtccaggacaccgccgtgtctcttagattatccccacagcctccatc

SEQ ID NO: 851029 - DNA, 640 bp, Homo sapiens
acagtttctacatcaaatgtaatgtaagaagattgcttggacttgcgaaaagaggaaaagaagatgcagtcgggctaggcgcagtggctcacgtctgtaatcccagcatttwgagaggccgaggcgggcggatcacaaggtcaggagatcaagaccatactggccaacatggtgaaaccctgtctgtactaaaaatacaaaaattacccagacgtggtggtacgcacctgtagtcccagctactcgggaggctgaggcaggagaattgcttgaacccgggaggcggaggttgcagtgagctgagatcgtgccactgcatttcagcctggcgacacagtgagactccatctcaaaaacaaaaaaaaaaagatgatgcagtcatgggtgtgggttaggtaagtgtgaaggagtcagtttttgctggtggcaggtaatggacttttacacgcttaatatcagaattagagtcacttcataattttcgttgagaattagccaatattgcttgctttttaagtttttatgtatcttaatatactccttaaaaatctctcaaacaatagtttcttggaagggtgtcattcctgactccctcctccactgccttcgtcagctgttataacagcgctgtggaatcatg

SEQ ID NO: 851030 - DNA, 591 bp, Homo sapiens
ttccaagcttagagcaagagaagcacaaggtgagcctggaaaatctagtggcaccaaatagcaagtcctccatgaatgatggtgacacagtacaagaatmcagtggccggctggaaagggctcccactggccaaatacgggacaatttaagcagcaagagaatcacgaaggtaatggatcatgacacaccagctaaagaaaagaatccgtgctgggtgcagtggctcatgccttgtaatcccaaaactttgagaggccaaggcaggtgggagttacagaccagcccggccaacatggtgaaaccccatctctactaaaaagacaaaaattagccaggtgtggtggtgcacgcctataatcccagctacttgggaggctgagacaggagaatcgcttgaacccgagaggcggaggttgcagtgagccaagatctcgccattgcactccagcctgggcaacaagagcaaaactccgtctcaaaaaataaataaataaataaataaaatgtaaagccataaaaggcatttggggacaatgggaaaatctgaacacgcactttattttgtgggatattattgtgtcaatcttagt

SEQ ID NO: 851031 - DNA, 591 bp, Homo sapiens
ttccaagcttagagcaagagaagcacaaggtgagcctggaaaatctagtggcaccaaatagcaagtcctccatgaatgatggtgacacagtacaagaatacagtggccggctggaaagggctcccactggccaaatacgggacaatttaagcagcaagagaatcacgaaggtaatggatcatgacacaccagctaaagaaaagaatccgtgctgggtgcagtggctcatgccttgtaatcccaaaactttgagaggccaaggcaggtgggagttacagaccagcccggccaacatggtgaaaccccatctctactaaaaagacaaaaattagccaggtgtggtggtgcacgcctataatcccagctacttgggaggctgagacaggagaatcgcttgaacccgagaggcggaggttgcagtgagccaagatctcgccattgcactccagcctgggcaacaagagcaaaactcygtctcaaaaaataaataaataaataaataaaatgtaaagccataaaaggcatttggggacaatgggaaaatctgaacacgcactttattttgtgggatattattgtgtcaatcttagt

SEQ ID NO: 851032 - DNA, 591 bp, Homo sapiens
ttccaagcttagagcaagagaagcacaaggtgagcctggaaaatctagtggcaccaaatagcaagtcctccatgaatgatggtgacacagtacaagaatacagtggccggctggaaagggctcccactggccaaatacgggacaatttaagcagcaagagaatcacgaaggtaatggatcatgacacaccagctaaagaaaagaatccgtgctgggtgcagtggctcatgccttgtaatcccaaaactttgagaggccaaggcaggtgggagttacagaccagcccggccaacatggtgaaaccccatctctactaaaaagacaaaaattagccaggtgtggtggtgcacgcctataatcccagctacttgggaggctgagacaggagaatcgcttgaacccgagaggcggaggttgcagtgagccaagatctcgccattgcactccagcctgggcaacaagagcaaaactccgtctcaaaaaataaataaataaataaataaaatktaaagccataaaaggcatttggggacaatgggaaaatctgaacacgcactttattttgtgggatattattgtgtcaatcttagt

SEQ ID NO: 851033 - DNA, 375 bp, Homo sapiens
attctaggtacttcatagaaatggaatcatacagtatttgtcattttgtgactgatgttctgtcacttacgataatgtgttcaaagttcatgtacrctatagtgtcagaacttcattccttttcacataatattatgaaataatattcattccttttcatataatattatgaaataaaatgtgttctatccctacaatagaatattattcagccataaaaaggaatgaagttcttctatcttctacaatattctattgcagggatagaacacattttgtttatcattcatcagtgacaaaagcttgggctgtctctgccttttggtgattgtgaataacgctgctacaaacattagcatacaagcatctgtttgt

SEQ ID NO: 851034 - DNA, 601 bp, Homo sapiens
cccaagattgaaccaggaggaaactgaaaccctgaacagatcaataatgagttataaaattgaatcagtaattaaaaaaaactaccaaagcaaccctaagcaaaaagaacaaagctgaaggcatcacactactcaagttcaaaccatattactaggctacagtaactaaggcaacatggtactagtacaaaaaacagacacatagaccaatggaacagattagagaaccagaaataaagccacatacctacaaccacctggtcttcaacaaagtcaacaacaacaagcaatggggaaagaactccctattcaataaatggtacttggataactcattagccatatgcagaagattgaaactgggccccttttcaccatatacaaaatcaactcaaaattgactaaagatttcactgtaaatctaaaactataaaaactctagaagaaaacctaggaaataccattctgaacataggccctggcaaagatttcatgatgaagactccggaagaaattgcaacaagaacaaaamtagacaagtgggacctaattgaactaaagagcatctgcacagcaaaagaaactatcaaacagacaatcc

SEQ ID NO: 851035 - DNA, 696 bp, Homo sapiens
ttagcctcccacacaataatagtgggagactttaacaccccactgtcaatattagacagatcaatgagccaaaaaattaacaaggatattcaggacttgagctcagttctggaccaagtggacctaatagatatctacagaactctccaccccaaatcaacagaatatacattcttggcagcaccacatcacacttatcctaaaattgaccacataattgaaagtaaaacagtcctcagcaaaatgcaaaagccagaaatcataacaaacagtctctcagaccacagtgcaatcaaattagaactcaggattaagaaactcactcaaactgcacatctacatggaaactcaacaacctgctcctgaatgtctactgggtaaataatgaaactgaggcagaaataaagaagttcttagaaacaaatgagaacaaagacaaaatgtaccagaatctctgggacacagctaaagcagtgttaagaggaaaatttatagcactaaatgcccacatgagaaagcaggaaagatctaaaatcgacaccctaacaccacaattaaaagaactagagaagaaagagcaaagaaattcaaaagttagcaggatacaagaaataactaaggtcagagcagaactgaargagatagagacatgaaaaaacccttaaaaaaaaaaatcagtggatccaggaactgttt

SEQ ID NO: 851036 - DNA, 583 bp, Homo sapiens
tacagccaaattctgccagaggtagaaagaggagctggtactattccttctgaaactattccaaatagaaaaagagggactcatccctaactcattttatgaggccagaatcatcctgataccaaaacttggcagagacacaacaacaattcaggcaatatccctaatgaacatcgatgcaaaaatcctcaattaaaatactggcaaaccgaatccagcagcacatcaaaaagcttatccaccatgatcatgtcagcttcatccctaggatgcaaggctggttcaacatatgcaaatcaataaacagaaccaatgacacaaactacatgattatctcaatagatccagaaaaggccttcaataaaattcaacaccccttcatgctaaaaactgtcaataaactagctatttatggaacatctctcaaaataataagagctatttatgacaaacccatagycaatatcatactgaatgggcaaaagctggaagcattccctttgaaaatcagcacaagacaagtttgccctctctcactactcttattcaacatagtcctggaagttctggccaaggcaatcag

SEQ ID NO: 851037 - DNA, 520 bp, Homo sapiens
gaataatgcatgtgacttatgcctcaagtttctgacaatctccatagggaagcatcgcaaaaacacacgggaagtcacacagagttaggggataatacaaggcagcggttgaagatattctgagcccaatttctcatttcagatactaaattctgaattacttgattctttccattcttggatcatggttgtacagtctgtggtacctaaaaggaagtattggcacctgatttgcctaggtggcatggatacttgagtaagctaaaagcgaaggccacatcttcacctctggcaggaaccagagaaaagcatattcacaagaaagaccccaagcccctttagcaccatactcactttgtagccctccccacacatcacttcctctgtctcaaaaattttcccaattcttttaccagctgtaaactgccaaaaacygaaatgtcagggttcttttctatagcctcttaggttaaaataactttcccttcctgactccctctttgcttagcaaatcttctta

SEQ ID NO: 851038 - DNA, 606 bp, Homo sapiens
aactacctattgggtaccatacttattacgtgggtgatgaaacaatctgtacctgagacctccatgacatgcaatttaggtayactgtaaacctgcacatgtacccctgaatctaaaaaaaaaaaaaagaaaactgagtcagagacaggtttgatgaattgtccagaggcataaagccaaaggcgagactcaaaaccagagtttagactctgtagtctaaactcctcatcatgaatctcatggctgccctcaatggctttggtatgcctcagtggctcctctgtcctgtgttcgtttactgtgcccgcagaactgggagactcatttttggagttccagtgtcagctcaagcttgtgattttacaaaagcaagttaagcctccctggtgtcaaagctttggactcaaccttctgttgccttctagggatgtcacccaggtagactttgaggatcttgagacaaagtggaattcaatacaggatattttcagaatctctgttttgcccaagagataaagctcccaccaggctgcagatggtccctctgatttatttttcagtccatccctggacctctaggatagcttatgaaaaccctggtggttt

SEQ ID NO: 851039 - DNA, 588 bp, Homo sapiens
taaatagacctccatttctttatttatagcctatgtgtgtctttgcacgtgagatggatctcctgaatacagcacactgatgggtgttggctccttatccaatttgccagtctttgtgttttaattggggcatttagcccatttacatttaaagttaatattattatgtgtgaatttgatcctgtcactatgatgctagctggttattttgcccactagttgatgcagtttctttatagtgccgaatgtctttactatttggtatgtttttgcagtggctggtacaactttttcctttccatatttagtgcttccttcaggagctcttgtaaggcaggcctagtggtgacaaaatccctcagcatttgcttgtctggattttatttctccttctcttatgaagcttagtttggctggatatgaaattgtgggttgaaattcttttccttaacaatgttgaatatgggctgcccctmtcttctggcttgtagggtttctggagagagatccgctgttagtctgatgggctttcctttgtgtgtaacctgacctttctctctggctgcccttaacattttttccttcatt

SEQ ID NO: 851040 - DNA, 588 bp, Homo sapiens
taaatagacctccatttctttatttatagcctatgtgtgtctttgcacgtgagatggatctcctgaatacagcacactgatgggtgttggctccttatccaatttgccagtctttgtgttttaattggggcatttagcccatttacatttaaagttaatattattatgtgtgaatttgatcctgtcactatgatgctagctggttattttgcccactagttgatgcagtttctttatagtgccgaatgtctttactatttggtatgtttttgcagtggctggtacaactttttcctttccatatttagtgcttccttcaggagctcttgtaaggcaggcctagtggtgacaaaatccctcagcatttgcttgtctggattttatttctccttctcttatgaagcttagtttggctggatatgaaattgtgggttgaaattcttttccttaacaatgttgaatatgggctgcccctctcttctggcttgtagggtttctggagagagatccgctgttagtctgatgggctttcctttgtgtgtaaccygacctttctctctggctgcccttaacattttttccttcatt

SEQ ID NO: 851041 - DNA, 548 bp, Homo sapiens
agatatgtaataactgcaagtaaaggctgaagacaatgtgagctgaacacggaactattacaaaggtttctgatttgttttgtaattgggccagtttctgtctgaagctcttaagcgagtrgggcagggaaaggcggatcctaggcgctgaggtgcaggaaaaagaagcagcttctgagacaccttaaaattcttttgctaaaccgtctttttctgaaagtcatttaatttataggtttttttttttttttttttttttttttttggcagctttcaggttaaaagtcctccgggtaacggcagaaaccaaatagtcaatcattaaggtgcctgactgcacgtaggcaatagttatcgcaggactgaagccccctttgcagtacaatttatcctttcctagatgcccctgagtacggaggactggaggaggtagaaagggaaagaaaacctccttctggcaggatgtagcttctgctgcacaaggtaggatgatgacaaaaggttttcactgctggggaatggatgattgcgggagaaaaagaatctcg

SEQ ID NO: 851042 - DNA, 628 bp, Homo sapiens
aatgaaatgatggtactggagtaacatatatgaacatgaatgaatctcaaaaatattggtttggataaaaaacatcataaaattatatacagcttgtgattccatttatgtgaagataaaaataggcaaaatgaaatgacttacaatttatggatccattcttagatatttaaactaagaaaaaccaaaaaacaagcaaaaacaaaaataagattgataaagacaaaatgtagggccatgcttggtgtctgacacttataatttcagtgactggggaggctaagatgggaggatgcctgggcaatatagtgagatccccttctctaaaaaaaaatgttttttttttttcttgagacagggtctcactctgtctcccaggtaggagtgcagaagcacacaatcttggctcactgcaacctccacctcctgggttcaagcaattctccttcctcaacctcccaagtggctgggattgcaggcatgtgtcaccacgctgggctaatcttgctatttttagtagagacagggtatcaccatatttgctaggctgttctcraactcctggcctcaagcgatccacccgccttggcctcccaaagtgctgcgattataggcgtgagccaacgtg

SEQ ID NO: 851043 - DNA, 628 bp, Homo sapiens
cctagaatctcactgttctttttctttttcttttctttttttttttttttttgagatggagtcctgctctgtcaygaggctggagtgcagtggcacgatctctgctcactgcaacctccacctcccaggttcaagcgattcccctacctcagcctcctgagtagctgggactacaggtgcgtgtcaccacacccggctaattttttttgtattttagtagagacggggtttctccacgttggccaggatggtctcgatctcctgaccttgtgatccacctgcctcggcctcccaaagtgctgggattacaggcgtgagccaccgtgcccagccctgttatctttcttataccaacaaagtatttaaaatgttttgctttgtttcataattatgtatgtgcattttcaccagcttcttgaggacaggtattcagtgaaaggcactacggcctagtggttaagaacatgggcttttggatgaattctgggttcaaatcctgtcttcacaactgagctacttggatggtgtcggggcaaaactttcctttaacctgtctggttcagtacctgagggttctgtgtattaaatggacaaaagacagattaacaggagaaaaggcatattaatt

SEQ ID NO: 851044 - DNA, 664 bp, Homo sapiens
cccaggatccagtcttctggtgagacactggggatgacacggggattgacagggctccaggcatcactgccacattactttggatcttgtatctgaactctagaatatgtcacatagtcatcaaaccacagtttagtctgcttttccacaaaggaaaactttatctgttggcctgtgttacactataatgtgtgaggggaattggatggtgttacatcgggaagccaagcaaagtttattgtttcttgggattacattcttatatttttatattctttaataaagcacaggctggagcataagtaaaaggaagcaagttcttaactactaaaaattgactgcatggccctgtctcacaccgtagataaatactagctaaaaatggaccgtagacccaaatgtcaaagctaaaactataaaactcttagaggaatctgcaggagtattctttgtgacctggcgttatgtaatgatttcttatacatgacagtaaaagcgtaagtgacaaaatacaaaatagataatattggacatcatcaaaatcaaaacttctgtatttcaaaagacactagtaagaaaatgagragaaaatccacagaatggaagaaaatatctgcaaatcatatatctgataaggggcttgtgtccagaacatatagagaac

SEQ ID NO: 851045 - DNA, 631 bp, Homo sapiens
aatttgacgagccaaaatatgaataagaacataggcagtcacagtgaccttttattaaatgcagagacagttatgtgtcacatgaaacatcaacaaaagcccagttctggtagccagcaagatttttttgccacatttatacttggtcctctttaataatacagagttgcccccagagtactgaaatgatagactagaacacgatgacttcagcaggggatcagagctttagagcttcatcattcatgtgagccaagtgcgaaatttcagcctgtctctcctctaaatgcagttaggagtcttcgaaaccttttgtgtgaatccaggagggaaaattgtctggcaaagtctgataagcatcgtgtcaagagcacatttgtactctggtaagaagcccaggccaattgctgttgggttgtcatggcaacagaaatacacaccatttacacatcagcttctgaaatgagcacaaaataacaaaaccttttcgacaggatgggaggtgaagggaagagcagcakcatctgtgcagcctggtgaaacggtgtttacgacagtctacacggcactactgggtatgctgtctccttggattgtgtcatatttttaacccagtgggaaattcatagga

SEQ ID NO: 851046 - DNA, 566 bp, Homo sapiens
aataaaacacctttacaagtggaaatttatggcacttaaagcagaaaggagaagggcagaagattctttctcaaaaatagctcaaaatagtacttatgctaaattagcatattttgggggacacattctgrtccccttcgaatccatattagaaaagaaagactaaagatggggaaattcagtgcttagttaagggagatgtaggtcacagagagtagttttcactaagaaatgaggagtaagtctgaaacaacaatgaaagaatcttgcttttcagtgattgaggcaaacagctccaataattggatttggggaagagaacaaaagtatagatgaaccagtataaggcaactactttgatcaaatggtgatttgtgacaacctgtactaaatttaacagcagaatttcatcaaggtcataagcacagtaacatagcaaagcttttatactccaaagagttggtgcccactttatgccatactaggtctgtgaattacaatgatatgaaaggtctggtccttgctttgtggaactttactcacttcattcatttggagaatagtaa

SEQ ID NO: 851047 - DNA, 603 bp, Homo sapiens
tccctgtgccaattgccaatcaacccaactcccaggcagccttggcagttatgtttgcttgtcctgctgtagcagccaatgacttagtaaaagtcagaacatagatctgctagctcccagtccaggatttccccataactcgtccatgtatatattaaacaattagccttgcttttaaaattctttttcatttagcctcttcttagaacttatcattttgagaatcctgacctgccaatgttccataatctttctgaaagtgacacagcaagtacgatgcatgcacactgctaactgcagctgatttcattttccatcatctacaaagcacataaggtaatttctaaaccagcagtaaaatctatttataaagatgctgatttgttttctgcactttccaaaacagagcttcaatttatttccctaacataaaaaaccattactttttaaaacaatcatagttagtatattttctaaatgttttaatttttgtaaaatccaacttgcaaattggagtgtaaatagctttcttaaaatgraagggaccgtgttagacccagtatgctgattgatgacttcactgtgcttcaaagcagacgattt

SEQ ID NO: 851048 - DNA, 556 bp, Homo sapiens
atgtttgtccctcacatagcattccagaccactgctacaagggtctaaaggcttgttcctcacaaaggattccagagcacacctgctgtggtctgattgtttgttcctcacataggattcctgaacactgctgctagggtctgaatgttggccttcacataggattccagaaccctgatacgattgtctgaatgtttgtccctcacacagcactacagaacactgctacgagggtctgaatgtttgttcctcacatgggattccagaacactgctatgattgtctgaatgtttgttcctcacataggtttccagaaaacttctgctatggtctgaaagtttatccctcacataggattccagaacactgctacgagggtctgaatgtttgtcccttcacataggattacagaacgctgctgctgttgtccaaacatctctctgtcacatagggttccagaacactgcaacatgtgtctgaatgttttccctcacatargattccagaacactctcattgttgtttgaatgtttgttcctcacataggattccagaa

SEQ ID NO: 851049 - DNA, 489 bp, Homo sapiens
tttctaacagtcccccaaagtcttagctcattccagcattaacccaaatgtccaagtccaaagtcttatcttagacaaggcaaggcccttcttcctatgagcctgtaaaatcaaaatcaagttagttacttcatagattcaatgaagatataggcattgggtaaatacacctgttccaaatgggagaaattggccaaaatgaagggattgcaggccccatgcaagtccaaaattcaatgggtcagtcaaatcttgaagctctgtaatgatttcctttgacttcgtgtctcacatccaggtcacactgaagcaagaggtgggctctcatggccttgggcagctccacccctgttgatttgcagggtacagccctcctcctggctgctttcacaggctggtgctgagtgtctgtggcttttccagrcaatacggtgcaagctgtcagtgtgtccaccattctggagtctggaggatggtggccctcttctc

SEQ ID NO: 851050 - DNA, 650 bp, Homo sapiens
tcgtcgccaaaatgaagggatcctctgcaargcaacctgggagggagtttaggattgttctgaagcagtgaaagtcattgagattcacatgtaagagggtagagaaagggaatccacatgttttgatccctccatgtgctggatataacttggtcttcattatattgcaccacctttggtgtcagagagaactggatttgaatcccagttccatcactcattatgatttgatggtgaatgtgtttttaactcatctgagcctcagtttgctcatctataaaagatgggattgttatgagacttgcataaggtaagtgtttaaaaatctgggaataacccctgtaatttaaaagacggggttgtgatgaggcttcaataaggtaagtgtgtaatatctggacacaatgttactaattttgtaggttttcaatatatagagaaggaggattatttttctctcatttaatttttagaacaagtttataaaattggtattattcatatttttgagataatcaaaggatcactaagtttaaataaatcaccatagtaacaaagcagttcacaatatattgactggataattgctagtgaaaagtagcaatgatgatcacattgaaaatcttgtgttaggtggtggttttctcttg

SEQ ID NO: 851051 - DNA, 502 bp, Homo sapiens
ttatttacatacaattaagttaaccaggttaaaatgtacagttcagtgattttttcataactttctacaattgtgtaaactctactttaatcaagatatayaccaatgtcctcatcgtaagttttctcatgcccctttatacttgatcttctccccacactccagaagccaaccactgatcttctctgtcaacatacttttgtttatctaaaatttcatacaaatataatcatacagtatgtattatgtagtgtttgaattcttgcagtaatcatgatgtactagatatatattcatattgtagtaatatgaatatatagtaattgtttgctctttttattgctgagtaagtccataataagaatatataactagtgaatttatccattcaccagctaatgtatgttttcggctattatgaatgttttatgctatcaccatccatgtacttgattttgtatagacatgtgtctatttctcatggatagcaaataggaatgaa

SEQ ID NO: 851052 - DNA, 594 bp, Homo sapiens
tgatgttttttgttgttccattttatggatttttttgtaaaggtgtaaaaaccttgtggtttaaaatagtccttcaaactttataaagttctcttttctgttagtgtgyaatattttaaaatatgatggcttgctttctgatctttcatgactatctgtctcttcttgactttttctgataaatattttagtagagacagggtttctccatgttggtcaggctggtctcgaattcccgacctcaggtgatccgcccttctcggctttccaaagtgctgggattacaggagtgagccaccgcacccggccgaactagcttatcttttagctaataaaggggtcctacaaactcttcttgcactcataacatgttttccaccaatgttacaaggtgagcatctctaatccaaaaatctgaaatttgaaatgctgcaaaactcaaaactttttgcgtgccaacatgacaccagaagtggaaaatttcacatttggcacatttgctttctgatggttcaatatatacaaactttgtttttggcacaacagagttgtattaaaaatattgtataaaattaccttcaggctatatgtata

SEQ ID NO: 851053 - DNA, 582 bp, Homo sapiens
taaaaaacagaaatagtattcaacccagcaatctcattactaagtatatgccaaaaggaaaatacattataccaaaaagacacatgcactcatatgttcattgcagtgctattcacaatagcaaaggcatggaataaatctaggtgcccatcaatggtagattggataacaaaaatatggtacttatacaccatacgatactacacagttattaaaaaggaggagaaaattttctctacaacaacacggatacagctggaggtcattatcctaattaaaataactcagaaacagaaaatctgcaggttctgcaggttctcatttataagtgggagctaaacattgggtattcacaaacatagagatggcaacgatggacactggggactacttgaagggtgagttgagaagggagacaagggttgaaaaattaactgttgggtatgatcctcagtacctgggtgatgggatttttcatacattcataccccaaacttcagcatcatgcaatayaccagggtaacaaacttgcacatgtaccccctcaagctaatataaaagttgaaaaaaaaaagcaaaatg

SEQ ID NO: 851054 - DNA, 475 bp, Homo sapiens
gggcttcagcccgaggcaagatggccatgctttggtactttragagctagatcagcagttctgattcacttggttcagggtggggcccacatatccatgttttgttaacatttcccaggtgctccagtgtgcttccagcattgatagtctgtgctagatagagtccatccacccctgggttgtaagaaccgaatgcaaacagcacagtgtgacctcctaatgttgttccaggcataggataggccactgaggctgcagaaatgaacgagacatgaagacatggtctctatactcaggaagccacagtcccaacagagctgagatttaaaatcccaaatagggtctaggcatgttgtggagtgtttctgcagtcgagttcctactctgccttgtatggccttgagtaagtcactcgtctgcttcatgactcacttttgtttaatgggttttgatgggatgctttcttgggacaatg

SEQ ID NO: 851055 - DNA, 606 bp, Homo sapiens
gccctctagacaggacagagggggccttcagcttctttcaggtcagatgattctcatttgccaatggtggcattttaaagcattgcaaagcagattttttgttgatgataaagactttaaaaaacatccgcaaattccatgtgctgtgttctagatacacattctagagctgcaatgggtggagacgggacattgtgtctcctaaccacagagaacaccccattcctgccctcatctccccatctctgtatgcccagcttcaacacactgctggaattttccctaagctaggaagatttctagaaggttgcctcataacatcatggtgggttgatggggcatcttcaggaatggggaggaattgacagtgacggtctacgagtcctgatctgcagtttttgaacatgaaaaacttgaagagcacagactagattttactcatctcactcattataatacctggcacaagagtagatgtgagtgaatgtttgctgaattaaggtttctgtagcttgatgtatttatgacaaactgacattaaatattcgatctcagtatcagaaatagcttagatgytatttgtatcttttagacccagaaaattat

SEQ ID NO: 851056 - DNA, 570 bp, Homo sapiens
ttgtatggagtattttctagaaatattaacatctaacactggaaagataatataattgaataattaggaataaaggctctggggttaggctgcttgcgtctattartttcctgtggctcctgtaacaaattatcacaaacttagtggctcaaaacaacacaacacacaattattctctcacggctctggaggtgagaagtttcaaatcatgatgttgtcagggctgcattccttctattggcttcatggcagaatcaatctgtcttgccttttcggcttctagagaccatctgcattcattccttgactcaggtacccttgcttctatcactcaacttcttgcttctgacatcacttctcatattactgactctgactttcttgtttctcttataaggacccttgtgattacattggatccccctaaataatccaagatactcttcccatctcaggatccataatttagtcacatcagcaaagttactcttgccataaaagataacatattcatagattctggggactcagtcataggtatctttgggagcccattattctgtctaccaa

SEQ ID NO: 851057 - DNA, 592 bp, Homo sapiens
atatatatacacacacacatatatacacacatactatataatattaatatacgtatactttaatgaggacaactttagacttctacttccatttaggatgtagaaagtcataagagaatattgctccctccctaacagtggttacttttttacttttagagtgtaaatgtaaaactatgtaaatgaacaaaaatacagaaaatgatgaattccttttaggcagtgtattaatctgttctcacactgctataaagaactacctgagactgggtaatttacaaagaaaagaggtttaattgactcgcagttccacaggcttaacaggaagcatggctgggaggccttggaaggcatacagtcatggtggaaggtgaagaggaagcagggatcttcttcacactgtggcaggagagacagagggagagagagaagggggaagtgccacatacttccatgccatcagatcttgtgagaactcactcactatctcgagaacagcaaggggaaatccacccccataatccagtcacctgcctgacacatggggattacaatttgacaggrgatttgggtggggacacagagtcaaacc

SEQ ID NO: 851058 - DNA, 513 bp, Homo sapiens
catttagactatttacattcaacattagtattgagatgtgagatgctattctattcatcattctatttgttgcatgaaatccttgtttttgtttttcattgttttgttgtttaataggtcctgtgagatttatgctttaaggagattctattttggtgtatttttataatttgttttaagatttgagctacttttagtagttcttgtagtgttggcttggtagtggtgaattctcttagcatttgtttgtttgaaaaagactgtatttttccttcatttatgaatcttagtttcactggatacaaaattcttggctgataattgttttgtttatggaggctaaaaataggaccccaaactcttctagcttgtagggtttcttctgagaaatctgctctgttwgtctgataggttttcctttatagattacatgatgcttttgcctcgcagctcttaagattctttccttcatcttgaccttagataacttcatgactatgtaccaaggcaatg

SEQ ID NO: 851059 - DNA, 509 bp, Homo sapiens
gagaggtgggcccgagttttggctctgctgcatcactggcttgctgttccaggtcggaattttcctctttctgagcctttgtttctcacccgaagggaacaaaaggccaccaccctcacaaagctgttgagattcaatgaaaaagagaggaaagatggatatgaagggcccctagaaataaggacattactaatttcctaaggaaagtacagtcttatgagtgacatcaccgtattttaaaatcagacacattggtttcctgcagacacagggaagacccacacctgcaggcatgtgtggagcatgtgaacaactctgctctttgattttggcatgctgcttctcgggcttctctagaaaggagaaaactgaagaactgagagacccagaggctggtgtccagatcaagtgcrgctgccatgtttcaaggagagccgtcttctgtgtgtacacagtgttggcctcagagaccagccaggagaaggctggctgggcacagagtcaagcat

SEQ ID NO: 851060 - DNA, 592 bp, Homo sapiens
tgtcttacagaaaaattactctgcctgaaaaataaacatcattcacaagggcctgagcagacatggctacaggcacgagacagagcagatgagctcttaagaactcagccagtatacccaacttggttccaagagctgcggtgccaccaccaaaaaccatcaagaccaaagacaggaatggcctcattgtctcttccacggcaatcctggagccaggattcagtttggtgcatgctcgtcaccatgcttagaaaagcacgtatggctccttttggtagctgctttccttgctttatttttaaacatttaaaaattataagcagatgactatacataaatacggaacccaatgtacatgaaattctagccattcatgtcaaattcacttttgatgtttccaacagcaacaattgatacagatatatattcagcatcccaaattcaaaaatccgaaatctgaaatgctccagtgagcatttttttktgtgtgtgtgtggggcggggggagggtcatgtcagcactcaaaaagtttgggattttgaagcatttcagagtttgggttttcagatttgggaaacaaccagttaagta

SEQ ID NO: 851061 - DNA, 631 bp, Homo sapiens
aattttttaaaatgtccaattcctgctgtttttcagatgagaaattggacttgaatgacagtaaatgggaagatattcatgtcattactggagccctcaaaatgttttttcgagaattaccagaacctctttttacatttaatcattttaatgattttgttaatgcaattagtaagtatgtaattctactcagttttttctagatattgaaaattctttgcacagattaagccacccaattttttttatcttactttaagcaagtattttcaacagattgttttactccaaacattttaaatgtgaccaccagatgtcactgtgtattaccaaatatcagcttccaaactgtgacattgctttcagtttcataagaatttgctgtaaaatatctggttattatcttttttcagagcaagaaccaagacagcgagtcgctgctgttaaggacctaatcagacagttgccaaagccaaaccaagacacaatgcagattcttttccgacatctcagaaggtaggaggactgcccagtcatgggatgtggtatagcacaaggggaagcgggaaggcctgtggggccagggtcactcagactcagatttggatccsagctatgctacttgctgtct

SEQ ID NO: 851062 - DNA, 615 bp, Homo sapiens
ttgcttatcagcttaataagcttttgggttgagactatggggttttctaaaaatatgatcatgtcatctgcaaacagggataattgacttcttctcttactatytgaaagttctttatttctttatcttgcctgattgccctggccagaacttccaatactatatttaataggagtagtgagagagggcaaccttgtcttgtgccagtttccaagggaatgcttccagcttttgcccattaagtatgatattagctgtgggcttatcatatatggtgcttattcttttgaggtatgtttcttcaatacctagtttattgagagtttttaacatgaatgaatggtgaattttattgaaagccttttctgtatcttttgagataatcatatggttttggcctttagttctgtttatgtgatgaataacatttattggtttgtgtaggttgaaccaaccttgtatcccggggatgaagtctacttgaccgtggtggatacgccttttgatctgctgctcaattcggtttgccagtattttgttgaggatttttgcatcaacattcatcaagaatattggcctgaagttttttgttgttgttgttgttgtatatctgcc

SEQ ID NO: 851063 - DNA, 508 bp, Homo sapiens
gttgatgggcttagaattttacttttgatttacatagttaatgaaccagaaaggaagatgaaatgtaataaaaatgtttgatccaaatggaaraaaagaagaaaaaagaacaaaaaatcaaaattatcgactcaaacctaactatataaataatcatattaaatgtaaatggtttaaacacctcaattaaaagtcaggaattgtcatataaattttttaggaagacccgattctatgctgcttacaagaaatacactttatatataaagaaacaaataggttaaaaaatacataccatgttaacagaaatcaacagaaagctgataaatctagccagattaatcaggcattagaagaaaaaaatgccagtagcaggaatgagaaaggtgacatgattttaggttttagatgttaaaagaatcataataaaatattatatataacttcatgtcaatgatttccacaattgtcataaaatagatgaactccttgaaatacacaaactacc

SEQ ID NO: 851064 - DNA, 627 bp, Homo sapiens
ctttaaagtgtacaggtcagtgacttcaagcaaccacagatcaaaactattcagggaagaaatattgcactttcattcamcatgtatagacatttttttcctgtcactattccctgaacaatatagtataacaactatgtacatggcatttacattgtattaggtagcataattaatatggtgatgatttaaagtatacaagaggatgtgcataggttatatgcaaatactatgccattttgtatcaaggacttgggcatttgtggattttggtatttaagagaatcctggaaccaattccccatggataccaggggatgactgtatatgcagacatcaccacagttaattttcatcacctcaaacatacctgtaccctttagttatcactgtcccatcccccctgccctctgcagccctaggtaaccacagtctacttctgtgtctataaatatgcctattttagacattttgtataaattggatcatatatgtggtcttttgtgattggtttattttgcctagcataatgtttacaactgatataaaatacatgtttcattctttttatggccaaataatgtcccgttgtatggatgtaccacctgtttgtccatttatcagtca

SEQ ID NO: 851065 - DNA, 624 bp, Homo sapiens
aaaataagaccaaatcaagaagcagcatattctggtataactttcaaattatcctttaaaaatagtcataagttcagaatctggtgtacaaattctatattatgtctccttacctttgaaatgcrtttttttttttttgagagacaatctcgctctgtcgccaggctggagtgcgatggcaccatctcggctcacggcaacttccgcctcccgggttcaagcaattctcctgcctcagcctccggagtagctgggactactggaacgcgccaccacatccagctaatttttgtatttttagtagagacggggtttcatcatgttggccaggatggtctccatctcctgacctcttgatccgctcgccttggcctcccaaagtgctgggattaaaggcgtgagccaccgcgcctggcctaaaatgcgtttcttttccttgatataaatgtattatctgcactactatgaatactgaaatgccataattgaggctttttttttaactttgcaaatggaataaaggagagaaggaaggatgagagtctcctgagatatttagataaatgttagagaaaagaaaagattcaagttgatattctgataaacctgataaatcacatggac

SEQ ID NO: 851066 - DNA, 568 bp, Homo sapiens
atggcccaggctaattataccaacrggtaggtgatactgggaaactacaagatcaattacaataatcaccttttaagatgatactaaaacaaatgttacatcctccttagaattaaccagggttaataatacatgacaagggttataaagcaactccatgttaagtaggaattcggtctctcaaatattcaagtatagcagctgttcctttcattaatatggctgctcgaggaactcggaatggatttccatccagtagtaatgttctaaacaaaagagagaaattgagaatgtaaacattttccattaacaaggtttttcatctaatttcatttgcaattttataaataaaatttctgtattttttttctatttgcccctttttatttttatttctttttttgagacagagtctcactctgttgcccagcctgaagtgcagaggtgcaatctcagcttattgcaacctccacctcccaggttcaagtaattctcatgcctcagcctcccgggtagctgggattacaggtgtgttccaccacacccggctaatttttgtattttcagt

SEQ ID NO: 851067 - DNA, 626 bp, Homo sapiens
atgacctatcagtaaatctcagtaagatccaattgaggagccatgccttagatagtaagattttgcaacctttgtttagaacgtttgcttaaaatgtttgttctttcttttattccccctttaatgaaagtcaactcacatctatttaaggaaaaagttgtaactctctgatatttcataaccaaacaggtttcattttcaattttaagaactctgctcccttaattataaatgttattggctcaagaagattttgcaacattagaagtcaaaacagcaaatgagagtccaaaataactgtttgagtgacagaacaataagacatttttaaaggcatggggattataagatatgttattataacatgatataatatgtaataatatggtattaatatattaattaatataattaatagatacgggaaaaagtcaaggagaaaatatatttaaatatcaccattcttgaatgggaaaatttgaaaacaactttatatatttttttgccagggtatacttgctaaattttgaatatagattatttttcttcataataaaatgtgttactttcaaacaattaaatgttcaagtacaaggamtggagtctggatttctattgagaacatg

SEQ ID NO: 851068 - DNA, 661 bp, Homo sapiens
gctaattttttgtatttttagtagagacggggtttcaccatgtaagccaggatggtctcgatytccagacctcgtcatccacccgcctcggcctcccaaagtgctgggattacaggtgtgagccaccgcgcctggccataaaatggtattttttaaagacaaaaattacaatatacaattactttactcacctagaacccacacatctgtcattttcagttattcagacactatgagaaaaagaacaagaataacagaaataggaaaatatccctctagtcacataaaccagtgtcataaaagctatacattaatatccaggctaacagacaaaatatggatttccagtttagacaacattaaaagttatagtatagaaatgactgctggagacagatgatattataacacccatatataaacacttagtgagcactatttagtgtgtattgtcggcagtgttttacatgcattaactttttacatcttcagcatgacataattatttctttccattttatagattataaacctgaggcacagaaaggtgttataatttacctcaagtcacacagcggtaaatgatgttgtcacggtttaatctcaggcaatcttagtataaaactaatatgtgaaaccatgacgttacactacatttctg

SEQ ID NO: 851069 - DNA, 661 bp, Homo sapiens
gctaattttttgtatttttagtagagacggggtttcaccatgtaagccaggatggtctcgatctccagacctcgtcatccacccgcctcggcctcccaaagtgctgggattacaggtgtgagccaccgcgcctggccataaaatggtattttttaaagacaaaaattacaatatacaattactttactcacctagaacccacacatctgtcattttcagttattcagacactatgagaaaaagaacaagaataacagaaataggaaaatatccctctagtcacataaaccagtgtcataaaagctatacattaatatccaggctaacagacaaaatatggatttccagtttagacaacattaaaagttatagtatagaaatgactgctggagacagatgatattataacacccatatataaacacttagtgagcactatttagtgtgtattgtcggcagtgttttacatgcattaactttttacatcttcagcatgacataattatttctttccattttatagattataaacctgaggcacagaaaggtgttataatttacctcaagtcacacagcggtaaatgatgttgtcacggtttaatctcaggcaatcttagtataaaactaatatrtgaaaccatgacgttacactacatttctg

SEQ ID NO: 851070 - DNA, 592 bp, Homo sapiens
ttccccacacatggttaaatttatttcctgctgtataaatcctcaattttagttggtcaggsagattgattttagattgattttccatctccttgattgaagtagttgattaaagccttcttcactggcaacactcattctctcagtgattggctttctgttcagtgaccaaatggacctggactgaatccctgactttagacagtaacttaaagccatatgaataaacatagatgtgagtaaagataaatacattgacagttataaaatcaagtattaatttaatattggtttataattacacctttgttttctacatgatgtaacaggccaatagttttttaaaaaactacttttagtttaaaaattagaattattgtaacttcagttggtagctgcactttttttctatgtaatttaagagattagtgtattgaaggacaatcattactgtatgtatttagatacacaatgtataaagatgtaattttgtaacatcaataactgaaagttggtggggacagagctgtatagaaacagagtttttgtatattcttgaagttaaactagagtaaattcacgttggaatcaa

SEQ ID NO: 851071 - DNA, 512 bp, Homo sapiens
taaaaatggaccaaaggaaaactcatatgcacaaggctgtgatgcacatayggatgaatggatttgtcttaaagggtaaaaccatttcaaatagagaagcacaggagatctagagggagtgtatgccttttggggagaaagtgtgacataaatcattttcttggcctgttcagcttattcagcagcatctcagttttctgtgtttcctcatccatccacttaaagtggtttcttttccttgggaataaggattgtatgctaaagagtcttactccttgtgcatatagcctaaattccctctgttttttttttgtttgtttttgttttttgtagtaatcagccaaatctttctgcaaaagcattttatcaaatgcttcctttgtttggggccaaataatcatcatagtacatttccatcatgaacttttctcttttatgggctcccaggattttcagtggactaatgggtgtcgttataagacatccacagttccatttgagctgtacagcac

SEQ ID NO: 851072 - DNA, 519 bp, Homo sapiens
atcatgaacttttctcttttatgggctcccaggattttcagtggactaatgggtgtcgttataagrcatccacagttccatttgagctgtacagcactgtaggagcaggatccctgatgcattctgggctcccagagctgggttagggcttagagttcacagaaaccagttattttcaaatgctattccatagaactctgcttttatctgtggtacacagtggctcctaggtaagattttgcttgatcaaataatttcttgtctaaagacttgaataaactcaaatattaaaaacacaaacatgtcttctcatttatcagatgagggaacctcaggcctgggggacaaagtaaaattaagttaccaaatctgctgtgagcactagatttggaatcaggaattccattaccaatcctgccatttactaactgtgcaaccctagggaaaacactgggtcttgcaggaggattatagaggaggtgttcccttctctgtaattcagaaatgttagtacttcct

SEQ ID NO: 851073 - DNA, 343 bp, Homo sapiens
caggcaggcaatagttgagagttttatttgaacatcaactcacccacactgaacatatggaatatttttctcccaatytttttatatattaaaataatcttgttataatttaaaatggaatgtttcactgttctgcagagcatgtgggcaatgtatatgtgggaacacccaagatgtcttccttctcttttcctgatttgtgcctcattctttttcctttcaattcaccttcgacaggtgcatctcacaatattttttgtagcttgtatacagtctttgtgtgctgagatattatttctctttctctgtgtcacatgatgggatatctctatttccttgcctc

SEQ ID NO: 851074 - DNA, 600 bp, Homo sapiens
ttctctgcgtccttcatggagatttcaaagcyaatgcattggacgaaagagcgaaggaggagtggataaaaaggatgtgggcagaagggaaaaataaagacagaaaacttcaaatatccttcaacaggtgaatgggtaaaacaactgtgatgcctctacacataggctactataaaatgaatgaactactgataaattcaacagcttgagtgaatctcaaaggcattatggtaggtgaaagaagccagacccaaaaggctacacactctatgatttcatttatatgactttctgaacaaggcaaaactataaggatggacggcagaatagtggtttccaaggctgattacttttgattacaaaagtagatttgggggatgatggagctgttctttactctgatggtggttaatactatacatttgtcaaaactcatggaactgtacactaaaaatttaaatcagctttattgtatgtgaataataataataatgctagaagtaaaggggagtagaaagggaagataaacgaaattaagacaaagaatttaaatctgctttggaaggaaatcatgcagtatctacatcatttaaagtgggc

SEQ ID NO: 851075 - DNA, 575 bp, Homo sapiens
tgctggtgaactagtgtgattttttacgggtgttgaagagtcttgctttgtcatattaccagggttggttttctggttccttctcatttgagtaggctctgtcagagtgamggtctagagctgaaggctgtagttcagattcttctgtcccatgggacattcctcaatgtagtactctcccctttttcctatggatgtggcttcctgtgagccgaactgcagtgattgttgtctctcttctgggtctagccacccagccagtctacctggttctgggctggtactgggggctgtctgcacagagtcctgtgatgtgaaccgtctatgggtctctcagtcatggatgccagcacctgttctggtggaggtggcagggggtgcaatggactccgtgagagttcttagctttggtggtttaatgctctatttttgtgctggttggcctcctgccaggaggtggcactttccagagagcatcagctgtagtagtgtggagcggggatcagcagtgggaggggccctagaactcccaagattatgtgttctttgtcttctgctacctgggtgggtagaga

SEQ ID NO: 851076 - DNA, 622 bp, Homo sapiens
taaacacatggtaagggcatggtttcaytgacccaaattaataccatgtaaatcacattactaacagaagacagctatctttccagttttattgaaaactcagaggtttctagatattaaactgaaaaaactctcaatctattttgataagcaggtaaaatttaaccatgactacatataataaacatatccagtgaccagaacatttctgaaacacacatttcattattattatagatcagtgaattattattattgttatatcttaacctcaattagctggataggttctgcccaagttcagggaattccttagggtcattcaaaagcaattatgtcatggagcatgggaggcacttcagattttttccatataaacagaattttaaaaataacatgccatcagaggatgcctgaaatttggggttttgaaaatgtcaactctgcaaagcatatctggttgagggtttccctctgcttaacagcccagactctggaacttaatgatttaaattattctctgaatttaggcagattttttttttctttgaccaaagaagcaggagaaacatccaatctatatcttttcttcatgttccaattcagtcattgtttcttgaat

SEQ ID NO: 851077 - DNA, 615 bp, Homo sapiens
accaatgttcataacagcattattcacaatagacaaaaggtagaaacaaaaatgtccaacaatagatgaatggataagtaagacatatacatacaatgaaatatcattcagccttaaaaaggaataaaattctgacacatgctacaacatgaatgaattttgaaaacactatgctaagtgaaataagccagataaagaaagacaaatattgtatgattccacttttatgaagtactgagaataggcaaattcatataaacagaaagtaaaataaaagttacctggggctgcaaggaaaaaggaagaggagttactgtttaacgggtacagagtctgtgtttgtgatgatgaaaaagttctggaaatagacagtggtgatggttgcacagcattgtgaacatacttcatgcttctgagctgcacatttacaaatggttaaaatggcaaattttttacatatttttgtatagtttttaatatatctttatatgtattttaccacaataaaaaatgaaactgaagrgctaaatctatcatcaccaacaattacttgaagacataagcatagaaagagcttatgactgttaaaacatctaatgaatatggagaaccata

SEQ ID NO: 851078 - DNA, 654 bp, Homo sapiens
gaggattatatgtttccttgacccgtagaaaaacataagcattaacagtacatacttcagacaactgaattttcaaccatgggtccaggttatcctcaaattctctaataaacaacagtgatgkttctccacattttatggaagttttagaacctaaacacaaagatttcatcttgttgcttccttttatattattgtctctgcttttcacattggtcctttcctctgttttcaaagcctaagtctaaatcctaaaaacttcaaacaaaaaatggcatgagcttcctgaattacccaactgtaccttcacacagcactatgaagcattcttcaaacattattcgaaatagtgttcttgcccttctcagaagcctaccccagcttctaaatgttcactcaagtcatggtgaagatttcgatcatgacatttaagcttccaggccacaagtacaggcaggtggctggtctcaggctgcaccactgagaactttagttagctgagcagactatattgttcctcccactagacagggagactgttcaagttccatttatatggaaaaccaaagtactgatgctacaaacttgcaatcaccaaaggattatcattctccaaacaaattactgccaggaggagtgtatgtacagagtgtt

SEQ ID NO: 851079 - DNA, 575 bp, Homo sapiens
ggtccggtatggtggctcacacctgtaatcccaacactttgggaggccgaggcagacagatcacttgagctcaggagttcaaggccagcctgggcaacatggtgaaaccctgtctctacaaaaaatataaaaattagctgggtatgatggtgtgtgcctgtagtcccagctccttgggtagttgatgtgggagtattgtttgagcctcggaggtcgaggctgaggtgagccatgaccataccaccacactccagccagtctgggcacagagtgagatcctgtctcaaaaagaaaaagaaaaaagctacaactttggtgcacaaaattattaaaaatattatataaaattaccttcaggctgtgtgtataagtaacataaatgaattttatgtttggacttgggtttcttcccctagatatctcagtatgcatatgcaaatatttaaraaatctgaaaaaaattcgagacacttatgcttctaagcattttgcataagggatagtcacccggcactacctagagttttctttttcctttgttgtgagccacatgtaatgtgcctcccattccctgc

SEQ ID NO: 851080 - DNA, 638 bp, Homo sapiens
aaacaaacaaacaaaaaaaccccaaacaaacctgtrtaccctaaacctaaacgtactaattgatcacattttgccatatttgctcatctgtactctctctccctgtgtgtgtgcattttttctccctaaatcatttgagagcaagttgcaagcaggctagttaccattgttaccggtctggagttcctttcatataaaacatgtgacccaagctagatcaattgaacagattactcttcggaatttgaatcttggaatagggtaatgagaggacaggataaaatgagtggtcttttctagatctactgctggtctcagataagatgttcaagtatggccaggcgcagtggcttacacctgtaatcccagcactttgggaggccaaggcaggtggatcacctgaggtcaggagttcaagaccagcctggccaaagtggtaaaatcctgtctctattaacaaaaattagccaggtgtggtggcacatgcctgtaatcccagctacttgggaggtgaggcaggagaattgcttgaacctgggaggcggaggttgctgtgagccatgattgtgcaattgcactccagcctggaccacaagaacaaaactccatctccaaaaaaaaaaaaaaaggaaaaagaa

SEQ ID NO: 851081 - DNA, 331 bp, Homo sapiens
aaaaaataaaaaacatttttaaaaaaaaggaaaaaggagaaaaatttggacacagagacatggacatacaaggggagaaggcaggtgaagatgtaggcagagcrtggagtaatgcatctacaagccagggaaaaacaaaaattgctggcaacctctagaaggtacaggtggcaaggaaggaatcttccctagaggtttagaagggagtccagccccgctgacaccttgattttgagcttctagtctctggaactgtgaaagaacatgttttggttgtttaaagctactaagtttttggtaatttgtcattgcagccctacgatacaaatat

SEQ ID NO: 851082 - DNA, 618 bp, Homo sapiens
aaaaaaaaaaactgggtgactcagaataacagaaaattattatctctcaattctggagaccagaagcctgcaaccaaggtgtcagcctgcyatgctccctcctgaggactctggagaaaaatctctccttggctctttccctgtgcctggtggctctttctatgcacctcttggctctttctatgcgtctggtggctcccagcagtcctcggggttacttggcttgcagctgcatccctcccatctccacctctgtcatcctgtggccttcttgcctgcatctctatgtgtcctctctgtttataaagatgccagtcaggccgggcgtggtggctcacacctgtaatcccagcactttgggagtctgaggcgggtggatcacgaggtcaggagattgagaccaccctggctaacacggtgaaaccccgtctctactaaaaaatagaaaaaaattagccgggcttggttgcgggcgcctgtagtcccagctacttgggaggctgaggcaggagaatgatgtgaacccaggaggcggagcttgcagtgagcccagatcgcgccactgcactccagcctgggtgacagagtgagactcggtctcaaaaataaataaataaa

SEQ ID NO: 851083 - DNA, 612 bp, Homo sapiens
tccctatcacagtgcacacaattataaaagtagcacagtacttccttccccttctatgatggagatcggcaaaatcaaacgtatcagaattgctgtgttttaggacatagagctgtagcaccacaggttctgtgtatgaagctctgtgctttacataacttgggacgtattatatcttagcatatctgattcctcttgtcctgaggaagaaggtagttccagaggaaattttgcaaagttgccaaaaaaaaggaaaaataataagtgtcctgaagaaacaagtgtttttttttttttccacatatgtagtcattgagaagtcaatgaatgttgtaaaagagtaatttggtcacctaattgtatttgttatccattgctgcctcacagattgcactgcatgagtttcttggggctgccatagcaaattaccaaaaaaaaaaaaaaaaaaaaaaaactgggtgactcagaataacagaaaattattatctctcaattctggagaccagaagcctgcaaccaaggtgtcagcctgccatgctccctcctgaggactctggaraaaaatctctccttggctctttccctgtgcctggtggctctttctatgcacct

SEQ ID NO: 851084 - DNA, 480 bp, Homo sapiens
tcagttttacttatatgttgacttaaacagttattatgaatattaaacaagataacatatgtaaaaggggcaggtacagagaaagtgctcattaaatgttttctttcttcccccaaagttggattggcttatgagtaggaaacacaaaaataagaacaaaaaaaaaaacctctcttctccatagcaagatctttaggagaagaaaaaaaaaaaggcttatggtactcagctcactggaaatttctgctactcattaaaaaaaaaaaaatccttctttaaatacatacaccaaaatttaagaagaatccaaaaaaaaaaaatcagaaatcccatatctcttttcttactgkgataaaaaactgcacaacataaaatttactatcttaaccatttctaggcgtactattcagtagtcaggcatattcacattgtgcagttaacctccagaacttttcatcttcccaaactgaaactctgcac

SEQ ID NO: 851085 - DNA, 594 bp, Homo sapiens
tttccattggtttgctgtccatacaaatgcatttccatacttgtgggaaaggtgtgtcaacatctatagatcaccacaaagctctagttttgtccacctttgtcagacacaatcttgtgaacttgaattgacatgctctttcacataggacaaaactggggaatcaaaaatagtcctacgaagagagtgagtagtcaaggaatactcctataattgaatagagctccatgtttgttcattgctttcaatttcttacatcattttcttatctgcgatctcctttatttttaatcccagcagccttgtgtgtggggtagagaaagggtcagtgtcttcttttatacacagaggagttcatccacaaatacattaagcaacttgtctcaggtcactcagatagttactgacattgtcaggaggagagccccagctggtatccagactcctggctggcaatggatrttgttgaaagttgcaagcacagaaggaattgaaccttttaaatagcacgtttgcatctggagtggtccagggacattgctgaaaggatggaaacataacctagatggccccctgataaaaatcaaagttcta

SEQ ID NO: 851086 - DNA, 528 bp, Homo sapiens
tcctctctgtgattgtagcacttgagtggaacctgaagggcaacaaggagttggccacggtaagatctgagtagaackttcctggcagatgttctcaggcaggaataatcttggcagcttaaaaaaaactagttttggggtatacttcttaatgtatactaaatataaatttttacttttattgatgattcacaccttctgttctttgttaacccatctcctggggttattattttgtggattagcatctcagtggatcatcctcaaagaaccctccatcccttcttgctggtataacataggaagaaccagagaggtccctgacagacaagattgttatatcagtaggctcaatttacacacgtgctccaaatctggggatgggacagcaaagaggaagctatgggccctttgagggttaacctgtatggaccccattcctttctccttgcttggaatttaaagttcagtgcccagttatggatccagatgcttagagtgaacgtcttccacctcctgcttcctcca

SEQ ID NO: 851087 - DNA, 512 bp, Homo sapiens
aatagagataatgatcagattatctatgggaaggcaggtaactgcaccagttgatttcttgaggtccctttggaagccagacacaagacagtkgtgtataacgtttagggatgtgggccctggaaccagactgcctcagtttgaatcccagcttactagacatgtaactttaggcaggttattgaaactctctgtgcctcagttttctcatctgaaaaatgggggcaataacaatgcttacctcctaggaccttggtgagaagtagatgatttactacctataaagtccttagaagaggctaagactggggaatgtgtttgctttgacaatgctggcggtgctaatagtaggatatactgcattttcacttagacaagctcatgcctgtgcctagtgcatgtagacaataacccaggattcccacattccaggtttctgaaggatcttgtacagctccaaacaagaggagctggactgcagaaagcagcttttgcagcaagtaaaaaagcca

SEQ ID NO: 851088 - DNA, 533 bp, Homo sapiens
tgtgaatgttgccttccatggcaaaagggagtttgaagatgtaatgagttaagaatcttgyggctgggtgcagtggctcactcttgtaatcctagcactatgggaggcggaggtgagtggatcacttgaggtcaggagttcgagaccagcctggccaaatggcgaaaccccatctctactaaaaacacaaaaagaattatctgggtgtaatggcgcatgcctgtagtcccagctactccggaggctgaagcaggagaattgcttgaacccaggaggaggaggttgcagtgagctgagattgtgccattgcactccagcctaggcaacagagcgagactccatttcaaacaaaaaaagaatcttgagatggggatattatcctggatcatccaggtaggccccaggtaatcacaagggttcttataagaaggaggcaggaggtcagagtgagtagtaggagacacgggcatagaaccaggaagtttgagtgaggaaagaaaggggccatgagtcaaaaaatagaagtggcctct

SEQ ID NO: 851089 - DNA, 576 bp, Homo sapiens
ctagtaactgcaatcaattggtatgacttggagtaccaggtatatcactcttggcaacacatctatttttagtaggacaaaaytgatgtgaaaaactgaaaatctcttcaataagagcattgaaactaggaaaggggtttagtgagatttagtatatgtatttatttacttctctgtggtttttaaacttatcttacttcctctttttaaaactctgtcagatttatcactgatttcagaattacaatctttaccatagactacaaatccctgagtagttatgtgatttcctcccttctatcttcccagtccatctcataccatacatttattggtcttctatgtcctagacacaccagccttttaagaggactctttattaatcacaaagatgttgaacagatgattctgacagcctggaattttctctctccacttttctttttcttttacctaggttgaattcattgtttagatctcaactgaaatattccttctttgtggaagcttcaccacatgacccagattatgctaggtctcataacatgctggggccttctcaatattgtgattaac

SEQ ID NO: 851090 - DNA, 576 bp, Homo sapiens
ctagtaactgcaatcaattggtatgacttggagtaccaggtatatcactcttggcaacacatctatttttagtaggacaaaactgatgtgaaaaactgaaaatctcttcaataagagcattgaaactaggaaaggggtttagtgagatttagtatatgtatttatttacttctctgtggtttttaaacttatcttacttcctctttttaaaactctgtcagatttatcactgatttcagaattacaatctttaccatagactacaaatccctgagtagttatgtgatttcctcccttctatcttcccagtccatctcataccatacatttattggtcttctatgtcctagacacaccagccttttaagaggactctttattaatcacaaagatgttgaacagatgattctgacagcctggaattttctctctccacttttctttttcttttacctaggttgaaktcattgtttagatctcaactgaaatattccttctttgtggaagcttcaccacatgacccagattatgctaggtctcataacatgctggggccttctcaatattgtgattaac

SEQ ID NO: 851091 - DNA, 529 bp, Homo sapiens
tcaaagtgaagcttttgacaaattagactagtttgataacctgggttttaaagaaactgtatcctttttccttgattttagaagagaacagcaaaagataattataaattttattttaaaatataatgtgtatttttctcactaaaagacgagttaatatgaaattcctaaacttttcatactgttttactattgagctaacattactttcacatataagtaaaataaatttaaaactatgttttcaatcaaattagattataattttaagaaacatttttatagtaatggaatatagttttgaacttatattaaacccaaattaattggatacttggattatttttaactaaagtagaatattaaaatattggttaccagcgtaattttgacatacattcctttgattcttattttyacatgttatagagtagcaataacttagggccgtgtttgaaaatgtcttaatgtttgcctttttaaggtatggtaaaaaaaaaaatgtgtatggccgtcagatatcatacta

SEQ ID NO: 851092 - DNA, 581 bp, Homo sapiens
gaatattttcatctattactttgttgaatagatggtctggccagttgttgttgcccatgcctgtaatccttgcattttgggtggccaaggtgggaggatcacttsgtcaaaagtttgatcccagcctgggcaacatagtgaaactttatgtctacaaaagctaaacaaaattagctggctgtgatcgtgtgtgcctgtagtcctatctattcaggtggctgaggtaggacgatcacttgagcacaggaagttgaggctgcagtgagctgagattgcaccattgcactccagcctgggtgacagagcaagactctgtcttaaaaaaaaaaaaaaaaaaaaagaaagaaagaaagaaaaagagaaaagaaaagaaaagaaaatgtgtttaaatccttttgctctccttcaccttcagagatactggaaattcatatatttgttcacttaatggtgtcccctgtatcattttatcataaaggttttatttttaaattatttttgattaatatttaatctgactaggtcatttcaaaaatctgtctccaagttctgagcttctttcttttgttaatctagtttat

SEQ ID NO: 851093 - DNA, 628 bp, Homo sapiens
aatcaacagagagaagagacaacctgttaaattaaagaaaagatttgcaaattattcatctgacattggactaatattcagaatatataaggtactcaactcaacaataaaaaatacatttaaaaagtgagcaaagaacatgaatagtcatttttccaaaatgacatacaaatggccaacatgtataagaaaaatgcttaacatcactaatcataaatgaaatcaaaatcaaaaccacaacaagatatcatcagacctaagttagaatggctattgttaaaaagacaaaaataaacaaaagatgcaaggcaaggatgtggagaaaagagaactcttatgcactgttggtgggaatgtaaattattacagcactatagaaaacagtatgaagatttctcgaaaaactaaaaacagaactaccatatgatccagccatctcactactgggtatttattcgaagaaaaagaaatcagtatatcaaagggatacctgcattcatttttttattgcagcgctattcatagtagcaaagctatgaaatcaagtgtctgtctatggataaatggataaagaatatgaggcatacatacagawttgaatgccattcagcaataaaaaggaatgaaa

SEQ ID NO: 851094 - DNA, 611 bp, Homo sapiens
ttctccatatcaaaaataacttttttttcttttatgtcattcatgtgttcactggattagcacctttaatttccttcaagaacttttccttcttattcacaatttggctaacctgttggtaaaagaagcctagttttcagccctatcttgtctttcaacttgttttcttcactttgcttactcatgtctagcttttcatttaaaatgagagatatgtgactctttctttcactcaaacactttaaggccattgtgtggttattttttgccctaatttcaaagttgttgtatctcagggaatagggaggctgaaggaagagagacaggggaagagccaattggcgaagcagttgtaacacacacaacatctattgattaagtcggtcattttatatgggcacaatttgtgattccccaaaataattaaaatagtaacatcgaaggtcactgatcacagattaccatatcatatataataatagtgaaaaacttggaatattgagakaattattaaaacatggcacagagacatgaagtgaacacatgctgttggaaaatgatgttgatagacttgcttgacaaagcgttgccacaaaccttcaatttgtaaa

SEQ ID NO: 851095 - DNA, 609 bp, Homo sapiens
ttaacgtggaggaaaaccatgcaaagaaaagccatgtgtttaagttgtgtaacttaaaacacaaagattgtgcttaattgacacatccagattttgtcaatgtgctagtgttgtgttctgctctacaaaacatttaataacacagttacactacagtttggaatagctattacctgtcaagcatgaggtaccagagatacagatgaattaggcagagtaactgaacctaagaaaatactaaataaggccaggcgcagtggctcacgcctgtaatcccagcacttcgggaggccgaggcgggcagattgcctgaggtcaggagttcaagaccagcctggccaacatggtgaaacaccgtctctattgaaaatacaaaaattatccaggcgtgctggtgggcacctgtaatcccagctacttgggaagctgagggaggaaaatggcttgagccccggaggcggaggttgcagtgagctgagattgtgccactgcactccagcctgggtgactgagtgggactctgtctcaaaagaaagaagaaaaraaaagaaaatatgaaatgagccaaaaagatctactcacagaaaaatctttaaacttatcaaaaat

SEQ ID NO: 851096 - DNA, 592 bp, Homo sapiens
agaagctgagggctgaggccagtggatcccttaagcccgggagtctgaggttacagtgagctatgatcacaccaccacactccagcctggaagacagagcaagaccccgtctctttaaataaataaataaataaaagtgttagatggtggaaatacctagcaaatgttttgtttcaatgacttacaccttttgagctcacctatagtaagggtaaggaaagaataaatgctctcctcccagcctacacttgggtagaccagggctgcatccaagctgcttacaggtcactgacttggctctgggatgcctgcttccactgttcacccccctaccaaaccccgccttaggtgtagcttcctggcattgtgggatgggagaggaacaaagccagcagagaccatctcaggtaactgggaaggaatactgatggagggagaggccctagtgtcactccagccccatgaaatgtgtggttttctttttttttttttggagatggagtcttgctctgtckcccaggctgaaatgcagtggtgcgatcctggctcactgcaacctccacctcccaggctcaagggattctcctgcctc

SEQ ID NO: 851097 - DNA, 382 bp, Homo sapiens
gtaagaaaaaacagaagatggataaaattagaaatgaaaaaggtgacattacaacagatactggagaaattcaaaagatcattacaggctactatgagcaactataagtcaataaattggaaaatctagtagaaatggataaattcctagatatagactacctaccaagattgaatcatgaagaaatccaaaaccttaacagacaaataacaagtaatgagatcaaagccttaataaaaagtctggcygggcgtggtggctcatgcctgtaatcccagcactttgggaggctgaggcgagtggatcacctgaggtcaggagttcaagaccagcctggctaacatggtgaaaccctgtctgtaccaaaaacacaaaaattagc

SEQ ID NO: 851098 - DNA, 596 bp, Homo sapiens
aaaaaaaagaaacatatagttcaaacatatagaacacacagaacaaaatgcagagtccagaaatagackcacacaaatatgacaaattaattttgggccccagaaaaactaaatggcgaaaggaaccgtatgcatgcatttgcaaaaaaaaattaacctacatctgaagctcacaccttatacaacaattaactcaaaatagatcataaacctaaatatgaaacataaagctataaaaacttttaaaataaaacataggagaagtctttgtgaccttgggtttagcaattagttttaaaatacaacagcaaaagcattatcaatacaagaaaaaaataataaataggacttcattaaaattataaacttttcctctgcaaaagataccattaagagactgaaaacacaagtcacagactgggagaaaatatttgaaaaccacacatctgacaaataaattgtttctagaatatacaataaactcttaaaactcaacaataataaaattaataagataataaggttttttaaatgggcaaaatacttgaatagacatttcaccaaaaattatttagagatgtctataagcacattaa

SEQ ID NO: 851099 - DNA, 630 bp, Homo sapiens
tgtttcacctttttgtcaattgtgtgtccactggagtagcactttcagtttccttccagaacttttcctttgcattcacagcttggctaaatggcgtaagaggcctagctttctgcctatctcrgctttcaacatgccttccttatcactcaacttaatcatttctagctttgtatttcaggtgagagatgtgtgactctgtctttcacttgaacatttagaggccattgtagggttgttaattggcctaatttcaatattgttgtgtctcagggaatagagaggcatgaggagagagagaaagctagtcagtggagcagtcagaacacacacatttcctgattaagttcaccatctatttatttatttatttaagacaggtcttgctctgttgcccaggctagagtgcagtggtgcaatcatagctcactgcagtcttgaacttctggccccaagtgatcctcccacctaggctttctgagtagctgggactacaggttacaggttctcggtatgttaaccaggctggtctcaaactcctggcctcaagccatcctcctgccttggcctcttaaagtgttgggattacagacgtgagccattgcagctggccaagttcaccatctcacg

SEQ ID NO: 851100 - DNA, 517 bp, Homo sapiens
acatgacatttactctaaaattgatcacataatcggaaataaaacactcctaagcaaatgcagaggaactgaaattacaacagtctctcagaccacagtgcaatsaaattagaactcaagattaagaaattcactcataaaccacacaactacatggaaatggaataatctgctcctaaatgactctggggtgaataatgaaattaaagtagaaatcaagaagttattggaaactaatgagaacagagacaacataccagaatctctgggatgcagctaaagcagagttaagagagaaatttatagcattgaatgcccacatcaaaaagctagaaagatcttaacaacctaacatctcaattaaaagaactagagaaccaagaacaaacaaactcgaaatctagcaaaagacaagatataaccaaaatcagagctgaactggaggagatagagacacaaaaaactcttcaaaaaataaacaaatccaggagttttttttgaaaaaattaaaaaatac

SEQ ID NO: 851101 - DNA, 467 bp, Homo sapiens; identical to SEQ ID NO: 847672

SEQ ID NO: 851102 - DNA, 596 bp, Homo sapiens
aatgacaagtgtcctagtaagagacagaagagaagacttggaggagaaggctgtgtgaagacatatgcagagattggagtgatgccaagcaatgcttgcrgtcaacagaagctggaaaaggcaagcaagaattctcctctcagagtcttcagaataacagtctctgtcagtaccttggtttcacacttccagcttccagaattgtgacagaatacatttctattggtttaagccaccaagtttatggtaatctgttacagagggcctaggaatacaatacatcctccaacttctctccgttcggcaaaatatgactagataccggcagtacgtaccttctacacataatttgttgagagtttttatcctgaaaggcttttgaattttgtcaaatactttctctgcatagattgagataattatatgcttcttatccttcattccattattgtggtggatcacatttatttatttgtagacttgagccatccttgcatcccagggataaatctcacttgctgatattatggtgcataatccttttaatgtactgttgaacttggttttctagcattttgttctcgatttctgcttct

SEQ ID NO: 851103 - DNA, 390 bp, Homo sapiens
ttcactgtgttagccaggatggtctcgatctcctgacctcatgatccgcccgcctcggcctcccaaagtgctaggattacaggcgtgagccaccgtgcccggcctctccattattttttagctgaaccacttgtagacaaattgcaaacaccaagatactctaccttaaatacttcagcatatatctccaaaataaaaatgtctggatcattctagtgtacaagcagagccgtgcatagcctataaaatggaaccgtggagactcgatacctgtaactmctccagactccgttactaccccctcccaactttttctctgtaaatatttgaccaacctggtatacgatgctggtattatactgaagtacagtaaaataaaatctagcagca

SEQ ID NO: 851104 - DNA, 631 bp, Homo sapiens
aatggtataatactcaggggtttgataatatggtttgtgaattatttaggtcakttgttctttttcccttcctcttttcatttggataacttaacaatagctcaagaaaattgtgtaggagtgggaaataaaggaatccctcaaattttgcctgaaaccgactggtgtttaaaatagcatttttaacaaagttgaaggctgcttgggagagtcagcaaatttggttttagctcctggttgagttacatagaatggttcaggattgaccagaatcacatagttagtaaaagctggaatttttgcaaattctgctgccttcttggtgctatcttcttcctgctgcattttactgattcctgattctgcttctgttaagcactaaggcctttggcaagtcaattcttatctcatattctccatgttcttatatataaaataagaaagaggatagatactgattctctacttagtaagaagctatggccttcagtcagccttaacaactaaacactacatcataataatttttaaaaggcgaatatttatttatcaatcacaccactttcgctttatgcatttaaatcatactgtgaatgattcaactaaaacatttctaataagatttgtataa

SEQ ID NO: 851105 - DNA, 631 bp, Homo sapiens
aatggtataatactcaggggtttgataatatggtttgtgaattatttaggtcagttgttctttttcccttcytcttttcatttggataacttaacaatagctcaagaaaattgtgtaggagtgggaaataaaggaatccctcaaattttgcctgaaaccgactggtgtttaaaatagcatttttaacaaagttgaaggctgcttgggagagtcagcaaatttggttttagctcctggttgagttacatagaatggttcaggattgaccagaatcacatagttagtaaaagctggaatttttgcaaattctgctgccttcttggtgctatcttcttcctgctgcattttactgattcctgattctgcttctgttaagcactaaggcctttggcaagtcaattcttatctcatattctccatgttcttatatataaaataagaaagaggatagatactgattctctacttagtaagaagctatggccttcagtcagccttaacaactaaacactacatcataataatttttaaaaggcgaatatttatttatcaatcacaccactttcgctttatgcatttaaatcatactgtgaatgattcaactaaaacatttctaataagatttgtataa

SEQ ID NO: 851106 - DNA, 598 bp, Homo sapiens
aatttatttatggttttacagaaaaatcaaataaggctgctgagtgttattttgaaaactacttttatgtttctgtatctaatttctctgttagcaaaatgaggaaaatttttctgacatctcaaagtagtttaagagagaattcataagtataaaatgttttaagcatatgcggactttatatggatagcctaagtcacagattctagcctctgaacttgtttatccacagactatttctgacaccaaatgtgtggtggatttttccacccccagccaattctccagttttccaaaccactgggtttcctaccatccactcaactccactaactacccagggtgagcacagacccaggggtgaagaattaagtttcaaaggaccaccccccatttcagataccaaaagcaagtcttgggccaaccacatttctggctaaccaggtaaaatttgcagaaccccacgacayacttttcaggctcattaatttgctagaacagctcacagatctcagcgaaaccattgactcactgtcaccagtttattgcaaaggatgtaactcaggaagaaccaaatggaagagaggcatagggcaag

SEQ ID NO: 851107 - DNA, 457 bp, Homo sapiens
tttagtttaactagataccatttgtcaaatctgctttcattgcaattgcttctggcatctttgtcatgaaatctttgccattcctatgtccaggatgatattccctakgttgtcttccaggatttttatagttttaggttttacatttaagtctttaatctagttcattgagagtttttaaaataaagggatgttaaattttatcaaaagtctttctttgtctattgagataatcgtggtttttgtttttagttttgtctatgtgacgaatcacattgattgatttgcaaatgttgaaccaactttgcatcccaggaataaagcctatttgatagtggtggattaaatttttgatgtgctgctggattcagtttgctagaattttgttgagaagttttgcttccatgttcatcaaggatattggcctgaagttttcttttatttttgtgtctctgag

SEQ ID NO: 851108 - DNA, 565 bp, Homo sapiens
tatttttatttctgtggggtaagtgctaatatcgtctttgtcatttctgattgtgttaattggatcttctctctttcttctttattattctggctagtggtctatctatcttattaactttttcaaaaaattagctctggctttgttgatcttttgaatagtttttcatgtctcaattccttcagttcagctctgattttggttatttcttgtcttctcctagctttggggttagtttgctcttgcttctctagttcttttagtcatgatgttaggtcgttaatttaagatctttctaactttttgatgtggatttttagtgctataaatttccctcttaacactgccttagctgtgtcctagagattctggtatgttgtaactttgttttcagtagtttcaaaaaacttcttgatttctgccttaatttcattatttacctgaaactcattctggagcaggttgtttaagttccatgtaattgtatggtgttgagcaattttcttagacttgaattctgtttttactgcactgtggtrtgagagtgtggttggtataatttcag

SEQ ID NO: 851109 - DNA, 597 bp, Homo sapiens
taggaaccattctttgctctaggagtagcaatgagatccaaatccaggaaatatggcaatatcttcgatttacatcattagccctcagtatttttttttttttttgagactagaagcagaaggctgcttcatgcctggctgcctatcaaaagaagcaattttcataaatctatagctctgaacaatgaaaacggttcctttcacctctgctgaatcagtgtctggagcatcagggacaggggaaaagttctaacattagcttttttcttctacctgctgctaatcagagtgcaagcgagaagttgtattcttctcagggccagtaaagcagggaaagaaatcactagtgctcctctccggtctgaggatcaaataaacagcctttttttatcatccagctgctaggggtatggcttgagctacagacagctcattagaaagaaccacaaagttagaaatttggcctttggggggaaaatgtcattcttcaaattccctgtcttgtrttctttaactaagtacatatcctttttaggggccagatgggatggggacacctgttttgaaccttaagacaataataagagcttagatatt

SEQ ID NO: 851110 - DNA, 586 bp, Homo sapiens
cttttgctaacctgtcttttgttatagtagtgtcrcctgtgacctttatgatgggtaaggaaagatttcacatcttttctacccctacattatcatactgtgaaattttattatatgctgtcttgccctcatagaaagagaattttggagtttgaaagaatcctgctaatcatgaaatctggtcctttatttaacagaaaaattcccagagacatgaaatgattagtactgtttcacagagaagcagagggagagccagaccctcagtcagtccaggctctgctgtctttggaggtggggtttcaggtctccccagcagggttgtgaggtcccaaagaacgggaggcaggccttgggccatagtctcctgcatccctccagagcctgcagcaggagctgggcccaaggatgctgctgagtgagtccacatgactgacatacactgctctggaagcaccattccggcagactagccctcttcttcccatgtaatccaggaaggttgttatagatagtccagatttttctagataatcttgtaacatattcacattcaacatacatacaaaaattcacacttggtatg

SEQ ID NO: 851111 - DNA, 589 bp, Homo sapiens
gaaaatacgaattatagaggaacggggaagaagggaggtatatatactctttgtactttctcttcaaattttttaaaaygtgaaactactctaaaaaatgtctattaaaaaattatgatcaatttcagtttatcctaggaaagcaaggataagttaataagtatacatatatacatatatataaatttaataatctatactaacaaatcattacagaaaatcacatgcattttagtagacaccaaactaacttgtaattcataaaagaatgtctgagtaacctgtggccgggagtggtggctcacgcctgtaatcccagcactttgggaggctgaggtgggcggatcacgaggtcaggagatcgagaccatcctggctaacacggtgaaaccccgtctctactaaaaatacaaaaaaattagcagggcatggtggtgggcacctgtaaccccagctactcgggagggtgaggcaggagaatggcatgaacctgggaggcagagcttgcagtgagctgagatggcatcactggactccagcctgggcaacagagcgagactccgttccgtctcaaaaaaaaaaaaaaagg

SEQ ID NO: 851112 - DNA, 589 bp, Homo sapiens
gaaaatacgaattatagaggaacggggaagaagggaggtatatatactctttgtactttctcttcaaattttttaaaatgtgaaactactctaaaaaatgtctattaaaaaattatgatcaatttcagtttatcctaggaaagcaaggataagttaataagtatacatatatacatatatataaatttaataatctatactaacaaatcattacagaaaatcacatgcattttagtagacaccaaactaacttgtaattcataaaagaatgtctgagtaacctgtggccgggagtggtggctcacgcctgtaatcccagcactttgggaggctgaggtgggcggatcacgaggtcaggagatcgagaccatcctggctaacacggtgaaaccccgtctctactaaaaatacaaaaaaattagcagggcatggtggtgggcacctgtaaccccagctactcgggagggtgaggcaggagaatggcatgaacctgggaggcagagcttgcagtgagctgagatggcatcactggactccagcctgggcracagagcgagactccgttccgtctcaaaaaaaaaaaaaaagg

SEQ ID NO: 851113 - DNA, 498 bp, Homo sapiens
ctatcctggaaagtccctgataaaagcactgcgttttcttaatcagtttccttttctgcagaataaatttctgttatgcttcttaatcagcaaaatgacaaacaaattaagaaataacctcaaacttaacaaaacagaacaaagtcttccctgaaggtcttggagaaccacatgagatcagatcacaacccaaggtctgccctgagaaatggggaaagccagggacctgccacacctcccttcctcttgtctaatcggagaagagaaactaaacttaattttcatgatcttactatgttagcctcatacgtaatcatcttctcttttgtctaaatggttccctattttcaccttatacttaactatcatatatagggcatatgaatayatttatctcagatcccattcagaagttgtaaaggaatacattattaataaatcaaatatttctacattacatggaagaaagtgtggaacagttaagaggatgggtactgg

SEQ ID NO: 851114 - DNA, 570 bp, Homo sapiens
ctctgcttcccgggttcacgccattctcctgcctcarcctccagagtagctgggattacaggtgcccgccaccacacccagctaatttttctatttttggtagagacggggtttcaccatgttagccaagatggtctcgatctcctgacctcgtgaaccgcctgcctcggcctcccaaagtgctgggattacaggcaggagccaccgtgccaggcccataaagcatattttaaaaataagtgattttaattaaaataagaaacttgaattcagaccagtatttaaatccaatcccagaaatgaacattagctaccgagaggcaaaaatatttaaggaatcaaatgggcctagaaatatttagtgttttgccttggataactgcattatttgcaatgaaccttcaaaaatcatgtagtaggtaatcctggttaacctaaattaaattgtacccagattgatagcacctgcccattttctagataatggcagccatccactgaggagaggaactgcctaccatgactgggaagagtgaatgagaactttattgtaaaaactcaaagtaccca

SEQ ID NO: 851115 - DNA, 522 bp, Homo sapiens
aagagtctacatatcaggaagatgacattaaaagtatattcagtcatatgaagctttcactcaagatatttcaggtaaaacttcatgatcagaaaaacatgcccttattttgattctattttatcacttggakacccctctttttctcacttttttcgttttttcttagttcaaggtattaggctatgaaaattgaaatcccagtcatttttctcattttcttgactaatttcattctgataaaccctgtgaactcattgcaactttccagaatattactaatgctaaagcatctagacgttatggctaaaatgcaggtcctcaaaattagctgcagttgctgatatttttttagagcctcatgagaaagataatggcatatggaattaatgataaattatgaccaattattttctcataaagctacacagaaatcattgcatgctttttctaaactctgggattttattctgaatacaaaaattaattaaattcaggtgacatttgataaataattgtgac

SEQ ID NO: 851116 - DNA, 412 bp, Homo sapiens
aggcgcggtggctcacgcctctaatcccagcactttgagaggccaaggtgggcagatcacgaggtcaagagrtggagaccatcctggccaacatggtgaaacctgtctctactaaaaatacaaaaattagctgggcatggtggcatgcgcctgtagtcatactcgggaggctgaggcaggagaatatcttgaacccaggcagtggaggttgtggtgagccgagattgcaccactgcaccctagcctggtggcagagcgatactctgcctcaaaaaaaaaaaaaaaaaaaatcattgtatgaatattcaaaattatacatgattgtaattataattgagtcatgaaggctgaaaataaagataaatgaatcaagcttcatttaagtagcaaaatgaaagcctctccatcctcc

SEQ ID NO: 851117 - DNA, 607 bp, Homo sapiens
ggaggacttactaaaatacagattgctgggccccagttctagagttcctaattcagtaggtctcaggggagcctgagaatttacatttataacaaattcccgtgtggtgctatcactrctcattcaggaaccccacgttaaaaaccagtagagaaaagtgtggtgctgcatttgttgctgccgtatgtaaaacctgtgaggtagcaagtgaggtggtcatcaccacacataatgaaaacagtttcataaaactcactaatgaatgggtccagttctgttaccccttaggtctaacttttatggaagaaacacagaccttgccttctgatgaattggctgactgctgaactaactcactgagtctttcatttacttggaaaatcatgattgaacttcattgatcagatgggcattctacttaacacagggtggacaaaagtttggaaaaataaacaagtgtttaatatatttcacatattaagttgcaataacactcattgttgatgagctaagggacacctcctggagtgcttcccgcagaagatataccacccgttccttcaagggagggaggaaccagatggttggtaatttccaaaactgagat

SEQ ID NO: 851118 - DNA, 607 bp, Homo sapiens
ggaggacttactaaaatacagattgctgggccccagttctagagttcctaattcagtaggtctcaggggagcctgagaatttacatttataacaaattcccgtgtggtgctatcactactcattcaggaaccscacgttaaaaaccagtagagaaaagtgtggtgctgcatttgttgctgccgtatgtaaaacctgtgaggtagcaagtgaggtggtcatcaccacacataatgaaaacagtttcataaaactcactaatgaatgggtccagttctgttaccccttaggtctaacttttatggaagaaacacagaccttgccttctgatgaattggctgactgctgaactaactcactgagtctttcatttacttggaaaatcatgattgaacttcattgatcagatgggcattctacttaacacagggtggacaaaagtttggaaaaataaacaagtgtttaatatatttcacatattaagttgcaataacactcattgttgatgagctaagggacacctcctggagtgcttcccgcagaagatataccacccgttccttcaagggagggaggaaccagatggttggtaatttccaaaactgagat

SEQ ID NO: 851119 - DNA, 607 bp, Homo sapiens
ggaggacttactaaaatacagattgctgggccccagttctagagttcctaattcagtaggtctcaggggagcctgagaatttacatttataacaaattcccgtgtggtgctatcactactcattcaggaaccccacgttaaaaaccagtagagaaaagtgtggtgctgcatttgttgctgccgtatgtaaaacctgtgaggtagcaagtgaggtggtcatcaccacacataatgaaaacagtttcataaaactcactaatgaatgggtccagttctgttaccccttaggtctaacttttatggaagaaacacagaccttgccttctgatgaattggctgactgctgaactaactcactgagtctttcatttacttggaaaatcatgattgaacttcattgatcagatgggcattctacttaacacagggtggacaaaagtttggaaaaataaacaagtgtttaatatatttcacatattaagttgcaataacactcattgttgatgagctaagggacaccwcctggagtgcttcccgcagaagatataccacccgttccttcaagggagggaggaaccagatggttggtaatttccaaaactgagat

SEQ ID NO: 851120 - DNA, 565 bp, Homo sapiens
aatggattcaataaagtttcaggatccaaaattattatatggaaaccagtagtatttccatacaccagtaatgatctagctaagtatcaaatygagaaggcaatcctgtttataatagctatcaaaaaataaaaatctaggaatatatttaaccagagaggtaaaagatctccataaggagaactataaaatactgatgaaagaaatcagagatgacacaaacaccccttgctcatgagctggaagagtcaacattgttgacatgaccatactgtccaaaagcaatttacagatttaatgcaacccttatcaaattaccaatgtcatttttctacagaattgggaaaaaatcctaaaattcatgtggtaccaaaaaagagcctgaagagccaaagcaaccctaagcaaaggaaaaaaaaaaaaaaaaacaagctacaggcatcacattacctgacttcaaattacttcaaattataccacagagctataatgaccaaaacagcatggtactgctataaaaataggcacagaacccagatataaagccacacacatacaacaaact

SEQ ID NO: 851121 - DNA, 495 bp, Homo sapiens
taatacctcaagttttgtttaagtaatgggaaaagtttttgtacatttgtttaatataaaaagcattgtcactaattttggtaatgggcaagccatgatctttgagcctctgaccttttaggattacatttcttttaagtcttctcttgattattaactttatttctgagcacatgctgagattgttagtaagagcatgctaaatctaacctctttttcttttttggtagtgtgataagattgtggtaccagggctgagccttaactgtaatgtatatgaatctaagcaagataatcatcaatctggcttggtatacatgacataggaagtcaggtcagatgatagttgcaattctagctggttaacaactttycttaaaaggtgttcagtaatggattcatttttctagaaacattaaggtaggtttcttagaatatgacatatggctatgtttattttgttctagtcagtgcatttattgatgacttgtcaac

SEQ ID NO: 851122 - DNA, 652 bp, Homo sapiens
tgtgatgcggagtaggaatgttatttctctgtaaacaggtaattaattatctcaactccatttgtggactaatcaatcttttcctctatggtctaaatgtatgatatttctacatgtccaagagtcttttcagggttctattttattctttgagtttaattgtctaatcctgtttagagacaggcaaatttaatttctataagtttgtaggatactatctgatagaatgagtgccatcttgaatcttttgcaaaatgtcttcactattcttgaacattttctcttggagataaattttagaatcaacttatcaaattgcacgtttaccatgtgcagttttagccattgtcaattttattttatattaattctttctacagaaatatttattataaattggacacaatactgacagtttatatttaattcttaacttatgaaaacactgtaagcaaatcctttcagatgctacagaagagtaacatcatcttgtcatcttccattggtgtcttgcttttttagctttgyctatacatactaactactcattttgtggtagagttaagaacaataggttaaattataatgtccttcgtttgttgggcatggcggcttatgccagtaataccagcactttgagaggccgaggcag

SEQ ID NO: 851123 - DNA, 652 bp, Homo sapiens
tgtgatgcggagtaggaatgttatttctctgtaaacaggtaattaattatctcaactccatttgtggactaatcaatcttttcctctatggtctaaatgtatgatatttctacatgtccaagagtcttttcagggttctattttattctttgagtttaattgtctaatcctgtttagagacaggcaaatttaatttctataagtttgtaggatactatctgatagaatgagtgccatcttgaatcttttgcaaaatgtcttcactattcttgaacattttctcttggagataaattttagaatcaacttatcaaattgcacgtttaccatgtgcagttttagccattgtcaattttattttatattaattctttctacagaaatatttattataaattggacacaatactgacagtttatatttaattcttaacttatgaaaacactgtaagcaaatcctttcagatgctacagaagagtaacatcatcttgtcatcttccattggtgtcttgcttttttagctttgcctatacatactaactactcattttgtggtagagttaagaacaataggttaaattataatgtccttcgtttgttgggcatggyggcttatgccagtaataccagcactttgagaggccgaggcag

SEQ ID NO: 851124 - DNA, 625 bp, Homo sapiens
cagagtccctaaacgaacaaacaaatgaccaaacaacaaactcagacgggagggagaagagggagggaaggatcagtacacagagttgctaccatgtattatctaaagtgtccagctctcaaaagaaagctctaagtcatgcaaacaaataacaaagtgtgacctatgcacaggaaagggaaacaaacaaacaaacaaacaaaaaacaggcttggaaggccccagaggttgaactttgcaaacaaaaacttcaaagcagctattatgaatatattcaaagaactaaagaaaaccatgtttaaagaattaagcaacagaatgacaacaatgactgaatacatagaaatagaaattataaaaatgaaccaaatggaaattttgaagttgaagtgtacaaccctgaacttaaaaacttgctagaaaggctccgtagtagatttgagctaacagaggaaaaaatcggtgtgaacttaaagagagataacgagagattatgcattctaaagaacagaaagaagaaagaaaaggaagcakggtctcagatcaacatggggcaccatttagcaccccaatatttgcatatggaatgcaggacaagaccagagaaaggaatagaaaaaaatat

SEQ ID NO: 851125 - DNA, 578 bp, Homo sapiens
catcaatcatcttagctagatattttggataacttgctgcagcttctccatcagcacctgctgtttcaccttgcactgttatgttacagagayggcttctttccataatcctcatgaaccaacctcttctcacttccagcttttattgtgcagcttccttacctctcagctttcatagaatcgaagagagttagggcctggctctggattcaattttggccaaggcaatgttacagctgtttgatcttctatccagaccactaaaactttctccatatcagcaataagtctatttcactttcttatcatttgtgtattcactagagtagcacttccaatttctttgaagaacttttcttttgcatttacaacttggctatttggtgcaagaggcctagcttttggctgtctcagctttttacatgccttcctcactaagcttaatcatttctagcttttgatttaaagtgagagatgtgtgactcctcttttcacttgaacattttgagaccattgtaggattattaattggcctaatttcaatactactgtgtttcaggtaatagggaggctttaag

SEQ ID NO: 851126 - DNA, 578 bp, Homo sapiens
catcaatcatcttagctagatattttggataacttgctgcagcttctccatcagcacctgctgtttcaccttgcactgttatgttacagagatggcttctttccataawcctcatgaaccaacctcttctcacttccagcttttattgtgcagcttccttacctctcagctttcatagaatcgaagagagttagggcctggctctggattcaattttggccaaggcaatgttacagctgtttgatcttctatccagaccactaaaactttctccatatcagcaataagtctatttcactttcttatcatttgtgtattcactagagtagcacttccaatttctttgaagaacttttcttttgcatttacaacttggctatttggtgcaagaggcctagcttttggctgtctcagctttttacatgccttcctcactaagcttaatcatttctagcttttgatttaaagtgagagatgtgtgactcctcttttcacttgaacattttgagaccattgtaggattattaattggcctaatttcaatactactgtgtttcaggtaatagggaggctttaag

SEQ ID NO: 851127 - DNA, 632 bp, Homo sapiens
cttccctgctgcagccagcatgatggcaccagccaytgccatcacctgctaccaaggatggtgaggcaggaggatgcttgagcccaggaagttgagaatacagtgaactgtgatcatgccactgcactccagcctgggtgacagagcaagaccctgtctcaaaaaaaaaaaaaaaaaatgctgctctgtctatggagtagccattctttaattcctttactttcttaataaacttgctttcactttgcactgcatacttgccctgaactctttcttgcgagagatccaagaaccctttcttgctctcttggggtctggatcaaaacccctttcctgtaacatatttctggtgaccacagaggggactatagtgcagaaaccctgacccaacgctacctttgggtaagtgttggcgttctgtgacagctttctcgtgaaccacaaaagggacaatattgaggagacccctgatccaaaggaaatagactgcaacactgattggacgactttgggtaagtggtggggtaccagggtaaagaataggtttgagttagaggctcaacttagaggaattagggtctcttctaggacagagtgagttagaggatcctcttaataaaaggcaaggatgc

SEQ ID NO: 851128 - DNA, 624 bp, Homo sapiens
cattaaaataatgaagtgaaaatagtaaaattatcaaacttgtaggatacattgaaagtagcgtatacaagaaaattctaaatgytttttagaagacagcaaagggtgaaaattaatgagctacgaatgaagcttgagaaattgaaacaaatcacaatccaaataaagtagaaagatggatattctaaagaacaaaaactatgaaatggaaaacaaagccaaaagtttgtctttggaaaaaagaaaaaaaaagctagacccatggctggcaagattgattaaaagagagacgacacaaattattaatattagaaataacaaagggtattaataatccagatatagtagaaatgataaagatcatgaaaaatattgtgaatatttttatgtcaatacatttgaaactgtagatgaaatagaaaaatatggcttattaaaactgactcagttgggcaaggtggctcacacctgtaagcccagcacttcggaggctgaggtgggcagattgcttgagaccaggagttctagactagtctgggcaacatagtgaagctttgtctctgtttaaacaaacaaacaaacaaacaaacaaacaaacagaaacactgactcaagaagaaataa

SEQ ID NO: 851129 - DNA, 560 bp, Homo sapiens
aatctcaaaaaagggcaggaactctccctacaattgatctgacagaaaagaaaatgccctcctaacaggcctccggcaggcacacttcccaagcgctccttggtttttttgttgttgttgttttgttttggtctcatcttccccagagactcctaagatggaaaaaggaccaatacactcccagcttgggcgatgcttcactgttaatgtcttaaaattcttggtcagttttgtgtttttttaaactcaagatctaaccacctgatcttaatactttttgaacaaccccacctcccaccacaattttcatttttcactgggtcccacaaattatgtagctggtccagaagggaagtaaaaacacccaataatatcttcttataaagtgcacaggaaaacctggccctgtcctaagaaccgaggccacagaactctgaacttttcctgtaacaccccatctccaatatcgaggctccaagatttttaaacgcatttgcagaaattctacaaaggtaagagatttttgcmaaagttaagcggaaaattctctgcctgccaca

SEQ ID NO: 851130 - DNA, 602 bp, Homo sapiens
caagcgatatagcaacgtatgtgagtgcctctgatgatttagcataaagcmgtcctgagccacatgacaggcacagccgcgaccagggacacaggctatctcataaagtactagcatgaagaattcagcagtgggactaagaaagaataaccctgaattgttcagtgtcagccaggagtatgtgagttttctgcaggagttgaattcctagggcaagagtttaaaattttcagaaattagtgggaaaatcaaagtaaaagaaaatactcattcaatttctacatgtcattatgataaagaagagaaggatacagaagcctagatatagtcaggacagaacttttttgtttcagaaactttttgtaaatgatgtctgtcttatttaaaaaataatccccagtatctttgcccaagacttgagtaataattttgtttgaatctcctatttttaaatttgtttcagaatacaacctaaaaggaacaaactaatgctctactcagtaggcctcttttcccttttcctaaagctcgtggcccagagtctctaatctcaccctcacaggcaatggggagttctagagcacacaagaggtccgtactct

SEQ ID NO: 851131 - DNA, 608 bp, Homo sapiens
atcctttcttaaacactagtccttagttcacagttaggaggactgggaaggcagcttgggcatgggcagcccccatcaaacgggaggctgaacagaggtggctttgatggcaggctgggaggtgaggwcaactcaactgaagcatctttaaacacagggttaacaggtcaagtctagctagctgtggggcagtttggcccttcccccttggggaatgttttacattccttggaagctgcatacttaaaagagatagacaggacagagcttccctccaggacatgggagtagccacattgtctggctggtgggttttcccagaataccctgaggatggtgtgttttaaaatgtgcagtccaggagctggacagatcgcccttgtttgtgcatatgtgctgtgccctctcaaggttcctttccttttccatctgggaggtctccacttcctttggctgtttcacatcctggcttgagggaaggtcctgatcacttactagttcacagctttgcatctcagttatatctcaccattcataagaattctggagcccaagctgcaacaccaggctctttgtggaggaaaatccatttttaagacattctcctt

SEQ ID NO: 851132 - DNA, 616 bp, Homo sapiens
gcacagtctgcacgaagtgacagccccggcrctacctgagcccatgggactcagctcttcatcctctcagggcctcttttagtctaggtgcccagggcactgagagggacctggagtgacaggaacacttgactcatggatcagaggtggagcagcagctcagggtggctgtgtgccctccctgggggtcattccctctctcttgtcctaggagcttggggtgcccatgcttgaggcaggaggctgtgtgctcctgggagctggccatggtgccatcttccagggccatttctcatgcctcccagtttccagtccctcctgactcccctccttctgggtcctccgcggcacaatgatatatttcatatttctatggaaggggtgtcatgtctcagcccccacactggcacacacacaaaaatgtatatgtgcatatacatatatatatatatatattttttttttgccaagtaagtcagcttggactcaaatgtcagtttctttgaacagatttgtcaatgacctcaaattaaactctcccatttgaggaatggcaggtgctgcccttaatatatcttgcaggcctgggagtgacaggtgtggggcctgctcacct

SEQ ID NO: 851133 - DNA, 526 bp, Homo sapiens
cagacatatccataaacatgaaacagttagatttcctacatgctcaagcgttttgctgatcaaaaccattttttttttaaccttagtcacttcgaaggctggagcccatgttagtgaaagcctactcgcagttgattaagcaccacttccattcaggactgcaactcagcacatcctcattgagggccactatgcacaagctatgcatgaaaagctgggaaccacctagaggaggatgttggctcctgccctaaggagctccactcagttcagtaggtgttgcgtgcctgcgctgatggttactgcccaacaaggactgactttaccatgttgtgttgtggtataagtgcaagaagagaaatttttttaaacctagtgccacaagattcaaagacaggagggtaggataggtgatttagaaaaagcttctggaagcagaggctgaacacagtggggaagacatagacattcacaratgcttaactgaatgccaggccttgaatcaggctcattccaaacgtcattt

SEQ ID NO: 851134 - DNA, 505 bp, Homo sapiens
tgtaaggtggtatctcattgtgattttgatgtgcatgatttgcactttcctgatggattagtgatattgagcatcttttcatgtgcttattggctttttgtgtgttttctttatagaaatgtctattcaagtcccttgcccatttttttaatgagattgtttgttttgctgttgttgagttatgggagtctttacatattgtagatattaaccacttgtcagatatgtgatttgcaaatattttctcctgtttcataagttgcctgttcactctgttgattgtgccctttgatatacacaaggttttttattttgatgtccaatttatctaattttgttgttgttacctgtgcttttggtgttgtattcaagaaattattgtcaaatccaatgtcacaaagcatttcatccctatattttcatctaagagttttatagttttagctcttatattaagcccttgattcattttgartttattttcatatatggtataaaggaaggc

SEQ ID NO: 851135 - DNA, 541 bp, Homo sapiens
cctgggtatggggataggctttgaggacccctggtaggatgtaaattacattttttacataattgtgggttatcccttagtgagaaaaaaaacctgtagatatggcacttcactccatttgccctctcgtttacaaaagagatctagctgtaggatggtattatagtttacacttccctcgggtggccatgtctctcctctggaaagaggatactgtggccaggtggtgctgcataaaaatataagtcacttcttcagcatttgagggtcaaattggtcccaattatccagaatacacctcaggagtggcttcacttttgaaggaatgtctcccatctgaaaggagaacataggagtgcccgcacctctagtcatcccctagtgagcactagccctagggcatccctgtaggggtgggttgcccctacacacctgtgggtgtttctygtaaggtgggacgagagatttggaaaagaaaaagacacagagacaaagtatagagaaagaaataaggggacccggggaaccagcgttcagcata

SEQ ID NO: 851136 - DNA, 483 bp, Homo sapiens
tgggtccagtgggtcctcaaacttatcctgtggctcttcctccagttctgaaatgcataattggaataaaaatactcaggagctggtagaattcacatattaaatccccaatgtgtggagtgaaggtttctttgctgggaaaggccaagcataagtcactatgactgcctgtacccaggaacatagtaaaccaaaagaaatactgctatctttttaggattgtgccacaatcaaggattagtttgaaagatgaaggggagatgactacactacatctcctttcagcttccctatttggcctgggcagatgacagacagatcgtggaaaatgacagtgatttatcgtagacttaaccaggtggtgactccagttgtagctgctgtgccagatgtggttctattgcttgagaaaattaccacatctactrgtacctggtgcagctgtcgatctggtaaatacactttctccatccttatcaagga

SEQ ID NO: 851137 - DNA, 565 bp, Homo sapiens
tgatcaaaagagcacaattttggtccatgaataagcaggtagaacaatgagagggaagagagagtcaagaagctgattaaagtgtatattttattacattataaaagtagcattccaatttggtggaagagacttagtacttaatcagtggctttaagaatattgactctcagctgggcgaggtggctcatgcctgtaatcccagcactttgggaggccaaggcaggtggatcatgaggtcaggaaatcgagaccatcctggctaactaacacggtgaaaccccgtctctattaaaaatacaaaaaaattagccaggtgtggtagtgggtgcctgtagtcccagctacttgggaggctgaggcaggagaatggcgtgaacccgggaggcggagcttgcagtgagccaagattgtgtcactgcactccagcctgggtgacagagcgcaactccatctcaaaaaaaaaaaaaagtagaatattgactctccttctggaagaaaataaagttggatccctacctcaccccaaacaaaaatmaaatgcccaataagctagtagtttaaa

SEQ ID NO: 851138 - DNA, 561 bp, Homo sapiens
atttagatacaacttctaggactaggaaatgtgaagaaaacctagagtctagaagactacttttttgttcatatatttttgttcatttattccttccttcaacaaagggactcccaaatctatgagaaatattttaaccataagacccagcacgtacttgaccagttttcatccccctacaatgaagcaaattacactttaatggtttgttattgagggtgtgattagctttctgtcaacagaatgagaaattaaaaatcagagtcacttaaccaaaccacaagctacatccacctttcccaagaggtaacttagtttggtaaaaggagcataaacttggatgccatacaatcttgagttcaactatttgcttcaaatatttatttgaaaaaatttttttttaacctctcagaatctcagtttcctcatctctaaaagagagatactaaataactatctyacatgtgaggaaactgcctcggacaatattgttcactcctgctgtcctcacatctcttcccaacagaatttttgaggagaaaaaaaagaacgttttcaaga

SEQ ID NO: 851139 - DNA, 510 bp, Homo sapiens
cttaaatccctcagatactgttgtttatttgggttctcttgcatcacgctgagcttctttaagataattgtgaattatttgtcatacaattcatagatctccatttctctggggttggttattggaacgttattagtctcttttgatgttatatttgcctacttgttcattatcagtgcagctctgctttggtatttgtgcatttgaagaagcaaacacttcctcctgtttttacagactgatttaggcaagtaaagacctcttcctttgggtctctggcctaatgagattgcccccaagaatcacagttgagtaggattggtgctaggtcacatgggtgctgcagaatctacagtgggggctgtggatgatgaacctattaccagagtctcaaacggacatgaatcttgtctgttttctgggaaaactggactgactgtaagtctttggtcartaggctggcactaggaaatgggtacttttcaggatccgcagttgtgtctgcaatag

SEQ ID NO: 851140 - DNA, 608 bp, Homo sapiens
tgtggttttatctacctttggtctctgatgatggtgacgtatagatggggttttgttgtggatgtcctttctgtttgttagttttccttctaacagtcaggccctcagctgcaggtctgttggagtttatcagaggtccaccccagaccctgtttgcctgggtatcagcagcggagtctgcagaacagcggatattggtgaacagcaaatgttgctgcctgatcattcctctggaacttttgtgtcagaggagtacccagccatgtgaggtgtcattctgcccctacttgggggtgcctcccagtaaggctactcaggggtcagggtccaacttgaggtggcagtctgtcctttctcagatctcaagctgcatgctgggagaaccactactctcttccaagctgtcagacagggacatttaactttacagaggtttctactgccttttgtttggctatgccctgcccccagaggtggagtctacagaggcaggcaggcgtccttgagctgcrgtgggctccacccagtttgagcttcctggccactttgtttacctactcaagccttgccaatggcgggcacccgtcccccagccttgctgccacctt

SEQ ID NO: 851141 - DNA, 608 bp, Homo sapiens
tgtggttttatctacctttggtctctgatgatggtgacgtatagatggggttttgttgtggatgtcctttctgtttgttagttttccttctaacagtcaggccctcagctgcaggtctgttggagtttatcagaggtccaccccagaccctgtttgcctgggtatcagcagcggagtctgcagaacagcggatattggtgaacagcaaatgttgctgcctgatcattcctctggaacttttgtgtcagaggagtacccagccatgtgaggtgtcattctgcccctacttgggggtgcctcccagtaaggctactcaggggtcagggtccaacttgaggtggcagtctgtcctttctcagatctcaagctgcatgctgggagaaccactactctcttccaagctgtcagacagggacatttaactttacagaggtttctactgccttttgtttggctatgccctgcccccagaggtggagtctacagaggcaggcaggcgtccttgagctgcggtgggctccacccagtttgagcttcctggccactttgtttacctactcaagccttgccaatggygggcacccgtcccccagccttgctgccacctt

SEQ ID NO: 851142 - DNA, 581 bp, Homo sapiens
aagcctaagagtaaataatcttttttattaccaagggtctccccaaatttatttggccaaaaatcccatctttcattttatacctactaataatatctagaaatagaactcamaattcacattgggaaactattctaaatatatattcaaagccaaaagaaagatttactgtacccaatttggaaggacaacgagaataacgatagattagattagaggaacttgaaatagtgtaggcaagcaatgatgagggttggaattaaggccacaaaatggcatagattcaagaaatgcccatgatagggcttagaattgatctgatttagtgattattcagtgaaaaagaaggagtcacatatatcaggtctggcttgagtgattggttaaacggtggtataacttgccaaatggaggtctggaagaaaaattgttagagtaagaatgtgagttcacttttgaactgttgacttcgaaatatttggggttcttctaggtcattttttccaataggagccagaaatagagatttagagcataagaaataaagaataaaagcctcagcaaagatataaatgtcaaag

SEQ ID NO: 851143 - DNA, 578 bp, Homo sapiens
ataggagcatttccaactcctgtgtataaggagagatacagaaaaatctttacaggtggactgaggaartgaacctcaacagatttgcagtaaatataaggcagatttaaagtcctgaactcaagtccctaagccattcattgatttactcaaatatgtactaaacaaatatgtatcaataagtggctgtgctatttcagtggtaaacaacagtcaagatggctttcccgggctgggcacagtgtggcccatgcctgtagtcccagcactttgggaggccgaggcgggtggatcatctgaggtcaggagctcgagaccagcctgaccaacatggtgaaaccctgtctacgaaaaatacaaaattagccatgcgtggtggcgcatgcctgtaatcccagctactccggaggttgaggcaggagaatcgcttgaacctgggaggcggaggttgtggtgagtcgagatcgcgtcattgcactccagcttgggcaacaatagcgaaactccatctcaaaaaaaaaaaaaaaaaaaagatgcctgtccctggcgctcactgtctagtgcagaagacagacatg

SEQ ID NO: 851144 - DNA, 385 bp, Homo sapiens
tttcaacatatcatcaatgtagacattattagtgatatatttyacattctttttttcacaataagtctcaaaatgtgtttattttacatgtaagacacattatggtttagatgttaagttttcattagaaatacttgatgagaggctggatgcagtggactcatgcctgaactcagcattttggccaaggtaggaggatcccttgaactcaggaattcaagaccatcttgggcaatgtagtgagaccttgtctctatttttaaaaaaattacctgggtgtggtgtcatgtacctggagtcccagctacttgggaggctgaggcaggagaattgcttgagcctgggaggtcaaggctgcagtgagctatgatcacacctctgcact

SEQ ID NO: 851145 - DNA, 559 bp, Homo sapiens
attcatatggaaccaaaaaagagcccaaatagccaaagcaatcttaagcaaaaggaacaaagccaaaggcatcacattacccaacttgaaactacactacaaggctayagtaaccaaaacagcatggtactgatacaaaaagtgacacatagaccaatgaaacagaatacagaaccaataaataaagctgcacacctacaactatctgatctttgacaaagtcagtgaaaatcagaaaagggggaaagaatcccttttcaataaatggtactggcattactggctagccatacacaggagaatggaactggactcctacctatcaccatatacaaaaatcaactcgagatggattgaagacttaaatgtaagacctcaaactgtaaaaatcctagaagaaaacctaggaaatactcttctcaacatgggacctggcaaataattcatggtcaagttctcaaaagcaattgtgacaaaaacagaaattgacaaataggacctaattaacctaaagagcttctgcacagtaggagaaactatcaacagagtaaacaaacta

SEQ ID NO: 851146 - DNA, 631 bp, Homo sapiens
atttgccaaaatttttctgaattgatgtttaccaaatttggctgagcagatgtaattggaaaccattgaatgctttgtttctcattcccaratttactattgattaatctgtgttctttcttccacatgtgagaggttttgatacaagtgatgactattgttattttaattctgtgagactctcccccaacactgagccatctcccactaaattatagtaatacaaatgctgtccaaacattttattaaatgaagaagtttgctatttcttatttcatttgctactgaggaagagaatgcttgatatttttttcaattgatgagagtatattatacttctattgctttctatttatatggaatttgtccccatcaggttcagttatgtggacatcctcagcatctctataaacgcattctgggagtttgaattgtggagggtgaatcagcctagctaaataggtgagtcagtgtccagagaatcaaaagaccagaattctcagttcagtacataatagcgtgtgacctaaagcactgagcaattatacttgatcatgtacctgcatcgaagctacacacaaaagacaaatgagatcacacttaaagctgaaaatagtgagcctctaagagt

SEQ ID NO: 851147 - DNA, 480 bp, Homo sapiens
agatccagtgaaaagtagcaaagtcaagatgatttgtcttatgggacaactataaatgttatgataaatatctgctttgatgatgcacttgtccccgtttctgaaaataawgttgcaaacagaattttgcaatgttactgatttccaatataaaaatgctacccactactcttacctcgatatttacatgctaaagtttactttataatttagaaaaaataggctttgccttaaggaatcatctgaaggtagacccagggagaatgataaggaaatataagatgcacctaatacaatctttgctcaatttgctgggccagggacacatgcaatttccgagacttgcccacaaggcggcgtcaaagcaaccagaaacgtctctgaaccacatatctttgtaaacaacttcgttttggcaggacaaacaaaaagaaaatttggaaggacaggagacagctgtggtgcaaattaaggcttcaa

SEQ ID NO: 851148 - DNA, 573 bp, Homo sapiens
gacatgtccttcagttgctccctcaagattcatttctgtaacttacatgtgcaatgccatgaataattgaaaacygatttaaagttgaccctgtcctctcatctagctcgagagggcagtgctggtggcttgtggtggggaaggcacgtggtcagcgtcttcatacttctcacccgcccatgctcagtcctctccttccgcagtccgatgaccatggtttctgctccttcttccccgaagttgggaaaggacagagaaaggagagaggtggcaggagaagtcttccttggtttgcattgttgtgagtgggttctgggatgttcccggtctgtgggtgtttaaggctgatgcttcctctgttggccatcattgatgggtccattggagacagaggctctgagagctcagacccctgcctgcagttttatgatgtaacaaaggcatttcttcttctctggctgatttacgacttcttcctctctcctaagcatggtcttgctggacgggatctgagaaaatcctggtcaatgctctctctgtggccagcctctcgtgcacagggagctctcagcc

SEQ ID NO: 851149 - DNA, 477 bp, Homo sapiens
tgagatatttctcagactgaatctctaaccaataaaaatgtcatttttaaaagttctaagaaccttctgtcaaattattttactatacatcagaagctatgtacttcaatatacactatatatataatatctatggaaatgtatagatatgctacattacatctatatataatgtatattataatgtataatgtaatatataaatgtgtatatatgtgctacattatactatacattatttatgatgtatgatatatgctacacatatttaataaaatcacctttcatatagaccaaatccctaatttagaaataaatatacaaaaataattacagacctggcactatgcccatggtcacttatagcatccctaggaaatcctcastggccatgactgtgttagtcactccatcccctggccatggctaattaattcagtaatagagacacttagactaggccagactctcttccct

SEQ ID NO: 851150 - DNA, 477 bp, Homo sapiens
tgagatatttctcagactgaatctctaaccaataaaaatgtcatttttaaaagttctaagaaccttctgtcaaattattttactatacatcagaagctatgtacttcaatatacactatatatataatatctatggaaatgtatagatatgctacattacatctatatataatgtatattataatgtataatgtaatatataaatgtgtatatatgtgctacattatactatacattatttatgatgtatgatatatgctacacatatttaataaaatcacctttcatatagaccaaatccctaatttagaaataaatatacaaaaataattacagacctggcactatgcccatggtcacttatagcatccctaggaaatcctcactggcyatgactgtgttagtcactccatcccctggccatggctaattaattcagtaatagagacacttagactaggccagactctcttccct

SEQ ID NO: 851151 - DNA, 530 bp, Homo sapiens
ccttggagagaaaactaaaggtctgtgccaaaaaaaaaaaaaaaaagaaaatctgcaaaggtggttctctgattgtctcacaaagtgtaacttgcacaatttcctccagacagccttaactgtctcaccatctcacagattaagatatgtaaggctaaatgttgtatattttacatctaaagctgctttgaaacatcaaggtgtttattagctggattcatgctatgcctttttagttgttgctgaaccacaggcttatactttgaggctttctggccacatgatggacctgacctttcacccaagaggtaaaaatgccacacatcattgcacaaattccaaaaatatttccattggcgtaagacagaagctttgcttataccatggtaggcacaagagaggattttacattttactagatcctaaatgtcttagtcacatgggaaagcatacakaacatagtgttaaatgtatgaagcagaaaacaaacgtggtagatccctgacatgcaggagggtgtgtctctggac

SEQ ID NO: 851152 - DNA, 602 bp, Homo sapiens
ccctctacctggaatgctcttatcttgtcttcttccattctcttcactacctcttatttcttcttcaagatctcctccttccaggagtattctttgactctaccccaaatttctgtctgtatctccccacctctgtgttccttgagagaagaaactgaattgtatttgtcttcatatctccataagaagaacctaataagcactaacaactgctggataaataaagaatttttgccacacaacaattgtttaaatagagcagatgctgacatctctattatacccacaaggaaacttagcttcaggaaagttgagtgacttgcctgagttcacactgatgggaagccagcactgaaaatcacatctctttacttctggtccagaacgcttttaatattttgtgttgcttctaagagtatatatctttttcttcagtgtttctttagaaaacactgggaatcaaataaatgtaaagttattctaagatagattatgtaattcttaaattagtttgcttaaactttaaaakgagccagattattgaagtacgtacagaaaaaaagaaaaaaattatcttttttctagtacttcgtaatgaaaca

SEQ ID NO: 851153 - DNA, 594 bp, Homo sapiens
taattttttttaagttaattcatttaggtcatatctgtaataagcaaaggtttttgaaccktataaaaagtattctcccttttcaaataataattatctgtagcatgtcagagtgattcttaagaggtagaaagggaatgaattagaacttagttttcaacatttgtgtttaacactttgcaggcatgtttattatcaatatatagtataccacaagcattttcagcatcaattatttgtgagtgaagtcaaaggtccatgatgttctgcattctgtaattttgctgaagcagtaggttaaattacttgtagagagactggtgtgtggaggcaagtcacttaggtcatgcatatgacaccccagtatctcctccctatctctggctagcaatggggttgtgtgatgaggcttaataaatggtcccccaaatatatctgcaacccaatccctggaacttgggaaggttacttgatacagcaaagaggactttgaatgtgtgtgtgattaagaatcttgagatgtgggaaaatactccggattatctggtttagctcactgtaatcacaaggatccttataaaaaggaggcaggag

SEQ ID NO: 851154 - DNA, 619 bp, Homo sapiens
gctcctcgtgtgctaggatccaggtctyttctctgggggcttggctcctggctcacaggttggtccaaagcaggtttgcagagactgatgagtgaacgaacgtatgaggcaataaatgaaccagagctcaccagtccctcggatgcctattttcagttttctttttaaatttttttttaagttccgggatacatgtgcaggtttgttacataggtatacatgtgccatggtggtttgctgcacccatcaacctgtcatctaggatttaagcccctatttgtcctgatgctctccctcccccaccccctactgctgacaggccccagtgtgtgtttttcccctccctgtgtccatgtgttctcattgttcaacttacacttatgagtgagaacatgcggtgtttggttttctgttcctgtgttagtttgctgaggatgatggcttccagcttcatccatgtccctgcaaaggacatgatctcattccttcttatggctgccattttgagttttcaaaactcagaaaactgatatgtaaaaccaattttattaatttttcagtggggatatgtctgtctccctcgacaggagccctcccatcaggcagatcccaagtctct

SEQ ID NO: 851155 - DNA, 576 bp, Homo sapiens
gggagccctctcccgcctggctgtctcgttcccctttctaaagaagtacatcaaacttttgttagattaagsataaggacgaagacccattttaactgcttcctgctgacaggggatgctgttttggggaaacaacagtccgagctccctcaaaggtctatttaaggtttcccagcagaaggggacattgtcagaggctccagctgcatgactatttggagtttgatggcctgaaggcaagaagagacaaactatgttattagaaaacatgtatccaaatgaaacaaggggagggttaaggacagctcaaaaattctgaggccttttaccagtttgcacaggaagagggaggccaaaagcccaactggttaaaatactttacccttttgccagcatgttgggcttctgggttctcttcccctgagcccaatcctatggcagccattttaaggtttgggaaattaactccttccagtttgtaggatgcatctgaagggagtgtcttgtagtacagagacacaattacctattagtgaagagaggacagagaaggagaaaggaaaaaaagaggcacct

SEQ ID NO: 851156 - DNA, 576 bp, Homo sapiens
gggagccctctcccgcctggctgtctcgttcccctttctaaagaagtacatcaaacttttgttagattaaggataaggaygaagacccattttaactgcttcctgctgacaggggatgctgttttggggaaacaacagtccgagctccctcaaaggtctatttaaggtttcccagcagaaggggacattgtcagaggctccagctgcatgactatttggagtttgatggcctgaaggcaagaagagacaaactatgttattagaaaacatgtatccaaatgaaacaaggggagggttaaggacagctcaaaaattctgaggccttttaccagtttgcacaggaagagggaggccaaaagcccaactggttaaaatactttacccttttgccagcatgttgggcttctgggttctcttcccctgagcccaatcctatggcagccattttaaggtttgggaaattaactccttccagtttgtaggatgcatctgaagggagtgtcttgtagtacagagacacaattacctattagtgaagagaggacagagaaggagaaaggaaaaaaagaggcacct

SEQ ID NO: 851157 - DNA, 669 bp, Homo sapiens
tgtaaaacaatctggaacatttccaaaactgggaccttgttgtttaagggaattatttcagcacttgtcagttactctctaggaaatcagggtatttctacgattttgttttctaccgaatgacattcactccttcttttaaaatgtacattcatttgccccatgcctttatgttatcatctctctgcctaacagaacaggtgcaatcttaaatatttctgccactctcagtgtattagtccattctcacactgctacaaagatactatgagactgggtgattcatgaagaaaagaggtttgattgactcacagttccgcatggctgggaaagtctcaggaaacttacaatcacagtggaaagcaaatgggaagcaaggtatgtcttacatagtggcaggagagagagaggaagtgaggaagttccacactttaaaaccatcagctcttgtgagaactcactcactatcatgagaacagtatgtgaaaactacccctatgatccaatcacctcccactaggtccctccctcaacacgtggggactacaattccagatgggatttgggtagggacacagaaccaaaccttatcactcagtaactgagtagccaacttagataccaatttagggctgctgggaytttgacaggcactgcttagaggagacc

SEQ ID NO: 851158 - DNA, 561 bp, Homo sapiens
tgcaaaggacctgatcttgttcttttttatggctgcatggtgtaccatggtrtatatgtaccatattttctttatccagtctcccattgatgggcatttaggttgattccatatctttgctattgtgaatagtgctgcaatgaacattcacgcgcatgtgtctttatgatagaatgatttatattcctttgggtatatacccacaaattggattactgtttcaaaaggtagttctgtttctagctctttgaggaatcaccacactacttcccacagcagctgaactaatttacactcataccaacgtgcataggtattctattttcacctcaacctcaccagcatctattattttttgactttttaataatcatcattctgactggcatgagatggtatctcacagtggttctgatttgcatttctctaatgatcaatgatgttgagctgtttttcatatgcttgctggccacatatatatcttcttttgaaaagtatctgttcatgtcttttgcccactttttaatgtttttttttcttgtaaatttaagttccttgtag

SEQ ID NO: 851159 - DNA, 667 bp, Homo sapiens
accatgcttatgaagtttatctaacagaatgaaagtattataaccgttcattcaacaaatatttactgatgatctaccatgtgccaagtgctataataggatcaattgatacactatccagtgaaagcctgtgaggtcaagcattgtgtctaataaggaggaataaaggtaatttcaactcagtacaaagatttctccactggggaggagaccagattgttacaggagccttgtgaagagttggttccaaggatttgtgatgtacactcaatctagagagggagaaggtgcctaaactgaacttcttagtagcaggggcttcttatatctagtgccttgaaaaacactaccattactagttacttaacaaatgtagaagtatcagtcggggagctgggggaagaagacaggcaggaaagtatattagtttatccgtccttcaaatagaaaataatattgtcatagctaaaatgtaacgactgcattatatgtgtcagacactgttctcaaggattactacttagctcattttaattcttctaactctaygaagtaggtattatgaacttccattttatagatgtggaaactaaaaatcattatttgcacacatgtgatgaagagtttacacagagggcctgatcctagttcccttcttgaagaagac

SEQ ID NO: 851160 - DNA, 598 bp, Homo sapiens
ctgtatgacaccagaagttctcttctaaccctaaaactccacaagttgtcttgctctacagatcgctccatttagtcagacataggaaagggattgctgttcagaggtattgcctcagttcatttttccaatgtcagtatcaaacaaaaaagatacttgggatgtacttaattcctcaagcaagttgctgaatctttccttcctttcttcattccatttacatctacttggggtataatatggagataatgcagtaaaaaagaaataaaaatccaaaaagtaaataagaaagttatgttccctggagattatgctatatataagaaataaatatgtaaataagaaaaccacagttcctgccataacagggtttatagtcgagagagggagagatactacataagcaaaccaataaataagaatggtaattacccactatgataaatctatgaagaaataaacataattgtgagagacaataataggagggagggcacttcatttattcacttattctgycagtctcccaacaaatatttcttgagctactgctatccagaaagcaaggggcctcattttggagattttggagatcaag

SEQ ID NO: 851161 - DNA, 599 bp, Homo sapiens
cagggagttttcaaagttcaactttcctgtgggaatagtttgcaaaacaactgagaatagaaggatggaaaggcagagtgtgggaaatcaaggttgcratcaaataccatgtttgatttatcacatgcatcctctgtcagtcatctggtggagcactaccttttgttccccttatttttgtcctgttttgtacctccttatagtacacaatagagataagaagaccgaaaatgtaaaagaaggcttccctgctctgcctaaatatgagtcccatctaatttttcctaagactcagttctgggagtaaacgctttgggacatggacattgagaaggtagtcagcactggaaagaaggggaaagtttagtgagtagtaggtatttccagaaaaagaatcctaaagatgcttaatttacaggggattttcattgccaagttatacaagtcactttgggtagaaatagaatgtggctttgataaattacttaaagtcaaatcccattagaaatttgactaagttacttcaaacccagcccaagactagccaattcagacagctcctgtgctataaaatggcaatccaatggaaggattcagtg

SEQ ID NO: 851162 - DNA, 615 bp, Homo sapiens
tctgatagaagagggttggagattgggggagttgggatcagacgccaaagcaagcatgaatctggcacatttgggrtcatctgaaaggtattcagtgtggttaagttagcaagtcctggctttgacattaaaggcaggataagcacttcacccaagatgaataacaactttttagtgcttgaaaagtttcattcaggaccatgtagaagagtagtgggaaacaaagctggagacaaaaattgagattgagagcagagaaacaagcacattgcattagtttaaaatttaccaggaaggccgggcgcggtggctcacgcctgtaatcccagcactttgtgaggctgaggaggacggatcatgaggtcaggagatggagaccatcctggctaacacggtgaaaccccgtctctactacaaatacaaaaaattagccgggcgcggtggtgggcgcctgtagtcccagctacttgggaggctgaggcgggagaatggcatgaacctgggaggcggagcttgcagtgagccgagatagcgccactgcagtcccgcctgggcgaaagagtgagactccgtctcaaacaaaaaaaaaaaaaaaaaaaaattaccaggaaatgg

SEQ ID NO: 851163 - DNA, 598 bp, Homo sapiens
gtcttttgtattatgttttattttgctttcaatttaatttacttatgctctgatctttattatttccattctatgaatttttggtttgctcttgcttttctagttctttaaaatgcattattagatgatttatttgaagtttttccactttttatgtaggcacttataggtttaaactttcctcttattatctgatatggcttggttgtgtccccatccaaatctcaacttgaattgtatctcccagaattcccacatgttgagggagggactcaggcggaggtaattgaatcatgggggccagtcttttccgtgctattcttgtgacagtgattaagtctcatgagatctgatgggcttatcagaggtttccacttttgcttctttggtcattttttcttgccgccaacgtaagaaatgcctttcacctcccgccatgattctgaggcctccccagccatgtggaactgtaagttcaattaaacctctttttgttaccagtttygggtatgtcttcatcagcagtgtgaaaacagaccaatacagtaaattggtaccagtagagtggggcactgctgaaaagatacctcaaaatgtg

SEQ ID NO: 851164 - DNA, 516 bp, Homo sapiens
gccggagtattcaaagaatttttccgcccagcttgagttcatcgcggatgcgttgactacacagcacccattttctcactttgttcatttcaattcgtggcgatcttcctctggtgaactcttgagtaatgtgctaaaactttgggtttgctctgcgacgcagacattctcgaaatgccatcgatgccgtggagcagatcccatctccctcggctcatcctctgttggtatttacctgttaaaccggaatcctcaaagcctgttgtgcaaccacctcattagggcgcgtggtaaaaatgcttgctgctgccccgacgcccctgtttctggaaacgggttcaagcttgatccaggatccttcttgaccaggcaagcttgacctttgatccaggctcagtgggcgttgactgatccctctggaggctctctgggaaagggaattcggccgagaaggaaggtgcccctacycacagtgttaatatttggcatccctagagtctgtgtgggttttgtttc

SEQ ID NO: 851165 - DNA, 593 bp, Homo sapiens
tcacttccctgctgggctatggcttggcactggctgggatcctttacctaaggcacagccatcacctggtcctgctaactgcttcccccaatccctgacccttcctgctgtcattgtctttcgggtgcttcattatccctcatggatttcctttcccctgcccacatttttgcaattgtctcttcagcaaatgttctccaataattccttttgagcatgccatttgtttcctgatagaacccagacaaatagagtagtacctttagaaatggcctcaggaaacagactcttaaaatagtattgggatggtattgtgtggtaggcagaataatggccttcaaaagatgcctgtgtcctaatccctggagcctgtgaatagattatgtcacatgacaaaggggaattaagtttgcagatagcattaaggttgctaatcagctgacctaaatatagagattatcttggttaaccaggttttgattacccaatgcaatcaaaagrgtccttaaaagtggaagaggcaggcaggagagtcagtgtcagagtgacgtgatgtaggaaagactgaacagccattactgactttgaagatg

SEQ ID NO: 851166 - DNA, 622 bp, Homo sapiens
actatattttatgtaagggaagataagttcaatgaacaaaaagaagacaaaatgttaaggaggccttctaaaaatacttaacaagaacaattctattgtgttggctttctatgacttctataattatacttgctacctcaatgcaagagataggaaagaaagaaaaagtagctctgactatgacagtagcccttagttgactaaaatgtggcagcagtcattcctgagaacttaagaatagcagtaacatcattatctgagatttgaattcacttcaggcacaatagaaaatatatttttttaattttctggacatcttaggaggatattttagatcagaaatcatgttgaggaattagacattaagccccaggacaaagccattcacatgtcaatctttgttgtcatctgtcctattgccaacacaggcctcaacattatcaagcggacagagggaaagaatgataatgtggaaatgatgactatatyttctggaagtgttaaagattgcagagatctttcctggaattgctgaatggtttctatctccttaatgagcaacacctttttaggaaggcagtagttgatgtcatctggactgtcgagtcctattaaagatgag

SEQ ID NO: 851167 - DNA, 564 bp, Homo sapiens
ttaattttaacttgaaaagttgtgggactgggcgcaakggctcatacctgtaagcccaacactttgggaggcctaggtgggcagattgcttgagcctaggagttggagaacagactgggcaacatgatgaaattctgcctctacaaaaaatacaaaaattagccaggcatggtggcgtgtgcctatagtcccagctacgtgggaggctgaggtgggaggattgcttgtacccaggacattgaggctgcagtgagtcatgatcccaccactgtactccagcctgggtaacagaacaagaccctgtctcaaaaaaaaaaaaaaaaaaaaaaatattttggcatttccctctttactctggtttgaaatgcccatatggctctgatatggcctccactatacagacaaggtcaatgctttaggaaatgacagcataaacaaaacaatatgtatatgccaaagcttcctctgaatcatgtataggacaaaaaaacaaagatttaagggattaggaatactggagtagatttagactgggaacctatacacccacccttgaattatatt

SEQ ID NO: 851168 - DNA, 503 bp, Homo sapiens
gtgaggcatatgtcccaaagctgaccctagagcagccgcccttctcagggagatgaagatctgtgcctcctggtctcagcttgactctgagtttatcctgtagccttaagcaagctgtcaaacctctgtgtatacctccgcttcctctattgaaaaataacagttctggattttgttaatagtcctggaggagagttattaacatgaggtgtgatacacagaaataaatattaattaaagctgacaatgatgatggttttgcaaacataaaagtgctgtaggaaaaatcttgtctgattctactgaatgatttccataaagctaggctgggctcccagataatattatggaaggattacacaaaacgactgayattttcaatttattcttttagctcatactgctttatatttaggcagctgtctaaggagacaccatcaaaatgccattagtcaccatggggaaaaagtgttcataagtgaaggcatgccattaatctacag

SEQ ID NO: 851169 - DNA, 620 bp, Homo sapiens
taaaagtatatttcttcctccctccttctacttctagtaccaatatcattgtgaaatgattaaatagatttgtagagaaaggaagtataaggctagtgagagtggggaaacagaatattaaagagaggaaactgcacatttaataattatccagaatcttttgataaaaatatctagttaagattttcacatatacgtcctatatgtgtgaaactgtattttcatatgataatattttatgtataaatataaatggttgtgacgtgacaatgcaatgatacctacaatgaaaacttgggttatattactactttttacattcctaatctttgaagatttagtaaacccacatttctgtgctcactgtacaatcttttttagaatgttgatcattctaataaaagtataattatgaataactgagttctacttctgtgctctcatatacatttagagcatgagtattgggtgagctattatcaaggaatttgttttccatgccttcatttttctttwctttactttttttttttttttttttttgagatggagatttgctctgttacccaggctggagtgcagtggcacagtctcggctcactgcaacctccacctcccgg

SEQ ID NO: 851170 - DNA, 620 bp, Homo sapiens
taaaagtatatttcttcctccctccttctacttctagtaccaatatcattgtgaaatgattaaatagatttgtagagaaaggaagtataaggctagtgagagtggggaaacagaatattaaagagaggaaactgcacatttaataattatccagaatcttttgataaaaatatctagttaagattttcacatatacgtcctatatgtgtgaaactgtattttcatatgataatattttatgtataaatataaatggttgtgacgtgacaatgcaatgatacctacaatgaaaacttgggttatattactactttttacattcctaatctttgaagatttagtaaacccacatttctgtgctcactgtacaatcttttttagaatgttgatcattctaataaaagtataattatgaataactgagttctacttctgtgctctcatatacatttagagcatgagtattgggtgagctattatcaaggaatttgttttccatgccttcatttttctttactttwctttttttttttttttttttttgagatggagatttgctctgttacccaggctggagtgcagtggcacagtctcggctcactgcaacctccacctcccgg

SEQ ID NO: 851171 - DNA, 684 bp, Homo sapiens
atgaatcaaaagggtatatatattggaaatgaggaaataaacctgactagaagttcatggaaaataatggttggataggyaacaaaggttcagaaatctaagaatattgttcatcctgtaaaataatctctatgttcaagtctttaaaaattaagccagattttcatgactaattgacatcatcagactctgttaagggtagccaagtaaaaataactaaaaagacacaaacaagataacgttttcatgtattaaatttccatatttttgcctttacttcctcgttgctttctagatcctgtatcaagagcttgaagatacatagtttcttctacacacagcaggatgaggcaaatccttctgcctacgatgactaggacctgaggcatcctgccctttcttgctccttggtgaatgaaaaggagaactaaggctgaagtaggaggagtaagtcagaaaccaacattctaatgatctccatgcctcttgcataaagtaaggtggaaggtcagagaagcatggggggactgagggatgtctgttccctgaggtacagtcagggaggtaacatgtctagaagaggtgccacatttgaactggcaccttgtccaacagggcacagaggtaaaaatgctgcatttgtggaaggaggaggccagacagatagcctgagagaatgctgtt

SEQ ID NO: 851172 - DNA, 626 bp, Homo sapiens
tgtctgtgctgatgctggtgtaaacagactgtgctgccaaggctataaaagtctascacatacaattacttacagaacataatagatgataatgataagaagtgactatattagtggtttatatatttactactctattctttttttgtttatttatttatttatttatttatttattttcaggttggagttgcaatggcgtgatttcagctcactacaacctccacctgctgggttcaagcaattcttctgcctcagcttcccgagtagctgggattacaggtgctcgccaccatgcctggctgatttttgtatttttagtagagatggggtttcaccatgttggccaggctggtcttgaactcctgccctcaagtgatccacccgccttggcctcccgaagtgctgggattacaggggtgagccaccacgcccagccctggttatcactttttgagaatgtactacttattaaaaaataaataaataaactgaacagtagagcaacttcaggcatgtccctcaggaggtatccagaaagaaggattgttatcataggagatgacagcttcatgcgtgttgttgctccaaagagcttccagtgggacaggatatgaaggtggaag

SEQ ID NO: 851173 - DNA, 582 bp, Homo sapiens
tcattcctgatgacaagtttttcagtgacacattgctgaggcacagtggctctgcccagcaatttgtaggagtgttagacaatgtggtggcacaaaccagggattcttagcccaactttagtgcaattaacagtgtctttgcctcttaaggcctagtctcagatgttcctcaaagtcacttctgcaccatattatattagtctaaccaagtcctaagaggagtacagattcaatgagtaaacaaaaagatatcatttctttctttttggttttttttgttgttattgttgttgagatggagtctcgctcgctctgtcacccaggctggagtgcagtggcaggatctcggctcactgcaaactccacctcccaggttcaagcaattctcctgcctcagcctcccgactagctgggattataggcctgtgccaccgtgcccagctaatttttgtatttttagtagagacagggtttcaccatgttggccaggctgatctcaaactcctcaggtgatccacttgccatgacctcccagagtgctggrgttacaagcgtgggccactgcacctggccaatggaatt

SEQ ID NO: 851174 - DNA, 594 bp, Homo sapiens
tacagcctgatttattggtctttccaatcaacagcatttgtggggttcagctttctcatcaggcacagactttcacaaaatgcactacataccatttgccactgtctgccaatgtagcatgtttggtttgcatgaaaaaaataaataattgtccagtgatagcaacttaccttcctagagttccacattgcatgatggttggctaaattcataaatttatacaccagatctggctggctaagatcacttgccagagaacaaagttccttgtaagtagaaaggccctgacttggaaacaaagaaaaagaggtaggcaataatacacttctctctctccagcctaaaaaattacatcatcaatattactaggacatactaaaatcaaattttcactcaatttctaatactgagttatcaccatggagacagaacacaagttagtaagaatataaaaagtcacctaattcaactattagcaattcctaagcccctctacattgctgctgataaatgacctaaatgcacctctaagtccatagccayggtccactcaccacctggagatgcaactcaataattcttcattatgttatg

SEQ ID NO: 851175 - DNA, 511 bp, Homo sapiens
gaaaaatgcttcagtgtgtctcaacagcagaactgatcaagtagaagaaagaattagtgagctctgagacaggctacttgaaaacacacagtcagaggaaaaaaatgcagaagaatgasatacacttacaagatctggaaaacagcttcaaagaggctaagagttatttgccttaaagaggaaacagagaaagaaacaggttagaaagtttattcaaagaaataatcaaaagaaaactttcagaacctagaaaaagatgaacacccaggtaaaagaaggtcaaagaacaccaagaaaattcaatccaattaagattaccccaaggcatataataaactcacaaaggtcatggatgaagagaggatcctcaaagtaccaagagaaaagaagcaagtaagatataaaggagctctgatacgtctggtgacagaaaccttacaggccaggagggagtgaaataacatattcaaagtgctaaaagtaagaaagaaagaaagaaaaaaatccttgc

SEQ ID NO: 851176 - DNA, 619 bp, Homo sapiens
atcaatgatacgaagagttggttttttgaaaagacaaaatcagtaaacctttagctagacaaagaaaragatgactcaaataaataaaatccacattgaaaagaagacattacaacctataccacagaaatacaaaggataatgagaaaatattatgaaaaattatatgccaacaaattggataacctagaagaaatggataaattcctagatgtatacaacctaccaagactgacttatgaagaaatagaaaatctgagcagattaatagtgagtgaggaaattgtatcaataatgaaaagtctctatcaaagaaaagcccaggactaaatgggggaaaagttgaaagcttttttttctaaggtctggaacaagacaaagatgcccactttcaccacttctgttcaacataatactagaagtgctagccagagaatttggcaagaaaaagaaataaaaggcatccaaattggaaaagaagtcatcaaattgtctcagtttgtagatgacatgatcctatatataaaaatacctttaaaagtttactaaaaaactgttaaaactaatacattcagtaaatttgcaggatacaaaatcagcatacaaaaatcagtatttc

SEQ ID NO: 851177 - DNA, 563 bp, Homo sapiens
ggtttctaataatattttaggccaggcctattaccatgttttccaacttaagagtatcttggcttatcttttccctgtggtcctttttttctttttttgacggagtctcgctccgtcacccaggctggagtcagtggcgcgatctcggctcactgcaagctccacctcccgggttcacgccattctcctgcctcagccttccacgtaactgggcctacaggcacccaccaccacgtccggctaattttttgtattttttatagagacggggtttcaccgtgttagctaggatggtctcgatctcctaacctcgtgatccgcccaccttggcctcccaaagtgctgggattacaggcgtgagccaccgcgcccggcctgtggtccttttttttcaattgatttctatttccattgtttccatggaaatcaatgttaagatttctataatcttatagaagttgtttatttcaagttgatgtatacattcctataacttctatgcccatttcaataattgggagaaatttcccagcktcaagcatgatgtatctaagaaatgtata

SEQ ID NO: 851178 - DNA, 637 bp, Homo sapiens
tattttatttgcaaatatcaacgtaattaaaaataaggataactacctgatcattytttcttccctgaaaataatctccaaatttttgtgtaatttatagctcatatttatctcttagattcatttagggaagattacaggcatgttttaaggaaacaatttatcggtaatctgttttttgaggaaatactaactctgagtaaaaatttgactttcctgtttgtttagtattgcagcactgagaactagtttctttctttctttctttttttaaacacagagtcttgctctgttgcccaggctagaatgtagtggcatggtatcggctcactgcatcctctgcttcccgggctcaagcagttctcctgctcagcctcccaagtagctgggattacaggcatatgccaccaggccctgatgatttttgtattttttgtagagatgggatttcaccatgttggccagactggtctcgaattcctgacctcaagtgatttgcctgcctcagcctcccacagtgttgggataacaggtgtgagccaccgcaacccgccaagaactagtttcttaatagcacaaactacctttaaatatcataaaatctgatagaatttttttctctcaaaacaacgtttac

SEQ ID NO: 851179 - DNA, 628 bp, Homo sapiens
agcttcttgcttatccatttctgtttgcattgtctcatacaacagccactaggcacacagggctactgagtctttcatatgtggttggtccaaatgagtatgttctataagtgtacaatacacatcagatatcaaagacttagtataaaaaattagaatatgaagtatctcaacttttatatagtattatatgccgaaataacagtatcttggatatactgttacataaaacatattgctaaaattaatttcacttgtttcttttcatagttttaaatatgactattagaaaatttaaaattaccaggccaggcgcagtggctcacgcctgtaatcccagcaacttgggaggccgaagtgggcggatcacgaggtcaggaatacaagaccagcctgaccaatatggtgaaaccccgtctctactaaaaatacaaaaaaaatagccaggcgtggttgcgggcgcctgtaatcccagttacaggggaagctgaggcaagagaaatgcttgaacccagggagcagaggttgcagtgagccgacgtcgcgccactgcactccagcctgggcracagaatgacgctccatctcaaaaaaagaaaaaggaaaaaaaagaaaagaaagaaaatgt

SEQ ID NO: 851180 - DNA, 632 bp, Homo sapiens
aggaattttgagaataagttgtactcatgacaagtaaatgtatagccctkgaatttttaaaaaatgagatcttggtttggccaaacattagattaccaaaaaatgaagcaagtggattgcgccctgtggtacagttggcaggatggaagctggcaagtggctgaactggtcttggggccaggtatgcaaccatctgagcaggtcaacaacaggctatgtcacctcctggggccttggggccctcagcagcaaaataactggactggacttgaaccgataaacagaattgcctgaaaaaacaaaggctggaccctacccaaatcaattaaattggaatatttggggatgcacctaagtactggtgccttctaaatatcttttaaatctgccctgtgattccaaaacctctacaattctttattctttcccctttttgctcttctttctacttctcctctctgaggtctagagaagcatttattcgggaggtgtgctgggtcagtgtgggaaggaacctcaaatctgctttcacatagaaatggtgctccttcaaaataaagacaggtatggtgaaggtaaactggtcaaaatcattacacacatgatgctctgtaggactgctgggtggcttg

SEQ ID NO: 851181 - DNA, 579 bp, Homo sapiens
ttcaggctgcagtgagccatgactgcgccactgcactccagcctgtgcaacagagcaagaccctgtctcaaaaaagaaaaaagaaagttcaacaatcaacagttaggtaacaagaaggcatgataaaaatttaggaacctaaagatgtaggttacagtcttgacgctaaagaacccagtagcacgaccttgcaaaagatccttggtctgggctacctgggcctcagttctcttaaaagccaaatcaaagtagctgtattaaatgatctcttaaatctaaagtttccatgttattaaagttgatttccaaatctaaagtcttacaatgcttttaaagtctgctgcagcctatacacagttttcttcctaatttaaagcaatgtgttaatataaagaacctccatattatttgtttcttagatttaagaattctgatagaaaaaataaatgtgggaaaagaatgggtgtaaagcctcgagttgttccaaaaataaaaagtaattgtcctaatgacgccatcttttctctttgtcaataccattytattttcttttcagttgctatcttcttctcttccaga

SEQ ID NO: 851182 - DNA, 655 bp, Homo sapiens
ttagtccttgaggtagagcttacctgttggagaacatggcagaaatcattgtaccaaaattggagcacaggtcagaggctaaagcatggcttactgctgtggctcatggtgaacttgagcttctcatggcccctcctatctcctgaggatggctgagctcacagatggggactgttatgtaatcagaggtcaagtggtttagctggggtggcagagagccaggtgaagactgaaagtgttcaaataaggaagagaacagaattgctttatgtctgccttcatgaagacaaaccctaatagccaaaggactgaaagtttgcccaaagagacctcaatttttgaaaggaaaatgcatcttctccttatgttagaatgaccacgtctaaataaaataaactcttttgccttttgttgttacttgtcttggtatctaccattgtttgacactaaaaaaaaataaagcagtgactaattattggctaatttaatctgtcatgatggcatttgtaattcaggtacatccttcattaaagcaagtataggcattattatttttaaarctttttttttctatttggatttcttctattttgtttgattatttattttgttgttactggtggtggtggtgttttacagtgagacatactggtta

SEQ ID NO: 851183 - DNA, 655 bp, Homo sapiens
ttagtccttgaggtagagcttacctgttggagaacatggcagaaatcattgtaccaaaattggagcacaggtcagaggctaaagcatggcttactgctgtggctcatggtgaacttgagcttctcatggcccctcctatctcctgaggatggctgagctcacagatggggactgttatgtaatcagaggtcaagtggtttagctggggtggcagagagccaggtgaagactgaaagtgttcaaataaggaagagaacagaattgctttatgtctgccttcatgaagacaaaccctaatagccaaaggactgaaagtttgcccaaagagacctcaatttttgaaaggaaaatgcatcttctccttatgttagaatgaccacgtctaaataaaataaactcttttgccttttgttgttacttgtcttggtatctaccattgtttgacactaaaaaaaaataaagcagtgactaattattggctaatttaatctgtcatgatggcatttgtaattcaggtacatccttcattaaagcaagtataggcattattatttttaaagctttttttttctatttggatttcttctattttgtttgattatttattttgttgttactggtggtgktggtgttttacagtgagacatactggtta

SEQ ID NO: 851184 - DNA, 643 bp, Homo sapiens
gtgagagctacccagctgagcccagtcaaaccacagaaccrtgaagcataataaagtactgtttgaagtcactaagttttagagtggttcttacttagcagtagataaccaggacacataccaagatgaatgtctgtgttttcaacacaaagtgtcaataacactgataactatggcaaatagcattgagagcttaatgtatgctgggcaccattctaagcacttgtactaattttttttttttttttttttttgagacagagtcttgctctgtcacccaggctggggtgcagtggtaccatctcggctcactgcatcctccacttcccaggttcaagcgattctcctgcctcagcctcctgagtagctgggattacaggggtgcaccaccatgcccacctaatttttatatttttagtagagacagggtttcaccatgttgggtagcctggtcttgaactcctgacctcaggtgttctgcccacctcagcctcccaaagtgttgggattacaggcatgagccaccacacctggccagcacttgtattaattcatgtaaacctaatatccaccctttgagatgggttctgttatcatcctcacttaataggtaatgacaaaggctcagaaaggttaagaaggt

SEQ ID NO: 851185 - DNA, 643 bp, Homo sapiens
gtgagagctacccagctgagcccagtcaaaccacagaaccgtgaagcataataaagtactgtttgaagtcactaagttttagagtggttcttacttagcagtagataaccaggacacataccaagatgaatgtctgtgttttcaacacaaagtgtcaataacactgataactatggcaaatagcattgagagcttaatgtatgctgggcaccattctaagcacttgtactaattttttttttttttttttttttgagacagagtcttgctctgtcacccaggctggggtgcagtggtaccatctcggctcactgcatcctccacttcccaggttcaagcgattctcctgcctcagcctcctgagtagctgggattacaggggtgcaccaccatgcccacctaatttttatatttttagtagagacagggtttcaccatgttgggtagcctggtcttgaactcctgacctcaggtgttctgcccacctcagcctcccaaagtgttgggattacaggcatgagccaccacacctggccagcacttgtattaattcatktaaacctaatatccaccctttgagatgggttctgttatcatcctcacttaataggtaatgacaaaggctcagaaaggttaagaaggt

SEQ ID NO: 851186 - DNA, 618 bp, Homo sapiens
tcagccacatttcaagagttcaatgaccacatgtggctaacggttactctattggacagcacaaaggtagaacattcccaccatcatataaagttctattagacagcgcaggtctagagtttcgctctgcagcactgccttagccagcactccctactctgccgttcagtctcttatctcgccccaaacagaccctctactcccgccacaaacccctgtgggtctgcaccacgcctgctcctcgggaaggtgattttcccgacctcgggccctcggtgggcctccatgatcggtgccccttcactaccagagtagttgaagatctgattaaatgcagtcattcatttgatgagcagaccttccagacacccactccgggtgtcagttgctgaggacccaggtgagaggcggaccttgtccccgcccggggactccctgtcacggctatcccgtccaacctcgccggggtatccgggctcagaactgaacctactccgtctrggagcccaaggatggctcccccaagtcgcccccgcctggccccaagctccagaggacctgccagaccagcttccgctcggagtttcgcactcagatcccggcgctgcaggtgccctc

SEQ ID NO: 851187 - DNA, 627 bp, Homo sapiens
aagtacattgcctacataatttctcctaacccaaatgaatctccagttaaaccaagctggtggttatgtactgtctccagaggatgccaagcataaagtccttgagtatattcatcttggatcctctgattggacaactgcggtattgagacttcaagttcccccttgaaggccccagacggtacctgtaattttactcaagttttaaatgtatgctctttgttaagaaagagtgacaatgatttgatttattttccgtgactggggttagggatgggggagactctaggaatgtgacttaccagtgaggttctagttttataaatcataggacaagttttgataggcaaatgttggactatagggctgaggttgttttccaccacaacatatagacttctactagcccttgaaggaaaaaacacgagaaaatcagttgggtcagctgagtattcctttacgagtatggaacagacttacataacaattctgcaggtaatggctctggaaaggtcaaccacttagttttggacaactcttttctattctgtataaccactttttcaccaaaatgatactaaataaatatgctatagraagctatattttgacatgactgttttaggc

SEQ ID NO: 851188 - DNA, 480 bp, Homo sapiens
cctgcacccccatgcccacctcctcctcgcgcctccatgccgcctcccacygctccagctccttgcagctgcgagtccagtcactggtcacctttcgtatctcctcactcacagcctggttggccaaacctgcctggtccagctgttctcagagcatggcattcacctgggccaggctggcactcctgaatggggcacaggggatcagtaggcgctcgcccagggggccatgctgcgagccctggccctccctgctgctcctactccagccagatgagggcactctccaggtcttggctgtgctctgcgtcctgggtggcagagaggttaaagcatcaggctgggcaggtggagggcagggcctgcctctgccccaccctggcacccaccctcagctgctgctgctccagctctccggatctctccaacagctgctccagctccgagaacctcttcttgtactggagaatctggggattg

SEQ ID NO: 851189 - DNA, 480 bp, Homo sapiens
cctgcacccccatgcccacctcctcctcgcgcctccatgccgcctcccactgctccagctccttgcagctgcgagtccagtcactggtcacctttcgtatctcctcactcasagcctggttggccaaacctgcctggtccagctgttctcagagcatggcattcacctgggccaggctggcactcctgaatggggcacaggggatcagtaggcgctcgcccagggggccatgctgcgagccctggccctccctgctgctcctactccagccagatgagggcactctccaggtcttggctgtgctctgcgtcctgggtggcagagaggttaaagcatcaggctgggcaggtggagggcagggcctgcctctgccccaccctggcacccaccctcagctgctgctgctccagctctccggatctctccaacagctgctccagctccgagaacctcttcttgtactggagaatctggggattg

SEQ ID NO: 851190 - DNA, 507 bp, Homo sapiens
attcaccgcccgcccagcctggcgcggcgccctcacctcagaaacgctgggtggacttcgcgtaacttcccattcacagggcagccggcagccgcgccgccgcgcctcggcccagctcctggcgccgcagatcgcccgtcccgcgttcccaaaagcaccgcgctcgctcaaaagctcgggcagcctcgcgaccctcacctacgcctcccagtaccgccgctgtctcaaccgccacccagcccctcgcctgcgcctgcgcctgcagcccactggctcctcaggctcccgatgggcgtgtcaggataacccaaggcgcaggcgcggcggggccttaaagggacccggcggcctcttctgcacaacgggttcgagcaggttaggggccgcgcaggcrgaggaaaggagtaacccaggggaaggaccgagtgcagcggggacggggaaatccctctctcccctccgcctgtctttcaaagcaccagccctcgaccctccaaatcgctggtt

SEQ ID NO: 851191 - DNA, 507 bp, Homo sapiens
attcaccgcccgcccagcctggcgcggcgccctcacctcagaaacgctgggtggacttcgcgtaacttcccattcacagggcagccggcagccgcgccgccgcgcctcggcccagctcctggcgccgcagatcgcccgtcccgcgttcccaaaagcaccgcgctcgctcaaaagctcgggcagcctcgcgaccctcacctacgcctcccagtaccgccgctgtctcaaccgccacccagcccctcgcctgcgcctgcgcctgcagcccactggctcctcaggctcccgatgggcgtgtcaggataacccaaggcgcaggcgcggcggggccttaaagggacccggcggcctcttctgcacaacgggttcgagcaggttaggggccgcgcaggcagagraaaggagtaacccaggggaaggaccgagtgcagcggggacggggaaatccctctctcccctccgcctgtctttcaaagcaccagccctcgaccctccaaatcgctggtt

SEQ ID NO: 851192 - DNA, 616 bp, Homo sapiens
atatattctgcattagactttgtgactacccttcaaattggtattgtgtcttattataaataagacacaaattggaattgtgtcttatttatccttgctcttccagcccctagcataatggcttggctttgaacgggcactccatgtaaacaaacctataatgtgaggccaaaacattctgtttctcctctactctcaccatcatcaccacttattcattcaagtcaggaacttgagagatgtttgtttgctcttttttttagtcaattttgtttaggtataaattatatacagtaaaacctacatattcaaagtgtacaggtcaatgactttgagaaacatatacatttgtagagccaccaaaccaattaagatatagaacattttcatctccctaaaaagctcattcttacatctttgaagtcaatatcttgcactaacgagtttttcaggcaaccactgatctgatttttatcaatataaagtggttttrtctgatttaaacttttatataaattaacattatttagtatgtacttgtttgtgtccaatttctttcatgtggcacaatatctgtgaggttcaaccatgttgcatttatttgacttttaattgg

SEQ ID NO: 851193 - DNA, 640 bp, Homo sapiens
aatagggtgttaaatgatttacagaatacaaacaaaaggaaagcagaacagcctaaatgctaggaactgcacaagcaaaagcacagatctggaaatgcaccatgactgagggaattggctgggacataaaaaggaaagctctggctatcatggtcagttagcaccaaatattggatctgataatatcggatagttcacttggaagcactgagtagtatattgagaactttgcatttcacctagtgagcaacaggcaaaggcagtatctgaactgggatgacatttcattcaagatttttatatgcactgttcacagtacagagtatatgcttcttgcatacacattcaaatgtttatcacatgacatcaaaagcataagcaacaaaagaaaaactatataacttggacttcactaaaaatttttaaattttgtgctccaaatgatacaatccgaaaagtgaaaagacaacccatagaatgtgagaaaatacttgcaagtcatatatctaaaaagagacwtgtatccagaatatataaagaagtttataacttgacaataaaaaagacaaatagccaagtaaaacatgggcaaaggattggaagagacatttatccaaagaatatatacacatggccaata

SEQ ID NO: 851194 - DNA, 602 bp, Homo sapiens
atctattaccatgagagatcagcctcttgcttctgcatccataagcccacaaaactcttcttcaatttgcactgcacaagtgggtctactagatgctatgggttgtgatagataaatttcctgtgtagttgtacttccaaatcccttgattctctcctttctccttttgtggagaagggtgcaatttacagggaataagcaacagttgagcaatatattctccctggttcaaaaacccaaagatcttgtgacaccaccaccaccacctgaatttctccttcccaatcaaaatcaactcctgggactacagtaatgcccagtaagttaagatgacttttacccaaaattaatcccatgtatcctattggcaaaggtccccaaataccagtgggaatcttagtgagtttgtttcctccaattaacgtaacccgttctctgactgggagatctaatcccgcgcttccaggtgttcccggggagagggaatcgacgtgcctccagaaactcacccctgaaacggagttgtggcctggasgaggagtgccctcattgtttgaggtgccccggtccaggcccccttcttgtttccctacaggggggtg

SEQ ID NO: 851195 - DNA, 541 bp, Homo sapiens
cacatctctgtaataaaataagagaacacagtatagggatcctcatttcatagatgaggaaaactgaggaatggagaggtcaaaagctggctcaatgtcacaggaaaggcagttgcagagttaggataagacccagggttcttgactccagccctttactttatccacaaagtcaacacaagcagtctagatttgttatctcgcccccttctgtctcaaagactgagtgacaaagagcccttagtgtgatactgagtgtaaatgacagcacaggaagtccattctcagggcaagctgtgagactggcagctgaacaggaggccacaaagcaagtctgtacagagcactttcagtctacactcactatctcatccctactaaggcccagagtccacagaagccaagggagggagtgacggaggctgcaggagggtccacttagttcatcaattcctgagtatcctttarcaccacaaaaggcttagacttaatgagaaagaaatgaatcatctatagaactgaatatttattttaaagatgg

SEQ ID NO: 851196 - DNA, 633 bp, Homo sapiens
aaaatctgacacattcattcttaattttagatgtccacaagtygtgaaaaactcatctctaagatgcacaatttttaagatcaaaatttctttgatttaaaaaattgtcatttaaaatggtttctgttcaaaacattagtcatctataaaaataaagatacatagtaatcatcacagaaggaaattattttacattgtttatttatgcctctattttaattatttgtaaagtcaaagagaagatgcttttttccagaatctagagtgcaacatgtttaaagagagaaagagacacacaaagtaagacacaaacagagatccaaagagacagaaaaattgcaaaatgctcttacttaaagcaccagactacttcagttacagcatatgcactcctaggtcagggttcctaaatcaatagactaaagaaaaactgccttgtcatcagaactccaaaatatatgggtctcaggagaaacaaatatgtggagctgtagatctaaatccaaactcaactctgtggaagaaaacaaattttacctgtaaaataagttgagctacttgaccagtacattagaaattacacagcaaaatactctaaagacaggatcctaaactcattttcctttcaaaagt

SEQ ID NO: 851197 - DNA, 585 bp, Homo sapiens
ttcctacttttcatttatcctactaggaataatctctcctttcaaactttacattgcaaataacttcttcaaaagtcatctcgaaactcatcttttctagaatgccttcctgaacaaactttataccattctcaaccatttgcttcttcttctgtcacctcagcactttcctctctacttccacaatattattattgaaaatgaaatcaaaggattacccaaaattaacatgtaagcagaaagacagaagttaaaccagaggaagaactttgaccaggacactaaacaaaaggcccagttatcaagacctctttttggggaatcagaaaatcagacggcccagatggtagaggagaaaaagacaggataagcaggcaagcagaaaggagactcagtgaatcatggcacaggaactgtttgcctatggctatcctcagtgtgccatctctgcaatataattttgtaggaaggktgactattcctaaaagctaaggaaagatgaagcactctcatactttgtaagtgggaatataaatagtacagcctccatagtgggcaattctgtaacatatttcaaaattcaaa

SEQ ID NO: 851198 - DNA, 644 bp, Homo sapiens
aacagggccctgggggctcatgaccctgcccgctgcatcccgggatgaccctgcctgatgcgtcccaggatgaccctgcccgctgcgtcccgggatgaacggctgtgggtatctcctgcaggcgcatgcaggtgttgtgtgtcagtgagggatggggatgggtgtggggccggtctccctctttatgcttcagcaggtaggtagggtgcaggtggggcctggcccctctctatggcctccagagctgctggctctgtgggccgccaccctagccgctccctgcagccaaagcatctttgggaagcccagctccagccaccctctgccctccccttgactgcagggctcagttcctgcagccccgcctggaagagcctgccccctgccctcgccctccagccaccccagggttctggtctgtttgtctggggcacctcgctgtcccctctggtggcttacgtgaccccatccatcctactggccttggctggaaccctggggggccctcgccacggcaggggtaggtgcctcaycctcgctgggtgagcccctcccatgcagggtcttgggggagggagggcactgctacaccccgacagagcctgactctcaagaggctcagcagatcttcgagcagagaatga

SEQ ID NO: 851199 - DNA, 314 bp, Homo sapiens
aggttcacccacgtcacagacgaaccgctccggtgcagggggagctgcgcacgtsggggcgggggctgtggcgtggcacctctgtaccttctctcaatttggctgtaagcctacaactgccctaaaataaagtctctttatttatttttttatttatttttacgcagctctcttttccttaaaataaaggctctaaaattgtgtgattccacctccctgaggctaagcgaaagagccgcgtctgcccctgtccttcccgggggctggcagggagtgggtgcccggcggtgactcagccctgcagcctcccagcc

SEQ ID NO: 851200 - DNA, 645 bp, Homo sapiens
gacctaagagtctgaatgctctaagcatgaataagcatttcacagaatcagaaaacgcaaaacaacctttgaggcaacgctttyccctgctaccaaagagcctatgtccccagccagggttcaacagcctagaccaggaacaccagtctctcaggccacgttcaccatagccccagggtctgtctcggggagtgtgcttctctggtgagccagaaaattctccattattccctgcttccagaaaaatctctcaaagaaatgcaattagggaaaattagttcttacattatcacatcttctgaagaggttggtctctatttctcgtaaccagaaataattattttcaaatctatttgttttttctaaacggagtggtatcttctgtctctggtgtgtgtggagcaaaaaatttaagggaatttcaataacttaggcttagacaaaacaagtgtttgactttagctctcaagagctggctttggctcccagaaggtgactaggtttagggaacatgttaaggaagggagttgacagggacatggcacacttgccaccaatctgaatacattcattttacctgtgaagattatccaatttattttatgaatatttattttaatgtattatactactgcattataaata

SEQ ID NO: 851201 - DNA, 584 bp, Homo sapiens
tatccaaattatgcttggagaatattaaacatgctttagggaataaaaatataattattgggttaggttgtagtttctctattgtattcattatcataatcatagatcatatggaaaaatattcacagggaaattatttgccatgtccccttgtaatttttcatttggtcaaatgctcattgtctccctccattctgtgccttccatcaaccccagccgtccccatccccaccctctcacacccagccaagaatctgatttaatcttcaaactaggattggcagaattcatgaaaactcagattgtatgcgtggaaatactgaagtaaaaaggacccagcattttttcaaatgagcctttctttgtgaggctctgctgcctgaatttaaggctgccatcccagtgggagttaaacacactcaaatgctcctaactgtgttgagtggttgatgatgacgaaacagttactatgtttgcccacattttctcctgtactgggacaaaattgcagtctcctagatcaagaggtaagctctgattgatctcaytgggagctttgccagtgaaaggacaatagtattggg

SEQ ID NO: 851202 - DNA, 277 bp, Homo sapiens
tggtctaagaatttggggggtttctcagcgactttgagacttcaagatagtggatgayggagaattcttataagataaggatacaatatttgcaaaacctgtgttttgagtcttatcctcttctgcatcccagtagtgacataatttcttgccctatttcatcaaacccattgtcggaagtctatagagttccaaggaaattttatatgtgaccctctataatgagaaggcatgcaaactctgttctaacttccaccaacacacatctagaataaag

SEQ ID NO: 851203 - DNA, 624 bp, Homo sapiens
ttctttcaaatctggtctaagaatttggggggtttctcagcgactttgagacttcaagatagtggatgatggagaattcttataagataaggatacaatatttgcaaaacctgtgttttgagtcttatcctcttctgcatcccagtagtgacataatttcttgccctatttcatcaaacccattgtcggaagtctatagagttccaaggaaattttatatgtgaccctctataatgagaaggcatgcaaactctgttctaacttccaccaacacacatctagaataaaggggggccgactatcggcacttttagctgatccgatccagtactgctctgtgagaatgattttccagcctagactttggtgaagcaaggatgaatgggtagttgtctgctaagatgaggagtaccaggagtagaatgtgtacatggccatcttaggtctgaagtgctgggcatctgattgggctacgcagagaaggaagaggctccagtaagaagaaacagwaagttaaacacctagcagctgaggagttagtaccaagtgaccaccctgatcatctatgggaatcaaggaagctgctagaggatttccagaatttacgaaagtcaaacaatgtgg

SEQ ID NO: 851204 - DNA, 608 bp, Homo sapiens
aagagtatgtatgtgatgatggaggctatgcataattccaatctttccatctctatctcaaccctttttttctcccatgtaagaatatgttaaaayggtgataatgactgtgtttaagggacaagtttcaagtagctctggcttatgttttaaaaagttaatgatgtggaaaattgaaggtagtgttttgtgcacatttatgagagattctaaagcctgatacttaaatactgctttgaattgtagagacaattttcacatctttttccatgtgtgaacattggtcattattttcttcagttcatgttaatattaagttttaaaggtgatagagaaaaggaacaggagaatagtctggcttctggctaaatgatcacttctccacctaatgtgggtccagtggggatggaggggagtagattgttgccatttttaaatgagataatttgtagaagtgcttgacatcatctttattttagaaagagtttaacagatgatattttgattccaattttggagtggctccttatttaaagagtagggttaatgctgtgctgagtgttcacatggatgtatgagaaaactgctgctaaacaatagattaaagg

SEQ ID NO: 851205 - DNA, 522 bp, Homo sapiens
acctgtcgagctttcctttcctctctacataatgagattagggtaatcagccaaggcagccagctttgaaggaacaatgtattagtggagaataatctgtaaacaataaattactaatactaatagacaatcartatagcctaaggagtttgttaacgccaagttctatgagacacacccctcactgcatgttatagaaaacaccagactcacaccctaaacccaccacgcacggagcctggcacccaataaatttggttgaactgaatggaaaaagtaattatcaatgtcagttgctaagggctacaggagacagtgaagagaaaggggagagggtttttgaaggaaccagagatcagtttgtcagggaccacaccacggtcttgtcttagaagttgtaatggatcgaacaagcagcgttctgacttcatactgagtctgcaattcaaatgaaataaagttcataaacggattcattccaacccaatttgtttcgcttggtacattttaaactcgatttga

SEQ ID NO: 851206 - DNA, 522 bp, Homo sapiens
acctgtcgagctttcctttcctctctacataatgagattagggtaatcagccaaggcagccagctttgaaggaacaatgtattagtggagaataatctgtaaacaataaattactaatactaatagacaatcagtatagcctaaggagtttgttaacgccaagttctatgagacacacccctcactgcatgttatagaaaacaccagactcacaccctaaacccaccacgcacggagcctggcacccaataaatttggttgaactgaatggaaaaagtaattatcaatgtcagttgctaagggctacaggagacagtgaagagaaaggggagagggtttttgaaggaaccagagatcagtttgtcagggaccacaccacggtcttgtcttagaagttgtaatggatcgaacaagcagcgttctgacttcatactgagtctgcaattcaaatgaaataaagttcataaayggattcattccaacccaatttgtttcgcttggtacattttaaactcgatttga

SEQ ID NO: 851207 - DNA, 606 bp, Homo sapiens
tgcttctctgtgtgcctggcagctggctgccacccctttgtcaactctggctactcagctttgctgcctggaaaagatctgcaaggctccagcctctaatagggctctgatctagcctcaaaagcatgaagtgtcaagacctggtgaacagctctggagctttggtgcagcacagaagctctcgggtgcactgtcggcctttggctggctgtggtttatgggttgggtagctttatagcttgtggccatgcaggaagagatcttcacagccctgttttgggaacaccattaggagctgtgggactgataatgctgcctggaaaagcagggacagggagccagggagaatcctcctcctgtcgcaccctctggctgggcttaggaaaatgtcatccagagtgaaaacttagggataagctcagatgagattgtttctggaggtcatgatcaatagggcagtgtgcaggcacctatctgwgagcttggagttaaatcggtgtgctccccattgcctcttctaggctaggcctttagtccacacgtagggtaggactcatagaaacactagattccagttctctaagttccagcagcaggcgaataaag

SEQ ID NO: 851208 - DNA, 506 bp, Homo sapiens
actttgcagccaacgaaatgttttattagaacaaaatttaataagcaaactgagtttccccaaaatattgaactcagaataaaacaactgagcttaaatgtatataaacatggtgacttaaccacacaaaaagraattatttcaattgactttaaaacatagtaattatttatttattttattttggttttttgagatggagtttcgctgatgtcaccccggctatagtgcagcggcatgatctcatgatctcatgatcttggctcactgcaacttctgcctcccaggttcaagcaattctcgtgcctcagcctcccgagtagctgggattacaggtgtgcatcaccacgcctgactaaattttgtattttcagtacagatggggtttcaccatgttggccaggctggtcttgaactcctgacctcaggtgatccacccatctcagcctcctaaagtgctgggattacaggcatgagccaccgagccctgccaaaacatagtaatt

SEQ ID NO: 851209 - DNA, 358 bp, Homo sapiens
ctgagacccctcttctacatgtgatgatgcaccctctcccctctccatcactccataaaaccctcccatcactytccctaggggagagactgctttgaagaatgctcccagtgtcctccttacttgagccaagtaataaacctcctattaataaaaacctgtgctctcatggagagtagtttactacttgctaggtgactaacccctggtattttttttgtaacagtgccatattttggggtaacatgtcctggaccccatcattcacaacactaacatcatactaatgacaaggagaaaagctttgttatccttgaggtgttctttctgtcttttaaaaattacttaatatttaaat

SEQ ID NO: 851210 - DNA, 606 bp, Homo sapiens
atgttaaaccacataacaagtctcaataaaattatatagatattaattatacaaaggaatctcctctgactatgatgctatgaatctagaaattgataacataagaaaattgggaaacttcaaaatatatgtaagttaaacaatacactctcaacaatgggtcaaagaacttaccacaaaagattttagaaaatgtcttcagacaaagtaaaaggaataaacaacttgtaaaaatgtagagttttagtaaaacccatgctcagagtaaaatttatagctgcatatacctatattaaaaaaagaagaaagatctcaactcaatattctaactctacaccataaggaactaaaaaatgataagcaaactaaatctaaaactagcagaagcaaggaattatcatgattagagcagaactaaatgattcagaaaataaaaaatcaatagagaaaaccaaataagtcaaatgtttgttctttgaaaaagtttgatataattgacaawcatttatatagattgagaaaggagactcaaatcattaaagtcataagtgaaagtggacatattactacaaaacctgtacaaaataaaatgtaaaataatgtttt

SEQ ID NO: 851211 - DNA, 627 bp, Homo sapiens
ctgtgattctacaattactcttggaagcttgtacctgctttttctgaacttcagcgccgtgtatcttttccctttatggctatttatttgtgtccttttactgtaacaaatcttacttgagtgtatgactttatgttgagtcctgtgagtccacctaccaaatcaccaaacttggtagtggtcttagggaaccccaacacaattataaacctaaatataacagttacaagaaaacataggagcagcaaatcttcataatcttaagttaggcaaagatttctcacatgtgacaccaaatcacatggaatttttaaaaattgatatttgaacttcatcagaattactactttttcatttaaagtcacatttaaaaaatacacaaacaagctacaaaatgggctgagaaaatacttgcatcagatatctgataaaacattctatcatgaatatatatgtacatatttctgtgtatatataactatatatatatatccatatatgtaatataacctaataagacaaacccaataattttcacaaagtacttgaayaaatatataatgaaataaaatttatgaatgacttgtaggcacaaaaaatggtcaattcaacatcattaattattaa

SEQ ID NO: 851212 - DNA, 537 bp, Homo sapiens
ctgcatagtatcattcatcacttttcaagtgctcagtagtcacatgcatataatggcttacttgctggaaagtgtggttctagatattaacatatataccacttacgtatcacaatccaccttcaaataatgctgtgccacttcacatcaaacttcaaacatcacttcactgtctccccctccatttttaagctattacttttatgtatttatgctacatgctgatatattataaacccctaatacatttttattgtttttccatgaacagttaattacattttaaggatatttttacatgagcaaaatatattttatgtttacccacatagtgaccatttctgggttttgttcattgctttgtacgaatccaaatttccttctagtatcatttttctttgatctgartaacttcctttaaaatttcttgtttctaattttctaataaattcttaacttttctctcacttaaaaaattttaaagagcctttttgagatacaatttacataacataaaatttccccattttccatgta

SEQ ID NO: 851213 - DNA, 606 bp, Homo sapiens
tcaggatgtcaggtactaatagagatattgttttgaaatagtatgagttaaatagaacacccgtagtactttctgyaaatggaattaaattacacaaagaatattcatttctcttcagataaaattacttactcagaacaatgcttgtaacaagtctgcagtggtagaaatgaaaaaaattagatgcgtgtccatgtacttaaagaactatataactcaaaaatagatttttataatactaagaaacaggaataaaactcagattattctacattttttatgatccctaaataaagtgaaccacatagctattttgttcctattacttttctttttcattttttattttgagataattgtggtttcatgcatagttataagaaataatatggagtgattactataccattcatccaatttactcaaaatcgaagcatctttcttaaacctgctataagtcacagcaaggacattggcattcatgaaaatcatttgactttatttcagaccaactagttttacatgcactgtgtgtgcatgtgtgtgtgtttgtgtgtgtgtgcgtgtatgtggctgttttgtaataagctattttatcatggttac

SEQ ID NO: 851214 - DNA, 469 bp, Homo sapiens
tgagcacatggtgagaataaaatgtagaccatgagttagtaaatgtaattattgcttacaatttttgtacagaaaatgtattcctttaccccctacacccagatcacaccacttttaccatactttccatggaatttcattgagcaggatttattctaagaatttaaataatagaaaaaaatcaatacttcattcagtagtgtttttgtttattgtaatatcagcatttttattgtggaactttttataaggtaaagcaaattaagcaaccatgttagttacattaggaataagtttattcaatatgaaaaagatgcaactataaaatcaaatggagtaagtgaaaatactaaatgataaaattacactgaaaataaaatattgatatatatttactctaaaatatagtstaaaataagtatattctcagtaacaataaacactactagtattaagtctgtaaaacaat

SEQ ID NO: 851215 - DNA, 469 bp, Homo sapiens
tgagcacatggtgagaataaaatgtagaccatgagttagtaaatgtaattattgcttacaatttttgtacagaaaatgtattcctttaccccctacacccagatcacaccacttttaccatactttccatggaatttcattgagcaggatttattctaagaatttaaataatagaaaaaaatcaatacttcattcagtagtgtttttgtttattgtaatatcagcatttttattgtggaactttttataaggtaaagcaaattaagcaaccatgttagttacattaggaataagtttattcaatatgaaaaagatgcaactataaaatcaaatggagtaagtgaaaatactaaatgataaaattacactgaaaataaaatattgatatatatttactctaaaatatagtctaaaataagtatattctyagtaacaataaacactactagtattaagtctgtaaaacaat

SEQ ID NO: 851216 - DNA, 626 bp, Homo sapiens
acagaatatcttacaattaatttttataaaccttccacaacttgcttaaattttagatttttttcttacgtaaagcaatcatttaacactttaggcagaaaggaaaaaaaaaaatccacatttccatggcttcttataatctttcaccaaaaacacattttactttctttacacacctttgcatgtaaaatcgtttctttagtagttttaatttcatgttataatattaactctcagcaacttttatttttggtgaaaaccttggtaagtaagagattttaattaggtactaagtgtggagcctagcctagcacacaccaggaagaaatgcagacaagagctgactctccaggatagctaggggcttggctaactccacatgtccccaggtcttaccttacttaagcaggcaagttgtacgacaagagttatagtggcattttatgaagcatttaggaggtctaacaacctttgaattgtacaacatttcttccataaattccctttcacaaatcttttcatgactcacatggaccgtatgaracatccttgtactttctgacttgccctaaaatccctccttttaaacaactggtcattttactttaggacaataatttaccata

SEQ ID NO: 851217 - DNA, 626 bp, Homo sapiens
acagaatatcttacaattaatttttataaaccttccacaacttgcttaaattttagatttttttcttacgtaaagcaatcatttaacactttaggcagaaaggaaaaaaaaaaatccacatttccatggcttcttataatctttcaccaaaaacacattttactttctttacacacctttgcatgtaaaatcgtttctttagtagttttaatttcatgttataatattaactctcagcaacttttatttttggtgaaaaccttggtaagtaagagattttaattaggtactaagtgtggagcctagcctagcacacaccaggaagaaatgcagacaagagctgactctccaggatagctaggggcttggctaactccacatgtccccaggtcttaccttacttaagcaggcaagttgtacgacaagagttatagtggcattttatgaagcatttaggaggtctaacaacctttgaattgtacaacatttcttccataaattccctttcacaaatcttttcatgactcacatggaccgtatgagacatccttgkactttctgacttgccctaaaatccctccttttaaacaactggtcattttactttaggacaataatttaccata

SEQ ID NO: 851218 - DNA, 418 bp, Homo sapiens
ctactgatgaatggatcaacaaaatgtggtattattatacaattgaatagtattcagccataaaagacatgaaattctgatacatagtagaacatgaacgagcctcaaaaacattacgctcagcaaaagaagccagacacaaaaggccacatagtgtatggttccatttatacaaaatgtccacaataggcaaaatccataaagacagaaagattagtggttgcccggggctgggggagggctaatggggagtgactgcttaatgcgtctgggatttccttttggggtgatgggaatgttctagaactagatggaggtgatagttgcacaatattgcaaatgtagtaaatgccmctaaattgtacacatttaaaggttaattttatattatatgaattttacctcaatttaaatgaaa

SEQ ID NO: 851219 - DNA, 628 bp, Homo sapiens
ctgatcatgttagataagagcctcccctattctagtatgaccttgacctaactagttacctctaacaatatctggacttctattcattttacctggtgttttatcatctgtctcctcccattagaatgtaagctccaggaagcagaaatttctgtctgtcttggtcactcttctgtttcccatcacctaaaacccaacgtaatttgctcaacaatttgttgagtgtgtgtgaatgaaataccaagtctggacaaagtgcaacagaggctacaaggacataatactcaggaacaacgggaaggtagttacttttggaaatctcagaggaaaagcaagtttctgatttattgtgggataagatggagaaggaggtacagaggacagacaagaaaaccagatatcaaatagtagaactggagtctgcattggaggtagtagagagcagaattaaagccgagaaatataaaaatcagtaaggtggagggcaaacttgagatactttcccagaattcagaggaaatcgccaaatagatcaatccagtgagataaaggataacagtkgtggatactggagaagggagttttcctaagggaaaaccaggacaaaagaaacagaatcaaaatccaa

SEQ ID NO: 851220 - DNA, 619 bp, Homo sapiens
tgggggttgctgtggacatgcagcttcatgagatgatgcttgtgaagtgtgcaggattttccctgccacatagcaagcttcaggagttcagtgccattattattatttctggctgctgttattgccaccctagtgggcactcagcccatgcatgttgtccctggcatgttgtccctggcatgttgtttgtgatcgcaaagttcccagcataagaataaaattctgtatgctctgttgtgcaggagaacacacacattttttgccatctattttagagcaacatgtatggaatcttggtggggtggcctgaatcctaggctgacgggtgggggcctgcagatctcagataagctgcaccacttgggttcacaatgcggtgcttggcccagacaacccctgggatcccttgttgacctaatatttcctaaaatatgagtatctggagactgagcacagcataggggtgggccttatcagctcctgctagggaaggcgagtcagccctggggtttcatgcaaagcttcgaggtrgtcgcctggcctccctcagtgcttgcctaaggcttgcaggctttggggaggggagctgccaattcccatgcatattgggagtagggat

SEQ ID NO: 851221 - DNA, 617 bp, Homo sapiens
cagcatcagtaacaaagacaagcccacagggccactgagggaataagccacacgaggtagccaataaaaagaatgaaagggaaggttcactcctgatgatggtttccaccagtcctatgcacagtgaaattcctcagctaccagctctattttgtcaacggtgaaacagctttgatcgcactaaccaacacatgcttaaaagccctgtgacagtacccatccctgactaaaccacattgccttttgctagatgacagcagcaagcagtaaggcaggccgtgtccacacaagccgagcgtacctcagagaacctctgaacgtcttgcgtcagcgtgcccacgcgcttccactggtagtgcttgagcaacttcagaatggctggattcaccgcattgtctgatgggacggtccgaaagaaataagggtattttttcttatcggctagaacaggcgtggttgcagcaaaagaaagctgaaaaacacaaaagagacaaygctttttactgatgagcctcacagctgtgacccagcatctttcctactggaatagagactgttagcttcaacttagagcataaacacacagggacagatatttttaaaacttttttattgta

SEQ ID NO: 851222 - DNA, 579 bp, Homo sapiens
agttttcccctgacagtgccaaggagactgagaggtttagactaggtggaattcaccacagtgcagctaagtggccatggccagactgcttctctagatgcctcctcacagggcagggcatctctgcaggaaatccagcagctccagttaggggcttacagacagaactctcatctccctaggaaagagtacgttgagggaaaggtggctgcagtctcaggtttagcagatttaaacttgtttacctgccggcactgaagagagcagctgatcctgacaagggggattctcccagcacagcgcactagctctgctcagggaaagactgcctcctcaagtgagtccctgaccccatgcctcataactcagagagacctcccaacaggggtcgacagacgcctcatacaggaaagctccagatggcatcagaccagtgcccctctgggatgaaccttccrgaggaaggagcaggcagcaatctttgttgttctgcagcctccactggtgatacttaggtgaacagggtctaatgtgaacccccagcaaactgcagcagacctgcagaagaggagcctgact

SEQ ID NO: 851223 - DNA, 630 bp, Homo sapiens
aaggaattgtaaagaactggaagggtttgaaatgacagaaatgggagagaactttttgtagaaagaaatcagtaatgccaaaagaatagaagacagaaaagataatgggcacatgcatgaattagtaggtagtccggtttagctggaactagtgaaacatgtagggaactcgttgaaaatacgtctgaaagggttaagtcagagacaaatggacttcaagatctatagcagaccttagaaatcctccattacacttaagaaaataaagactcaaaaaaattagttatgcaatatgatacagcaaagtgatgatcctagtagccaaggatatattattttgtgtctcctgaaagaccacttccgttgttcattctgtatattttgcagggtaatctgggtgttcttaaatgccaagtaaagaaggttgtactaattatttaatgtggtaaatcttatagaagtactaaatatctttgataatggaaatgaatcttgaaaaayagaaaaagaagaacagaagaagccttttgtagagatgtgattgatgattagatttttaaaaaactgggtgaaccttccaaagatctacttaccctacacatagacatagaaaccacctttcatatactt

SEQ ID NO: 851224 - DNA, 519 bp, Homo sapiens
aaaacacaaataaataaataaaataaaacattaacaagagcaactatcgcactgtgaggtcagagaaaatatrggttaaggcacccaggtcgtgatgccttttatgatgtactgggcaaagttctatgcgtacaggacactgaggtaaagcacacaaaccagttccttgctctagggagtttatattttggtaggcaagtgttcaataactgttagaatttattactatctgcaaacactgcattataaagcacagagaaatactagatggaacatccgccttctggagcctgcaatgtttcaagaagtatttgaggtaggaaggaaagaattaaaggtgaaagaaaaaaaaagaaaagcaagcaagccagcagcagaaggtaccactaaagaaatgatgggaaagtggcttggggaggaaattgggctactgttaaaagcaatccgtgggcctagaagaaaaacctgtcccctctgcttagccctctagtggtgggaacaaataaaaacataaatact

SEQ ID NO: 851225 - DNA, 528 bp, Homo sapiens
ttggaatctttccctactattctttttctttctttttttatttttattttttatttttttattttattttattattattatactttaagttttagggtacatgtgcacaacgtgcaggttagttacatatgtatacatgtgccatgctggtgtgctgcacccatcaactcgtcatttagcattaggtatatctcctaatgctatccctcccccctccctctttttctttcactgcctatatctggaaattctgttggctattccttaagaatatttccagtttctgaccacatcttacgacctccattgccactaacctggtttactctgataacctctgaataagtccctgtttcttttttccattccatttttttctcaacatctattctcaaaacagaaaccagagctatcctttttaaatgaaaggcaggtcatatcattcctctgtgaaaaaccccttggtcaattcctamtttcacttagagtaaaagccaaaatcctgacatgacctcaaggcccttcata

SEQ ID NO: 851226 - DNA, 516 bp, Homo sapiens
ttagcccaagacaagggagtggagggagtggggttccaaagattggggcagggaacccaaggaaggcaaggataagttgaagactcagagaaagcaggagatgaggcatggagaaygagaccacctggatctccatccctggtcacatccaggaactgtgcgtgggtgtgtgtcctccccctagagttctgctggcacttggcatagggtgagcactctaaatcattcagagaaggacttggcaggacacaagccccttcttgggatagggaggccaccttggtacctggagagtctgtgcccccatgggccccttcccctgcaggtgagggactgggttttgggggagccattgcagttatttggtgaggtggggataagggatagggtgcgggtgccctctattctaggagggcagggaaggcagtagccctggcttggggagaagaggtgcattgttggaagtatctagggtgaggagcagacaaggcagggctgagaggtcccagctggcct

SEQ ID NO: 851227 - DNA, 594 bp, Homo sapiens
cttgcctgggggtggtgaagagtccccaagcctgcccatgcaggtttgatgacacgtgtccattttcraagaagccctgttgaagcttaggcattttccacaaatgagttgacatcctcaggaggtgtagggttcacttacagcctttaaaatgtgagcctccatgctgtcagggagatgggggcctggaggcatggggtttgtgcctgtgtccagctctgcactccatatgtactctgtgctcaagctgccccagatgcctccttgaatcacagccatcctcaggataggtgctgttttcatccccatgtgctaccccaggaagccacagcgcagacaccttggatacgatgcccaaggccggtgtttctctggccttgtggggctcccgtccctcctgccaatgctcatgggccagcccggggctgcaggatcatctcctgatttgactcccctccttggggtgctgaggggtcatgagaggttggtgtgggaacgcaacagggctccgactctgagattgagattttgcataccagtaaaagttctttctttttttttttttttttttttttttttttgagacggagtctc

SEQ ID NO: 851228 - DNA, 606 bp, Homo sapiens
tcagaaattttttatggtatagatgcaccgcagtttatttaaccattcacctattgaaagacatcctggttatttccaggttggggctattatgtaaaaaactgctataattatagcggttgactataatcatctgtattatagtcagtttgaactgccctaacaaaataccatagactaggtggcttatacaacaaaaatttacttcctcacaggtctggagggtggatgaccaagattagggtgagttctggttggggctctcttcctggcttgtagatggctgctttcttgttgtgtcctcaaatggcagaaagagagagacagagagagagaaaaagaaagaaagagagattgtcctcctcttataaagccacagtcctatattagaggcccacccttatggcctcatttaagcttaattgcctcctaaagaccctctctccagatatagttgctttggaggttaggacttcaacatatgaagtttagggtgacacaactcaatccacagcaaactccatgtatataacttytcatttctctgagtctccaaagtctgctgtatcattcttatgccgctgggcagcatgctagttgttatgt

SEQ ID NO: 851229 - DNA, 606 bp, Homo sapiens
tcagaaattttttatggtatagatgcaccgcagtttatttaaccattcacctattgaaagacatcctggttatttccaggttggggctattatgtaaaaaactgctataattatagcggttgactataatcatctgtattatagtcagtttgaactgccctaacaaaataccatagactaggtggcttatacaacaaaaatttacttcctcacaggtctggagggtggatgaccaagattagggtgagttctggttggggctctcttcctggcttgtagatggctgctttcttgttgtgtcctcaaatggcagaaagagagagacagagagagagaaaaagaaagaaagagagattgtcctcctcttataaagccacagtcctatattagaggcccacccttatggcctcatttaagcttaattgcctcctaaagaccctctctccagatatagttgctttggaggttaggacttcaacatatgaagtttagggtgacacaactcaatccacagcaaactccatgtatataacttttcatttctctgagtctccaaagtctrctgtatcattcttatgccgctgggcagcatgctagttgttatgt

SEQ ID NO: 851230 - DNA, 683 bp, Homo sapiens
atcccagaacttaaaataaaatttaaattaaaaaaagaaaatgtggcwtatatacacaatggaatattattcagccataaaaagaatgaaatcccaatcaagcagagtcctatggatgaaagaaaaaaataagtaagaatgaaatcctgttatttgtgacaacatggatgaacctgaaggacatcaggttaggtgaaataagccagacagacaaagaaaaatatcacatgatcttatgtggaatctaagaggataaaaaaaagaattagccaggcgtggtggcttgcacctgtagtccctgctacttgggaggctaaggcaggaggaacacttgagcctgggaggtttgagactgcagtgaactgtgatcgtgccactgcactccagcctgggtgacagaatgagaccatatctcaaaaaaaagaaaagaaaaagaaagttggtatagaagcagaaagtagaacagtggttatgagagactaaggaggggagagggggatggggagaggttggtcaatgggtacaaaattacaattaggaagaataagttctggtggtctattgcacataaaatgtatgtaatagtaaaatatcatatattacaaaacagctagaagagaggcctttggatgttctcaccacaaagaaatgataaatgcatgaggcaatggatccggtaacta

SEQ ID NO: 851231 - DNA, 683 bp, Homo sapiens
atcccagaacttaaaataaaatttaaattaaaaaaagaaaatgtggcttatatacacaatggaatattattcagccataaaaagaatgaaatcccaatcaagcagagtcctatggatgaaagaaaaaawtaagtaagaatgaaatcctgttatttgtgacaacatggatgaacctgaaggacatcaggttaggtgaaataagccagacagacaaagaaaaatatcacatgatcttatgtggaatctaagaggataaaaaaaagaattagccaggcgtggtggcttgcacctgtagtccctgctacttgggaggctaaggcaggaggaacacttgagcctgggaggtttgagactgcagtgaactgtgatcgtgccactgcactccagcctgggtgacagaatgagaccatatctcaaaaaaaagaaaagaaaaagaaagttggtatagaagcagaaagtagaacagtggttatgagagactaaggaggggagagggggatggggagaggttggtcaatgggtacaaaattacaattaggaagaataagttctggtggtctattgcacataaaatgtatgtaatagtaaaatatcatatattacaaaacagctagaagagaggcctttggatgttctcaccacaaagaaatgataaatgcatgaggcaatggatccggtaacta

SEQ ID NO: 851232 - DNA, 683 bp, Homo sapiens
atcccagaacttaaaataaaatttaaattaaaaaaagaaaatgtggcttatatacacaatggaatattattcagccataaaaagaatgaaatcccaatcaagcagagtcctatggatgaaagaaaaaaataagtaagaatgaaatcctgttatttgtgacaacatggatgaacctgaaggacatcaggttaggtgaaataagccagacagacaaagaaaaatatcacatgatcttatgtggaatctaagaggataaaaaaaagaattagccaggcgtggtggcttgcacctgtagtccctgctacttgggaggctaaggcaggaggaacacttgagcctgggaggtttgagactgcagtgaactgtgatcgtgccactgcactccagcctgggtgacagaatgagaccatatctcaaaaaaaagaaaagaaaaagaaagttggtatagaagcagaaagtagaacagtggttatgagagactaaggaggggagagggggatggggagaggttggtcaatgggtacaaaattacaattaggaagaataagttctggtggtctattgcacataaaatgtatrtaatagtaaaatatcatatattacaaaacagctagaagagaggcctttggatgttctcaccacaaagaaatgataaatgcatgaggcaatggatccggtaacta

SEQ ID NO: 851233 - DNA, 536 bp, Homo sapiens
agtggctcatgcctgtaatcccagcactttgggaagccaaggcaataggatcagttgagcccaggagttcaaaacmagctggggcaacatagtgagacccccatctgtataaaaaaaaaaaaagtaaaaattagccatgcatggtggcatatatctgcagtctcagctactcaggaggttgaagcaggacattcacttgagccctggaagctgaggatgcactgagccaagattgcactactgcactccagccagggcgacagagccaggcctggtctaaaagaaaaaaaaaaaaggttgactgggctgaaagatacccagacatttggtcaaccattattccaggtatttctgtgagggtattcttatattttcatattcttgtatgagcttaacatttaatttggtactttgagtaataaagatcacccttcctaatgtggagaaatatattaatcatccactaatagagtccaaagagaacaaaaatttgacctctcttgcaaaagagagactttctcttgtctgatggtctt

SEQ ID NO: 851234 - DNA, 504 bp, Homo sapiens
actgcaatgtgtattaacctaagaaaccaggatgcattatcaattaaatgaagtacaacatgcacagctttccaccattgtgtgtttctttaatgtgacttgagcaaacagcaggtrttaaataaccttccaaaagactgtaagttcagcattatctgcatatttgcttgaacagcagtaagtaaaaggaaaagcaatgagtgtctttggggctgccttgatctaaggaaaacatcttcaaagagtcatgtactgtgatattcttcttccaatgaggggtgaagtaatgtaacacttcagaaggagtcactgataagttatattcatcttccgtgatagacagttagaccttgaaataacaacagaaaaggaagattttcatcaaacctgaattgaagaaggaacaagtagcaaaaagagcaatggaccttggggtttgttcagatacaaactgctatttactagctgtgtgtctttaagcaagttacttgacttctctgtgcc

SEQ ID NO: 851235 - DNA, 626 bp, Homo sapiens
ctaatcctgttcttcacacccatatttgtgttttctgatcaccagcagwcatagattcctttgaggcaactacacaaaacattggacagctgagtgcaaagaactaagccacagaacatatcacataagaacttcctacaggatgacacgattgtggtcatcagcacactggatcatctccctgttctgcatctattctcaggttcatcagtgttcacgaatgtgcttccctccctaacatgaagcacttccctgctcctcattgagtggcccttccactgcagtgaacaggtttctgatcccaccgacaaagttctcagttgttgtgggaagtcagggaccccaaatggagggagtggctgaagccatggcagaagaacatggattgtgaagatttcatggacatttattagttccccaaattaatacttttataatttcttatgcctgtctttactgcagtctctaaacataaattgtaaagatttcatggacacttatcacttccccaatcaatacccttgtgatttcctatgcttgtctttgctttaatctcttaatcctgtcagctgaggaggatgtatgtcacctcaggaccatgtgataattgcattaactgcacaaat

SEQ ID NO: 851236 - DNA, 626 bp, Homo sapiens
ctaatcctgttcttcacacccatatttgtgttttctgatcaccagcagacatagattcctttgaggcaactacacaaaacattggacagctgagtgcaaagaactaagccacagaacatatcacataagaactycctacaggatgacacgattgtggtcatcagcacactggatcatctccctgttctgcatctattctcaggttcatcagtgttcacgaatgtgcttccctccctaacatgaagcacttccctgctcctcattgagtggcccttccactgcagtgaacaggtttctgatcccaccgacaaagttctcagttgttgtgggaagtcagggaccccaaatggagggagtggctgaagccatggcagaagaacatggattgtgaagatttcatggacatttattagttccccaaattaatacttttataatttcttatgcctgtctttactgcagtctctaaacataaattgtaaagatttcatggacacttatcacttccccaatcaatacccttgtgatttcctatgcttgtctttgctttaatctcttaatcctgtcagctgaggaggatgtatgtcacctcaggaccatgtgataattgcattaactgcacaaat

SEQ ID NO: 851237 - DNA, 482 bp, Homo sapiens
tctaatgacacaaaaagattcttgagtgctttccaaatcaagcactattaaaaattaacatgaatattaattttaatatgaatcactaaaacattaatatagactaattttaatatagaataatatattttcataacatatataaatatattaatatagaataatatattaatatattcataacatatataaatatattaatatagaataatatattaataacatatataaatatattaatatagaataatatattattaatgtagaatgatatacttagtctatattaataaatattctgtattaatatgttccatattgttttagtgattattgaaatggggcaatccatgtatagtgactctttatggagaagacaacttgtctatgatggttacaatgataatattagtwagtagagaaaagagaggaagaaattgagaggataaaagaaaggaaggttgattctttgttagcttcaa

SEQ ID NO: 851238 - DNA, 615 bp, Homo sapiens
aaatatacttactatatttgattccaaatgaacaaacacaaatttcattggtgtagttctttctgtttttcaaaatacttcacaggaaatatctcatttagctcttacagcacctccttactgctgttttacagagaggtgctcaggttacacatttattggtaagaggatttcaggaccacataggtgttaagtccaaatccatgcttgttctgttgcaccatggtaccttttaaatttctagtctgtggaacaaaagttcgcccattaattctcagtagtttagtgtcccaacttttagtagccagagataatctcacagtccatataaataagattttcttttttctggcataagcttcctcttgagaatcagtgagagaaaggaatggtcttagcctcatttgcagaacaatctcccccgacaaataaaccataacagacttagctctcctctactccacaatccatgaaacagacccacaaatactctttgtttaaacatggataggattgtcttagccatttggatctgacctcrgaagacttggcacaccctttttttattgttcagatacctggctcctttggatgggaggatccataaactgcctg

SEQ ID NO: 851239 - DNA, 656 bp, Homo sapiens
cttctaggcctatctgtgcacttccttgtaaaatccagttttagcaaagaaccctgctaagtcagtttagcaagaatcacccagccttgatatttgatagtcctcagtatctraccgggttcgtcattgtccaccatctcccaggtgatgtctgatcaccttggcctgtcttcagcaaggatactattaggtcagtttagccagaatctcccttacccctgatattctgtcttagtaattttccatctactggcctccactgggctccctggctgtaaattcccatgctgtatttgaaagtgagcccaacttctctcccacactgcaaaatcccgttgtagtgatccttatacctatcatgatggtcctgaataaggtcttccttaccatactttaacaatgtaattgaaaatttttcttcaacatctgttcatgtttgaaagtgctgagagtaactcagagtctgtggctatggttggtttacttggtgtgtgagtggactgttcgctgggagctccctggtgtctctatattcaggtttttcttcttgggctcatcagtttctccagagaaaacttttccagtctcttgcctggagaatggaagactgggttgcagtgttttgcacactaagtgagggaagcatccagtttatt

SEQ ID NO: 851240 - DNA, 590 bp, Homo sapiens
agcattgtttgtaataacaaagattggaaatracataagcattcatcaatggggtatgggtaaatatgatacaacacattcatgtaatagaatattttacagaagttacacgatataaactcaaaaatattattttattttattttatttttttgagacaaggtgttactctgtcacccaggctagagtgcagtggcacaatcaaagatcactgcagcctcgacctaccggggctcaagtgatcctcccatctcagcctcctgagtagctgggaccacaaacatgtgccactgcctggctagttcttaaactttttgtacagatatggtatcactacgttgcccaggctggtctccagcttttgaccccaaatgaccctcccacctcagcctcccagagttctgggattacaggtatgagccactattctcagccaaaacatttttaaatgaccaaataagttgcagattaatatcagaggtagaaaaaaaatccagtctgtatattttctataactacatgtaattcctttgtaaatggatacatgtcaactttgtcttgcaaccaagatagagtaacaggaacaagat

SEQ ID NO: 851241 - DNA, 567 bp, Homo sapiens
aaggatggtgctctctgggagctggaatacaaacaaggggattcctatgattgcactcagcttactgccttgagagattttttttttttttttttgagayggagtcttgcccaggctgtagtgcagtggtgtaattttggctcactgcaacctccacctcctaggttcaagtgattctctcgcctcagcctctcgagtagctgggactacaggcatgcaccaccatgcctggctaatttttatatttttagtggagacagggtttctctatgttggccaggctggtctcaaactcctgacctcaggtgatatgtccatcttggcctcctaaagtgctgaaattacaggtgtgagccactgcgcccggccttccttgagagatttctaagttgcagcgcagagaaaggacactcagacagagactgctggactccctggtttgaggagctagaactgagagtctgaggaaatcaaaacatctagaagtctcaggacagaatactgtagggtaaagacttcccagagagatcctaagagatctatagaatgtcccccttgaggacccag

SEQ ID NO: 851242 - DNA, 607 bp, Homo sapiens
caggagtgtgtgagtgtgagtgtgtgtgtgtgtgtgtgtktatcagagagagagagtgagagagaaagagagaaacagatgaaggacagagacagaaagagagaattatagtgagtctctgaacggatagaaatctctctctatgcaacctttagcttttttcaaggctaaccccagaagccccatgactttagggacactagtcattactccgcaggtcatgtggagacccgcctgtttgcatctgcaacactcctgcaggatcgggcaggtatgtgggctcttttaccaacacagtcaccgttctgctcactgaattggaaacctgggctgaggaaacagaaacaggaacttcaggtactgtcgagagatacaaatgttagaacttgacagattttgtggtatttgaggttcctgctaaaacatgaacctgactctaagtagaaactatgttacttggcatatttgacttgatttctcataatctggaggaaattttaccaaggtcaatgtctggccagaatcatccccgtgatgcagacagggaaatacgaattacttgtgaaagttgataaagatagaatttagattaatatgcatgatgttt

SEQ ID NO: 851243 - DNA, 563 bp, Homo sapiens
agaatgtgtcacaagttaaattgtttatgtttatttgtttgaaatattaaattyattcattttccatggatggcaaggattttgcctgtaggtaacagcaggcagtgtgtgtttcaacatcagtgaaattctatttagaaaaattaactgaaagaggggaaggactgacttcattaaaaaccaaagtgaggagaatgagagaacagatttaatgaaatgtggaagactacaaaaaaagaagaagaaatggtccattaccaattttacaagaatgtgagctgactgaagaataggtcagagttttcatgggaattataaaagcctacatatttacagaatgaataagcttacttaatgtttaggtagcccttttcataggagaatcatttataaagatttatgttgatttattttcccaagtccaggagctagtttttgtaatgttgattgctagtattttggctttttgacatagttacttaattttaagtaactaaattctgatatttatgttgttatattattttgtgtttaaaaacctgaaatctcattttttttcttaa

SEQ ID NO: 851244 - DNA, 670 bp, Homo sapiens
gtgggaaaagcaaggagcaaattttttcctagagcatccagagggaacaaaactctgctgacaccttgattttggyccagtgagactcgttttggacttctgaccttagaattgtaagataataaatgtcattactttaagccagtaagtctgtggcgatttgttaccgtagccctaggaaactagtacaccaggtgcacatgctctttccttgacaccttgctgccttctgcaaattcagaattcactaagaaagaaatctggtggtcggcagcctggtgctgtttttcttttgaatccctattctgtttctcctgctgtttgtttctcctctggctgcttctcctttcatggccagaggccctagcaggtctgtgtgctccgtctgattgtcccttctatggctgctactttgggaattacgtggaaagagacagcaaagggataagaaagaagaaaaaaaaaaacattgacagaagcaaggagaattttgatgaaaggcagatcctctgtatttgtggttaatgtctttctacgttagaaaatatatacctcccttgaaagagttgtgtttttctccacccttttccaaacatacctctccacacctttcccatctctcactcagacacaaacacagagcaatctggagaccctggaaggctcatct

SEQ ID NO: 851245 - DNA, 612 bp, Homo sapiens
gatatagaacaattgcaggtacttgagagtcacagaaaatgagactggaaaactaagctggaaccaaggacaaaggatttttaatgtctttattagggggtttggatttatgtactaggtaatgatcagcctcggtccccacctgtacaacgatggaaaggtgtgtggccatgcaaagaagtcaaatgtcatgaatgaccttcctgcagagttaggatttttgttaagaatactttgcattttctaagaagtagtttgggttattacatgggttattaagatcccgtgtactgaaaaaatttagcgggggcggaggagaaggcgggctcccaatccggttctatccggttctcccaccatcccccgccaggggtctcagcagctcggagggtggaggggcggcagcgccaggcaccgcgcacgcgcctttccggagccagaatgcccaagaggaaggtcagctctgctgaaggggccgccacaggaaragcctaacaggaggtcagcgctgttgtcaggtaaacctgctcctgcaaaagtgcaggcgaagccgaaaaaggcagcagcgaaggatacatcttaagacaaaaaagcacaaacaaaagggaaaag

SEQ ID NO: 851246 - DNA, 622 bp, Homo sapiens
cactgtctacctggagatagtgtcacatcccacaggttgaggatcagtcctcaagaatgcccactgccagcccctgcgaccttcactcctgccgcaagttcaggcctctggaacttctttttaattaattwatttttttgagacagagtctcgctctgtcacccaggctggagtgcagtggcgtgatcttggctcactgcaaccctcacctcccaggttccagtgattctcatgcctcagcctgggattactcagtagctgggattactgacatgcactaccacgccccgctaattttttgttttttttagtagagatggggtttcgctatgttggccaggctggtctcaaactcctggcctcaagtgacctgcccgcttcggcctcccaaagtgctgggattacaggcgtgagccactgtacccggcctggaacagatcagcttcaagttggggttcccacaactctctctttgggttcggttaatttgctggagcagttcacaaaactcagataaacacatttactggttcattataaatgatattacaaaggatacagatgaagagacatgcagagcaaggtacaagggaaggggcgcggagcttccatgccctctcta

SEQ ID NO: 851247 - DNA, 589 bp, Homo sapiens
gttttaagtgttctcttatgataagtgatcaagctggtctcctgtaatttgctgcagaatgagaatgaagaaattacgatgtcaaataataaagactcccagggtaaaaaaaaaaaaattcaaagttragtctgttaacttgttaagcaagagaatacgtgctggtaaagaaatttagttcaccacagggaagagtcagaggattttaagagtgagaagaggaggaggagttcatggtggctgttaattaaggattggaaatttgcactctggatagaatggaatgaatccaaaggtgtaaaaatagttggttaacacacatctttagttaggtctagtaagggtgtggcatactggagcttctcagggttgatgatactgtatcagcatcagctgatatctcctagacatggaaatggaagatttcccttccatagtggtctcttttcattcttgcttaatggatggtttgtctacaaagacaatgaagaacacactactgtataccatgtttccctctgtcacgtttgccgtcctcctaccttcagtgtttcttactctgggaatccaatagaggggctttttgaaa

SEQ ID NO: 851248 - DNA, 466 bp, Homo sapiens
aaactatgttcagttgaaactgaaaggaacatagtttatagatttgtttccttgatatgccataacatatatttaaacaattattaaatatttactcttaaaaatacttgacttactaattctrtacatttctgcagatataaacgcctcctggaaatgacaataaatatgtgaaatgtatttggaaatgaagacgttggttgccatggagacttaaaaacagatcaactgaaaatggatattctgattaagaagctaaaacagaaggtaattttaaaaaaattatattatcttaaggtctagattacgtgtgtgagatgtgcgggtttgttatataggtaaacatgtgccatggtggtttgctgcacctatcaatccatcacctagatattaagccctgaaggcattagttattgatgttgatgctctccctcctgaccccaacaggccccagtgttttttgttc

SEQ ID NO: 851249 - DNA, 466 bp, Homo sapiens
aaactatgttcagttgaaactgaaaggaacatagtttatagatttgtttccttgatatgccataacatatatttaaacaattattaaatatttactcttaaaaatacttgacttactaattctgtacatttctgcagatataaacgcctcctggaaatgacaataaatatgtgaaatgtatttggaaatgaagacgttggttgccatggagacttaaaaacagatcaactgaaaatggatattctgattaagaagctaaaacagaaggtaattttaaaaaaattatattatcttaaggtctagattacgtgtgtgagatgtgcgggtttgttatayaggtaaacatgtgccatggtggtttgctgcacctatcaatccatcacctagatattaagccctgaaggcattagttattgatgttgatgctctccctcctgaccccaacaggccccagtgttttttgttc

SEQ ID NO: 851250 - DNA, 541 bp, Homo sapiens
aagtggactaatacagtaagcatatattctacgttgcatatgaagagatgccattccaaagacctaggaaataatttagtgaaagaaacttaaaataaggtagtaaaatatattctcagcaactaccaccagtcagataattcaatttcccctaaaatataaagcaaaaatgatctgaaatgtaaaacatttactatacatatgccacagaaattggccaaaatgctgcatatttgctagaggaaataagattaaaggaagcatttcaagtgaccagaacttccttaacatactttttctaactgatgtttgggcaataattctcccaggatatttctgccaatttgtaagaacctaaaaaggataggagataatttctctaagtatgagatataacattttcaaactcaagttttttacctcactataacacttctttgatgctgaattaatagaaaagaaagcttatggagaaaggaaattctaccactgaaataytgcggcattttaaaagttaacccattttaataaagctgataaa

SEQ ID NO: 851251 - DNA, 604 bp, Homo sapiens
cagtccataatacaaagcaacaacaacaaaaaaatctaaaattcactttttactcgacttttctctcctactgccatgtaatttcctgctccyctttacaaaaacaacttctcaaaagagttgtatatgcttgctgtctctagtattttccctctcattctgtcataatttcactccattcagctttttattttcacaactccatgaaaactactccagtggccaaagtcactgatgaccttgctgataaatccaatggtcattctcagtgctcattttatttgatatagcaacaacatttgacacagttgattatccttcttcctcaatacctcctgctcccttggcttccagaacaacatactcagttgatcctccttttgccttcctggttacactcagtctcttttgctggttcctcctttttttccagaactattaatattgtaacaatctggattctcttttctatccacattcgttcccttggtgaacttatccagtctcataattttaactattatggatatactagactccaaaatttatctcactagctttctctcttaaattttaaatgtctgtgtattatttccatatgctc

SEQ ID NO: 851252 - DNA, 604 bp, Homo sapiens
cagtccataatacaaagcaacaacaacaaaaaaatctaaaattcactttttactcgacttttctctcctactgccatgtaatttcctgctcccctttacaaaaacaacttctcaaaagagttgtatatgcttgctgtctctagtattttccctctcattctgtcataatttcactccattcagctttttattttcacaactccatgaaaactactccagtggccaaagtcactgatgaccttgctgataaatccaatggtcattctcagtgctcattttatttgatatagcaacaacatttgacacagttgattatccttcttcctcaatacctcctgctcccttggcttccagaacaacatactcagttgatcctccttttgccttcctggttacactcagtctcttttgctggttcctcctttttttccagaactattaatattgtaacaatctggattctcttttctatccacattcgttcccttggtgaacttatccagtctcataattttaactattatggatatactagactccaaaatttrtctcactagctttctctcttaaattttaaatgtctgtgtattatttccatatgctc

SEQ ID NO: 851253 - DNA, 659 bp, Homo sapiens
aatggcatgatgtaaagaagaaagggctagggaagatttttcatgtgtctatttatttaggatgaggaaaacytcagcctataaacgtgttcaacagaatgcaccaatagaaaacgaaagagtaggaatttaaggttcagaaataatacactggagccctatctcagagaagtcaggtttaacactggttaaaacctgtgaaagaagtagggacacttattctgtaatagaaatgaaaaatgtaaggttggtggaagacagagatagaactagtgatagaaaacgagaaagctgagggaggttatatctgagggtccctcttttctgggcaatatatgatgaagcagtgtttgctaatatagtcataggaaaccacacataatttcagataaacagaaaaagggaatgaatttgagttgtgagtttaactttatgaaatgggtgttgagaaagagattttcagaactctgcaatttcatcttttatgttgcaacaatgagtaggatagatcagaaaagaagaaaaccactgtatttgtagaaactgcaatggtctagagcaagagtgaatgagggtctgacctgagcagagaagagtgagactaaataggatgcagcagagagtctcttcatgcatttactatatgcaccgtgcccagc

SEQ ID NO: 851254 - DNA, 572 bp, Homo sapiens
aaatttcactcatgacagattatttttctgaatgttttgtaatttttaacagaaactttcctttaaatggggtagattttttttctctgacaattttttgtacctatgggtgaaattccawattagtttaatgtttgcatctcccaatgacccaggagtattaccagacacaggccaattttactgttattttctaagcttagggttttctagatcaagtaggccatgcagctttaaatctcaaacacttgccaaagagagtaccatatttataaattatcaggagatatccttttcattctcctctaaaaacccagatagtggtatacaagcttccttgccatgtctatatatcattggtaggtaggtttttttttttccatctcacactttaattaaagatacaaccttttcagatcctggatctgtgtagatggtctttgttctaactctctgccttccatactctcaaggcatcaccgtctgtgtctataaggccgaaagtaactatgtcggtagtttaatgacaaacacacctcatatacacgcattccaccattttttccttcccc

SEQ ID NO: 851255 - DNA, 572 bp, Homo sapiens
aaatttcactcatgacagattatttttctgaatgttttgtaatttttaacagaaactttcctttaaatggggtagattttttttctctgacaattttttgtacctatgggtgaaattccaaattagtttaatgtttgcatctcccaatgacccaggagtattaccagacacaggccaattttactgttattttctaagcttagggttttctagatcaagtaggccatgcagctttaaatctcaaacacttgccaaagagagtaccatatttataaattatcaggagatatccttttcattctcctctaaaaacccagatagtggtatacaagcttccttgccatgtctatatatcattggtaggtaggtttttttttttccatctcacactttaattaaagatacaaccttttcagatcctggatctgtgtagatggtctttgttctaactctctgccttccatactctcaaggcatcaccgtctgtgtctataaggccgaaagtaactatgtcggtagtttaatgacaaacacacctcatatacacgcawtccaccattttttccttcccc

SEQ ID NO: 851256 - DNA, 662 bp, Homo sapiens
taccagcaaaattattttatagaaagtaaaaagctaattctgaaatttatatggaaattcaaggacttaaatatagcataaaaatgtacatatatatgtgtgtatatataaatacacacacataaataaaaggaccaagttagagaaattgcactatctattttcaaggcttactataaaaccacattaatcatggtagtgtggccaggcacagtgactcacacctataatctcagtactttgggaggccaaggcaggtggatagcgtgagcccaggagttcaagattagcctgagcaacatgatgaaacctcatctctaaaaaaaatacaaaaaaattaggcgggggtggttgcatgctcctgtagtcccagctacttgggtagctgagggaggaggatcgcttgagcccaggagttggaggttgcagtgagctatgattgtgccactgtgctccagcctgagcaacagaatgagatcctgtctcaaaaagaaattatggtaatgtggtgttgtaaaaataatacacatatagatcaataaaacagaattgagagtacagaaataaaccaagacacatttggycaatgatttttatttatttatttgtttattttcttgatataaaatattttacatatttatggagcacatgtgagtatt

SEQ ID NO: 851257 - DNA, 632 bp, Homo sapiens
taattttatagctccccactccatctgccccgccccttcccttcaatgatgacgtttgcaggtttcagggggaccagggaacaaagctggagcctggcagccccactatgctgccagccggggagagcaagtcacagttacaaattatcacaacaattagcgcctgtacttgggggatctgcaaattgaggagaccccaactcctcattgtacaggggtctatttggcagtgaccttgctctggaaacgatgatattccctcagcgtgagggaattgatgttgatgaacctgatggcatcaattggctcataatcatcctgcactttcatgctcaccagcaactggctgtagagagacagtgcgtactcccagctgaggatgtacacctggcccttgaggacggacacctgcactttcccttctactcgctcctggaacttggcaatgcagtggcggacaaattcacactctggtctgtgccagaaaccggtatacaccagctcagcaaattccaagcccaggccttgtttgrttttgcgcacttccaggtccatggtgaaggccttgatgtctaaatgagcgtggtaaaggatggtgcctgctggggtatcctagataccttgggacttca

SEQ ID NO: 851258 - DNA, 543 bp, Homo sapiens
aactatgagaacacatggacacagggcggggaacataacacactggggcctgtcaaggggtgggggactgagggagggatagtattaggagaagtacctaatgtagatgatgagttgatgggtgcagcaaaccaacatggcacatgtatacctatgtaacaaacctgcatgttgtgcatatgtactctagaacttaaagtataataaaaaaagaaaaagggagagaaatttgtttttaggtcttgaggaagagggagcagataggagagtccagagagaggagccaaacaggtggcagaaaatgggcacttcttgagatgaagggacaatgagatgatcttcatggctgacctcagatgtccacaaaaaaattgtctccatggtgacttgaattcccattgcttgatgcaaactgtatgccactttttggaaaataatatttcaacayagcaaatgaataaagtgtagagaagagcattaaatatacatgtacctgcacaacccggaattaacaactatcaacatctaattctatattattct

SEQ ID NO: 851259 - DNA, 536 bp, Homo sapiens
tgacagaatttaagagctgagtcacagtaatcttgaattcaccttgtctattttacagaggagtgttgatttaggcttgcttcacacrtggctaattttcaagatcaaattcacacaggaaaacaaggggggcagaaagacaaagcactaacctagaaggtgaggtgcatcatgtttcactcaatgtggccgtggctcaggcacatcacagtaacagttctggacctcagtttttcattggttactttcactctaacattcttgattctaaacttgatgtgcatctacatcacaacataaggcagctctggggagcaggctctaactgatgctttctccaagcccctagaagctatgcatatgcagtttgtgtgccaatttctgagtgtgtgtgaggaaatgcaggggtgaatcgatggacaaataactagacaaatatatttgttttaaagactcaacattgaggaccaagttttcatagtgaataccattcagcaagtcgattaatcagatttggataggagtaaatgtgggca

SEQ ID NO: 851260 - DNA, 288 bp, Homo sapiens
tggtgttgggacatgggtcattttgtgtgcccaatgccttgtccacaatttctcacactgagccatctttgttcaaaaccttccagaattttccataagacatcattgattattaatcatccaaagtcggcctcactgtgtgtgccttagcattgtgttatgaaaatttgctgtgttttgcatatccctgtgtttttttgtatttgcttgtcttctctcctaattagatyccatttcctacactatctctacagtgtgcagcacagtgaatattcattcaatgggata

SEQ ID NO: 851261 - DNA, 624 bp, Homo sapiens
tgataaacatcttaacaggaaacaggattcgagagcagagaactggtccgacaaaaatttaccaggctggaatttctcaatcctagtaagcctgagggtactrcaggagaccagggcgtatttcagtctttatctcaactgcataagacagacactcccagagcggccttttatagacctcccccaaggaatgtcttccttccccagggtattccttgctgggaaaggaattcagcgatatctctcttacttgcacgtccatttataggctctctgcaagaagaaaaatatggctgtattctgcccaaccccgcaggaagtcataccttatggttatattcccatgttccctgaaaatcactgttattctgttctttttcaaggtgcactgatttcataccgttcaaacacacatgttttacaatcaatttgtacaacagtggtcctgaggtgacatacattctcagcttatgaagataatgggattaagagattaaagtaaagacaggcataagaaattataagagtattattagggtgtgataaatgtccatgaaatcttcacaatttatgttcagagactgcagtaaagacaggtgtaagaaattataaaagtattaattt

SEQ ID NO: 851262 - DNA, 624 bp, Homo sapiens
tgataaacatcttaacaggaaacaggattcgagagcagagaactggtccgacaaaaatttaccaggctggaatttctcaatcctagtaagcctgagggtactacaggagaccagggcgtatttcagtcyttatctcaactgcataagacagacactcccagagcggccttttatagacctcccccaaggaatgtcttccttccccagggtattccttgctgggaaaggaattcagcgatatctctcttacttgcacgtccatttataggctctctgcaagaagaaaaatatggctgtattctgcccaaccccgcaggaagtcataccttatggttatattcccatgttccctgaaaatcactgttattctgttctttttcaaggtgcactgatttcataccgttcaaacacacatgttttacaatcaatttgtacaacagtggtcctgaggtgacatacattctcagcttatgaagataatgggattaagagattaaagtaaagacaggcataagaaattataagagtattattagggtgtgataaatgtccatgaaatcttcacaatttatgttcagagactgcagtaaagacaggtgtaagaaattataaaagtattaattt

SEQ ID NO: 851263 - DNA, 605 bp, Homo sapiens
  misc_feature 568: n = A,T,C or G
tatctaggtgcattgctggttggcataataatttgaaaggaatctttttctgagcagtaggtctcaatgatgggcttaaaatagtcagtaaaccacatgctataaacagatgtgctgtcataaatagaaaacatttgttttgctatttctagagcacaggcagagtacatttagtaacttttaagggtctttggatctttggaaaggtaaatgagcattggcttccacttaaagtcgccaactgcattagccccttgtaacaagacagtctgtactcggaagctttgatcccacgcattgacttctctctagttttgaaagtcctatatgacagcctcttccaatagaatgctgttttgtctacattgaaaatctgttgcttagcatagctatcttcatcaattatcttcagctgcatcttctggataactcactgcagcttctaacatcagcacttgcttcaccttgcactttacgttatggagagaactccttcccttaaacctcatgaacacttctgctagcttctacttttttytgcagcttcctcacctctttcagccttcantgaattgaagaggataagggccttgctctggattagc

SEQ ID NO: 851264 - DNA, 541 bp, Homo sapiens
acactcttcaaaacccggctcagacgaaggaaccaaggccttcaccctcctctgagaagcctccaccatcacccaaccagctcatacagccccrctgggctgtattattcatgtagaagtctgtggtctctttcaccctcttgtgaatccttttaggacaggaatcccagcttcttctccatgtaccacctgtgcccagcacaggggtaagcccacaatgcaataagaaaatacttccatcccctgcccatagttcctctctgctccaagatgagaaagaactctacctcccttcgtgcctgggggttgcccctgctctaatccctcctagtcatgcccctcccacgggaggagatgttgatagtcggagtgaacagagtaaggatattctctggaacaaatcgtactagtgggtgggtgtctgtatcttaaaggcaggaacagaggctctgtgcctcctccacctgttagtccagccaggcaccccaccctggatgcagctttgggcctgaggccgagagggtaagtcacgcgggggcga

SEQ ID NO: 851265 - DNA, 609 bp, Homo sapiens
tgctttttatcatgggttttttattttattcttatccaaaaagctctatttgacacaattaaacatgggcttttwatttatcacatcattcttgggcattcacattaaaaaatgataagcaaaattaatgtcttaagggctctaaaactccttcacattctgaatccaagtcttcagattaacttttatattcggagaggtttatggctggattttttttttacctaacattgtcctctgtgacaagagcatggtgatgctacatttcttcaaaaagggcttcattaccatctcttggggttttcctccaagctgctgacatgcatttgcaagttttgattctagactttcctgctcttctgttgacatcagagggtaccaacagaaaactttcagacaaaaacccaggctcatcttccttccttgaatggcccttaactggtttgcgactgaaacactgaggggctgcagttgtctggtcaaggcaccagaaataacaatccacttccagcatgcataggctgtggtcacctgttacctatccaacagtaattatggtaatggcacactttgtaaaagtgcaccccaatttcagagaaatgaacaggc

SEQ ID NO: 851266 - DNA, 609 bp, Homo sapiens
tgctttttatcatgggttttttattttattcttatccaaaaagctctatttgacacaattaaacatgggctttttatttatcacatcattcttgggcattcacattaaaaaatgataagcaaaattaatgtcttaagggctctaaaactccttcacattctgaatccaagtcttcagattaacttttatattcggagaggtttatggctggattttttttttacctaacattgtcctctgtgacaagagcatggtgatgctacatttcttcaaaaagggcttcattaccatctcttggggttttcctccaagctgctgacatgcatttgcaagttttgattctagactttcctgctcttctgttgacatcagagggtaccaacagaaaactttcagacaaaaacccaggctcatcttccttccttgaatggcccttaactggtttgcgactgaaacactgaggggctgcagttgtctggtcaaggcaccagaaataacaatccacttccagcatgcataggctgtggtcacctgttacctatccaacagtaattatggtaatggcacrctttgtaaaagtgcaccccaatttcagagaaatgaacaggc

SEQ ID NO: 851267 - DNA, 623 bp, Homo sapiens
tttccaaagcaaatccatccccactggtggggaytgtcgatcatatggccctacctccccagcccaagttggccaatcaaaataccccaatggtactggactcagagtgattggccaaggcatgggcacatgacccaagctggcagactgtcccaatggctccagacacaaccacgtgttgatccagaactgatatctccaaggtgcagatgaaaacagtaagttgaggaagaaagtttctctgtctgacattagctttgcccagagtgtctctgagtgcaaatctaacatagtcattttcctagtgctgatgacattcactggggccatgaattagtcaggacaggctacactaggctgcaggaaaaactaaaccatgaaatctcagaggcttaacacaataaaggtttacttcttagaaaaagtcagatgtgagtcaggctggccccctctgtcttgaatatttggctcctctcaaagtctattggcctgaactagtaatgttaccccaacccaaccacaagagatactgggaaacataagagtgtgtgtagatactgggtgagtatcaactgccataagtcgaatgatattttttttaaatctctaaatattatttgagc

SEQ ID NO: 851268 - DNA, 697 bp, Homo sapiens
caggacagagtgagacagagcaagattccatcatgatactcagaacagcagacaattttaaatttatgaattgcttctttctggaaacttccatttaatatttttgaactgcagttggctctaggtaactgaaaccatggaaaatgaaactgcaggtaaggaagaactactgtactatgaagctacagtatgatgatgttacagaattacacaggcataagggtaaaaatgtagatcaatggaagagactagagagtccagaaagaggccaacatatacatggccaattgatttttaataacataggcaccagcataattcaatggggaaggggtaatgattttttaaaaatagggctagaacaactggattgtcatatgaaagaaaagtaaactcaatccccgtctcacaccatacacaaatattgatttgaaatcagtcatagacataaacataaaacctaaaactataaaatttctagaagaaataatagaaaaaagaaccctttgtagtttggggttagacaagaatttctttgatagacaaaagtattagtcataaaagaaaaaattaataaaytagacttcatcaaaataaaacacttctgctctctaaaagacataatcaaaaagtgaaaaggcaagtcacaaattgggagaaaatatgtgcatcacatatatctgtcaagaagcatgca

SEQ ID NO: 851269 - DNA, 488 bp, Homo sapiens
tttttctggtgctggttcaggtacttggatatactggatattaggctcctgtcagatgaagagtttggcaatattttcttccatttcacatgttgtctcttcactctttgtwttgtttgctttgcagaaggtttttacatatattcccacttgccatttttgttttggtagtttgtgcttttgaaggctttcccatgaaatctgcctaaaccaatgtcctgaagcatttcccttatgttttcttgcagtaattttatacaggttcagatcttacatttaagtcctacatccattttgaatttatttttgcatatggtgaaatacaggggtctaatttcattcttctgcatacaaacaaccagtttttttagattcatttattgaagagggtgttctctccccaatgtgttttattggtacctttttcaaaaatcagttggctgtagataagggtatatatttatgggttctctattccattggtcttt

SEQ ID NO: 851270 - DNA, 607 bp, Homo sapiens
aaccatcctgacagttctgaggtgttatctcactgtggttttaatctgcatttccttgttagaaaagtaccttttaaattgagcaccttttttacaactcaaatgtccattaaaagatcartaagtaaagaaattcttgtaaatatatgcaatgggatattattcaggctataaaaaaaaaggaaatcctgttatttgcaacaacatgggtgaacctagataacattatgctaagtgagacaagccagtcacaaaagacaaatattacatgaatccatccttatgaagtttccaaaatagtcaaactcatagaagcagagaataaagaatggtggttggctgggactaggagggaaaaatggggtataaagtctaccttatacaaaatgagtatgttctaaagatctgatataaaacatactagctttagttagcaatattgcattgtgcactttaaaatatgttcacaagaaagatctcatgttaagtgttcttacacaaaaacaagacaaacataaaatcctaaaatccacgaagaaaacaagaaaatgtatggaggtgatagatatgtttagtaccttggttgtgatgatagtatcacaagtgt

SEQ ID NO: 851271 - DNA, 640 bp, Homo sapiens
aggctggggaggagttggggagggagggaggttgctctgcgggacttcctgagctaattgactatgttgtcgggktgctcttgcctccttcaggagcatctggtctttcaaagctgttgctaaaatttaacccttttcctctgaagcaggggacgtctctatgccaccctggggcccaactggcgggttccagttaggaattctcccagaacccggagctgtgtctacaggtattcatgtgttcatgtgttcatttgtttgacacatagcttgttatgtggccttttggatgccaagcactgtgctagaggctgccgaaagaaacagacacagcctttgcctacatgagtctactgccaggtgcactggctgtcccagaggaggtgaggggcactcaggaagaggagggggagcttacttggttcgggagatcagggaaggcctccctgaagaagagactggaagaatgataggaattcgccaaataattggaagtggaggggcaatgagaatgttcccagcaaagggacagcatgggctatgaggcaggaagagctgggtgattcgagtgaagggaagggagtgttggaaggaatgagagagggcagggacatgagatgagctggagccacatccagca

SEQ ID NO: 851272 - DNA, 587 bp, Homo sapiens
caggatatttaattgtacttagctagaggaatatctactctatcttcttagaaatggaagccytatgtgcttatttttccacacataatttgttgacataaaaatgttatgttttccttccactataatattttctatcgatttattcttatatttatcaaagtatttatggtatatgtttttgcataatactattgtgcacattaatggtcagaactaaaatatcattattgtggcagttactttttatatcaatgaaagagttcctatctatgccatttaatgctttatatactgaattctacattgtttgaaactaatgttaagtatttgctttgttctacttaatatatatttgcttagcattttatgttcatctgttcaccattactttggtttttggaatcaatcttgccaataaacaactttatttcagtttttacattcatttataatacacttacaatttacttacatttacattcaggtaacatccataaatgtaaacatgtaattttcataagccataatcttacttttgacacttttatggtttttttcatatagactgtttaactgtatattct

SEQ ID NO: 851273 - DNA, 584 bp, Homo sapiens
ggaagatgatgtaagagctaatttttcctccatatgtggaaaacatacatgtacacacacacacasggatggaagatccgagatattagaaataagaaaagagatcaagaaaaatatatttagttgtcctctagaaggctcccatctttgtccttctggattcagagtatagaaaccatgattattttaagaaactctgagaggagaaagagctggtgcattatttcctaaagtgtagccctgggagattgcaagtcttttaaagaaagctatccagtatggtcttcaagataaggaagaagagattaagcaggaaggtccctggacaaaacaaagactttccaaactgagaaaatgggggtcacagaagtgcttagagaaagctggtggaactgaagatgtctggttttcaaacaaggagaatgtagagtgtatggaccaaggtaaccagatgccactgcagtatagcaagtatcaacagctgtggtaggcatgtactgataagaagggaaaaggagaatatgtccagatgaggacaaaaagtgtctatgaagccagacacctgatgcgccaactatatctca

SEQ ID NO: 851274 - DNA, 715 bp, Homo sapiens
ttgcaaagttgaaattttcaactatcctgaaactaaagacccaaagtaagtgtttcatagtttctaactgctgtcgatttagaccaaggttcaacagccttggcactactgacaatttggattggataattctttgctgtgggaggctgtcctttgtgttataaaaatgtttagcagcatccctgtcctctgttctctagatgagagcagccacttccctcatgcccagttgtgagtaccaataatatctccagatatcacccctgagaggcaaaaatcactcccagttgagaacaactgatttagaggacagatttcaatattcattaacttaaatggattttttaaatcttaattacctttatatttgaacaaataaagtttcctgattaaagactgcattttccctaaatgggaatttgacaagatagtaataagaaataatttgaagaaaaaaaaaactcaaaaaaaaaagaatcccactttttgcatatttaactaaattctccagttagtgatgacttttaaacactttaatagtagattttcacttaagaaactagagaaaatttttactcataaattacagcaatcattaagatagcttgtttatatgcagatttccctttagtaatgaaatatttcataatctctttctaaatgaacacattctcaataaaaagttaataggatcckagctgaagatggtaatttg

SEQ ID NO: 851275 - DNA, 607 bp, Homo sapiens
atagcacattcagtgccaacaaagcatctggcacgtagtaggcactctgtcaatagatggcaaacaccagcgttattcttacaaaacaggtgaaactgcatcacctcagtctcttcttggaccaacatcagcaggtgttaattgttggagcaagtggcatctcactactcaaactatggatgataatctgctggctgcatactgtataggaaaagcatttttacctgagaaagataactttcaactttctaatctagccttgtaccagttgcaaataattgttattatatgttatgctttatagacagtcttgtttttaattatgaagtttttattggagtggcacgtttcaaggtaagtctgccatctgacttgccagtacttgttaaaagtttttatagtgtgactcatttacatatgcatgtgtatgtttaggtgctattattaaattttgctggcatatagtgaggaaattgtgattcaaattcgtccrtatgtactcctcccccaccatctgctctgcccctccatttaccagaaggctagctttagctacttgtgcatgtaaaacagaagcaagcaacactgtgaaagtgaaaatctttta

SEQ ID NO: 851276 - DNA, 609 bp, Homo sapiens
cactattagtatcccaattttcagatttaaaagctgagtcacaaagagtttacttatmtcacttgcccaaatccaagagtagagctggatttgaatctaggcagtctgatgccagaattggctctctaacattagaatatagtaaaaatggaaaagacagcttccttttatttttgggaagagagaagagaaaacaagcatttgttgcaaactttttgattgctaaatatcgtggcagaaattttacatacattctgctggcaacagccctatgagtcatatcatctgatccttattttacactgatagaaactaggccactgggatttcctggaggatccagttactttcttggggatcactgggaatttataaaagtaaaaaccagtgtgtttgttcccttcattcatcataaaactaagcaacaagcaaagttcctttcactcattgcatcagcaacaagcaaactggccctagcaggaagaccgaatcttgagactgtggttcatttcttcatctgatatggatcaatggatcagctgataaaatacacacacacacacacacacacacacacacacacacacacaaagacacaaaggtaattca

SEQ ID NO: 851277 - DNA, 529 bp, Homo sapiens
atagatatatacaaaactctccagtgaaaaacaacagaatctacattcttctcattaccacatggcacatactctaaaattgatcacataattggaattaaaacactcctcagcaaatgcaaaagaactgaaatcataacaaactgtctcccagaccacagcacaattaaattagagatgaatactaagaaattcactcaaaaccatacaattacacggaaagtgaaacgcctgctcctgaatgacttttgggtaaacaatcaaattaaggcagaaatcaagaagttctttgaaactaatgcttgcagcattagtttctattcaacacttctattcaacatagtattgaatattctggcaagggcaatcagggaagagaaagaaataaaggcatccaaataagaagagaggaagtcaaactatctttstttgcaggtgacatgatcttatatctagaagaccccattgtctcagcccaaaagcttcttaagctgataaacaacttcagcaaagtctcaggatacaaaaa

SEQ ID NO: 851278 - DNA, 567 bp, Homo sapiens
atcaggatccaaagctgtggagaaaactcaacctctgcctcctgggttcaagcaattctcctgcctcagcctccctggtagctgggattacaggtgcctgacaccacccccagctaatttttgtatttttagtagagacatggtttcaccatgttggtcaggctggtcttgaactcctgacctcaggtgatccacccacctcagcctcccaaagtgctgggattacaggcgtgagccacttttagaaaatgttttcatctatctcaatacctcactacccctcctgatattccatctataatagcaacagttgtgaaatgcactagattctaacattaacactagatccattaagaacagagcagaagagagtctggatacacaaatttcacaattattggctcccatcaacatatctaactcaagcataaagttgtttcagcagtagtttaagkttggttactaatgcaacacctctttgcatgcaatggcccattaaattatcttcaactttaaaaggttcctttgtttttaaatgcttataatgaacaaatatataccaatacc

SEQ ID NO: 851279 - DNA, 566 bp, Homo sapiens
gtacacctgaaaaagctcaaacttgcctagcacatatagagtccgaattcagttgggtttgtgtgaaacgggtaggttgagccctaaaaaagaggtagataacccatataggcagacttccttattttatttatttttttctgcttcagcctcctgagtagctgggactacaggtgtgtgccaccacgtctggctaattttgtttgtttttagtagagatggggtttcaccatattggccaggctggtctcgaactcctgaccttgtgatctgcgcgcctcggcctcccaaagtgctgggattacaggcgtgagccactgcgcctcgccaacttccttattttaaatgccatttcccactaaaaataaaaccagtaattctttgaaaaaaagttaatattatgtataggactggaagtatataagataaaactggaatatattgtcakaccagaaatcaaagattttgtcaaagactaatagttccatgtcaaaaagattcactaatcaatttgcagaggctcccactggccaaagatagagcttgatcatcaacaggaataataa

SEQ ID NO: 851280 - DNA, 704 bp, Homo sapiens
agcatggtgcatttttattgtccagaggttatggaggcttcacttgaactagctctagaactgatagggagccagcagagatatagaaatatcatggtcctctgcaaacactggcccagttccacctgtatcttcccttcacagacccatttcactcacaacgtcagtaacagatgtctagagactctaaaaaattgttccaaaatttgttaccttgtgaaaagattatcttcttttaatttatgagttcttcgtaggcttctgtttaaattatgaatgtgtcatatctgataatatgaggataaaaataatagctagtattttttagtatttaatgtcaggcacaagcctacatattttacatacatatataagtgtatatatagatatatagatttatatatgtacaaatttaatcttcacaacaaaagtaaaatcaggtgctattattccctccccccttttgtaaagaagaaaactcaggcatatagaggagaaataccttaaccattaccacacaccttgtaagggctgggacaaataaacacaagtaattttcaaatatattaataataatattctgagtattaattcctgtttccaaatagattactcttttaaacatagcactactacttacctaatgaaatttagttgctattaatggatgaattttktatctaacaggcttgattttgattatg

SEQ ID NO: 851281 - DNA, 616 bp, Homo sapiens
gtatccagtgtctatcacagtgcctcatgtgcaagacacatccactctcacaggacttctgtggggattaaatgaaacaacatttataaagtgcctacccacagtatggaacatggtatatgctcaattaatttttttatagacagatagatagcaaatgttaaccaagcaaataaggcttaattaaatagaattcttaaataaacaaacttgaaaaaataaaatgaaacttttgcttcattttgtaatattaagatatcttagctcagttgataaaagactgattgttaatgaaaataatagaaaatactattattttccactttattgatggaaacttctaaaataatattgtttattatattatttagaactttgtagaaaggagggggctacataattttttttttttttgagatagggtctcactcagggtcacccaggctgaagtgcagtggcacaatcatggttcactgcagcctcgacctcacaggctcaagcaatctccccatctcagcctcccaagtagcwgggaccacaggcacgtgccaccacaccaggatgagggctacatagttttagaaatgactccttatatctgttccataatctttca

SEQ ID NO: 851282 - DNA, 514 bp, Homo sapiens
gagtgcagtggtgtgatctcggctcactgcagcctctgcctcccaggttccagtgattaccctgcttcagcctcttgagtagmtgggattacaggcacccaccaccacacctggctaatttctgtattttcagtagatacggggtttcaccatattggccaggctggtctcaaactcctgacctcagatgatctgccctcctgggcctcccaaagtgctaggattacaggcatgagtcactgtgcccagccatgactgccatttttaaaatgacctgctataatgttatcccttgcattttatcaatcaaataattttaatgtgagttttgttgtttttttttttccagacagcatcttgctctgtcacccaggctggagtactgtggcatgataatggctcactgcagccttgatgtcccaagctcaagcaatcttcccacttcagcctcccaagcagctgggactacaagcatgtactaccgcatccagctaatgtttgtattttgtgtaga

SEQ ID NO: 851283 - DNA, 616 bp, Homo sapiens
ttccggtagccggtggcatctcctgtcagacgccggccactccgcgctcctgtcacctccggtggaggcgaccccatcccgagggcactgccgcgggggctcgsttccgactgcgggagacccagggatggggtggggagccgagccttctaaataaagctgttacagctgcgggtcctggggcagcccgaaggccagaaggggcgaccctgggacagaggccgcgacatccctcgggatccccactgaggcaaccgggacagcattcgacgactcggctcgcgagaccctcggcgtgacgccgggtaggaccgggtcgactggcaatgggggaggccctccaccgcgactggactggatacccggcgggggtcctggagaaagaaagggccggccggcgggcgccccacagccggaaggggcgagcccgcaaatagggctcaccttcaggtcgttctctggcaggtacttgcacagccgcgctatttccacatacttgtccaggtctagcggcgccattttaagaataacaagccgcggcaacagcggcggcggcggctgtagcagcggcggcggcagcggcggaggccgaagccggaactttccctgcgtcacg

SEQ ID NO: 851284 - DNA, 616 bp, Homo sapiens
ttccggtagccggtggcatctcctgtcagacgccggccactccgcgctcctgtcacctccggtggaggcgaccccatcccgagggcactgccgcgggggctcgcytccgactgcgggagacccagggatggggtggggagccgagccttctaaataaagctgttacagctgcgggtcctggggcagcccgaaggccagaaggggcgaccctgggacagaggccgcgacatccctcgggatccccactgaggcaaccgggacagcattcgacgactcggctcgcgagaccctcggcgtgacgccgggtaggaccgggtcgactggcaatgggggaggccctccaccgcgactggactggatacccggcgggggtcctggagaaagaaagggccggccggcgggcgccccacagccggaaggggcgagcccgcaaatagggctcaccttcaggtcgttctctggcaggtacttgcacagccgcgctatttccacatacttgtccaggtctagcggcgccattttaagaataacaagccgcggcaacagcggcggcggcggctgtagcagcggcggcggcagcggcggaggccgaagccggaactttccctgcgtcacg

SEQ ID NO: 851285 - DNA, 610 bp, Homo sapiens
ataacaacaaaacaatacaaacaaaaaatacagtataacaactatttatatagcatttacattgtatttgatactattaatataagyaatctaaagatttgaagtatacaggaggatgcacataagttatgtgcaaatactgccattttatatcaagggcttgagcatctgtagattttagtatccatattgaggcctgaaaccaatcccccacagataccaaggaatgactgtatatacttatttatactgtaacctaggcaaaaatcatttgaggtagagttcacaaaaatatcctttagcacaatgggtgacatggatcaaatattcaataaaatataaatgactatgaacttcaaagaaggaaatccatacagaaacagtagctccatcatttatcagtgaggaaaagtgtatccaaataagaaagtgcctagaccactttttccacaattatggcttcatatgtcttgattacaacataaagattcaataaactgggactggtatatcataaccaccctctcccagtgaaataatgatgaaagaaacaagacacacagtatatccaacagtaatcctcatacaagataacttaggagacacactg

SEQ ID NO: 851286 - DNA, 572 bp, Homo sapiens
tcagcttatattttagtgaatttattaatacatgttcccaaatcataygggatttctaaaattctaatatgtctgagtatatgctatcaataataattatggttattatattaagatattgtaggccacagaaatttccttgtcaattttgtctttatgacaatttaaagtaatttccatagttaattacttaattctgatgcagtttctgaaagcttcataagcaggcaaaatcctagaatatagtgtcttttaggaggttcgtgaaaggatgaaaaggaccctgaaaagcacttttgaattcaggtttctgatgactttagaatcatatcatttggactgaataagaattcctggaactttaataaaaagactgactggtttataaaactgctaatccaagtagaacaaaaattatttgaaaaccaagagaatactttgtcagattttcatgctggatcagccaatactgaaattgtttaaatatacaatttgaatgaattccatggtctaagtcaaattacttatgataacccatcagctatcagtgctatgtccctaaattggagaaa

SEQ ID NO: 851287 - DNA, 567 bp, Homo sapiens
ctgaaagcaacatgaattcagaatattcctggacttacagtggagctctgtytaaataaactcattataagttgaaaatatcataagtctaaaacactcctttgactcgtaatttttttttttttttttttttgagatggagtttcgctcttcttgcccaggctggagtgcaatggtgtgatcttggctcaccgcaacctccacctcccaggttcaagcgattctcctgcctcaacctcccaagtagctgggattacaggcatgtgccaccatgcccggctaattttgcatttttagtagagatggggtttctccatgttagtcaggctggtcttgaactcccaacctcaggtgatccactcaccttggcctcccaaagtgctgggattacaggcatgagccaccgtgcccagctgacttacaatattttcaacttccaatggctttattgggatggagccccatggtaagttgaggagcacctgtacctttgatgaaaatttcctgactacataatcattcagtgggttcttcctgtccactgcacagacaaaatcaattcactgg

SEQ ID NO: 851288 - DNA, 604 bp, Homo sapiens
cttttatgacggtgattgtgacatcaatgactaaagtttcagtaaatctctcaaaattgagaggatgaccaaaagggggaatttgttaaatcaagtttagcctaaagcggcttcgttacatattttcagttcggcttaaaggtttcatcatgaactatagcctaagtggaaatgtgaacaaactgtggtctactcttgtgccagtcaccaaattttgaccatcaaatgtggctaaatgttcaaactgtgttcaaataaggcaaacgccaagctataaccaatgcagctgtttctgtacctcaattccattttctgtatgtcactttccttttccatcagtaaatcttccaccacgtagctgcgctggagtctctgaacctactctggcttgggaggctgccagtttcgggaactgttcattgctcaattaaactttaaaaaatttaattcaggctgggcacagtggctcatgatggggcgggttgcstctccacacctgtgggtgtttctcattaggtggaacgagggactttgaaaagaaagagacacagagacaaagtatagagaaaggaaaaagggggcctaggggactggtattcagcat

SEQ ID NO: 851289 - DNA, 576 bp, Homo sapiens
tggatattcagtcttctcagtatcatttgtttgaaaacaytgccctttccccattgaatggtcttggcaaccttgtcaaatatcatttggccatatatgctagggtttctttctgggctctctattctattgtattagtttgtatgtctgatcttatgccagtagcacactgctttgtgtactgtaactttgtagcaagtcttgaaatctggatatctgagtcttcaagcttagttctttttcatggtggttttggctatttggagtctcttgagattccatatgaattttaaaatgggtttttctatttctgcaaataaatatcattgggattttgatagatattgcattgaatctataaatcactttgggtagtattgacatcttaacaatattaagcctttcaatccataaacatgagatgtctttccatttatttaagtctcgtttaatgtctttcagaaatgttttgcaaggagtctcacttccttgactaagttaattcctaagtgtgttattctttttggtgctattgtaactggaatttttaattttacttttcatattgttcattgt

SEQ ID NO: 851290 - DNA, 623 bp, Homo sapiens
attgaatctataaatcactttgggtagtattgacatcttaacaatattaagcctttcaatccataaacatgagatgtctttccatttatttaagtctcgtttaatgtctttcagaaatgttttgcaaggagtctcacttccttgactaagttaattcctaagtgtgttattctttttggtgctattgtaactggaatttttaattttacttttcatattgttcattgttgctgtatagaaatgcatatggttttgtttgttgactctgtattttgctacattggtgaatttatttattagttctaacaatattctgtggaatctttagggtttttttgcatataaaatcatatcatccattaacagagataattttacttattcttttcaattcagatgactttcatttgtttttcttgacttattcctctggctagaacttccagtactatgtcgaatagaagcagccaaagtggccatttttgcctygttcctgacataaaagaaaatctttcaccattaagtatgatgtttgctgtgggtttttgatctatgtcttttattttattgcattgtagttgttttcttctcttcctagtttgttgagtgttttatcatgaaag

SEQ ID NO: 851291 - DNA, 623 bp, Homo sapiens
attgaatctataaatcactttgggtagtattgacatcttaacaatattaagcctttcaatccataaacatgagatgtctttccatttatttaagtctcgtttaatgtctttcagaaatgttttgcaaggagtctcacttccttgactaagttaattcctaagtgtgttattctttttggtgctattgtaactggaatttttaattttacttttcatattgttcattgttgctgtatagaaatgcatatggttttgtttgttgactctgtattttgctacattggtgaatttatttattagttctaacaatattctgtggaatctttagggtttttttgcatataaaatcatatcatccattaacagagataattttacttattcttttcaattcagatgactttcatttgtttttcttgacttattcctctggctagaacttccagtactatgtcgaatagaagcagccaaagtggccatttttgcctcgttcctgacataaaagaaaatctttcaccattaagtatgatgtttgctgtgggtttttsatctatgtcttttattttattgcattgtagttgttttcttctcttcctagtttgttgagtgttttatcatgaaag

SEQ ID NO: 851292 - DNA, 618 bp, Homo sapiens
ggcattcttaattatactaattacctgctttgtgattattcttgctacttcacagccttgccagacccctgatgactttgtggctgccacttctccgggacatatcataattggaggtttgtttgctattcatgaaaaaatgttgtcctcagaagactctcccagacgaccacaaatccaggagtgtgttgggtgagtaagtctcaaaaaacacgtttagatttcaagattgtcatgagactaggacatataaactgttaacttgtattaatatctaaatcatttaaaaaaataaactcatatgtatttttaagttgcatatggttaatcttgcaatccttctttaaaagagagctataacagccctctatgtataatgaaacaacctccaagtgcagaggatatgcatgcttttcattaatatattaatttagattttgcctttaaaaaacaatgcctgaagtcacttgaaaagacattgtggcctatttttcactacaagcatacwtaacccacatgtatttctatcacacacatgtattttgttttaaacacagatctattatttaatgctttgtttaaaatagactatagttgaattttttcttactaacattt

SEQ ID NO: 851293 - DNA, 632 bp, Homo sapiens
tattcttaagtgtaatctcccaaaacaaaaatcacagcactgctgtgccaatagaacaataaaggaaatattgtttcataagagttgtcagttttactacaattacataactttcaacaattattctggaggaaaaaaatcttatttaatctaagaaattaagttttaaattccttgaagccaaaactacatccttgtcatcatttgaataacacaagtaagagaatgactattttactttttctctttttttttttttttttgagacaaagtcttgcttttgtcacccaggctggagcgcaatggtgcaatcttggctcactgcaacctctgcctcccaagttcaagcgattctcctgcctcagcctcccaagtagctgggattacaggcacctaccaccaagcctggctaatttttgtgtttttagtagagacggggtttcaccatgttggccaggctggtctcgaacttctgacctcagatgatccgcccacctcaccctyccaaagtgctgggattacaagcatgagcccactgtgccaagcctttcttttaacttttgaggcccttaaattcaattgggtgaaaattgaataatttctaactctttttggaataaagggtttcctcc

SEQ ID NO: 851294 - DNA, 545 bp, Homo sapiens
ccttccaggcaaagggagctaaataatgytggtgaggctgcacgcggtggctcacgcccataatctcagcactttgggaggccaaagtggttgattgcttgagctcagaagttgaagaccagcctaggcagcataaggaaactctgtctcttcaaaaaaaaaatattagcctggcgtggttgcgcacgcctgtcatcccagctactcaggaggctgaggtgagaggatcacctgagcccaggaggtcgaggctgacatgagccgtgatcgtgccactgtgccccagcttgggtgacagagtgagaccctgtctcaaaatagtaataataataataacaataataataatgttggtaaaatgagaaatacacattgtactattgatctgataccgtggtaaatataataattcaaaagagttatttattattgatataatccaagctagagagaaaaattattaatcattccatttataattaactttaagatttgatatttcttgctctgtggaaacagggaaaaagtaaaaggatttattgaat

SEQ ID NO: 851295 - DNA, 400 bp, Homo sapiens; identical to SEQ ID NO: 836835

SEQ ID NO: 851296 - DNA, 615 bp, Homo sapiens
ttctcactataaaagtaatatctactcataataaaagtttcaaaaaagtagaattttcagaaaaatagaaggaagattcaatatctctcataaatccactattcaactaaaattttaatgtatttccttttcattctctttttttagcaatgctagttcatatatatatatataattttcatcacatagagatcactcagaattcggaaatattcaaaggtgtttggtaatcatcaaagacttctaaagcttagtgacaaaataatataaaacctgtaagaacatttatatcagagatttagaaagtactacatgtaaagcctacatgtgtaggtactgtacacctatagtaggtaacacagtttgggagaaaaaaataaaatatatgactctaagagttctgaaagtgattccaaataggtgttctgaacatattttgaacaacgttagtttagttgtgatgcacgtatatctttcccgccataggttgagccctcagtgtggctcttattcccctgagaaaaccagccagccccttggtagatttcttctgctatggaaaggtcctctyctactatggaatggtcattgatttgttcttgtgggaatatgtgt

SEQ ID NO: 851297 - DNA, 611 bp, Homo sapiens
ctgggttcaagcaattatcttcctcagcctgggattacaggaacccaccaccatgcccacctaattttgtatttttagtaaagacggggtttcaccgtcttggtcaggctagtcttgaakgcctgacctcgtgatccacctgcctcgacctcccaaagtgctggaactacaggcatgagccaccttgcctggcctcaatattgtttttaataatttctgctttacttgcagttaatcatatcaggccgtctaccatacccagttgtgtcagcaagaagatctgtacaatgataagtaacacatggctcccagagctaacatattcctaacacttatataaacactttttcagaaatttgacaatattttataattaaacaatatcttattttacaagaaaagatatggtatcacaatactctgagcaaagagttaatttgcttctcaaatttcctagataatgaagtagtcctaaaatatttaactcagtattggtaatagtttcaatttgaggaagtgttctgaatagcctttttaatgctgatgtcataagattgtgttacaaacacagactttcatttaaagacactttatttttaattttgttctaa

SEQ ID NO: 851298 - DNA, 357 bp, Homo sapiens
aatctttgaatataatgacacgttaaacagtgaatattaccttatatggcaatgcttgtgattaagttaaggactttaagggaaggggcttattctgaaatatactcacgggtctttaattcaatgacaaatgttcttcttttttttttttttttgagatggagtcttgttctttcgcccaggctggtggagtgcagtggtgcaatctctgctcactgcaacctctgcctcccaggttcaagcaactctcctgcctcagcctcctgaggagtgggattacaagcgcctgccatcatgcccagataatttttatacttytattagaggaagggtttcaccatgttagccaggctggtc

SEQ ID NO: 851299 - DNA, 578 bp, Homo sapiens
aggtggacaccagcactcaattggatacacaccctgaaggtggataccaggccccacgtgaattcctacactccaggtgaacatcaggtcccaagtggatacctggaccccaggtggataccagtctctaaattaataccaggcctcagatggtccttaggagccatgtgggcattagtcatcaggaagttacctaggcccaaagtggacatcaggccccatgttgacacaagatctagttggaagtcaggccccaggtggacacccaggccctaggtaaatacttaggtcccaagttgacagcaggccctatatgaacactcagaactcaggtggacatcaggcctcaggtggacatctgagttcatctggaacctcatgttacaggccccatgtaaacaccaggccttagatggatacccaatctctaggtagacatcagagctcagattgacacaaagactccagtagacataatgtaccaatgaatatccaggcrcccggtaaatacccaggccccagattgacaccacggtctatgtggacacagaggccctgggtagtaaacaggcccaagg

SEQ ID NO: 851300 - DNA, 524 bp, Homo sapiens
gcctgtgagcaggggttccagcaggtcctccggctcccagaggtgacctcctcctccaggaatggaggtttgccctcagctgggcatctgggccatttgcctctaatgtgctgcccaggatggcctcttcttgacaggtggacaggggttgagggggccagggggcatctccaaaggaagctcttaaactcagcagcagcactccagaatctccatgcctgcacctgcccaaggatttattcatagcttaactaagaatttcaaatttctaccataacactgaaataaagtttgactttttgaaacttctatgacttctttcactccctaatattgtagatggtgtttttgaggtgacgttgaaaacctctgatagttgtgtgttttgttgtggttctttgggtgactaaattaccatctgatcaagtgatatygaaaacccttcaggtacggcttttagaagactttgacctatttttgcttgtgttgactctccctccagctttgtggaaagagggatcatg

SEQ ID NO: 851301 - DNA, 586 bp, Homo sapiens
gtgtatgttgtataggatcattttgcttcatttctgggtactttcagaggaccaaggctctgtacaagttccttggttgcagataggctcctgtggtggcttggtgtggtgatgtatttttgtttggtggtgtaattcaggcttcagtccagtagacagtgcttaagagtaacagctggctgcagggtcttctcctctgtgtacttgtcctcgacaggtgcagaagtgacaaagtgccaaaagcgccctgtcccagtgtgtactagtcttcagcaggggcagagctgctggagaaacctaagaagcagcctctttcagcccacgttccttgggtcccaacaggatgaccactgctggatctgcagcagtgcactaggaaggggacagagggcaagagataaccacctctctaaatctgttcccaggctttggtgtgcccctttcagcagctgatatcgtgatcgtgtttcctttgayccaaggggtggctttggcaagctgtattcctccttcccttagggctggtcctcaccaaagtttaggtctcctggggaatggggttcacctccctcttgtttcttggaac

SEQ ID NO: 851302 - DNA, 634 bp, Homo sapiens
agaggggagagaatacaattgcaccaaataaagactcactttggaactcagtgattatatgtgtgcatatatgtgtatatatatgtatattatacatgtgtatgcatgtatatatgtatattatacayatatatgcatgtatatatatgaatacatataaaactgaaaactgcacacatcccatatacaccatatacatgaaagtgaacacacacacatacataaacatatatattcagtttcaaacaattgttagggaacctgaggaagaaactaaatggaatataatggttgcatctatgatagccatggtactagaactagtagtagttctactaaggtgagaattgacatagtaaaagaaataagatacaaagcagtaagagagagctacattttccttaaggccaggctgaatattcactaacaaggaaatttctacagtcattattttaatctgattcattctcttggtgggatattccagagttaccacctacagaaattccacttttccttactgaggttctctttttttcttttcagtccaaatattagtcatttggtagagaaggcagaaacaattaacaattgagtaattcctcaggaatcatgttaaaaggtttccaaatca

SEQ ID NO: 851303 - DNA, 611 bp, Homo sapiens
cccatatacaccatatacatgaaagtgaacacacacacatacataaacatatatattcagtttcaaacaattgttagggaacctgaggaagaaactaaatggaatataatggttgcatctatgatagccatggtactagaactagtagtagttctactaaggtgagaattgacatagtaaaagaaataagatacaaagcagtaagagagagctacattttccttaaggccaggctgaatattcactaacaaggaaatttctacagtcattattttaatctgattcattctcttggtgggatattccagagttaccacctacagaaattccacttttccttactgaggttctctttttttcttttcagtccaaatattagtcatttggtagagaaggcagaaacaattaacaattgagtaattcctcaggaatcatgttaaaaggtttccaaatcatgaatgtatagttatattttgttcactagattttaacccacatacctcacttgtatagaaattatgcttatttggatattcaatatatttcttcayacaaagacaaaatctataaaatgtacacacacacagatgctatggatacatgcacacatg

SEQ ID NO: 851304 - DNA, 611 bp, Homo sapiens
cccatatacaccatatacatgaaagtgaacacacacacatacataaacatatatattcagtttcaaacaattgttagggaacctgaggaagaaactaaatggaatataatggttgcatctatgatagccatggtactagaactagtagtagttctactaaggtgagaattgacatagtaaaagaaataagatacaaagcagtaagagagagctacattttccttaaggccaggctgaatattcactaacaaggaaatttctacagtcattattttaatctgattcattctcttggtgggatattccagagttaccacctacagaaattccacttttccttactgaggttctctttttttcttttcagtccaaatattagtcatttggtagagaaggcagaaacaattaacaattgagtaattcctcaggaatcatgttaaaaggtttccaaatcatgaatgtatagttatattttgttcactagattttaacccacatacctcacttgtatagaaattatgcttatttggatattcaatatatttcttcatayaaagacaaaatctataaaatgtacacacacacagatgctatggatacatgcacacatg

SEQ ID NO: 851305 - DNA, 404 bp, Homo sapiens
ataagtgatacaaaaacaagtgcaaccgcctcagtaaccaacacatttgcagtctaatagaggaaaacaagccctgttataagaataattatagtaaaaggctatataaaatacaatccattttgasacacaccttcaactctatttgctaattctcattttcactctttagtttatttttagattaaatagttattttcacaaatcagtctgaggacagagttttttgttttgttttgttttgttttgttttgtttttgtgagtcatcagcactatgcaattgcatatacctgttgtgtttagtctacaaaggctgaacatcatgtaatagtttttatgcattttgttcataggttactgggtgctttaaggcaaaactgaatgagtttccaatagtcagtac

SEQ ID NO: 851306 - DNA, 509 bp, Homo sapiens
gagaagctatacaggtggcatataagcatgaaaagatgctccacatatgtcatcaggaaaatgcaaagtaaaacaacagagagataccactatacacctattagaatggccaaaatctagaatactgacaataccaaatgctagcaaagatgtagagcaacaggaactctcattcattgctggcgggaaggcaaaatgaactctgattcgttgctggcaggaaggcaaaatggctcagcctctgtgaaaaatagtttggaggtttcttataagataaacatactcttaccatacaatccagcaattgtgctccatggtatttacccaaaggagctgaaaacacatccacacaaaaagctgcatacaaatgtttatactagttttattcgtaattgccaaaacttgtaataaaacaagatctcctacattaagtgartggaaaaactatacatccagacaatggaatattattcaatgctacaaagaaatgagttatccagccatgaaaa

SEQ ID NO: 851307 - DNA, 622 bp, Homo sapiens
caaaacaatcatttgggaaggaataatctcttcaacaaatggtgctaggaaaactggatatctatgtgcagaaaaacgaaactaaaccccatctctctccatatacaaaaatcaactcaaaatggattaaagacttaaatgtaagatccaaaactaagaaactaccagaagaaaatgggagaaatgctttaggacattggtctgtgcaaaaattttatggagacctcaaaagcacaggcaataaaagcagaagcagacaattgggattagatcaaactaaaaagctctggacagcaaaggaaacaataaacagagtgaagagaaacctacagaatgggagaaaatatttgctactgagccatccaacaagggattaatatccagaatatataaggaactcaaacaacaacaacaacaaaaaagcaatccaattttttaaatgagcaaataagctgaaaagacatctttcaaaatagacatacaaatgactaacaggcatacgaagaaaatgctcaacwtcactaatcatctgggaaatgccaatcaaaactacaatgagatatcatctcatcccatttagaatggctattatcaaaaagataaaaaataataaacactggca

SEQ ID NO: 851308 - DNA, 616 bp, Homo sapiens
aaaggacaagcaatgacatcaagattagcaactcacataattgtggtgagccacccagggcaggccttccctgaggcttccagcctgaagtctccagcactgcgagcggagagatcagaaagtcaggagtaggcctacgctgggagagaagcagggggctgcgcacaggaaaatgaagggagatcagatggtatatggagagcaaagagggagtggaagaggaatgtgggtgagaacaatcttccagtgcactcaaacacaaaggaattcacttacttactccccaaacacctgcgaattatctccttagaacctgatctgatgctaaccacaggtcttgccctcaaggagctctcaatctagtgggatagacaaatacccatgacaatagagagtgataagtctaacaatagaggcagactccaggagtaaggtaagaatatgtgcaaacacaccagccccaagggtttgtggagcccttagaatttatttacagtattggatataacggcaacattaaaatatgcaagctagccaggcayaggtggctcatgcctgtaatcccagcagtttggggtgctgagccagaaggatcctttgagcccaagagtttgag

SEQ ID NO: 851309 - DNA, 620 bp, Homo sapiens
tttcttatatgtaaagatgataataatagcacatattatctaggattgtccttataaatatgaaactctgaacagtgcctggcaaatagtcatcaccatgtagctcttgttattatcattatcttgttatattgagctctattggtgcatagaatagtatatatacattattgatttaaagaacgggaatatgtagcatattgaaagaaagtcaagagagatggtgttgtgtggtctaaaacaatggcttccaagctccatttttgattaaaatcatctgggatgattattaaaatccagatccctgcccactctactcctccttccatgctctatatttgtaacaattgcaccaaagatcatgtttgcatagtcagctttggaatgcagtgaaatcaaatgaattttaataatgcatgttcaggtaccatatgatttaattagagaagctattttggtacaggggtttttccattgacctataaattcaatcctgtggggagttgtgcattctaccatgtctccaccaygtgccatttggatgtctcctctctcctttcttcctttcccttcctcccctcatccatagagagaagatgactactcccagttgatgctga

SEQ ID NO: 851310 - DNA, 620 bp, Homo sapiens
tttcttatatgtaaagatgataataatagcacatattatctaggattgtccttataaatatgaaactctgaacagtgcctggcaaatagtcatcaccatgtagctcttgttattatcattatcttgttatattgagctctattggtgcatagaatagtatatatacattattgatttaaagaacgggaatatgtagcatattgaaagaaagtcaagagagatggtgttgtgtggtctaaaacaatggcttccaagctccatttttgattaaaatcatctgggatgattattaaaatccagatccctgcccactctactcctccttccatgctctatatttgtaacaattgcaccaaagatcatgtttgcatagtcagctttggaatgcagtgaaatcaaatgaattttaataatgcatgttcaggtaccatatgatttaattagagaagctattttggtacaggggtttttccattgacctataaattcaatcctgtggggagttgtgcattctaccatgtctccaccatgtgccatttggaygtctcctctctcctttcttcctttcccttcctcccctcatccatagagagaagatgactactcccagttgatgctga

SEQ ID NO: 851311 - DNA, 528 bp, Homo sapiens
tattcgaccattttaattcttataaagggtgtctattttctataaaagaatcctggcatttgaatgcaggaacagaatactaagttggatattgtcccaatattgtgatcatatgatttgttggaaaatayagtgaagaaaaaattaaatatatattattaccttctctgtatatctgtactaggcaggtggtaggaataaacaagctatttcagtattgacttgtagaaccaattatagaaataattataaaaataaatgcaaataggtacccattctgggcatagaaaattatttttgcaatgaaattcttatgagtttcagtaatatcactgaaatacatacatgcatacataataatctctgtctctattacacacacatacacatacgcacacatatatacagatatatatacacaagtaatcagagaaatccccctcttttctaattacatcagatttctctgtcctttggcatttcctttttctcataccaaaactccagtccttatttctcatatcagtc

SEQ ID NO: 851312 - DNA, 591 bp, Homo sapiens
acatattaaactccagattgggacatagtttgtgttcctattcaattcccaataatatattagagtttgcaataaataataaattccctgaggatacayagcattgtgtctttttttttttttacgataattaaggcaagggtgaaaacaaagacttttgtctcataaaattgtgccttctaagattaccacccaaatataaaataaatcctaagctagcaaactatgttattttcttctcaattgtaagcattttctgtgggtttgtgtggaaatagtgcctatgaagatcatcatcaatatccagaactgtctaaacaaaagcagccaaattactcttttactctaaaatatggttggatgtaatacaatgccacttactactaggcatcattgaaatcattaaacatgaagtggaaatagccttttgctaacgtttccgaaatgagagctaaattgttgtatgctgcgaagttgaaaggaggtatttgctgtctgacacctgaaaaaaggacctaaacaggcaacttccattaccaccagaggcaaatggcgagaatgcctgcctgttaactgagagcatttctctta

SEQ ID NO: 851313 - DNA, 484 bp, Homo sapiens
tgaggttagtatccttataatcacagaataagagaccagrgttctctttctctccactacacaagtacagagcaaaaaggcagccttctgcaatccaagaagggacctgtcaccaggaaactgaatcagccagcctcttgatcttggacttctcagcctcaaggatttgaggaataaattcctgttgttaaagctacccagttaatgatattttgtatgacaacctagggtagagaattaaatgcaatatcaccaggcatacaaaaaatgccgtgagaataagagacaacagaaacatactcataagtgatacaaatattagaatttccagatacgcactgaaagtaaatgtgttaaaatagtcaggatggcaacagagataactgcatcagagaaatggaatctatgaaaaataatcaaacaaaaattctaaaatgcaaaaaactgcagtaactataattaagaacccaatgaataagttaaa

SEQ ID NO: 851314 - DNA, 484 bp, Homo sapiens
tgaggttagtatccttataatcacagaataagagaccagggttctctttctctccactacacaagtacagagcaaaaaggcagccttctgcaatccaagaagggacctgtcaccaggaaactgaatcagccagcctcttgatcttggacttctcagcctcaaggatttgaggaataaattcctgttgttaaagctacccagttaatgatattttgtatgacaacctagggtagagaattaaatgcaatatcaccaggcatacaaaaaatgccgtgagaataagagacaacagaaacatactcataagtgatacaaatattagaatttccagatacgcactgaaagtaaatgtgttaaaatagtcaggatggcaacagagataactgcatcagagaaatggaatctatgaaaaataatcaaacaaaaaytctaaaatgcaaaaaactgcagtaactataattaagaacccaatgaataagttaaa

SEQ ID NO: 851315 - DNA, 600 bp, Homo sapiens
attacaacaatataggaaagtcttattattgttattatttcccacattctcattttgtaccttgtcctagaataaacctcttgcaatagaaacaaaatttcagtgaatacaagatgttattactatctgtcatggatatggctgtttaaaagtgcttctttttatactatgtgctttgctacttatattttcatgtacttcttgcaaatttctctgaaaacatttgtagatttatcatttagtgtcttgggttgtgccacaaacgtaaattttttaagaaaaaaatggaaaaaaattactggaacaaaggtcaaataactgtttccatttcggttgttttagacactatgggaagcatatttaatactttgattgcttatcaagaaaaacagactagaacagggaatattccaaaagaagtagcagaattgaaggaatctgctagaggcagatttaatttacattcttgttgtttacatatgggatttcttttttaatctttttgcttctactcaatataaatgagtctgtgattactgyttaataatttaccaagaatttcagtagatggagtattttctgcccaggaatctatatatg

SEQ ID NO: 851316 - DNA, 591 bp, Homo sapiens
gttacattgccagtggatggcttactctgcctcaaggaaagaaaaaacaccccctctcgttctctctctctctctctctctctctctctctcattcgcttggctcactccagcagctcaatttggacctccagttgtaatgctgcagagtcctttgctcgggggacctctaggtgggacggtgagaaaatgcacaccaagcttcagcttctccccacagctggaggagcaatagtgggaagccccatgctgacttcagacccaagctgaggcctttgggaaacagatctgaaacatgaattccactgcagcatcaagcactgtgcctgcagaaaccttgctttgcttgctgctgtatctctagaacaatgccagctcaaagttggcacacactcactcagtatctgctgaacaaatgaattcctatttggcccaattcttatactaattggcctgaacccagaaagggacaaggggtgatgggtaaacytaacaagaatcatcttcttttgtgtgaggtcgaatgtgaatgctgaaattgagttggatattagagggcggagccatgctgtgtgcattctgagtagcattt

SEQ ID NO: 851317 - DNA, 625 bp, Homo sapiens
atgggggattggtgcatttccggttgtatgaagaattgttgtattgtgtcaggcataatgatcaccttattattgtctttatttgaagattatgtatgatctcaggagatgtgtatgggtcaaggtgacatggggtggactcgtgatggttaataccgagtgtcaacttgattagattgaagggtgcaaagtattgatcctgggtgtgtctgtgaaggtgttaccaaaggagattaacatttgagtcaatgggctgagaaaggcagacccacctttaatctgaatgggcataatctaatcagctgccagtgtggccagaataaaaagcaggcggaagaacgttaaaagaatagactggcctagcctcccagcctacatctttctccaatactggatgcttcctgccctcgaacatcggactttaagttcttcagctttgggattcagactggctcccttgctccatagcttgtagatggcctattatgggactttgtratcatgtggattaatactctttaatagactctgatatatatattttattagttctgtatctctagagaaccctgacaaatataacacatatttgaaaataattaaacttgattttaaccaatattat

SEQ ID NO: 851318 - DNA, 616 bp, Homo sapiens
gtaagttttgaaatcgggaaatgtgarctttgcttttctttttcaagactgtttcagctatctttagtccctcaagtgccatataaattttaggatgggtttatctaattctacaaaaaacatcattgagattttgatagggatcactaaatctaggtactttgggaagtattgacatcttaacaatgctaaatcttccaatccatgactatgtgatcttttcatttatttctgtctttaatgtctgtcagtaatgttttatagttttcatagtgcaagtctttcacctctttaagttaattctaaatatatattttttctttttgatgctattggaattgaattttttttcatttcctctttggactgttcattgttaatgtacagaaatgcaactgctttttgtgtgttttgtattctgctactactttgctgaattcatttatcagttctaataatttgtttttgtggaatctttaggattttctacatataggatctcattatctgtgagcagagataattttacttcttcctttacaatttggatgtatttttttaaatttttgcctaatttctctggctagaacttctagtactatgttgaatagaagtg

SEQ ID NO: 851319 - DNA, 563 bp, Homo sapiens
tagaagaacacctaggcaataccattcaggatataggcatggtcaaagacttcacgactaaaacaccaaaagcaatggcaacgaaatccaaaattgacaaatgggacctaatcaaactaaagaastcctacatagcaaaagaaactaaaatcagagtgaacaggcaacctacaaaatgggagaaaatttctgcaatctacccatctgacaaaggtctaattgccacaatctacaaggaacttcaccaaatttaaaagaaaaaataaccccatcaaaaagtgggccaaggacagaacttctcaaaagaagacatttatgtggccaacaaacatgaaaaaaaaaatctcaccatcactggtcattagagaaatgcaaatcaaaattgcaatgaggtaccatctcacaccagttagaatggcgattatttaaaagtcaggaaacagttgctggagaggaagcggtgaaataggaaagcttttacactgttggtgggagtgtaaattatttcaaccattgtggaagacagtgtggtgattcctcaaggatctagaaccagaaatacc

SEQ ID NO: 851320 - DNA, 574 bp, Homo sapiens
tcaattccttaaaatgactgacaaaagaaaaacccttcattccagtcttttgatttgtaaagcctaatagattaatccttttttttttcttgagacggagtctcggcctgttgcccaggctagagtgcagtgtcacaatcttggctcactgcaacctctacctcgggttcaagtgattctcctgccttagcctcccgagtagttgggattacaggcatgcgctaccacacctggctaatttttttgtatttttagtagagatggggtttcaccacgttggccaggctggtcttgaactcctgacctcaggtgatccacctgccttggcctcccaaagtgctgggataacaggtgtgagccactgcacctggcctagattaatcttttataaattaatcaaatatataattcaaaaaagttaatcagtagattagaagaattaattagtatcaattaaaaggcattcgttttttttttcagttttgttaataatcaagccatccttarcttttatgttttttggtatcgtgaggtcataatcaatgaagagtaaaaaattcaatacaaataaagt

SEQ ID NO: 851321 - DNA, 633 bp, Homo sapiens
tctggactgagtagacagttctgaatttagatccttgtcctgtgacactggcacatacttcttcttttctgaacctgtttttccatccaaaaaatgagaataaaacctgatactgcayaataatcttttacaaattaaagatgtgcttaaagcacgtagcacacagtaggtgttcaataaataatggccaatgattgttttattagtcccactcaaaggttatgaaccttaacttgtttttctctccagacaaaataagtttatttcagcaacacgatttctttactgcccactccccacaactctgtttatttgtgacatttcacactcacagagcaggtcagtgattgtgcctgccaatcatgagtgtgtattcatacttgtgttcttagcactccatggctctagctctatggccccctctgtgtcgtggcataaaaggttcatgagacaagtgtgtaagacgatgtagccccagtggtacaactaatccagcagaagtacttctggacctactagatacattttgatgtccacgtggatattcccccttagaattttttatatggttcttacctggtatattcgagcaggcattttctccacaaacagtcctttcttctcgcctttttt

SEQ ID NO: 851322 - DNA, 644 bp, Homo sapiens
ttaatgctcgtgtgagaggcagagtgggtggagtggagctggctggatccttgctttggcctcctggatttctctctatctccattttgaaaccactctgtgtttggaagaacttttgagtattcagagctgcccactggcagaacagtcttccttgggcaggagtgagctccttgtccccagaaggctgggtctggctggcccctggcagggacactgatgagggtgcttgagttgatcctgtctagtccctttctgtgttttcaaagcccattctaaagcagattcccatttccgtctttgactctaaggcccaagggggcaagctggtctgccgggcccacaacgcttttgggggtgagggtgtctacgccattgccaggtgctgcctgctaccccaggccaactgcagcgtccacacagctccaccagctgaggccagcatggggacccgtgtccactgccaccaacagggccacgtcctcacaggtaggaggctgggcttgccctggggtgaggaggggtctctttctccttatgcacccactgcccrcgaggcttggtcctcacaagtgtgatccatgagactcaagcctgacttgcagttccatactctggttctgccacttccatgccctttgagc

SEQ ID NO: 851323 - DNA, 495 bp, Homo sapiens
tatgtttaaagaattgccttagaagactataccaaggggctgatctaaaagacaatatctcttcatgtttaaagttactaaaatatgagtatagtatatatacttattttttagttgcaaaaatgacaacctatcttaaaaattataaagaaataagtaattagaaaaaaagatcattaattcttcaaacacgaaatcatagcaattgatagtgatgagtgattggtctttataaagaaagaaacaaactataataaactccatcaggaagaatgtagaagtaattcactgggattcttgagcattaggaataccaagaaaccaaacatactacccaaaggacgttacagtttctctggagatatttaaaagcaagtctgcttggacataagggaatgaataaamtatttgcatatttgccatgttccttccaaatggatgatctttctataacattctaatgcttgcacaatgctcaggagtcccgttggaaag

SEQ ID NO: 851324 - DNA, 643 bp, Homo sapiens
tttcacgtgtgctttcctcttytttctagtcaaggcactaagattcctgggggcatctcttagtccgaagctcttcgccacatgcccaaggtggagggatcggacgtggaagatgtgcttcagctccctggggtaggtggcgtaggcttggatgaaggactgcagagctgaaagaaaagagagcggggagggaagctgtcaggaccggggtctccaagctccaaagtgcccggcctaatggttatcttctgtactttatcttgccaggcaacgaaacatgagcaggacaattacaacatatacaaacaactaaaatctagacttctgtgtatttcttcaattcctaaacaacaaaaagaaaaaaactacagggggccacaattattacttgaatatgcccgataaaatatcagatttgaccacacagctcctaacaatcccacagggtggggcccagcacagcacctggtaccagcaggcactcggtagatgtctgttgtgtaaatgagtgaaaagagagaataggtgaagaaactaagaaatgatcaacacaggacatcgttttcttatgaaaatgagaaaatcattagacatttatattaacacatttttcctaattaaattttacttacttttgaatagt

SEQ ID NO: 851325 - DNA, 527 bp, Homo sapiens
gcaaaaatatgggtccaggctaaattcccatcgaccaatgagtgaatacataaatatacaacagaatactacctgccktaaaagggaatgaaataattgcattcagagcaacctggatgtagttggagatgattattctaagtgaagtaattcaggattggaaaaccaaacatcgtatgttctcacttataagtgggagctaagctatgaagacacgaaggtataagaatgatataatggactctggggattctgggagaaggatgggaggggagtgaaggataaaagacaacacattgggtacagagtatgctgcttgggtgatgggcgcactaaaatctcagaaatcaccactaaaccaccactaaggcaatctgcagattcaacgcaatccttatcaaaataccaatgacgttcttcacagaaatagaaaaaaactattctaaaatgtatatggaatcaccaaaaacccagaaaaaccaaagctatcctgagcaaaagaatgaaaatggaggaattgctttacc

SEQ ID NO: 851326 - DNA, 455 bp, Homo sapiens
gaattgctttacctgactaaattatactacaaagctattggatactattcagcaataattaagaatgagatcctgtcatttgcaaaaacatggatggacctggaggttattatgttaagcgaaataaatcagacacacaaagacaaactttgcatgttctcacttacttgtgggatgtaaaaaatcaaaacaattaaacccattttgatcaagagtaggttggttaccagagagactgcaaagggtagtggagggtgggaggaaagtggtgatagttaatgggtgcaaaattaaaatagttagaattaatgaataagacctaatatttgatggcacgatggggtgattatagtcaakaataatttaattgtacatttaaaaattactaaaataatataattgtattgtttgtaacacaaagtataaatgcttgaggggctgaataccccattgtc

SEQ ID NO: 851327 - DNA, 656 bp, Homo sapiens
ttctaaataattcaataatcctatatgatcttaaaaaatacttttcatatctttcttttggagaaaaaatgaaatttatcctgattcagaaatgaaacaataatagagtataagtagaactyaagaaaattccaaaagagattattctctcttaaataattcagtgtggaaatgaattgggtttagtgtgataatctctttgagagatctctaaaatgataaagtataatttaaagcatctgtggcctacttattaaattattaatgtcaagtgagaaagtgttattgctggtgctgaaccaaaaaatttgtctgtgcgtgcaaaagggttctttttaaaatttttccctaacaagtgtgagcaggactttggtttggttgtgtgctttcttcatatatcacaaataccatttgatatgcaaaatcattgggaaagcatcaattatgcagaggcagttaagtgaagtatactaatatgcaatgattctaaactaccacagggtggtaggagattcactttccacaacatttatctaattagcagaactaactgctttgctatacttctaccacaatcaaatcccttattaaaaactatatcattgttactgctcaataagagtgaataaaatctccaaggcaaaaattatactttg

SEQ ID NO: 851328 - DNA, 635 bp, Homo sapiens
tgttttatgtccaattgtgtggttgactttagagtatgtgccatatggtgacaagaaraatgtatattccattgttttggggtggggagttctatagatgtttattaggaccatttggtcaagtgtcaagttcagatcctgaatatctttgttagttctctgccttaatgatctatctaatattgtcagtgggatgttgaagtctcccactgttattttgttgttatctaagtttcttcataggtctctaagaagctgctttatgaaactgggtgctcctttgctgggtctgtatagatttagggcagttaggtcttcttcctgaactgaaccctttaccattatttgattcccattttttgtaattttcaaattgttgttggtttaaagtttgttttgtctgaaactagactagcaacccctgctttttttctgtttttcattttcttagtagatttttctccatcatttagtttgagcttatgggtgtcattgcatgtgagatagttcttttgaagacagcatacaaatgggtcattattttttatccaatttgccattctgtgccttttaattggggcatttagcttatttacattcaaggtcagtactgaaatgtgcgaatttgttcctgt

SEQ ID NO: 851329 - DNA, 281 bp, Homo sapiens
cccaatggctttccatcactatagatttgtaaacgattcttagaatgtaatatgtgctctttgacctataaccatcttccattccattcaacatttctcaattcaaacacktaacagtgagtagctaatgtatgttagcattagataccatggagatatataaatggatatggcatggctcgtgaattaaggaagttacattctggataagaaaacagataagtaaatagataaccccataccagagtttacaaaataacccatactatagcccaaattca

SEQ ID NO: 851330 - DNA, 609 bp, Homo sapiens
ttaagagcacgggttctcttgttccatcagaatacataaatgttctgaaagaagtgtcygccaactttcccattgaatgatcaagtgcaaaacaatccagcaagataattttatgatgattagttttggaagattaataactttctcttttacctctgctctttctaagatgttagaattgacgttctcatttacagacacattaaaaatattttacaatgtattaaataatctgctcaatttaaacattttggaaaacaagaatatcataaagaaaaatatgtaaattagctgaaattgtatctctttgatagatccatgttaaaattcccttgaactattttttttttagtttgaggtataaagatatctcacatatccacacatatacataggtgcatatatatgattatacacatattttggccatgctatataaggagacttttaaattataccttattaatttaaaactaagttgcaacaatttttatttcaactctaattatgctttgctttaaaaaaaaaggcaacagtccaaatgtggggtccaaaatttctattattaattcaggatagattcctagaatcacttggttaaagggaata

SEQ ID NO: 851331 - DNA, 589 bp, Homo sapiens
aatcattgcctatctgaaaagccaaaataattctttatctctttctcacacgtcatgttttatctctcataatagatttatattttagttaaatgtaaacttgagaatccaaaataattttctcttggaaatgaaaagacaatacttgccaggcacagtggcttatacctgtaatctcagctattcaggaggttgaggcaagaggatcacttgagcccaggaatttcaggctgcagtgagccatagttatgccactgcactccaacctggacagcagggtgagaccccatctttacaaataaataaataaatagacggtgcttaattattttctactttacagatgtgccagtctaatgaccacctgctacttgttttatggaacaagttcatagatattttcaaccagaagactgatgactatcatcagttaacaaaaagtttcttctattgttttggatgatttatttcyttccacttttttctttcctataccactggacattttattataaagatgtgggtatggctctttcatctgatattttctgttttcgtacattgtgctttacattctagaagatctccg

SEQ ID NO: 851332 - DNA, 628 bp, Homo sapiens
atcagatttcatgagaactcactcactatcatgagagcagcatgggagaaaccacccccatgattcaattacctccacctggtctctcttttgacacgtggagattatggggattataattcaagatgagtctggggtggggacacaaagcgtaacctatcacttggatagtcttgatccttatggatgtttgctggtgtctgggaatacaaaagttagatatttatttttgtctttgcagtctgggattgtttgtacccaatcttcttgagaagatgggtacaaagatgctaaggcagtaggattgattcagcccaagactttccggtatttgaaaggacttgggtgttgtgatctagtccatatctgcattagtgggcaccccaagtccagtaagactggggttcttgccgacttctagaactactgcctgggcagtcttggataagatccggaagaattctctggattaccaggcagagactcttgttttctttccttctcccaaacaaacagagtctmtctctctttgctgagccttctggagctggggatggagtgacaaatgcacccctgtggccaccaccactgggactatgctgggggtcagaactgacaccagtatatc

SEQ ID NO: 851333 - DNA, 613 bp, Homo sapiens
gctttctctggaagcttcgttccagaggggcacccaccacatgccagctggagttctcctgtatgaggtgcctgtcgacccctgctgggaggtgtcacccagtcaggaggcacaggggtcagggacccacttaaggagacagtttgtcccttaggagaactcgagcactgttctgggagatccactgccctcttcagtgctggtaggcgggaatgtttaaatctgctgaagctgtgcccaccgccgccccttcccccaggtgctctgtcccagggaaatgggagttttatctataagcccctgtctggggctgctgcttttctttcagagatgccctgcccagagaggaggaatccagagaggtagtctggctacagcagctttgctgtgctgtggtgggctagcccagtccaaacttccctgtggctttgtttacactgtgatgggaaaagcgccttctcaagcctcagtaatgggggatgcccttgcccccaccaagctccagtctctcaggtcaacttmagactgctgtgctggggtctgcccaaatggctgcccagttttgtgcttgaaaccaagggccctagtggtgtaggcacccgagggaatctcc

SEQ ID NO: 851334 - DNA, 608 bp, Homo sapiens
ctcctccgatcgccctggccaaactctgcgctgttcctccagccatggccagtgtactcctatggcagtgcgttcctcatamgtccagtcgcacgtgtgttcctccgctgatgtgctcctctccacatccgggcacctgtgtgcttgcctgttacggtcttgggggtttgtataggcagaggatgggggcatggcaggccagggtggtcttgggaaatgcaacatttgtgcaggaaatgcctgacctcacctaggtccctggggctggagacctagccagggaccaggccctcctctacccagcacttcccttccccgcttccgatcatttaaagggaccacacccttccctttccagcaattcccttccatatcatatatatgatatataacacacataatataatatgtaaatgattttatacacataaatgtacgtataaaatcaactcctatgaaccaaagggaaacattacatattatgtcaaaattgttaatttgctgaactctatctgctttatttcaacacttaaaagttgctttatctttgtgtgggttataacagttttatgtttacagtatagcagatattttagattaaaaaaggt

SEQ ID NO: 851335 - DNA, 630 bp, Homo sapiens
aggctacacagcttagcagtgcatgtgttttcagctggtcctgggtggaaaggggcatygtgtttaggggcattttacctgcagatcctgtaacattggactgtggactgcacgttactcagaccaaagggaaacgattttgttccacaaaaagccaaaatcttgcactcatccagcccaactcacagtctggtgagctgccaccactgcctggtcaccaacaagcaaaccagccagtctgccccaaccaaagggacaaagtggttgttgtcagatggctgccagctcctgtgactaaacctgagatcaagtgaaaaaaacaatttcctgggccgggcgccgtggctcatgcctgtaatcccagcactttgggaggccaaggtgggcggatcacctgagatgaggagttcaagaccagcctgaccaacatggggaaaccttgtctctactaaaaatacaaaattagccaggcgtggtggcacatgcctgtaatcccagctacttgggaggctgaggcaggagaatcacttgaacctgggaggcagaggttggggtgagccaagatcgctccattgcactccggcctgggcgacaagagcaaaactccacctcaaaaaaaaaaaaaagcgc

SEQ ID NO: 851336 - DNA, 550 bp, Homo sapiens
agccctgtggccgccacctgaggtgggctggggctgctcccctaaccctactttgcttccgccactcagccatttccccctcctcagatggggcaccaataacaaggagctcaccctgcccgctcccaacccccctcctgctcctccctgccccccaaggttctggttccatttttcctctgttcacaaactacctctggacagttgtgttgttttttgttcaatgttccattcttcgacatccgtcattgctgctgctaccagcgccaaatgttcatcctcattgcctcctgttctgcccacgatcccctcccccaagatactctttgtggggaagaggggctggggcatggcaggctgggtgaccgactaccccagtcccagggaaggtggggccctgcccctaggatgctgcagcagagtgagcaagggggcccraatcgaccataaagggtgtaggggccacctcctccccctgttctgttggggaggggtagccatgatttgtcccagcctggggctccctctctggtttcctatttgcagttac

SEQ ID NO: 851337 - DNA, 386 bp, Homo sapiens
agggtgggatgagatgacaggtgggcctctcttcttggacagctctctgctgacagckgccccagagctacatttgaggcctggtgtcttgctgtgttcaggcttcatatctgatgagagtacctccaagtatagccgggaaaactgcagctctgccttccctcttcatgcagctaccgtttcaggaagcgggaggctagggtggggttgaggctacattgtgctaccatgctcgagttttgactgcctcctgatccatgctgctgtggttagtgcctggacttgtctgcccacttcagctaatgcctcactcatcctcgtgtcctccagctctggatccactgaacaaaccataaaagcaagacctgaaaggattgaactatttt

SEQ ID NO: 851338 - DNA, 611 bp, Homo sapiens
tgccaagaccagttgcttttcctgccattctatgcttccaatccaccccctgcccttctggggcactgccaggggtggaacacagacctctcctggacccatgcagcagccatcgctagacagtccacttttaacgccaagtgccagggcactccttctgaatcatgactcttaccaaggcctcccctactctgaaaactcttgtagctccctgctgtcaccaggtgaagggcaaaactcctcagcccagtgtgtgaagccgccttctctgggctgctggcccatgagtccttgagacaccctctgctttcacctcagccgcccccgctttgccatttatgcttcctgctgccaggcctttgcctcgcggctctcccctcgatgggtccaaatcttcccattgatcaagacctgttgcaaatgccaccttgtcaggtaaagcattctctgatctggtgccaggaggactggtagcctcggcttgttcctccctcatcccagggagtctgtacccatgccctaccctccctgtagcctgtgggctctgcgagygtcttctatgggggcaggtggagggagctccagctgtgctctccttccctgtcagcctt

SEQ ID NO: 851339 - DNA, 584 bp, Homo sapiens
gttaaaagttcagaacacctttaattcaccttttatttgcatcrttagcataaatactcttactgtagagagaggatctttctgagattatacatagtgatgtgttgaattattagactaagaacaggaaacctttaggctgactgtgaaatcaaggcaggaaccacgcaaagtcccctctcctctttttaagataatggacctccccgcagatgtgcagtttgagagatgagtgcagcagcaggaaaaacacaggctctgtgcagacaccaatcaccccagcaaggtgggcctggctgaatgcttggggcattcacttagctgagctgaaaattacccccttcatgttgtcagagaggttgttatttctgcttcatggtccttagaaaagtcacctctgcttttgagagatgtaggcagcttttgaaaagcctcctgcagtcaatatgtccccctaaagctactggcacctttcccaagatgccctgatacggactgactctgaccacaacctggagagaagctccaccgcgggaatgaagacaatggttccaaaatcctctgctcctttcattaaatttaaa

SEQ ID NO: 851340 - DNA, 567 bp, Homo sapiens
aagtggagcaaggacctccaaaaacacttctttccataaaaacaacaagaacatttccccaaaattaccaaaataaactttattaaaactccagaacataaccaaaggcttatactcatctggaagtacttatattgaagaaaaccagctaactctgggtagaagagtgagttttgtgatatttttacttgctctattcacatcaccctctgctagctccatgacagccttgaaaatcaaatgctgtgatcacaactagcagcaaagcagccactcaaaggcttagaacggaacttggcctttttcaaagtcccaatctcagacgactgtcatcatctgacctgtctggacttgctgtagaaagtctcatttgtaaggcttgtcttccgttcacctggtgcagacattgcccagggtgaacagccttttctcagagggtgtttgtcaaaaacacaaacaaacaaaagtaactgttcaataacatagctgcctgagattgggagaacccttgaaacaaaaacaagstaagtcgaaaccttgaaagtgaaatctggggaagaaggtatt

SEQ ID NO: 851341 - DNA, 657 bp, Homo sapiens
taccccttagcgatgattgtcattgttgaagtgactgtgagctgcaatctttgtaggaagtttataaagtcartagacattccattgaactttatgctcttcagattatcccaatacattgcagtagactagctatggagacctattttctagtctccactgagcaaccactgacagatagttagaatgctttataggcttcagcagacttttcagtgaaaaaaccattttttttttgctttctgtttgctttgagaccaacttgacatatttcatttccaaatgtttcacttacgtttttactgacacttataatttacaaatgattgtttccattcaaaagtagtagaagttagataataatgttaacacattgtactgtctctgcaattcattctagtttcacaaatcagtatttatcttctgctgtatttgcagatatatattttgtcataaatgctaattggaaatgtcaggatttttcaatctaattaggataattggctagacaagaggatcagaagtatttatttttaatataaattcatttttatgattgccaaacaggctaccgttggttatgtttcctaggttaccatgagcatggtggttgtcaggcctttgcatctcttgacataggaaagcatctgtaaaaac

SEQ ID NO: 851342 - DNA, 586 bp, Homo sapiens
ttgctattttgatatttgtcaatttattttagataattatctttcattatrtgaggaaagtacttttcaaatatattttactaagagtctttaaggataaatggatatttctttaatactttctgcatttcaggatggttacatgaatttttcctgtggcctatcaatgtgctttcacatatttattaattgacatcctcatgctgagtgattattacaaaacctctggaaaaggtcgctgtttgtcatggcatatttgaattttaatacaatctaagattcattctttctacatgaaacaattgttccccaaatttcagctaggtgtgcttttcatgaaatcactgtaccccataaacactgggcaagaatcaggtgtcacaaaaaaccatgtttgttagtgtataaatgttgtcactgaaaagggcagtttggcaataactctttatacaaatcaaatgcatttcagagacttttggatgcatcattttaaagaggagatggacaataacagcattaatccattcatgagggcagagccctcaggactaatcacctcttaacggccctgactcttaatatcatc

SEQ ID NO: 851343 - DNA, 646 bp, Homo sapiens
caggatccatatatttctttctccactctgaaaagaagaatttgtacttacttgtgaaatgtactacttgtatattttaggtgcacaatcaaataaatcagtagattgcagttagtgtatactacgaactacatacactgggcacattaaggagaatatattatctgactggaaagtttaatttgaatatgttaagcatagatttatccttgagaattattttacattagtatgtaaaaccgggaaaggatttgcctgccattggaagctgttggaataaagttattcatgactgaccccaaacagaattagtcagaatgttttctgtagccacgctttctgtcaaagagaagggagttcagtagaaaagaataaacagacgctgaagagcagctgctgaagtccagaatgatggataagagctcacaggagtaaaaatgagttcccaggtaccaggttgcttggattatatcccatatctggagagaactttggcctgagatctgatccaccatctgctttcttagaggagttacaggaagatggaaaacaaayggtacgttttcagtttagaaaaaaaaaaggtgtctacagagcgagttctgagactgtaaatcaggaagatgctaggtgcaactgcaaggtg

SEQ ID NO: 851344 - DNA, 529 bp, Homo sapiens
agtatatcacatttatttgcatattttgaaccatctttgcaccccagggatcagtcccacttggtcatagtgaatgattcttttaatgtgctgtsaattcagtttgctagtattttgttaaagatatttgtatccatattcatcagagatattggactgtgttttcttttctcatagcgtctttgtctggctttggtattagggtaatactaaccttgaaaaatagttcagaagtattccttcctcttcaagattttcgaagaattcgagaaggattctactagttctttaaatgttgggtagaattaggccataaaaccactgggtcctggttttttctttttttttttttagtgggggattttatcactgagtcagtcttcttattaattactagtctgttcagactttctgtttcttcatgatttagtcttggtgggttgtatgtgtctatgaattatccagttattttagggtatctaatttgtgggtgtataaatgttcacagtagtctttatcctttgtattt

SEQ ID NO: 851345 - DNA, 511 bp, Homo sapiens
caatggtggatgccccacccccagcctcactgtcgccttgcagtttgatctcagactgctgtgctagcaatgagtgaggctctatagatgtgggaccctccgagtcaggcacgggatataatctcctggtatgccatttgctaaggccattggaaaagtgcagtatcagggtgggagtgtcctgattttccaggtaccatctgtcatggcttccctttgctaggaaagggaattccctgatcccttgagcttccagggtgaggcgatgccctgccctgctccgtgggctgcacccacgtgtctgggaagccccagtgagatgaacccggtacctcagttggaaatgcagaaatcacctgtcttctgcatcattcacrctgggagctgcagactggagctgttcctattcagccatcttggtgccacccctgtctcaagatattttctaatttaccttatgatttattgtgggacccattggtagtttaagagcatgttgtttaaattcaac

SEQ ID NO: 851346 - DNA, 589 bp, Homo sapiens
aaaatacatgctcataattagactattatacggtagtatttagacatggagtgattattagagagtcttaatctaaagcagacagtgagatgacacaaatttagtaagatttataaactatatttgggttgtttttggcaattcaccaaataattgggagggtgaaaacaacttgctttattattattttctttgtggctataggctgccttctatagtcatcattgctgttctcctcctcctcctccttcaactcctcctcttccttctcctcattctcctctttctcttcctcctcctccttcaccatctaatcagtagggctttgaaagtatttccacatctctttgactggcacaagcttgaatacagcattgcttgcacaccttcctagtagtttttattcctgaccccctcagtggaagtatcatggttgttatgctgtggttccttatggwtgcaagagacaacagaagtggggaaagcctgaacgtgggaatatggttataaatgtacagtatattagcatttaaggcattgttctttgtattgccacatattttctcattgttataagaaaattgcctgt

SEQ ID NO: 851347 - DNA, 527 bp, Homo sapiens
atattttctaggttttcttataggatttttatagtttsaggtcttaaatttaaatcttttaatctatctcaaattgacttttgtatatggtgataggtaggggtccatttttattcttctgcatatggagcatcagttaacccagcatgatttgttgaatagaaaatctttttctcattgcttatttttgttgtcttttttgaagatcagatggtcataggtgtgtggcattatttctgggctgtctattttgttccattggtctatctgtctgtatttataccagttttatacatgtttttatatcatgttgttttagttactgtagccttgtagtatagtttgaagtagggtaacatgatgcctttggctttgttttttttttttacttactattgctttggatattcaggctctttttggttccatatgaattttagaatagacttttttctgattctgcaaaaaatgatgttggtagattgttaggaattgctttgaatttgtaaattgctttaggtagcatg

SEQ ID NO: 851348 - DNA, 670 bp, Homo sapiens
attaaaaattcttggccacgtatggtgactcatgcctgtaatcccagcactttgggaggctgaggcaggaggattacttgagcacaggaattcggcctgggcaacatagcaagaccttgtctcttaaaaaaaaatcttgttggaagaaaaaagtcttaacacagcttctgaattcagaaatagaggtaaatttaattggagaagcagtgtggggcaggagaaagaacagaaagagcttggagctctaccactgtattagttaactgtggccagaagtctgaatttaaggtgtcagcagggtcacgctttttctgaagactgtagggaagaatccttgcctctccctagctactggtggtggctatcagtccttgttattccttgccttgcagctgcatcactgcaatctctgtgcttccatcttcatgtggagttctcccctctgtgtctctgtgtcactgcgtcttcacgtggtattttttcataaggacactaggcattgaatttagggcccagtctaatctggtatgacttcrccttcacataaataataacatctgccaagaccttatttccaggtagacatgaagttttaggaggacgctctttatgttggtcagattgtgctgccataacaaaataccatagagtgagtggcttagacaacaga

SEQ ID NO: 851349 - DNA, 425 bp, Homo sapiens
taagtgataaattaaacataaagcaatattattggttttaggggattctctctcatttatctttgtrtttcccatagaccccacctgcctagaacggtcttacagttgatagtaaatactgatcaaatctgtggtaactgttttctgcttgacatttttcttttattttttttcttctagtctgccaaaggctgttaatcttcattttaaaagtatcatttaaatggttagagcagcttctccttgcttaatgtttattttgcttaatctctctctctctcttatttttttttacttacaaacaaacaataacccatgcttcataatacataacactttcttgtaaaatttcttgagaactccccctatctgcactcccaagcccttataagagtttcattcagtaatagaatctcagtccctat

SEQ ID NO: 851350 - DNA, 579 bp, Homo sapiens
taaggtttctaaaataaaaattaggagaatacattaattatatkagaataatcagaaatttcttaaacacaaagcacagtcagaaaaactgataaattgaactttataatattaaagatttttgttcatcaaaagatacaattaagagagcaaaaaggcaaaccaccaactgagagaagatattcatgaaattggcatatatacacatgcatatcctgttacaagtctataagaaaaagacagaaacttccattttaaaatagtcaaaatatttgttcagggccttcaataaagaaaatatttaaatggtcaataatcatgtaaaaagacgattaacatcattgctcattagagaaatgcaaactgaaaccacaatgaaatagcactagacacccactagaatagctcacattaaaaagggctgaaaatatcaaatgttggcaagaatgcagagcacctcaaattctcataccttgctagtgagactataaagtagttcaacaatgatatggtttggctgtgtcaccacccaaatctcatcttgaattacagctctcataatccccaggtgtcttggga

SEQ ID NO: 851351 - DNA, 268 bp, Homo sapiens
ggatgagggataaaagacgacaaatatggtgctgtgtatactgctctggtgatgggtgcaccaaaatctcacaaatcaccacaaaagaacttactcatgtaaccaaataccacctgtttcccaataacctatggaaataaaaaaaatttwaaaaaaaccaaagccattgagtaagatatttgctttcatttacatctaatattcagagtaaaagagtctataaaccgaatactacctaacactgcagaattaaactatgttcacgtaa

SEQ ID NO: 851352 - DNA, 608 bp, Homo sapiens
caagaggaaggtgattgaatcatggggacagatttccccctccatgctgtcctcatgatagtgagtgagtgctcacaatatttggttgtttaaaagtttgtgatggcygggcacagtggctcacgcctgtaatcccagcactttgagaggccgaggcaggcggatcataagttcaggagttcgagaccagcctgaccaacatggtgaaaccccgtctctactaaaaatacaaaaaattagctgggtgtggtggcgcacacctgtaatcccagctacacaggaggctgaggcaggagaatcgcttgaacctgggaggcagaggttgcagtgagccgagatcatgccactgcatagcagcctgggtgacagagcaagactccatctcaaaataaataaataaataaacaaaagtttgtggcaccttcccctacctcttcctcctgctattgccatataagacacgcctactttgccttcaccttcagccatgaatgcaagtttcctgaggcttccccagccatgcttcctgtacagcctgcaaaatcatgagacaattaaacctcttttctgtataaattattcactttcaggtatttatttataacaat

SEQ ID NO: 851353 - DNA, 623 bp, Homo sapiens
cctgccccctcctgtctcctctaatgattccttgccaacaagggagggagaccctggccccttcatttgccagtttagggattttccactaagcatctcaactccctgccaaccacctttagttattaaaatgcagctcacaacgtctcactctggctgttacattatcattcctcgttagagactcctccagggcctgagacatccctgcactgactttataattacaaagtcaatttctaaacagacatttgcaaataagtcaatttaaataccgagatttgcaaacaataattaagcagtagcttcttttttaatatctctacatataattaatgccggtgggcttttcattttaccttgcaactgggtagtttgcaatagtttgttgagctaaagtgttctctgaaagcaaatcaaagcacaggggagattttgaaagtgattgaagaatgagtttttccttttccttccttatccctacttcacctgattggctaggtttcttatcaggtgggaccatgatagggcagggatgctgaagcaggatcattttcygcagtaaaaacagtaacaacacagggttctggtccagagatagcttggttaatatggcctctaaa

SEQ ID NO: 851354 - DNA, 598 bp, Homo sapiens
agcattcctgagctcttttcatagctgaaggaggggagagccagggcagggctccacatttgtgtctggtggtgctactgtgggcagtgtgrctgggcagggcagtcactctaatgtcttcctgagtcaagggcaacagggtgcttcatcttacactgttcattgcttgtggtggggcacttataccactctgtttgatagcaatgtggaattttaatataatttcagaaaaacccccagttctgcctgttcactttagatacattagttctggttcaattcccagccttctatttgtgtgatcctggataaatcactatgctgctttgagtctcagttttctcacctgaaaaattgggagaaataatagaaccttcctgttaggtctgttatgagaataatatgagatataatacatggaaatttttagtatagcatgcaagaagcactaaatataccatggcttccattcaccagaagtgaaaagtctagttataataggatatagaggctattagtctggtttccaaagacccctaagaaacttacaagtgtcttaaaaggtacttgaaaaaatttgtacatatgatgatatttt

SEQ ID NO: 851355 - DNA, 622 bp, Homo sapiens
attcaccagaagtgaaaagtctagttataataggatatagaggctattagtctggtttccaaagacccctaagaaacttacaagtgtcttaaaaggtacttgaaaaaatttgtacatatgatgatattttgggagatgtatatgactcataacttgaatcagaatcccaatgttgtcctctgacctttcactctaacttagggatggaaggcatagaaggatcggaggattttcccctggtttttcaattaggttttctcttgctgtggaaattgcacactcaaaggtagttaatgtctcttggagatcaggaagcaggcttaatgcctcccttccctatctacatcaccaaagaacaaaaagcaagatagcttagcatgtctctaagcactgcatttcacgttgatgcttcgttaattttatccaacttgccctgaatgacttatctagtgttaggaacaatattgtttgtgaaccctctggcatctactattacatgaatacagcaaaaatctattatatgaacacaatttcarttattgttttcttgacagagagcaggaactaagtaaataattccaccagttacagctatataacatctagcaggtcacaaaatgat

SEQ ID NO: 851356 - DNA, 617 bp, Homo sapiens
cattcttaaatatctgctagccgtgataaagaaatcaatgtactttatgtccttagctcccacaatgtagcctaaatatttgccctggcatgcttatactggtccaaaaaagtattaggtcatagcctgttcctcttccttatttgaaggtgtttttacctttctcagcattccgcaagttacttcctccttcctttgttctcctctgcctttgcctcttttaaaaagttctaagttgctagccagtcagaacaaatacagaatgtgaggtcccgttccagtcaatggaaaccagacacagcagtagggtggacatgtcaagttataaatgaccctatctcctttgttcggtgtgctctcatggcaaaactgctggcgagtgtaccctttctgcaagaagtaaaaatggccttgcaagtaaattaaatttatgttcaagtgctatttctttatggcaccgggaagcaagcatttcaaacaatactaaaagagccatcatccctaggtgatgcaataggtttatyaattgccatttagacctaagaaagttggatttgtacaaaatcacacaatagctgaatggcagagctgaaactagaataaagtgatgaggctca

SEQ ID NO: 851357 - DNA, 627 bp, Homo sapiens; identical to SEQ ID NO: 843606

SEQ ID NO: 851358 - DNA, 564 bp, Homo sapiens
gaatatctatttatgtaaatcatatgctataaaggttatttgctgttaaagtctccaattaaaattccaaytgacagtcaagaatccttgaaatagcctaatcaaataagagtagatcaccactttatccaaggaataagcatcctctaggcagaggcaccatcctgtttttcttttttccacacctagaaaatcttcagcagctaacaaaatcaactgactagtatatgaaatgtatttgtaaataaataaataatcagcaactcagagaacatttattaaaagttttctaaagggtagagtaggtggctaaataaatgtgatacaatcatttcctttatagtgtttgcattaacattttacctaataataaaacgtaggttatttgtggcaaatgcatatcacagatgcagatatacaaagatgacaaggagaaacactaaatagcaataaatggtgcaaaccaagaaacagaggaggaaatgttgaagcaattgtgtagcagtacataaaagtttagagttctacaagcagagacctgtatgtaactatcacacatagaat

SEQ ID NO: 851359 - DNA, 536 bp, Homo sapiens
actggctccaggccagtccccacggttccaggctccagtggccccagggtccatgcccccaccagtaaatcctsgtatcaggccagaccctaaggaccaaaactccaggatagcctctgcagacccaggcttatctcagggtctatttagaagactcatgtgtagccttactctagcaccaggtcagtacccacagaagttcctgtggacccaggcttcagttcagactttatggatacaggctccagccagcctcaaggaaccagtctccagacacaccattacagacccaatcaaaacttctggcacagtttacccaggctctaaggccatctctgcatacccgggtgccaagcccactcacctattgaccttggtactgggccagcctgcctgatgactccagcagcaagtccatctatgaatcatggcagatagtctgcccataacctctggacaagctgaatgataaagggctttcccagacaaagccagtctgcaaagactgaaatgagtccctacttcttcaaatgtga

SEQ ID NO: 851360 - DNA, 536 bp, Homo sapiens
actggctccaggccagtccccacggttccaggctccagtggccccagggtccatgcccccaccagtaaatcctcgtatcaggccagaccctawggaccaaaactccaggatagcctctgcagacccaggcttatctcagggtctatttagaagactcatgtgtagccttactctagcaccaggtcagtacccacagaagttcctgtggacccaggcttcagttcagactttatggatacaggctccagccagcctcaaggaaccagtctccagacacaccattacagacccaatcaaaacttctggcacagtttacccaggctctaaggccatctctgcatacccgggtgccaagcccactcacctattgaccttggtactgggccagcctgcctgatgactccagcagcaagtccatctatgaatcatggcagatagtctgcccataacctctggacaagctgaatgataaagggctttcccagacaaagccagtctgcaaagactgaaatgagtccctacttcttcaaatgtga

SEQ ID NO: 851361 - DNA, 624 bp, Homo sapiens
cctaatctccagtctctccccttttcccagaaaaatttagcagtcctsggttccgtatactcagggttccctgataaaatgtatggtggggactggggagaagggcatgctcattctctcagaagcagcatattgcagtggaatgagcacaagtttccaaatgaagaatctggtacttgtaggatttcatggatgtatctcgtgtccaggcaacttcaaatcaaaccaccatattacgatagtcttcaagaatggagatgcatgaggtggcaatggagatgaaacagtttgttatttatggctccaaatcacattaacttgtgtagctcaggaggatactcacttgatctattcaatatataccttctgatatgtattcaaaaaatttctggttccagatgtttttgattttctggttggggtgtgattacgtgatacctttgtctaaggtgctcagcaatctccctggaggaagataatttgtttcattcactctgaagattgttcaggaaaaataacattcagacttccatccatatctgacaggcccgaggggcctgcaacttctctaatgatgcctttaaatgattttaatgttgtgataaacacaaactcagtacggaa

SEQ ID NO: 851362 - DNA, 659 bp, Homo sapiens
ttcttgatagagctgctatctaagttgggacacttatatggttagaagttaatcaaataaagatggagggaagagaattttacccataaagaatagcatgggcaaaggatttgaggtgaaagggaacagaactctatttatggaaaagaatttcagtttagtgagatgtggggatgaaagtgaaatagagaatagacagagttgagctagaatgctaagtcaaggagtttaaattttataccagggaattgggatttaacaagggaatttaagtgttttaagcagaggctatatctgatcaagtggttcctcctaaaagagatagcatatatatccctgccccattcatgttgtgcttggccatgtggtttgctttggctaatgggatgttagtggatatgacacaagcaaaaagcaaagacttaaaatgcacttgtgtaattgagtttgttctcttaaaatgtttccatcagtatgagaaggacatgccttgaagagctcgctggattcagaacaagaaaacacagagcagacctgaatcaaatccastttagagccaagcccagcccaacccaattgagataaataaaagctgcctaagctcatatctgtagatgtgagcataaatgattattgttataaaccactgagttgtgggg

SEQ ID NO: 851363 - DNA, 607 bp, Homo sapiens
catggtgaaaccccgtctctactaaaagtacaaaaattagccrggcgaggtggcacacgcctgtagtcccagccactcaggaggctgagataggagaatcacttgaacctgggaggcaaaggttgcagtgagctgagatcgcgccaccgcactccaacctgggcagcagagcaagactccatccccatcaaaaaaagaaataaaattgatttttgtatacattgattttatatcctgcaaccatgctaataaactcacttattaattccagtagcttttaaaataaatttcatgggggcccacgacggtggctcatgcctataatcccagtattttgggaggccttcgtgggtggatcattcaagtccaggagttcaagaccagcatgggcaacatggtgaaaccccttgtctaaaaaaaaaaaaaaattagctgggtatggtagcgtgcatctgtaaccccggctactagggaggctgaggtaggagacttgatcgaattaatgagattgaggctgcaatgagctataattgcaccactgcactccaacttgggagacagaatgagaccctggctcaatcaatcagtcagtcgtttccattggatt

SEQ ID NO: 851364 - DNA, 525 bp, Homo sapiens
tagaattcatccaaggagggcagtaaatctggagaacggcttcgtcagagccgcagtttggaagaactacctttgcagccttttgcccacgcgggggtgcagaaggggctggtcagtgccaaggtggtgctgcccggacccgcccctccatccatagaatatgtcgtgctgcagtggtgagcggccagcagccatcgcaaaggtggagactgagcgtcaaggagaggtccaggaaggagggaggccggctgcccaggtgcagggagcggctactccgtggtcccgtgaatggctgctgtcagcccagcacccaggaacagaggccatagggagggactcagatgtgatttctggtgtctgtttttgtgtttttttccaggtcgcgggacaagaaagatctctgtgttggacacagactagacgacaggagctacgtgttcttctgcatggggaccaccacacccagtgctgaccaccacacgatgtgccagtacctggggaygacacaggggcccccgggcttca

SEQ ID NO: 851365 - DNA, 569 bp, Homo sapiens
acttatgtccacacaaaccctgcacaagatgtttatagaaactctattcataaatgcctcaaaccactaacatactagatgcccttcagcaggtggatgataaacaagctgtggttcatgaagtgctcaaaaccagaaacgaacaagacgactttcaataggagaaggataaacatgctgtggctcatctgtgcaacggaataacacccaacagtaaaaagaaatgagctggccgggcacggtggctcatgcctgtaatcccagcactttgggaagctgaggaaggtggatcacctgaggccgggagttcgagaccagcctgaccaacatggagaaaccccatctctactataaatacaaaattacctgggcatggtggtgcatgcctgtaatcccagctactcaggaggctgaggcagatgaatcacttgaacctgggaggcagaggttgcggtgagcygagatcacgccatcgcactccagcttgggcaacaagagtgaaactccatccccccaaaaaaaagaaaaaaaagaaatcagctatcaagctgttagaagacatggaggaa

SEQ ID NO: 851366 - DNA, 593 bp, Homo sapiens
ccacggctgggaagcagaacccctagaaggcctgaagtttctattcagaaaacgctaagactttctcttctagcgctccgtcttgcaatacctgctcttacctctcatcttctcttacactgggcacaggactaggcagataacctgcagccagcctccttcagggtctgtggcctctcacccctctctagcacctcagggttgccttggcgggggtcgcccatccaagggaaggactggatttacctgcaaacctttttgggaaatctaaaatcttggactgggtcacaaatgacaggagtaaccagcgcaaatgtctcagagtggcccataaacaaaactttagaaggcccagggcacaaaaggccattctcagtaaacaaaacaagggatgatgcaaccgctttagctatgcccttgctgagtccgaaggtggatgtccaggctattataccacaaaatgtccagtataaaaacggctttcttcgaatttggaatggatttatttggctaactgcctccaccggacatttaaaccaratagcccccttacgctacaaacgacagaacccctcccttgaccaccgacttta

SEQ ID NO: 851367 - DNA, 515 bp, Homo sapiens
ctcacagcagccttgagctcctgggctcaagcgatccagggatcctcccgcttcagcgtctcgagtagctgggagcatcaccaggcccagcttgktttttttttttttttttttttttttgggagatgggagtcttgctttgctgcccacatttgtctcaaactcaagtgatcctcctgccttggcctcccaccatcatgttgggattacaggtgggagcccctgtgtctagcgctaaagcaaaaggaaaaggagaaagaacaaaaaggacaaatccctgcactttggtttctaaacagccacctctcagtgctctgtgcacgctggcctccctgcatggagttctttctcccttctttttcaccttgaatttctatttatttttttaaagacgtacatcaaatatcatctccttccaaaagttttccataactaatcttggcagccagctgttcctccttctgaaaactataataagggctaacattatggagtgcttactgatacactaactg

SEQ ID NO: 851368 - DNA, 601 bp, Homo sapiens
atttcagcatctgactccgtgaccgtgatctaatctgagaaactaatcaatacctaggagagagayaaaatggccttcatgccagttaaatgctgtgcctttcatataggcttcttggagataatgctctagtctttaatgactaatttagatgagggaggtgagggcaactattaaagacccaggaggctggggagggaatgttgtactattatttggcccatatttttgaacaaggaagagatcttgaggattctttattttcttccctttaggaatacagaaaacaagtccacaggtggagaaaatgccctgttccatgaggctacagcgtctgtcagaccacaaggctgtggtcaggggtcagaagggtcccaataacgaggattttcaagacttgcatacattcaaaatggagaggcaaaatctgaggaaggcatgtgcattcctatggcattttggcctcaaacctgctgaagccatcgtgtgtaagaaatagcttcagggaaatataactacactgatcctgtaccaaatacatttataagaaacaagcaggaaacactcagctagaatcaccctcaagaagttattagtgcca

SEQ ID NO: 851369 - DNA, 699 bp, Homo sapiens
gagatttctcattatttcaatttatattgtttgttctaaatactgagtaactacagcatgtttttaaaatgtgctaaacacacattataaatacctacataactgaatactataaatgccacaatttaataacttcacaatgtaatcataaaattttaaaatttatcagagacactgtagtctgagccttttttgttgttgttactgaaacaaattgaggttcaaagaagttaaggtgaatttcagaaaaatgcttagagatactggtttttgtatttgagtaacgtgggtgtggaaaaaagtagttatggaggaagaatgggatctaaaataaatgatcatggtagtaactgacattgtttgacacatttgtgattctccgaccttctgaataaagatatgctaacataaggggtgatggcaaatgcacacaaatgattaggaggctcacaatgctgtttgccagatctttccagttctcttcatttctggtcacatggcagcattgcaatttctggctctcttgtggttagatagggccaagtaaattgtcctggccagcgagttgtaacactctgtcacttccaagccagagcatttaattgcccgttaagaccagccagagctctgtctttcctgcrgtcagaatgactggtaaaattccacacagcaactgctatgtcacctaggatccaaagt

SEQ ID NO: 851370 - DNA, 610 bp, Homo sapiens
tgtgtctgtgagggtgttgccaaaagatattaacatgtgagtcagtggactgggaaaggccgatccacccttaatctgggtgggcacaatctaatcagctgccagcatggctagaataaaagcagtcagaagaacgtggaaagactagactggcttagccacccagtctacatctttctcccatgctggatgcttcctgccctcaaacatcagactccaagttcttcagctttgggactcgaactggcttctttgctcctcagcttgcagatggcttattgtgggaacttgtaatcatgtgagtttaatacttaataaactcccctttatatatacatctatcctattagttctttccctctagagaaccctaatacactcccttttcatattacacgccagttatctaaccaccggattctcctgttttcatgtgcatcacattaggatcttcctaaagtaacaagttgatatggtctggcagtgtcccctccaaaatctcatcttgagttgtagctcccataattcccacgtgttgtgggtrggacccagtgggagataactgaaacatgggagcagtttcccccataccgttcttgtgatagtgaat

SEQ ID NO: 851371 - DNA, 597 bp, Homo sapiens
caatgaacagttttcctgtaatttgagatttttaaaatgtcctttgcataagaattaacttttatgatcaacatatattaagtagyaaaaatttaatagtctacataagtgtttcttccatttggtttgtaataaaataaataaaatttgtaatctttcctgcaaggtagcaaaaacactccaggagatactaagaaatatttagagtaatggatgctcaggtctgaatgggactgtagagatcatctagtccaactatttattttataggtaatgttatctgtgaggaaaatccaggagttctgacatcgaacagctataatttcatgtatgtggtctcaattcattttaaggaaaatgatggatatgttacaattattttgtttgcatggtgcaagtgtttgtcatttcctgcaatctagctttttcctaattttacatcccacttcctacactgggctttggctgggattttcctactcccctgcaagatcttgcttcttccatttctgtaacttggaggccaagaggctttattctgtaaagaagagatagtaaatatagtttctttgcaggtcgcatgatattggtccctaa

SEQ ID NO: 851372 - DNA, 527 bp, Homo sapiens
agctggatttccacaccaattttatctttgacctcttaacttggccattgtttttgtgattctgtgcgatgggcacctgttaacttggaattccgtagagaccgtagctctcctttcactgactttcaatcrcacatcagattgtagcaatttttagctactattaacccagtctggtttcaaattgttgacctgtaggtcacaggcccattactaatccctggagcaattcagtctcttagttattatgtgtcatttagtagacttgattcatgtgcacatctcttagcaacatcaatagaacttctgtgtggagatcaagagtgatgaggggcccagattttattgaaaaaatacaatagaagagctggattagttctgtgattttgaggcatgacatctcattgattatgaagaaggatctatgtgtgcataaaaaccaatgtggccattgcacacacgagaaaaacacagaattttagagaaatatggaacgtgaggaatttttcctgttttccaacacaatt

SEQ ID NO: 851373 - DNA, 549 bp, Homo sapiens
tatagttgaagtgggggacagggaggaggacactggccaggttagaagtcttcataatccatacctaagactgaattgtacatagtaattaattaattaattattaattccaaaggcaaactgctctcctaggtacttttttctttttttcaagatggagttttgctcttgttgcccaggctgcagtgcaatggtgcaatcttggctcactgcaacctccgcttcccaggttcaagtgattctcctgcctcagcctcccaagtagctgggattacaggtgcctgccaccacgcctggctaatattagtatttttagtagagacggggtttcaccatgttggccaggctggtcttgaactcctgaccttaggtgatccgcctgcctcggcctcccaaagtgctgggattacaggcatgaaccaccgcacctggcctcttctagatatttaagaatgtagttcacataagaggattacagcatcatttkgaagtatactgttatagaatgtttaattgtctcatcccaaaaaaaatgtaagagggagattg

SEQ ID NO: 851374 - DNA, 607 bp, Homo sapiens
tgatgctgcggataggcagagcacatcttgaccagcacatagcttgcttgcttgttctccatcttgtttgcaaactgaaatcagtggaggaatttaaaaaatactgattctggtttccaccccgatagattatgattcaattggtatggggtacagcttggacatctagatatttctaatgatctccaggtaattctaatgtgaagcaaagtttcagaaacacagctagactgacctgctcctgcatgtagaaaatccaggttctggtcattggtggctgagcaggctgggggagccacattcagagtgtggtcactctggcctggcaagaagcctggcctggcaagtgtttttcctcgtatcctgacacccacatagcagggatccagccacggtgcccagaatacaggacaggaccgtttctctggagagttagtacaagcaaggctgcctcttagttctaaaggactgagatacaaggcagagacttaggcacaggagcatcrcaccgggatccaggcagaaggcctggatgtaaagctaggggcttggttacaaggatagaggcaagaggtcagttactagaattggttatggtgtcagagtc

SEQ ID NO: 851375 - DNA, 669 bp, Homo sapiens
catcgtcaaaggaagctgatagatcaagaattagaaatttaaaacaaaatgagaattagaacaaaatatcaagaatggagagtaagtctattgagtgyggtagagagcagttgctgacagtacatcataatgacaataattattagagcaagcagctcctgagcacatgtaatgtgccagagactgggcccaggcttttgtgcattgtctcactgaatccccacagcagccctaggagataaggtaggctgattagcattgtttttcaatgaggaaacaggcacctaatgcctctagtagcttaatcaagatgaatccaggcagaggggtgtggagattggaatttggaaaaaggtttgatttagtgactgctgatatgaagaagaaacgttctacaggtaaggtgggcaggaactatgattctaagatgctaaaggttgtaaacatggatgttgatgtcgctaagaataatgatggataataaggtgtaaaataaaaaaaaaattcaaactaagtcctgaaatatctaatgaaatacgggatgtgaaaatgttatacaatactgggaaaacagaaaaattaaagaccaacccaggggaggacataacatggggataggctaggttatactgcggtaacaaacaagtcccaaacctcagaagcataaaa

SEQ ID NO: 851376 - DNA, 495 bp, Homo sapiens
taaagggggacagctgtatatccacacagtggaataccactcagccatgaaaagggaagaacttcggatccatgcaataacatgtatgagtctcaaaarcatcctgaactgaaaaagtcaggcccacgagagtagatactgtgtgattccttttctatgaagttctagaaatgacaaacccaagctgtagtgacagaacccagaccatgatttctggggactaggaatggcagtaaggattggctgagagaagcgcaggttctttctgagctaaggtaaatgttctgtatcttaagcgtggtggtgttttcgcagatgtaggcatttgtcaaaagtcatcgaactggctgggcgtggtggcccacgcctgtaattacagcactttgggatgccgaggcaggcaggtcacctgaggccaggagtttgagaccagccgtgccattgtgctccaccctgggcaacaagagtgaaactctgtctcaaaaaaaagaaaaa

SEQ ID NO: 851377 - DNA, 635 bp, Homo sapiens
aaacttttcctgtggagggccaaataggaaatatttgaggctttgcaggctgtatggtttctgtggcactgcttgtctgtcactgtagcacaacagcatccagagatggtacattaatgaatgggtrtggctgtggacaaaggaaaattcttacaaaaacaggtggcccagggtcacagtttgcaggcctctggtatcctatacccatatgcaatatagctctgtgatgaggggctgagggcttagtatcaggggagcctgggttccaattttggacattctagccctagttgtagggtctatttgtgcaaattgtagaacatctttctgcctcagttccctcatctgtataataggactaataataaccagatcccagtgttgggattagatgagctaaggtgtgtaaaaaacatggccagatcctgtgcacggcagaatctgtaaaaacagtggatgctacgttacttgctatcatgagccaagtttcttgtttgtctttcatccttctgtgtgttagtccattgagtaaatacactttaatctgcttcattatttctcccagactgtctactttaaatcattcaacacccttgaagcaccgaggatgaagaaaagaagctgattttcatttt

SEQ ID NO: 851378 - DNA, 592 bp, Homo sapiens
ccttgtctgtaaaatggagacaacgaccgtagcccactttctagggtttatgggaacattgcatgggctgaaatgtgctaagtgcttagcacactgcttggcagtcacaggcatgtgttattatctttgcttttattatccttattattcttttaaaggcatggagaggatgagattttcagtggagaaagaaccaaggttacgtagggatttttggacaaacaggaagtgtgggctctgctcagagaagtgcaaatgaatttgtaatctgagaggggctgatcatcaacccatcagaatcctccaaatatgagcacagattagtttatgttattcattcagtaggtcagtaagtatttatggagttccactgtgtgtcaggcttgttcagggcacggtgaggatatggctggaaaccagcacgacatgtctttgtcctcgtggtgtgcacagtctagaggtgttcaggcactcaaaaggtgggtcattacaggtgtgttgggggatattaaagagaagtacagaacagtaagagcagacaaaacggasgattctggtgtaccgggtggggggtacccagggaattccccgt

SEQ ID NO: 851379 - DNA, 508 bp, Homo sapiens
gtgcctagctccgtgttaaccaattagacagcttcttcccaccccagaccccagagacctggcccaagcctggagaagacatcctgtttcccctgaggaagtggcccagattgaaggagccactagggtrtttgaggggggagtgagtaggaaatagggcaggaaggggctgacaagtagtaataacagtggtatccagtgtccgctaagaaccgcgcccccactgccacccccactgctttgtcctgacccttggagatctcaataaacttggcaaactcttactggcctttggagtccaaagtcttcccatgatcccatctcatcctcaagctggctcctccatccaccatctctcttctgtataccatcccagtccaaaaaacaatgccggccctttcttggtttctacagaaaacaggctcacaccacacattccaggagtttagaaacgttgctgagcactaaatgggcaccaggcaccatcacattgcctggcaaatatcct

SEQ ID NO: 851380 - DNA, 612 bp, Homo sapiens
ccctgggacacatgacttatacagggatgacctatctgccctacccaccacaagaccagatattcatactgaggatgattgtagaaaatgctctggagtcatggaaagaggacaactttttggctctgtgaactsagatacatcattcatatctccaaagctctacttattcaactgttaaatggggatagccatacatgcttggtctactttgcagagtcactggaggtcttaacctagaccttagaaggaaaaaaggctttgtaagaaataaagaacactgacagtgtaactgtctggtgtagacctgtagttaatctactcacccctcaatttcaaagactggctcttcctcaggtgattcacttagcctctctgatcctcagagtcctcatctgaaaaatggggataataatcatagcctagcacactctgtagtgttgtgagaattgtatgaaataatagatatggaaacctttgtcaatgttaccatgctatataaagtaaatatgaggggtgatatggttttgatctgtgttcccacccaagtctcatgttgaaatgtaatccccagtgctggaggtggggcctggtggaagatgattagatcac

SEQ ID NO: 851381 - DNA, 328 bp, Homo sapiens
agtgcaagtctcttctgcctgcagccttggttcctccytctgttctccagcaatccaccactgctcctcaggacgactgcaaacaccagacggaagtgcatcattttggccacagtgtcccaggtcgaaacaccacctctgactccaaacagagccatgagtttgtcccttgaggctcgggctatgtgcacaagttttcagaacgccttgtttcttgtcaaaaactaaactgatgtttttcctggcatggcttttggaagggagcatgattgctgattaaatatgaagtggtttgaaacctaagtgtctctctgaataacgtaatgtt

SEQ ID NO: 851382 - DNA, 328 bp, Homo sapiens
agtgcaagtctcttctgcctgcagccttggttcctccctctgttctccagcaatccaccactgctcctcaggacgactgcaaacaccagacggaagtgcatcattttggccacagtgtcccaggtcgaaacaccacctctgactccaaacagagccatgagtttgtcccttgaggctcgggctatgtgcacaagttttcagaaygccttgtttcttgtcaaaaactaaactgatgtttttcctggcatggcttttggaagggagcatgattgctgattaaatatgaagtggtttgaaacctaagtgtctctctgaataacgtaatgtt

SEQ ID NO: 851383 - DNA, 626 bp, Homo sapiens
atcccacagctaataggaggaagaggctggattcatgtcaggctgtgtcaacaccagagcccctttttcactccaccattaggttatctctcccgacttccagctcattctccaaggagcccccttggctccttcgcaacttcctatcctgatatccagggacatttccacattaatctcggtttcctttgctatttatgttgttaccttgcccatgctgtatcacaagggttattagtcagaaattgtgtgtcagtggttatgaccctaaaggaaacattccggaactcccaccaacccttccctgatctcagctcatgaataatagactatttatcagtgggcagaatacaacctattgttggagtataaaggaacagcgaccaggttagaaggcctccgtacaagatgtgtgcctcaaggacctgctgagtaagctggtgaacacgtggcttttggaaaacaggatgacgccagcccaaattgctgacaggtcagccccgcttgctgtgaactgagtcttctaggarcagggatgcattgccccagagagagtcatgcattcacctaatgacaagtaaaaatgaaaattgtagcagctaccatctgagtgctccccatgtgcc

SEQ ID NO: 851384 - DNA, 641 bp, Homo sapiens
ttggattctgagttcatggggacagtttgaagcattgggctaccaaggctggtctggaaatagggcaagcctggagattgaggctgagggagctggcctggcttggcatgggcctgaagttggggctcactgtggctaatctggtactgaggcgagtctgaaggcttggtctgtggtactagcttgaagccttgggcattgggagctggcctaatgccagatttcaataagcaggctcactgctgtggtccagggcaagattaggaactcacttcactctccttcccccacatggagggtatctcttccagtaatgtgctgcctgtactgggagaaggggtgattcaggtaatgtgaaactgttttttcctaccctcttccaggtgtctttgttttatttctgtactacaaccaagtgctataatctcacatctggattacttggttcttttgaaggtatttcatatatgggtagttgttcaaattgatgttctacaaggggatgagcactggaaagtccttttccctgctatggttctcaatgaagcctgcastgtcctagaactagagacatgctctatattttatatggtttcacaacagacaaccaggcccttttggcactgtttatctgacaaaat

SEQ ID NO: 851385 - DNA, 624 bp, Homo sapiens
gtcattcaggaggaggacactgctgtgctgcccggtcccgccggaccattccagttcaaagagtacctgctgcagttggtggaagtgcaaagcctttyctgtttgataagaaactggccaagatacccggcttatggggagcactggatgaccacagccacctgtggacttggcaatccactggttcctgcacccgggtaagtttccgggcagagctgcatttattgacggctatgaagaccggtcagtgaaagtgaaactgcatcttggcatcttggcattggccactgagctctccacttatgcactgtgtatgtctctcccatgcctaaggacattctgggggtggatgttttgcacggcttggcagctgtgccgtcacagacttcatggacccctggacaatggaaccgggacagtccactgagagccagaaagagtttgccttcgtgggaagatgacaacgggctttctcagtgttgctgcagggcttgcatagccccatcatatatcatggttttgttgatgatattatattaacctctgatttgcttgcaggtttagaagaggcagcacccctcttgcctgggattgggataatgcagctgagacggccttcctggt

SEQ ID NO: 851386 - DNA, 234 bp, Homo sapiens
aagtattttctgtggtgcatgcctattctaatatgaacactgcattggtaattaatggcartcttgaaagattttagtaatttcttcttgattatctatttggatgttactctggttggtgtatttatatttattctcaatctaggctagttagtaaataacatttggccattaaattaggtggtactctgtgctgtgaaagttccaacaaactttctcatttggctaccgtgt

SEQ ID NO: 851387 - DNA, 243 bp, Homo sapiens
ccattttctggtagcattggaagccacatgctccagatggkgtagtcacaagatgaaagctgtttaggtccctgagcttggaggatagtcacccaagagagccacataacccatatgggactgtactgtgaaagagcaaaaaaaaaaaaaccaaaaaaccttgatatgtgaagccactgagatttttgtggttacagtggctagcattaataatcattaataattctaattaatatgcctctt

SEQ ID NO: 851388 - DNA, 620 bp, Homo sapiens
tcataagagaacatcttgaatcacaactaaattatgaagaggtgatgaccaaaccaattctgtagcccctcttcccctaatcacggcaaatgaaagaaagaagatgatggaccagctcccaagttttccttctaaacagatatttctgggaagacacataaaaggaactgaaaagttaggatttttataattttaaaattcactttaagacccctgagtttctgaattattcacaaatatacatgattcccacacattcacatggaagaatagcccaaaattagagtcccactatcatccaaactttacatcaagacgaaccagtactgaagcctcccagattcctaatccttaattgctggtgagagtctgcagagcaaggtcatttgcatgacaacctcagccttctcagagggcccaagattttgcttggctactcactacaagtcaaaatatacagaagtaatatataaaatatactactttagttcttcagctccttgaaaaccatttctccactcccaaatgaaaaatagcatacaaaaaaaagtatagcatatcttatcacctcagctaacttttcaaagttataattytactggaagataaagtccaaagca

SEQ ID NO: 851389 - DNA, 558 bp, Homo sapiens
tagttatttcctagatacaatgggggtacagatattgcataaatacagccattccaaatgggagaaactggccaaaacaaagtagctacaggcctcatgcaagtctgaaatccagtggggmagtcaaatcttaaagctccagaatgatctcctttgacttcatgtctcacatccagatcatgctgatacaagaggaaggtttgcatggtcttgggcagctcttcactgtggctttgaagagtacagtctccctcccacctgtcttcatgggctggcattgagtatctgctacttttccaggcatatggtgcaagctgtcagtggatgtaccattctagggtctggagggtggtggccctcttctcacagctccactaggtgatgcctcagtagggactttgtggtgatcctctgacgccacatttcccttctgcactgccctagcataggctctccatgagggcctcacccctgcaacaaacttctgcctggacatccaggcatttccatgtgtattctgaaatctaggcagaggttcccaaaccccaattcttgact

SEQ ID NO: 851390 - DNA, 540 bp, Homo sapiens
ttgggaatggaaagaatgacaatgttyccttcaccatgaactcaatcaactaaaataaccattcacgcctcccagctgctttcaacttttcactaccaggaatttccctttacctcttgacagaggaactcctgcagttatcttctcctgtgaccgctcatgtttgcaggcaaatatattctccttcagaggagctgacataaaagtattttaaatcaaaatgggatttaatatcacttgttattaaaatacatttctggtgcctgttttaagggtttattttcttgccaaatagtttagtgtaaaaggagagaaaataagtaaatcttatactatctaaggttaaaaaatttacgttttgtgatcatgatgtttgtattgagaaagtatgtgtgtgtgtctgtgtctgtgtgtatagcctgtaatgtgtaaggatatgatagaaactatatcacccacgcatttcattctattgccttcatgcttagttatttgataaataactgtatctcttatggcctaatgtaaaataatgaatca

SEQ ID NO: 851391 - DNA, 632 bp, Homo sapiens
ttatgttcctgttgatgtttgaattttcttccatgaatcacaaatgttcctaatgatatttagaatgrtaaatcctttccagaaggttttcagtgtcctttgcccagatccattggagtaatcactatctatgtcagctatgggcttacaaaatgtattttttaaataataagacttgaaagtcaaaattgctccttgattgatgggctacagaatggatgttatgttagcatgcaagaaaacaacattaacgtctttgtacatcttcatcagagctcttgggtgactgaatgcattgtaaatgagcagtaatgttttgaaaaaaatctttttttctgagcagtaggtctcaacaatgggcttaaaatattcattaaaccatgctgtaagcagatatgctgtcatccagactttgttgctccatttataaagcacagttagagtagatttaacatagttcttaaggaaccaaggatttttggaatgctcagtgggcactggcttcaatttaaaatcatcagctgcattagcccataacaagagagtcagcctgttctctgaagccttgaagccaggcattgacttcttccctctacctatgaaagtcctagatggtatcttcttccaataga

SEQ ID NO: 851392 - DNA, 623 bp, Homo sapiens
aaacaattgcaacaatagcaaaaattgacatatgggatctaattaaactaaggagcttctgcacagcaaaagaaactattatcagagtsaacagacaacctacagaatgggagaaaatttttgtaatctatccatctgacaaaggtctaatatccaaaaactacaaggaacttaaacaaatttataataaaaaacaatcccattaaaaagtgggcagaggacatgaacaaacacttctcaaaagaagacattcatgtgaccaacaaacatatgaaaaaaagctcaacatcaccggccattagagaaatgaagatcaaaaccacaatgaggtaccatctcatgccagtcagaatgaagattattaaaaagtcaagaaacaacagatactggtgaggctgtggagaaataggaacacttttacactgttggtgggaatgtaagttagtgcaaccattgtggaagacagtgtggtgattcctcaaagacctagaaccattaatagatttgacccagtaatcccattactgggtatatacccaaaggaatataaatcattctattataaagatacatgcaccagtatgtttactgcagcactattcacaatagcaaagacatagaat

SEQ ID NO: 851393 - DNA, 505 bp, Homo sapiens
cagaactgttcttgaccctcttagggaatgtaatatcttgagttaggaggaaaaagttcaggaaagcctgggctttgttcctctttyccctggaagcagaatgtccatcaaagctttgcccagcatgtgacatgactcctgtcacatgatgtatataacttggtatggactgcctttcagagttcttcagttgtggtgtgcaaagtggagcatgggcagtcaggacttcttctctcctggaaggctttcttgagtcttgggggaccagttctcactggattctagggtgtttttccctttcccctttctgtctatccatgaataataaatccacttcatgtaacttgtgtatgagtattttctatttcactaagctcacacaatttggtgaccagtgcatggtagacctcctacaaactttgaacatttttttctaaaaattaaaaagatacttttgtctatttgaaatcaatgaaaagtaaaaagacattgttttctttttcat

SEQ ID NO: 851394 - DNA, 599 bp, Homo sapiens
atacagtgctatgattgggttcaccctagcttgattacagggaaattttacattgaaagaggcaggtgaagaggattagaggctattgcccacctagcactctgcctgtagagcagatatgtttctttgagagaaatgggctgctgtccttgcctccagctctggagctgcaacatagagcttccaccctggggagaggtaggccatgaaaacatatggcactttagctctccctaaggggactcactttactgggacaaatatgtaaaaaagagtgctgccagttttagtcaaacaatacaattttaaataatggatattttggcaataagaaattaagaggaggctgatagcttcttgagaacaacagctaaatttcaaaccagctaataatttatcagagagaataagggaaagagtcagaaataagaagagccctgctggggtcagagcaagcctcaaagactggcctccatgacaatctmtccaaaggggtctacattttattgtttgaaatgtggatcagtttataccttagtgtattgttaagaatagtagagaaataagattgcacttagtagatgctaagagctggatat

SEQ ID NO: 851395 - DNA, 577 bp, Homo sapiens
atgcatatatttttaccatcagtaggtacaactacaaattttctaaacaaattgagcaaatgtatttatttccaccagcattatatggaatttccagtggtgcctcattcttatcaacatttagctgtgyggacattttaaaatgtgtctcttctggtgagtatgtaaatgtatctcattatggttttaatttgcatcatcttgatgataagtgatgttgaacacattttatgtttatttgatatttgattgtttgaaaagtgtctttttgagtatattgtctgtttcattaaattgtctcacttgccttttttaaaaatgtgagaattattatttatgctgtatatcaatcctttgttaaatatctgtttggcaaatattcttcctcccactctatgattctgacatctttgctttatcagaaacccatcaggagctttttgataccacactttttaagagccttgacaggtggctagtaattgatatggtaaactaatattggaaaagttttaatggtaggtagtgaagtttggtctgtcatacttcccagatagccatttctttataggacctt

SEQ ID NO: 851396 - DNA, 634 bp, Homo sapiens
gttagtgattctgctatttataatggccctaagcacagtattaaagtgttgtcgttatgtacaagaaggctatgatgagtcttrtgtacttttttaccttctaaaattaaaaaaataataatttaaaagaatcatttacagttgaaatgcaaaaatacaatctctagaaatactgtcatgaagtgtaaagggtttcgctttaaaaccttttttaaaacttatgaaatataactcatttgagagagcgtattatagatatattgccacttaataaatgatgagtaatgcatctgtgtaatactgccttgttctagaaatagagatttgtcaggcctcaagaggacttcaagatctacttccagtcaaatcttctctggccctgctaaactaaaccttgtcttaattctcatagtcataatttttggtagacatcactaatgtcttataaagtaacaaagttagtgttttgtaagtaacaaaattattccagcaacatatgaaagaaaatgtcgactcagcaattcattactgaggctgatacctaataaataactgaggcaaacattggtttttgtttgaggacaaagttatttcacttcttattttattttatttatttttattttattttatt

SEQ ID NO: 851397 - DNA, 619 bp, Homo sapiens
aacagaaatttattccctcccatctttggaggctacatgtccaaattcaaggaattggcaaggcygtgcttcctctgaagcctcaagtagaaagtctttcttccagcttctggtagcactagatgtcccttggtttgtggtagcttaactacaatttattcctccattcttacatggtctgtgtgtttctgtgtcttcatgtgacattctgctctatgtgtgtgtgtctctttccttttcttgtgaggacagcactaatattggattaagagcccaccttactccagtatgaccccatcttaattattaacatcggcagtgacactacagtgatgtttcatttagtgatagggatacattcttagaaatacagtattaggtgatttttgtcattgtgtgaacatgttaagttcagtatacagtaacagcattagatagggtagttaaagaaggcttctctaagaaagtagcacttaaattgaatacttgaataatgatgacaagacatccatgaaaaagaatgattgtgggtatgggggagaatgattcactcaagagaacagcataaacaaacagaatcaaatactccaatatgtgaaagatgagcagtgtggataga

SEQ ID NO: 851398 - DNA, 596 bp, Homo sapiens
gaacatgccatcttgtgctgcatacgggactttgcaggagtgatgaaggacctggagctggagagatgatccttgcccaatctaatcaagggaaattcatgaaggtgagaagaggtggtaccagaaacaaagtcagattggtgtgaggctgctgactttgacagtggaagaaggggctggaccagagcccagaaacggggctgcttctagacaccaccagcaaaggccaggaaataggtaccccctagagcctccgaggaaccagctctgcagggtttagtccagggagatccattttgagcttctgaccctcagaactgtcagatgacacattcatgctgttttaagacactaaatctctggtgatttgggacagcagccataagacaccaatacaggtgctctatgggagttcctattaactcgatagagtgtgtttagtgggagaagaccctgatctgagaaaacgcaggtgatatggttttgctgtgtccccacccaaatctcaccttgaattgtagctcccataattcccacgtgttgtgggagggaccyggtgggaggtaattgaatcatgggggtggatctttcccatg

SEQ ID NO: 851399 - DNA, 675 bp, Homo sapiens
taacctgtaaaccaagaaaaaaatcccaatggttttgaggcccaggagtgaggtggtagagtggtgttctaraaagagcagcagagagagaagagagagagcaacttggacagtgagaagaaggcagggaaaagtgacttgtaaggaggagacagccaagcccaccggaaaaaagatgggggttgcttccagcccattccacagaccagctacctaatgcttaggaaaatgttagcttcagaagttatgaaatttgaaattaacaaatgcaaaattgagctgccattcataaatacaaaacttaagtgattttgaaagtgcattaagaagcaaatcaacaattacaattggccaaaatgtcacataccaaaaatttctcagtggcttcttgtccaacagcatgacaaatatcaccaaaatttgcagcacaaaccttaaaaaggcaaaaggcatatccattattcttatctttctttttgtcttaacaaattgtaaaaactaacaagcaggaactttgagagcaattaccccgctagtcaggcagctaacgagcctttcccaagcccatcgcccatacagcacaacgccagatgcctccattgcatcaaaaacagaagatttacaataaggtgccaaattctaagattttctggctcctaattgatcttgatacag

SEQ ID NO: 851400 - DNA, 524 bp, Homo sapiens
aaattatagtacaaggctatagtaaccaaaacaccacgrtaatagtataaaagcaaaccactgcaacagaatagagaacccagaaataaagccaaatacttacaaccaactgatctttcacaatgcatacaaaacatacactggagaaaggatattctattcaataaatggtgctgggaaaactggctagctacatggagaagaacgaaactggatccttatctctccctttatacaaaaatctactcaagattttaaatctaagacctgaaaccataaacattatagaagaaaatctaggaaaaactctttctggacactggtgtaggcaaagaatttatgactaagaccccaaaagcaaatttaacaaaaaccaatataaataaatgcgatctaattaaactaaaaagcttctgcacagcaaaagaaatagtcatcaaagagacaactcacagaatgggagaaaatatttgcgaaccatgcatccaacaaagaactaatatccagaatctacaaggaactca

SEQ ID NO: 851401 - DNA, 587 bp, Homo sapiens
actctcatgcctggtgtcatggctggcggggctggaaaactgggagctggctgggcacccctctctctctccctgccccacaatgacctcccaactattcctctttccatcagagttgtcagatctctttacatgccacctctaagaacccaaaagagtaaaggcagaagctaccaggcctctcactgcctagcccaagactggagtagtatcagacaaatcccaggccagcccagaattaaggggagaggaaatagactcctcttccaatgggaagagtggcatgtacacacagggacaggaggaattgttggtagctgtgggaggctacataatgccccccaaaatgtctaggtccaaatccctgttccctgtgaatatgtcaccttatgtagcaaaacggacttcacagatgtgcttaagaaccctgagatggagagatgatctgggttatccagctgggycctgaatgttcaagggtcttaacaagaaggaggcagagagagatctcactacagaaggaagaaggcaatgtgacaatggaagcagagagaggctggaggatgctgctctgctggcctggaaga

SEQ ID NO: 851402 - DNA, 578 bp, Homo sapiens
gtctgcatgtgcatccacgtatgtgtgcayacctatgtgtgcgtgtgtgcatgtatgcctgtgtgtgtgtttgcacctgtgtgtatatgtgtgtgtgtatttgggctggggagtattaaactagatgaggtgtggtgagcagctggtgcacggctgtgcagtgggcatctcaggtgtggtacatcaacagcagctcctctgacctctgtctctaaagccagctcttcccacactcttcccaagctcagcacatagaagtttgctaaggctgggaaactagaagttatctcacaccccacacccttctggcaagcaaatcctcatcagttctgtctcaaatctctccagaatccacaagcttctcacctgctcagagccccaagaggagggtccgggccaccccaccaggcaagctgcccagaccagcagaagtacgggccagagacagggtgtctagaggggccgtggaggagggagaaggtcagtgtcaaggggcagcctcagggacaacagctcccctcaccacccatctcccaagaaagccctaaaaacgagggctctgcatccaggcagggtgg

SEQ ID NO: 851403 - DNA, 497 bp, Homo sapiens
gggagtattaaactagatgaggtgtggtgagcagctggtgcacggctgtgcagtgggcatctcaggtgtggtacatcaacagcagctcctctgacctctgtctctaaagccagctcttcccacactcttcccaagctcagcacatagaagtttgctaaggctgggaaactagaagttatctcacaccccacacccttctggcaagcaaatcctcatcagttctgtctcaaatctctccagaatccacaagcttctcacctgctcagagccccaagaggagggtccgggccaccccaccaggcaagctgcccagaccagcagaagtacgggccagagacagggtgtctagaggggccgtggaggagggagaaggtcagtgtcaaggggcagcctcagggacaacagctcccctcaccacccatctcccaagaaagccctaaaaacgagggctcygcatccaggcagggtgggatccaagaggtggtgaagggagaact

SEQ ID NO: 851404 - DNA, 506 bp, Homo sapiens
aggtcatgagatcagagccctgaaggatgacattagttcttttatactaataaaaaaggcccaagggagcttgtttgccccttccaccaagtaagaacatagcaagaagatgccttcagtgaagtggaaagcaagacctcactgaatgacaaatgtgctgtcaccttgatctttggcttcctcacttctaaatctataagaaataaaattctgtggtttataagccacttggtttatggtagtcttgttataacagcctgaatgaactgacaccactaaacctgccctacaaaacatgctaaaagaagttctttaacctgaaataaaaagaaacgaataggcagcatgaacagatatgaaatataaaactcgcaaaaatgtacatatataatcaaatacagaatactctactactgtaataatggtgcataaattaattttaacyatattataaaagttgaaagacaaaagtagtaaacgtaactataactataataatttgttaa

SEQ ID NO: 851405 - DNA, 522 bp, Homo sapiens
ttccatgatggagcatctctcagctttagtcatgattatatgttagctagccatgtacaagcttttcacaaaattaattatgccaacaggcactgaagtagccatgcttttccatacagactagaatcattyttgtgttttcgcaatgcccatcaagttctgctataaaatgaggaagcctctttcccgggaagcctcctttcttcattcatatcactcactatcaaatggaagagatgtcattgttgattaagtgcaggtattgagagcgatgctaggatagaaccttctagtccatggcatggcagagaatggtgggaagaactatgaaaagtaagaataacctgcatctctctgaataaaccgcttgatatatctgcatttacttctttgttttcatcaagggtgtttcataatgtttttgtcctaatctccttaagaaacaacagtactaaaatattatttaagaaattcattctatgtctcgaatatgcttaataaagtgggggagagggagttatg

SEQ ID NO: 851406 - DNA, 539 bp, Homo sapiens
tcggtgggtccaccagacacggaagccacatctgcactgtctcaagaacatccatggcatgtgagcctagaaagaattcccaactggacagaacgccagtgggaaaggcccgctgatgggtgcagggcgccatctgcagcagccaggaagatgcctgccttggtgaggatgaacctctcacacgctggcctcttggatttcctccctgggagaaggacagcagcccctctggctactgcctttcttgggtccatgagtttccagtattttaaggtctaactctcaacccatctttaatatgtctgcagccttgccccaagctgagaccctagcaatgcctggtccagtccaacctggagctcacacacctatttctggggctacactcatctccaccccttggacaaggctccagttttggcagtgttctgggaatgcayacagatccacatgtggccatccaatgccccggatggccatcctgcatccctctctctcctcccaccaccatcatgtgacctaccacttctgtttttggg

SEQ ID NO: 851407 - DNA, 626 bp, Homo sapiens
cactcacccctgtagttcccaggaagagttctgtgtgctttgactcttatgaaaagaaatagccggcacttcattaaacacatgagagaagcacaatccattcccgkgtttgagactgtctatatgtttttgtgcttccccaagtaggctgaccttctagctctgctctttctgacaaatacttcaatgagttggcattcaccaagggggtgtgtatgtgtgtgtctgcacacacatgtgtgtcaaggaatgcaagatcccactgaagagtctgttggatctaactggcaaattaccctgagaggaggagaaacaggtggggggtggggtggggggctgtaaaaggttcctagtgctttttacacatcagatgcatcagcaaacactcgcttctggggccacccagactgcgctgtgctcaccagagcagatgacaggttgcaggtctgccctgcaggtcaggaggatgcaaggagttgtggtgacagagaactgagggacaggcaaggtgctctgggcaggcgctgtgagcggggattagggggatcagggaggctttgtggaagagatggtacttgagctggggccttaaaggacggcaggactcgaggatgcaggaggtgata

SEQ ID NO: 851408 - DNA, 356 bp, Homo sapiens
ctgttttccccaagggtggcctgtcccctggggaccagctgggtatcactctccggcagaccagactcccagagccttgccatccctgcccccaaagcctcctggctctctgtcccaggaacaataataagcccccacatcctaagactctatgtaggcaccaaaggaggctgatctcacttaatcctcccaacaatctcctgaggtgagtgaatccactcatttattttatatccgacctatcttgctggtgacacgaacagttaagkgtcttgcacaaggtcacagttaatggatgctgggattttcttcctggctggatccagacatcacaaactcacataccacccaccacc

SEQ ID NO: 851409 - DNA, 600 bp, Homo sapiens
gctgggattacaggcatgtgccaccacgcccggctaattttgcatttttagtagagacgggggtttcgccacactggtcaggctggtctcgaactcctgacctcaggtgatccgcccgcctcggcctcacagggtgctgggattacaggcgtgagccaccgcgcccggctgcaggtgggtatttctttaaggactaggcgagaggccttccgctccgagaagaacactcacagaacagtggcctttcctggtcacggcgaatgcacctaggacaaatcgcacagctggtttccaggccccgcccccacctgtagactccgcctctgggtccgccactctcccgtcaggcgccgcgcgcgctcattgccccgcccctcaggctttgccccgccccttacggcgccggagagatggcggagttggacatcgggcagcactgccaggtggagcattgccggcagcgaggtgatccggsagcttccagcccccatccccggccgcgggagaccagggctccgctttggctccgcggatggtggcggcgggtgaagggaggccacaaggctgggcagggcctgaggagcggggtgggagcgtttc

SEQ ID NO: 851410 - DNA, 643 bp, Homo sapiens
ccctcaatacctggggattacagttcaggatgaggtttgggtgaggacacaaagcttaaccatatcaawgcatattcagattgtttctgtttttattagtgtctttgtattacctctttttcccttgaattcatttgggatagaagtctaaaagtagaatcaccagatacagaagtatgaattattttatagctctttttttttttttttttttttttttgagatggagtctcactctgtcacccaggttggagtgcagtggtgcaatctcggctcactgcaacctctgcctccagggttcgagtctcctgcctcagcctcccgagtagctgggattacaggtgtgcgccaccacacccggctaattttttttgtatttttagtagaggcggagtttcaccttgttgcccaggctggtctcaaactcctgacctcaggtgatccaccctccaaagtgttgggattacaggcgtgagccaccgtgcccggcccaattttatagctcttcttagtgccctttccagatagattgaattgatgccataccaatatagtgttaagtaacttgcttctccctcaggagtctcaccagactcaatttaaatatttttaatgttgagatgtatcatttctcaagaccgtt

SEQ ID NO: 851411 - DNA, 591 bp, Homo sapiens
tacagtaagaatacagtactatactcttctgggaccatcgttgtatatgtggtctggtgttgactgctacatggcacatgactgtatcttcataaaggcttgtatccagaatatatagagaactcttacaacctaataagagacaaatgacctaataaaaaatgggcacagccaggctcagtggctcaacacctgtaagctcaacactttgggaggctgaggcaagaggattacttgaggccaggagttcaagacagcctgggcaacataatgagacctcatctctacttaaaaaaattttttaattagcagtcttggtggcgtacacctatagtcccagctacttgggaggctgaggtgggaggatcgcttgagcccaggggttcaaggctgcactgagctatgatcacatcactgtactccagcctgggtagcagagaaagaccttgtctctcttaaaaaaaataaatraataatgaacagatacaatctatgaaagtatcttataaagttaaatcatacttataaaataatttacttataaaccatacttataaagttaccatacaatccacacatttcactcctagg

SEQ ID NO: 851412 - DNA, 481 bp, Homo sapiens
ctgtcctgggcctgaggggatcccactggcctgaaaggtgagtcccaggccaggcaccattgggacttaagggcacatcagtggtagtctggaagtactgttagtggcctgggatggtggtggctatgaggtgaggctcctctgcctttggaaaaaggaggaaagagtgggaaggcctgcatcttgtggtttcagcgccagctcagcagcaataaaacagagcactaagatagacttctaaggtttcgactctagtcgctgactccctggtggcaccactggacccatgcagggcctggggaacctcaccaccccaaagggatgaacacagccctggctggctctgctgattgcagcgccccagtgccttgagcacacatagacagtagccagaaattgcttacarcaggttttgggtgagaccagcgctgtgctggcttcaagtctgatccagtgcagtcatagtggaagtggtcacaag

SEQ ID NO: 851413 - DNA, 525 bp, Homo sapiens
tgtgctgtttggtgatgagcaggtggagaagtagttggatcccatgggagatggactggcctcctcttcttgggttgactgcagcttgttggaggtgtggataargcacttagtgtctttgctccttcattagtatgagggtagcaagggaagtttcactgcagaggtggtggcagagaggctttcagttccccaggagctctgttcaaggagttgcagagctgctaatggctcgataacccggcaagggatgactagaggccaaggcctggaggatctgcctggtgaagagttatgggaatgggcacccatgcaacagtctgtccacttttgttgtatgccttgtgtaatatgctggggttctactccagtccatagtcgccttgaatattgcagtacctggaggtattaacagtgaaggctgtgaaacagtcaaggtgtcggccttccctttcctctgggacctctgtttcatggatgtatgaacatgttgctgatctaaacacacttgtaggaggtggatgg

SEQ ID NO: 851414 - DNA, 393 bp, Homo sapiens
ctaagaaaaaaagaacaaaactggaggaatcacattacctgacttcaaattatactacagagctacagtaactaaaacggtatrgtactgatataaaatcagtcacatagaccaatggaacagaataaagaactcagaaacaagtgcacacacctacagtgaactcattttcaaaaaaagtgcaaagaacatacactggggaaatgacacttgctttattaaatggtcctaggaaaactggatatccatatgcagaagaatgaatctatctagacacatgtctctcaccatatacaaaaatgaagtcaaagttgattaaatatttaaatctaagaccgcaaactatgaaactattacaagaaaactttggggaaaatctccaggacactagtt

SEQ ID NO: 851415 - DNA, 475 bp, Homo sapiens
ctgccatttttaaataacagcaactaattcaaatgtttttaaaaatacactctgggcaaaacagtttgcctgcrggccctatctgtcccgtaggcagtggccagtttacaacctctgacctccctgttggtgtaaaaaagtgagaagaaaaaaggaggatgcaaaagaagtgtaagaacttgtctctgcctcccctgaccttacaacttatttgggagaaaaaagagggacccacatgaaaaaattaaatcttgacccaaatcggtgttgagtaagtgccaagacaagtggtatttctcttttatttttatttttttgagatggagtctcactctatcgcccaggctggagtgcagtggcacaatcttggctcactgcaacctctgcctcccgggttcaagcgattctcctgcctcagcctcccgagtagctgggactacaggtgcatgccgccacgcctggctaattttttgta

SEQ ID NO: 851416 - DNA, 641 bp, Homo sapiens
tctacagagactgtttttcaaaataaggtaatatttacaagttctaagaattaggatgtggatatctttgggggaccatgagtagatattattattctcattttaccatgagggaacttcaagtcatgtgcccaaggacaaatggctaacaaggggtagaggcgggatttgaacccagctctgtccacctcagaagctcattcttttttctttatacattgtcacctacagaggctggagaaaagatctgaaacctggccgagtgcggtgggtcacgcctgtaatctcagccctttgggaggcagaggtgggcggatcacctgaggtcgggagttcgagaccagcctgaccaacatggtgaaaccccgtctctactaaaaatagcagggcgtggtggcacatgcctgtaatcccactactcaggaggctggggcaggagaatcgcttgaacctgggaggcggaggttgcagtgagccaagatggtgccattgcagtccagcctgggcaacaagagtgaaactctgtctcaaacaaaaaaaaaaaaaaaaaaaaagaaaagaaatctgaaactcagccgccgagtggkgcctactgcaagaaaactacaaatccaggcgtattctaagcactgtctgtaaaa

SEQ ID NO: 851417 - DNA, 599 bp, Homo sapiens
tgtatccttgaagacaggaattcttttcaggacaaccccctttcaactgcatgtccatmttctttcctctaaataatcattcccattccttcacatctcttgctctgctttccttccttttacttttacaattctaatttttaaaataagtaatccacacatatgggtccaaattcagaggtacaaataaatatgggatgaaaattcccctcccatccatgcccctcagctagccaattcacctccccagaggcaaacaaagacactagtatctcaggtattcttccagaaatattttatatcatgcctttggggcaaccttccttggggataatacctgcagctaccattatagaaatgcggctcatgacaggtgaaattaggcagtggtaatgaaagttgaagatcaagttcatggacaggatcggcaatatgaagtggttcattcatgatctctgtgcatttcctttctttagtgggaatttacgaaaaggatttttttaaggtagaagtattggtattcatttacttattcactcaagacaattctacatgtgccgacactatggggatgcaatgggccctgatgattagcagct

SEQ ID NO: 851418 - DNA, 646 bp, Homo sapiens
ccagaaggctgaggtgggaggattgcttaagcccaaggaagtcgaggctgcagtgagccatgattgtgccactgcactctagcctgggcgacagagtgagaccttgtcacaaaaaaaagaaagaaagaaagaaagaaatgacactatctttttgaatcagtcagccctgtcccctattcaaaaacgttaacaatttcatttattcattctccaaacatttattaaatacctaatttttgcaaagcactgacaaacatgttacaaaaagtcagtatgtcctcaaagaattcttcattctgaatttcaaaatacctgaatctatgaattcattcaacaaatattttgaataggcccccacgctgcatgctgggacttctattgcaaacgagacaaagttcctgctctcaaggaagttagaataaaaaggaggaaacagataagaaactgatatcattaaactttatgtgcaccaattaactatttttttaattttttgtatttttcatgcctctgggacaagttcaaggccaattaactattaaaaacagatgctaaaarggtatctaatgtagaagcctgtatagacaaaataggcaagctgtgctcaaccattcacttctttcaaaatgctgaatggcagctttgt

SEQ ID NO: 851419 - DNA, 546 bp, Homo sapiens
aactgtaaaacatttaaaaatctttttgactcttttacaataacacttaaaacacaaatacattgtatggttgtacaaaaatatgttctttctttatatccttattctagaagccattttctgwttttaaattatttatttattttcacttcttacactttttaaaaatatgaagacacaaatacacacattagcctagacctacacaggatcaggatcatcaatatcactgtctcctgcctcctcatcttgtcccactggaaggtgttcaggggcaataacacacatggagctgtcacctcctatgataacaatgccttcttctggatacctcctgaatgacctgccagaggctgtttacagttaacttaaaaagaaaacataaatataaggagtacatgctaaaagaatgaaaaagagcataatataataaatacataaacctgtaacatagtcatccatcatgatcatcaagtattatgtgctgtacatagttgtatgtactatatttttatatgactggcagcacagtaggcttacttacac

SEQ ID NO: 851420 - DNA, 560 bp, Homo sapiens
tttccagtgaggaagcggaggcataaagargttcactttcttgctcaaacccatccatccactaaaaggtggggccaggatttgaacctcagcattttgggcttcaaaattggcactcttaacccttacactatgctgcctctaataagactttaaacataatcacagaaattaatattggtgattctaaattattacctcacttattatttacaaaactgaatgctaaaaaaatttttgttccaaatgatatgctgcaaaacccaagagaaagatgataaagacaaaggaagtagagtaactcatcttttaagcaaagatactaaacacatgcttaaaataaaaaataaaaaataattgttttgactttgaaattgatgattacatgaatataggcttaagcatattctcaaagaaaacaaagtttactgtaaccactcataaaatatttaaaagaatatctagctataattcagatcaaatatctatgaaagacatctaaaaacaccggataaagacataagctaaaataagagaatctctagctaacatattatgac

SEQ ID NO: 851421 - DNA, 554 bp, Homo sapiens
gcgtttcctacccccaagattaggttatggcctccttgccagtttaatgtgtttatagtttgcaccttgtacttttttttttgtagtgcagttttcrtttatacacttgattatttttctctctcccccatcccaacttgactatagttgctgttactgccaggaccaagtctattttaattactgatgtcaacctctgtcaacagtattttgtactcagaatgctcaattcctagtggaaggaatgaatgggctgtgagggaatagtatctacagaagcatgagctctgaaagggcttggctttttctaggaatttgtatattgttacagtgtgacagtagagaatagatggttgcattttattaagcagacatacctcttaattccacactgcaaaaaaacttgttagactactatcttcacacagatgaatgcccattctccctaaggaaagattgtaggaaggaagaccttctctgctgctcactgttgatagtgagaatgtagtggatacagcacagctttgggctcccaactattttggcctctgctg

SEQ ID NO: 851422 - DNA, 570 bp, Homo sapiens
gtgcaggctcctagttaagcccgctcccactagctactctccaacaagttaaagatatgctgtttgagcacaaaggagattgatttaaaccgctattgctatagattacacctatgatgtactgcctccctttcagtgttttcaccctgaacatctgctttttagatctaagtgattacactcaataaacagtgtggagaccagagctcagcgccttttgcagcctccattatgcaactggccccgactcccaccttcatgaactcttaacctgtacctgtctcttctcattcctttgtcgccaccgaacttcaggtaccctacgggtggtgttgaggctggtccccaacacaaaaggaggtggctgaatttggccctgggccatagttcacctatccttcctcaaaaataatacaatatgggaatatgtcaataattayaaaactgggcatggtggtgtacacctgtagtctcagctactccagaggctaaagcaggagaactgcttgagcccaggagttcaagatcagcctggacaacatggtgagacctcatttcttaaaaataaat

SEQ ID NO: 851423 - DNA, 628 bp, Homo sapiens
ccagctatctgctaaactccagatgttgctgtgaaggtattctgtagatgtgattaatatttataatcggctgactataaggaaagcagattattccccataatgtgggaaggtcccattcattcagctgaagaccttaaaagcaaaaactgaggcttcgcagaaaagaagaaattctgccttaaggctgtaacagaaatcctccctaagtttccagcctgccctacagatttcatactcaagacagcaacatcaattcttacctgaatttccagcctgccaacctgcccccacaaatttcaaacttgccatcccctacattagctaatcttttaaagtaaatctatccacactctattactctctctccctcccgccccaccctattccctctctcaccgtctctctatgtaagtacagctgacccttgaacaacacaggcttgaactacacaggtccatttatattcgtatttttttcaatgaatacagtcggcccttcatattgtggattctatacccgcaaccaaacrcacatcaaaaatatggtacttgaggaatgcaaaacccaagtatacaaaaggctgacttttcatatctgagtgttctgcagggttgactgcaggact

SEQ ID NO: 851424 - DNA, 669 bp, Homo sapiens
ttttattaaaaaaaaaaatttaaatagtttctgggttgcactgagagaaaatatcttgtggtaattcttaagaaattaactaaatacactaattttagattggtagtctccaacaacaaaaaagtaacctttcctatttgaaagaaaaaaagaaagggaatcaactggagaaaatagaggaagaaacatttctagaatattaactaaatccttaaagtaaagtggtttaatttatatgtcaggcttaaagaggagaaactgggtaaaggcaggcacaatagcaaggcccatgaaactctgaaaacaaaacacatttatggagacaaaatgtatcccaactcaggctgggtgcggtggctcacacctgtaatctcagcactttgggaggccaaggtgagcggatcagttgaagccaggagtttgagaccagcctggccaacatggtgaaatcccatgtctactaacatacaaaaaaattagctgaatgtggtggtgcatgcctgtaattccaactactcaggaggctgaggcacaaaaatttcttgaacccaggaggtggaggttgcagtgagctgggatcgtgccactgtactccagactggatgacaaagcgagactctctctctgagggggaaaaaaaaggatcckaactcagaagtagaaaacatg

SEQ ID NO: 851425 - DNA, 524 bp, Homo sapiens
ttatcagtcaaatgctgtcctgagggctgcttgcctgcaatgtcctccccaggatctgggatgtccttcatcattctggggaattgccattttctttcttgaattaaagctcacagagttggtctttatgtacttgcttgctatttccaaatgactgaggcatgctaaaagcctgtaatctgccatcttggaaaaaaatccttgcatccttaagagaaatggcacttggtgttgatacatggtgtttctacgttgctgaattcactttgaaaatatatgtatattttaaaatctacatttatatgtgagactggtgtaaaaatatcctactgtatttgtgcaattttggaatcagttatattaatgtactcaatgagttgggaatttttcttttttactattatccaaaaaaattataaaagacataattgttgctttcttacagatttagtaaaaacctcatcgtgtccttttrtggagagatggtgaaaaatatttttactgtaaatgtaatttgcgtattt

SEQ ID NO: 851426 - DNA, 478 bp, Homo sapiens
aagcgattctcctgcctcagcctcccaagtagctgggattacaggcatacactaccacgcctrgctaattttgtatttttagtggagatggggtttctccgtgttggtcaggcttgtgggcaaaagaaagagagatcagactgttactgtttctacatagaaagaagtagacataagagactccattttgttctgtactaagaaaaattcttctgccttgagatgctgtgctggcagaaacatgtgctgtgttgactcaaggtttaatggatttagggctatgcaggatgtgctttgttaaacaaatgcttgaaggcagcatacttgttaaaagtcatcaccactccctaatctcaagtacccagggacacaaaacactgaggaaggctgcaggaacctctgcctaggaaagccaggtattgtccaaggtttctccccaggtgatagtctgaaatatggcttcctgggaagggaaaga

SEQ ID NO: 851427 - DNA, 478 bp, Homo sapiens
aagcgattctcctgcctcagcctcccaagtagctgggattacaggcatacactaccacgcctggctarttttgtatttttagtggagatggggtttctccgtgttggtcaggcttgtgggcaaaagaaagagagatcagactgttactgtttctacatagaaagaagtagacataagagactccattttgttctgtactaagaaaaattcttctgccttgagatgctgtgctggcagaaacatgtgctgtgttgactcaaggtttaatggatttagggctatgcaggatgtgctttgttaaacaaatgcttgaaggcagcatacttgttaaaagtcatcaccactccctaatctcaagtacccagggacacaaaacactgaggaaggctgcaggaacctctgcctaggaaagccaggtattgtccaaggtttctccccaggtgatagtctgaaatatggcttcctgggaagggaaaga

SEQ ID NO: 851428 - DNA, 514 bp, Homo sapiens
ctacaagttactatgctaaaacatttttttaattaaaagtaatgtatatcacagattttacaacactcaaggaattctttaatataattaagagaaactacaaaactccaattaagacacttgaggccgggtgtggtggctcacacctgtaatcccagcactttgggaggccaaggcgggagaatcacttgaggccaggaattcgagcccagcctggccaacgtggcgaaaccccgtctctacaaaaaaaaaaaaaaaaaaaaaaaaaaaaattagccaggcgtggtggcacatgcctgtaatcccagctacctgggaggctgagagcaagcagaggttgcagtaagccaagatggtgccactggactccaacctaagtgacagaggaagaccctgtctcaaaaataaaataaaataaaakaaagacacttgacattcttcaaaaggttaatgtcatgaggaaaaaagtgtggggttttctagagattaaaaaggctaaagagttgtaagaatc

SEQ ID NO: 851429 - DNA, 438 bp, Homo sapiens
ttgctgaagattaaagtatttttaagtctcaccaaaaaggtggaaggagccaacctagacacacaaaaggagctggggttctattcatggtgagtttcttttttttgtttcttccagctctaacgtgggtacccaactgcgtggcttttcggtgagcccccaatataaaatgtaataattttttttctattcttaggctttatctaccaagaaatgaattggataatccacataaacaaaaagcttggaaaatttatccaccagaatttgccgtggagatactttttggtaagaaatgacttccagtgatgttgtagctggatccgattaagtayagctcccccttccccttctgggaaagaattatgttctttccaaccttgccacatattcatatatcctaaatcttccttgatgatatatttatatatgtttata

SEQ ID NO: 851430 - DNA, 569 bp, Homo sapiens
caaatgatcgaattaaactctgaccagcaagtctcggggcgataatccaggctcaagcatcagagagcttgcctcwtgacctgttgaatcataacatctgctgtgagtatctgctgttaactctggggtaagtcagcatcacatcaggttctacaccaatcccatccatgccaggagagaagcagctgctatggtgcgtaacagggcaccggatgattattatttcagatgaaatagacatctaatatactgcttaaacaattgcattccggcctggaaaatctacctgctgatttcactgccaggcaaggcgtcctcagaggcagctgccgctttccacaatagcactggtgatttcatgaaattgcatctcctgattttattcccacttaaacttcacttgctcatgccagtgacggtggagagacaattgtcgcctcctaccccaccttcagcttagtcatctcaagtgatttacttgtatatgcgtaatcaccctcttctcaaaatgaaataaaataggaaatctggattctattgttgaagtgtctccttactacctcgccctt

SEQ ID NO: 851431 - DNA, 531 bp, Homo sapiens
tgccacaaaattgctgcataacaaaactaccctagagctattggcttatagtcatttatggtcacagatctgtggattggctgatggtcagctgatgggaggcaaggctcagctgagatggctcggctttgcccctcacatctgtctttttcctgagacagactgatgcagaaatgtggtccttgtggcaatggcagagcacagggagcaatacatgaggtctcttgaggcctaggcttggaacctgcacaccgtcagttccaacttacagaatggaagcacgtcatgtggatggactcgtagacaatgggtgagaaaatatctccagccctctttacgggcaaaacaaagccacatggcaaaaggcagctaatacatgacatttactcacttgagcaggcacaccatagttctgtttaagttcaccttcraggttgaccttcatgactcccagttttatcccctccagaccaaagctgtttgggcctggggaagagcttgaacccctattgggccaaaggttctctttca

SEQ ID NO: 851432 - DNA, 531 bp, Homo sapiens
tgccacaaaattgctgcataacaaaactaccctagagctattggcttatagtcatttatggtcacagatctgtggattggctgatggtcagctgatgggaggcaaggctcagctgagatggctcggctttgcccctcacatctgtctttttcctgagacagactgatgcagaaatgtggtccttgtggcaatggcagagcacagggagcaatacatgaggtctcttgaggcctaggcttggaacctgcacaccgtcagttccaacttacagaatggaagcacgtcatgtggatggactcgtagacaatgggtgagaaaatatctccagccctctttacgggcaaaacaaagccacatggcaaaaggcagctaatacatgacatttactcacttgagcaggcacaccatagttctgtttaagttcaccttcgaggttgaccttcatgactcccagttttaycccctccagaccaaagctgtttgggcctggggaagagcttgaacccctattgggccaaaggttctctttca

SEQ ID NO: 851433 - DNA, 624 bp, Homo sapiens
acactcgttaggatggccactgtttacaaaaacagatgataacaattgtaggtgaggatgtggagaaatgggwaccctcatgcagtgttggtgggaatgtaaaatggtaaagccactgtgaaaaacacttgtggaggtttctcaaaaattaaaaaaaatacaattactatatgattcagaagttccacttctgggggtatgcccaaaagaattgaaagtagggtgttgaagaatatttgtattctcatttctatagcagtacgatcaccatagctgaaatatggaagtaaccaacccaagtgtccttcagtggatgactggataggcaaatgtggtaaatacatacaatggaatattgtttagcattaaaaaggaaggaaaaatctggcatttgtaacaacacagatgaactttgaggacattaggctaagtgaaataagccaatcagacaaaggcaaatatataattccatttttatgaggtaattagtcaaaattataaaggcagaaactggaatggtggatgccagagactgaatatctatattcattaaacactaactcctcatttccccttccttccagttttggaagatggaagcagttctagagtggatcgtagtga

SEQ ID NO: 851434 - DNA, 596 bp, Homo sapiens
acagcattaaatgttattgacatatacaagcaaccattaacttataactgattgctattcttaaaatgtatctacatatttcaccttgaagtgactcagcaccaatgtgaagcacctattttaaaatccagagcctgatgttttacccaaatgtattaagttagtgcaaaagtaattgtgttttttgccgttaaaagtaatggcaaaaacctcatagaaatttatctctgtcactaaaatatacatgtttgaaccattattaatactgaagtcaaattttttggagagaaatacattctgaagtgacattcatacaatttaagggtattcattctattaaattcagtttttataaaatagttatattgagtaaaaacaatttactgacataatactgtttggcatacactagattttaagaataaatggatacatgtcctaacctggctctttaaaaaaaaaaaaagaagaaatagggtctcactctgtggcctagsctgaactaaagtgacatgaacaccaatcacctccttcctgggctcaaacaatcctctccctcagcctcccaaataattgggactacaggcatagcacca

SEQ ID NO: 851435 - DNA, 567 bp, Homo sapiens
atccctaggatgcaagattggtacatatgcaaatcaataaatatgatccatcacataaacagaactaaagacaaaaaccacataattatctcaatagacacagaaaaggctttcaatacaattaaacactcattcatattaaatatgctcaataaactagatattgaaggaaaatacctcgaaattaaagagccatctctgacaaacccataacccacatattactaaatggcacaagctggaaacatgccccttgaaaaccagcacaagacaaggatgccttctctcaccactcttattcaacacagtattggaaatcctggacagagcaatcaggcaagagaaagaaataaaaggcatccaaataggaagagaggaagtcaaactatccctgtttgcagacaacataagcctttaactagaaaactccatagtctcagcacaaaagcttcttaagctgatacacaacttcmgcaaagtctcaggatacaaaatcaatgggcaaaatttgctaacattcccataaacaaacaacagtcaagctgagagcaaaatcaggaatgtaat

SEQ ID NO: 851436 - DNA, 567 bp, Homo sapiens
atccctaggatgcaagattggtacatatgcaaatcaataaatatgatccatcacataaacagaactaaagacaaaaaccacataattatctcaatagacacagaaaaggctttcaatacaattaaacactcattcatattaaatatgctcaataaactagatattgaaggaaaatacctcgaaattaaagagccatctctgacaaacccataacccacatattactaaatggcacaagctggaaacatgccccttgaaaaccagcacaagacaaggatgccttctctcaccactcttattcaacacagtattggaaatcctggacagagcaatcaggcaagagaaagaaataaaaggcatccaaataggaagagaggaagtcaaactatccctgtttgcagacaacataagcctttaactagaaaactccatagtctcagcacaaaagcttcttaagctgatacacaacttccgcaaagtctcaggatacaaaatcaatgggcaaaatttgctaacattcccataaacaaacmacagtcaagctgagagcaaaatcaggaatgtaat

SEQ ID NO: 851437 - DNA, 538 bp, Homo sapiens
tttgacaaatcagacaaaaacatgcaattgggaacaatgtcctatttgataaatgrcactaggataataggctagccatatgcagaagattgacattggaccccttccttacaccatatagaaaaatcaactcatgatgaattaaaggcttaaatgtaataatcaaaactgtaaaaaccctggaagacaacctaggtaatactatttaggacacaggaacgtacaaagattttatgatgaagatgtcaaaagcaactgcaacaaaagcaaaaatggacaaatgggacctaattaaactaaagcgcttttgcatagcaaagaaaatgattaatagcgtgaacagacagcctacagaatgggagaatactagacaaagtctagtatccagcatctgtaagaaacttaaataaatttcaagaaaaaaaataaaaaccccaaaagtgcacaaaggatgtaaacaggcactttaaaaaaatgcaaatcaaaattacaatgagataccatctcacaccagttagaatggcaatcattaaaaagt

SEQ ID NO: 851438 - DNA, 538 bp, Homo sapiens
tttgacaaatcagacaaaaacatgcaattgggaacaatgtcctatttgataaatggcactaggataataggctagccatatgcagaagattgacattggaccccttccttacaccatatagaaaaatcaactcatgatgaattaaaggcttaaatgtaataatcaaaactgtaaaaaccctggaagacaacctaggtaatactatttaggacacaggaacgtacaaagattttatgatgaagatgtcaaaagcaactgcaacaaaagcaaaaatggacaaatgggacctaattaaactaaagcgcttttgcatagcaaagaaaatgattaatagcgtgaacagacagcctacagaatgggagaatactagacaaagtctagtatccagcatctgtaagaaacttaaataaatttcaagaaaaaaaataaaaaccccaaaagtgyacaaaggatgtaaacaggcactttaaaaaaatgcaaatcaaaattacaatgagataccatctcacaccagttagaatggcaatcattaaaaagt

SEQ ID NO: 851439 - DNA, 538 bp, Homo sapiens
tttgacaaatcagacaaaaacatgcaattgggaacaatgtcctatttgataaatggcactaggataataggctagccatatgcagaagattgacattggaccccttccttacaccatatagaaaaatcaactcatgatgaattaaaggcttaaatgtaataatcaaaactgtaaaaaccctggaagacaacctaggtaatactatttaggacacaggaacgtacaaagattttatgatgaagatgtcaaaagcaactgcaacaaaagcaaaaatggacaaatgggacctaattaaactaaagcgcttttgcatagcaaagaaaatgattaatagcgtgaacagacagcctacagaatgggagaatactagacaaagtctagtatccagcatctgtaagaaacttaaataaatttcaagaaaaaaaataaaaaccccaaaagtgcrcaaaggatgtaaacaggcactttaaaaaaatgcaaatcaaaattacaatgagataccatctcacaccagttagaatggcaatcattaaaaagt

SEQ ID NO: 851440 - DNA, 538 bp, Homo sapiens
tttgacaaatcagacaaaaacatgcaattgggaacaatgtcctatttgataaatggcactaggataataggctagccatatgcagaagattgacattggaccccttccttacaccatatagaaaaatcaactcatgatgaattaaaggcttaaatgtaataatcaaaactgtaaaaaccctggaagacaacctaggtaatactatttaggacacaggaacgtacaaagattttatgatgaagatgtcaaaagcaactgcaacaaaagcaaaaatggacaaatgggacctaattaaactaaagcgcttttgcatagcaaagaaaatgattaatagcgtgaacagacagcctacagaatgggagaatactagacaaagtctagtatccagcatctgtaagaaacttaaataaatttcaagaaaaaaaataaaaaccccaaaagtgcacaaaggatgtaaacaggcactttaaaaaaatgcaaatcaaaatyacaatgagataccatctcacaccagttagaatggcaatcattaaaaagt

SEQ ID NO: 851441 - DNA, 475 bp, Homo sapiens
  misc_feature 433: n = A,T,C or G
tattcgtggttacaggctatgtatgcgcttttcattgctcatataataggtgrggttagaaatgtaagagcgtaaaagctggattgctcatcctgttaaggtatttttggttctatcagagatggggaagtcagctaatgattgcatatttagaagttggaaagggtcttttccttcataatgggagtggtaggttaagttagcaaagaaatccccttgacttaggcgtatgggtgaagtctaactgccagtcctctctgggatagtgccctattctttgttctcccagagggaacttatgatggatcaaagcattattcctttggcatacctcacaggctttgactacttgccggatggtccaaaggagatgtggccctgtaaatagggctttggccatttgttgagtgttctcaatacccatatgaaaagnttggtggagggtcttaagtattttccactggttggcttcatg

SEQ ID NO: 851442 - DNA, 584 bp, Homo sapiens
ctgcaaactaatctatgctattcttggctatgttccataacaaygtctctcttctttgaccatacagggaaacatgatccatgaccagtcccataaggttttttcagctgttaggaaaataaaacagtcaattattagtcttaaaatgggcacaaaaatacagttcaataaaataaataagatctagtattcaatagcccaatagggtcactatagttaataataatttattgtatattttcaaaagtaactaaaaacgtagaattagaatatcctaacacaaagaagcggtaatgtttgaggtgatgattaccccaattaccctgatttgttcattacactttgcatgtctgtctgtatcaaaaaatcacatgtaccccatgaataagctattatgtacccaaaataattaaaaataattttttaaatgaaaatcaatttaaaatgaaatataatctaatcacaccaacagaattttatcatcatttaattgatttttatattgtctaattctgaaatatcagggtctgaaagtatttcttgtcctttagacaataagagtatttaaaatttttagccagttt

SEQ ID NO: 851443 - DNA, 522 bp, Homo sapiens
tggcctagctaaaatatagtcatgagattttaaaatatttttttaaaggagctcaatgggtaaaggtcagcttaattagaagctaacattcatgatatgtgtgtgtgtgtgtgtgtgtgtgtgtgtgtgtgtgtgtgtgtattaaaaggcctttctatttttttttttctctcctaggatcttgtcttttttgagcaaattttttttcttctcagttgactgaattctgttttattcatttacttctcttgtctctcctttcttttcctaccctttgttgcatgaagggtctaaaatagtttctaatagactggggttccttaaataaattggagaaggtgccactctcccttttaggaagaaacctcttttccttatggaaccccaagagtgtaaacagacaagtccrtctcagatcataaactacttggttttgtattatgttacctgattttttgacaagtaaaacataaattagttattacaacagaggctactcttggatctttaaggaatagtata

SEQ ID NO: 851444 - DNA, 504 bp, Homo sapiens
tataatttttagttgatattatttacttttagtgaggtggccttacagagctcctactatgtgtaatcttccatatgaaagcattataaatgacctgagataatcgtggcttcaaggaacttgtggaatgattagggcaagaaaacacatgaagggcatcatctccacgaggcctccagccttagcccaacagtaattagatgccctccatctaggggcttctatgcatggggataatctcatctgtctgtagttcagcagactggaaacagattctaagaaaagaggaaggtcttgtttgtatgctcagcatctattacagtgactgacatatggtagacagtccattagtgtgtcatgaataaatgagaatgctctagaatgcatggcagcatgtactatctgcatcagcacagattttaaktatcttaagagttaagaggacaggacaattcatagagtgctcagggaaatctactccaaacatgcactctgtaagtttaa

SEQ ID NO: 851445 - DNA, 519 bp, Homo sapiens
agttcaatcaatgcaaactcttaatacctcccaactcaagtatttcccaaggtgtgctctcattaaatgagcttgaaaatgctttgtattttatyggcctcttgggatatcaaaggatctgagaatttctgcagtaaacaaggtttttaatttcattcaacttggcaatttcaaacttataaccaccattcccattgctaattcctgtagaaatttcacacaattaaatgtccccagaaacatagtttgggaactattgttctttgtccccctttcccattacagctgtgtagtggatacccttggtaccccattcagatcctctagggtcttttaaccaactttttttcaccattgcccagctgtgctcttgccattaaaagtttatacctttgaccttcagaggactgaccttgggcctgtaaccagcctcacctgtagagagagtcagaagtgactcagagtttacatctcccttaggatggattctagcccatggctagctggtatgggatacag

SEQ ID NO: 851446 - DNA, 511 bp, Homo sapiens
gggctcagtggctcatgcctgcactcccaatgctttgggaggcctagatgggaggattacttgagcccaggagttcaagaccatgctggacaacatagctataaccctatctctacaactaacaataatgaatgcaaatgtttaggttcctccctagacctgctaagtcagaacatctggagtgaactcaggaaactgtgttttaaaaatccctccagatgattctgatcctcatgaaaatttagaaattagcattttacaccaatgatgctcatccctgtgtatcagaatccctagagagcttaattaaaattggagagtccagattcatgccccagatctattaaaactgtattttcacatagcccttcaggcaattctgataaactcaggattgaaaaccacatatttatacaaaataaattgtactgctttatacgctttcagtgtttgtatatcagaatttatcagacttgatagtttttmtccctctcagagagaaacataatac

SEQ ID NO: 851447 - DNA, 560 bp, Homo sapiens
attctttaacacctccagaagatcactctggctcaccagcaatggatccaaaccaagatgaaatctccaaattgccagaaaaagaatttagaaggttgattattaagccaatcaaggaggcaccagagaaagktgaagcccaacttaaataaataaaaaagatacagaatatgaagggaaaattcttcagtgaaacagacagtacaaataaaaaacgaacacaacttctggaaatgaagaacacacttagagaattgcaaaatgcactggaaagtctcagcaatagaatagaacaagtagaggaaaaaacttcagagctcaaagacaaaactttcaaattagcctaatctgacaaagacaaagaaaaagaattttaaaaaataaacaaatcctccaagaagtttgggattatgttaaacgaccaaacctaagaataattggttttcctgaagaagagaaatctaaaagcttggaaaacatatctgaggaaataatcaagaaaaacttccccagccttgctagagatctagacatccaaatacaaaaggctcaaagaacac

SEQ ID NO: 851448 - DNA, 454 bp, Homo sapiens
gttgtaaggaatataataagaaggaattatattcggctttcccagtaccaaatcagtattagtcagggttttccaaagaaccaatagggtatgtatatagatacataaggygggaaatttttaggggaattagctcagacaattatggtggctgtgaaatcctatgactgccatctgcaaactggagaccctgggatatcagtagcatggcttagtccaagtccaaagacctcagagtcaggaaagctgctggtgtaactgaaaacctcaggacccagggggccactggtataaatcttggagtccaacgctcaatgagcctgaagttctgatgtcaaaggcagcaaaggtctgtctcagctctcagagagagaattcactttctgtattattgtcttcaggtccctggccaattggatgatgcccaacaatactgagggaataccttccccac

SEQ ID NO: 851449 - DNA, 658 bp, Homo sapiens
atcaacagatttttggaagaaggaaaggcaaaataggagtagaaagaacttagaagaaagctcaagtgctgtaggagactagaagaattgtctgatttgctcctatagggcctctgagattcccagaacttaagwtgaggcagagcagatagtaaagtactgagctaaacaaatatggattgattaaaaggctgtatatgcactggctagacttctagatatgttgcagtttattctctgtataaacagatcagtgagtttccaaaagaaaatgccttcagtaccacaaaattaagaaaatattttgaaaacattgattaagccctccgctatttctgcaaactgagccattttccatcatgagatgagaaagtcaaacatgcagtggaaagacaatatgcagggtcatcaaacaatttgaaggaaaatattcaaaccacctccaagatcaacccttgttttatctctgcccattatttgaattagtgtataaatgcaatttttactgaatttttgttaaatataggaaatacagatttatttttcatttttgtgggtagtttttcagaataaagttttaatccaacctttcttcctacttacccccaaatgttgatcaccttgtaagttctcttcatgtggacttttcctgatacca

SEQ ID NO: 851450 - DNA, 522 bp, Homo sapiens
ccaatattcagattcagtaagtccagagaatccaataagatatccatgagaagatctaccccaagacacataatcatcagattctccaaggttgaaatgaaggaagaaatattaagggcagtcagagagaaaggccaggtcacctacaaagggaagcccattagactaacagtagacctctcagcagaaaccctacaagccagaagagactgaaggtcaatgttcaatatttttcaagaaaagaatttccaaccaagaatttcatatccagccaaactaagcttcataagcgaaggagaaataaaagccttttcagacaagcaaatcctgagggattttgtcaccaccagccctgctttgcgagagctcctgaaggaagtattaaacatggaaaggaaaaaccgttaccagccactacaaaaacacactgaagtacacagaccaatgaygctatgaagcaaccacattagcaagtctgcaaaattaaccagctagcatcatgatgacaagaccgaatttaca

SEQ ID NO: 851451 - DNA, 572 bp, Homo sapiens
catgatacctcctgataacacattaaatatgctctaatgataacagctcaaatatattactgtttacttatttcctgcctctacatttagggctaaattatgcctacacctagttttgttatatagtcattctcaaggtgttatcagatactcagatgcctgccaggatttctcctagaggtaccatgctgctgtctgtagtgatgtttccaatgtattcaacagagcactaccttccacagtgcacccactctcaaggtcagacgaggttgctatatattatagcttcttctaagagattcataaattattagcatatgaaaaactgatatttctcacagtaaagaaatcagtttaattttgtttgactccacattaacccatacatatttgaccatgggaccctttagtcatcaacaacttttaacacccatggcactagtatttcagggaacaccttttggaaactgctactccataggatatatttctattcctgttcatttcagatgttgtttttgtaaacattctgtttttkaaacaccatgcagaggtgatctgctttattcccc

SEQ ID NO: 851452 - DNA, 592 bp, Homo sapiens
gccgtcctgttctggcacaatgagtgcatgtgttgagtacccatgatgtcagagaagaaggctrccaaaagcatagactcctacacataaggttgatctaaatttctgtcactctgaacacccaaactgccagcaacatagatcaaccctgaccccgatacagaaatatccctagaaggaataaatcagtcatttggcaaattgactacttttgacctcttccaccctggaaggggcatggatttattttggttggaatagtaacaggtatgagtttacctttccttcactctgggtcccaatcagcaccaaacctgaagacttacagaatgtttgatctgctgacatgggataatgcaaggcatcacttcggtccaagagacccacttttcaccaaaagggatgcagcggtgaacacatggaacccgctgatcctgtcatagactgcaccactcaggaactgcaaagtggataaaatgatggaatgactttgtaaaggtgaagctaaagcaccaatctgaagatgacaccttgcaaggacagagtgccagctttgatgaagctgagtatacactaaattaaaggaacatta

SEQ ID NO: 851453 - DNA, 570 bp, Homo sapiens
aatatattattggtttctgtttcattaataataatttataaaaatggatgaatacatcatctcaaatgaagatatcaattcctgacacaagaggtttctttattcacctttggcwgcttcaaggtttaataatagaaagctaaagaaaccaagaggacagaagacttttatcaccttctaaatttagggctttgaatgataaggactttatgtgtcacaacactaaacaatttcacctacagagtgctacagtgaaattaccacttatttggggtccccgagatagcacatttcatttttaccttgttttattttacctatttcctgggagcaggcttagtcctacaagggaaatacaaaagctcccttcacactatgatatgagaactgtaaatagccctgcctgggaaaactgatcttatccagaaagtttactgggcagacatctgtactgttacattaactatgactacatagaaaagctccagtctaaaatgtgtaaataccatctgaccaaggcctttgggccctcctctctcactaacaccctaggagacgttatcctccaca

SEQ ID NO: 851454 - DNA, 570 bp, Homo sapiens
aatatattattggtttctgtttcattaataataatttataaaaatggatgaatacatcatctcaaatgaagatatcaattcctgacacaagaggtttctttattcacctttggctgmttcaaggtttaataatagaaagctaaagaaaccaagaggacagaagacttttatcaccttctaaatttagggctttgaatgataaggactttatgtgtcacaacactaaacaatttcacctacagagtgctacagtgaaattaccacttatttggggtccccgagatagcacatttcatttttaccttgttttattttacctatttcctgggagcaggcttagtcctacaagggaaatacaaaagctcccttcacactatgatatgagaactgtaaatagccctgcctgggaaaactgatcttatccagaaagtttactgggcagacatctgtactgttacattaactatgactacatagaaaagctccagtctaaaatgtgtaaataccatctgaccaaggcctttgggccctcctctctcactaacaccctaggagacgttatcctccaca

SEQ ID NO: 851455 - DNA, 628 bp, Homo sapiens
tttatatatatatatcctatatcacagataaactaaattaatacttgttgaaacacacaatgttctctatggaaaaatattactgtacaatgactactatagaaaagtatctatctatctatctgtctagtagacaccaccccaccccaaagatattttttatctaagccttggaattcgtgaatatgttaggctacatggaaaaggggaattaagattggattgaattaaggttgctaattcattgaccttaaaatagggagatagaccaggttatccaggtgggcccagtgaaatcacaagagtctgtataaatagagagacagtgtcagagtgacgtgatgttaagaaaaactcgaccttccattgctggctgagaagatgtaagggggccaaaacccaagaaatataggtggactctaaaagttagaaaaggtgagaaattgaatcactttccaaagcttccagaaaggaataccactctgccaacccagtgattatagctcaatgaaacctattttgaacttctaaccaagagaattgtaaaataataaawcatggtattttaagccactaaggttgtagtaatttgtatagcagcaataggaaataaatacatatatgaata

SEQ ID NO: 851456 - DNA, 589 bp, Homo sapiens
ctcgccagccttactaccatccctgacaaactaagattaacaagtaaacatatcatattattttttaaatatgataaatgtatgcaaatcttagttatagaattgaggaattattacatgagaacaggctctctacataagtgaggatatccaaatgattgatccaaattgtcctcagcatcatttatcatttaaaaaatgcacatttatactaaaataaaatagctatacacaccaggagaatgactccatttaacagattgagaataacaagtaccaacaaagatgtggatcaactggaactctcatataatgttcaaggaagttgactataaaattactttgaaaaactctggacaatttttttatacattgaaaataaacctaccttatggccaagcaattatactatctattttttcttgctcaaaaaaactgaaagaatatctacaaaaaggctcataacagctttattcataatagaaaaaaaaactggggttgaaagcaaatttccatgaagagaagaygggtgaacatattatgctgtattcatgcagtggggtattactcagcaatcaagagaataaat

SEQ ID NO: 851457 - DNA, 555 bp, Homo sapiens
attcctatggctgtggccagcttgctggttggctggagctagatgcctgagatggttttactcatgtgtttggaatcttgggggtggggcggggatgactgggccttattctccatgtgggtcttcattatgtgcttcataatagcataatggtctcagattaccaaaagaacaagagttaaaactggaaagttctcttgacactgagactcagaaatcacccaccattatttcactttgttttattgattactgttattcacagggacagttcagattcaagggaagtaaatctaccaaacgatggaagaatcaaaaaagaatttgtaaccttttttaatccacacaattctaacttccattacttatatcatcttttgtaaatttataatcaaagtaaatataatcaaaggtttgtttatatttattttaatatagcatacctataamaataagttcataatgtgataccaaaaattaatgtttggaatttgtttatatcatatatgatttgtagatatactatacttattaaagatgataacatttaatatt

SEQ ID NO: 851458 - DNA, 519 bp, Homo sapiens
aaactattaggaaaatgtggaacttttaaataatatgactctcatacctcattgaagcttttggaatttttttagaagaggkaagagcattaattttatagtcagcaacaacacattgcatgcctcctacaaattgagcatcataatattatctggagagaaataaatatcatgagccctaatctgtaatttctgggaaactacttggctcatgtcttcatttgtcaatacctgtagtccccaaccttaattatatactgttcaataacctgcttacttgcttactttagtatagtgtcttatctaaagtctccatcctctgggtgctaatctatcactggaaacagtttcaaccgtaattttttcactcttgatcacgactcactcatatgacccagtgaaacaaattacagtgttctctttgcattgatttgacttctgggcctttgtaaatcttacttctctaattaggctgtaaaaagaaactgcaatatatagattcatggaatagaatcagga

SEQ ID NO: 851459 - DNA, 611 bp, Homo sapiens
tccactttaaatacatgtgtagcaattatccaagaataattcataatatgcataaataatgaggtaccttctgcagtatcacttcaaatgatgyaatcttcctgtgggatataacactgaaggtaggcaattctgatatgcggagttcaggtttagagttgccagattcagaaatggtgtctgaaaaatttttgttgagaattccatgaatccaagaaagcagagaacagggaatccattgttagtctaaagaaatgacatctaccaatcattgagcacgattttagaaacataatttatatgttttatataatggttattgcatatatgatagtctacaatttacaatagttatttccactttacaaaggaagatattaggtcagaaagattaagtaacttgtgcaaagccacacaattaggaactgctgaaactattaccatcattataattcacagcagcagcagccagaatgagtccaaaatcatgcattttttacttaaatacgagccagttaactatacattttcccataactgatggtatgcatggggcctttatttatcatatatatatatatattttttttttccaattattaaagagtata

SEQ ID NO: 851460 - DNA, 639 bp, Homo sapiens
gtagatatcatccatggcagctcagagttccaagcatgagtattccgggaacaggtagaagttgcatggccttttatgacccagtctcagagtcacacagcatgacttcttccagacttgaytggttgaacttagaattcacttctttgtgggaaaatgttaaaatcacttgaaatacatcttgtataattgaatataaagttgtgaccacctttggaaaatatattctgccagatctcccttctttcctaagtctgaaggagtcaaaaaagctgtgaataggggaagaagagaaatattcatcatgcccttttttccttcccatttcagctttctcagcctggagaggtgatgggagtaggaaagaagatttaaagtcaatgaaatctgaagttcagacatcacacatattagattggatgtatagaaacttgaaaagagatagttcattaactgatggtgatcagacaaattttaagaatgcctgaaattttatccaaggcatgagtgtttgctgtggagtgaacaaatagaattattttctacctacaccctaccatgcccaattctctccacatgggtgtaggtggtctgtgtgcatttgcaatatgccgtaagtgtgcatgacaaataagtcac

SEQ ID NO: 851461 - DNA, 585 bp, Homo sapiens
taaaaaaaaaattacaaattttatctattccctttcctttaaattatattggactgatgctattaaagcagacctccaaattttaaagtcctttagatttcaacctcaaattactaargggtagagtagctatccacttcaaggtctattttatagtctaaactttatttcattctttctctctacaatcaccacccaatgctgtctgattttctttgaaccattcttagatgatctcattcaaatcatgttctttaaatgttctcaattcacctttttctattacaaccctagaagtgtaaggtgttaaaatcaactctgaagctattctagctacgttcactcagcctaataattcctagattatgctatgcttttttaaagcacacaattagcaactcattgggtagtttgaatcaaagaatttcttagaagttatcacatgtaaatccattggcctgcataagtaatccaaactatatcaatatttttttaagttaagaatattttgagattcctattcatgctgttttttgtctcttttcagtcaagtcattatccctaaaatattgttattaacagaca

SEQ ID NO: 851462 - DNA, 601 bp, Homo sapiens
ctctcagtctcaagtgatcctcctacctcagcctcctgagtagttgggaccacaggcatgtaccaccatgtctagctaatttatttttaatttttgtggaaatgggtmtctccctcatttgcccaggctcgtgtcaaattcctggactcaagtgatcctccctcctcggccttccaaaatgctgcgataacagacatgagccactgcacctggcctttttcttttctttcttttttttcttttttttgagacagggtctctgtcacccaggctggagtgcagcggcgtggtcttagctcactggaacctctgcctcccaagctcaagcaatcctcctgcctcagcatccccagtagctgggactacaagcaccgtaccaccacgcccagctaattttttgttttttgtaaaggcggggtctctctgtgttgcctaggctggtctcaaacttctgagctcaagaaagttgcccgccttagcctccaaaattgctgggattacaggcacgagccatggtgcctggccctttgtattcttataaagtgatggaagatgccattttataaagtttaaaatgtagggaaaaaaaaacttatttgga

SEQ ID NO: 851463 - DNA, 604 bp, Homo sapiens
ctttggcgggtggggcttgggggaagactgagaagctgaggaggggtgggttagacatctccataatgcttccttgtccttggatgatttcccattgggagcttggggaaagttcaagttgtcaagaactttaactcttcattctcaaattgttactctatcgataaagaggcaaactggtaagagaaatgaagcgggttccactttcttccgttttccgctctcctgcagagaagaaagatgtatttcaggagatctattgcttggtgtgagagttgcctactagcaagtggtcagcatgcagtgatgctggaaagagtgaagaggaaccacaagttctaagcactaaggcgaagtgccagagagaaagactgaacctcctgcttattcaccccatttagaaaaagctgtcttctcatttatgcagccaccagacacctgaaaaaatgctcatcatcactggtcaccagagaaatgcaaatcamaaccacaatgagataccatctcatgccagttagaatgtggaggatgtggagaaataggaatgcttttacactgttggtgggggtgtaaattagttcaaccattgtggaagacagtgtgg

SEQ ID NO: 851464 - DNA, 642 bp, Homo sapiens
aggctgctagtaggaaaaactgatccagactaatctcagctcgcagagcctctgacccgggctttcctcccacttgccggtctatttccggctgctaattagattgcacagcaagccacrttgggaagccgacctgtcgttccaaaggcactccactcgcatctccaaatgtagcaggtgatttggtaaaagttgattctgactccttcccccagcttctaaaataattgtaagtgtcgggctgtttccaaggtgaactaatgaacagctcatctgctaatagcaggggcaagctggctgaggacggcacgctcgcctgtggattgggtgaaaaggaaagaagtaattggattattaataccaagccgtcaaaataccttttattccttttatattcttctggaaggaaacgacaatctctggaaacataaatacatgttctgtgggggtaagcagggctaagaaaatgtggggctgaaaaggaggagggggttaaaaaggtggaattgtcagtccccactgtggcagtctacactgagaaccagcccacagttaggcgtgaataatgactctgttcaagtcggactttattgcttttggccaaaggccttttgcagaaataactttgtaactccctgccag

SEQ ID NO: 851465 - DNA, 586 bp, Homo sapiens
tggtggatccaggctaggattctctctacgttcacagcagtgggagtgatcaggacgacagtctggggtcctttccaccatgggcacaaagaggctacgttccagtccttgatccacactcgaacacctggggagaaaaggtgaactggggagaataagctaacagggtctctcatttacccaggctgagattgtttgtgtaatttttcctaaagcctgtagctgtcgctgtaactcaatttcacctaactctcaggaagtgcctggaagtccctgcaatatgggagggggcccatgatataatatttcctaaggggaatatcctgttcttttagaaggggtacatctaattttaaataatactatagagagcatgtatccattttaatcctgttttctgacatactttccctaaactatttttgatagtctgattcatctgctctgcctttctggaactctgaggccggtaggcggcatgcagtttccaartgatccccaatacctttgctatcttctgtaccaagtcagccacaaacgttagcccgttatctgagctgatccgtaagggcagtccaaatctagg

SEQ ID NO: 851466 - DNA, 624 bp, Homo sapiens
gtctcagaggtcaggtctgctagagtagactgagtccaacacttctacacagtcatgcttgacagggctctctgatactgggakcaaggtagcagggttcagggtgttacaaactttaatggttatacagggattttcacagagcaaactttggtacttggtgagtctaacattcgttagccaatgatgtcctttagtattcattaatgtcaccacagcatggggagcctttatgttcaggttttgcccaagagtcagcttatctgcttcttgtactagcagggcagttgctgccaaggccctcaaacatgggggccattctttagaaaccccatgtagttgtttagagaggtaggccaccggcctcggccagggccccacagtttgggttaaaactccaactgccatcttttctctctctgacacatacaatgtaaaaggctttgtcagatcgggtagccccagggctggggctgacataagtttttcctttaacttatgaaaggcttgttgttgtcgggattcccattcaaaaagttcctgttccccccactttgtgacctcatacaaaggcttggctaatactgcaaagtttgggatccacagtctgcaaaaccccacagc

SEQ ID NO: 851467 - DNA, 376 bp, Homo sapiens
atctcatctttccattggctgaatgtaagttgaactcycagccttgctgaggttgactgttaaagtgagggcattgactgggaaaaaatgagatcctataagttagaatggggacatgtgggaagattctgatgaaactggagacattgagcccctaaattctaatgggtcttctttgccagtggagaggcctttccattttcagtgaaaggtgcatcccgctctctcaggagttaactctgcatttcctgaggaaactgtaatgacaattgtcctggaaggaagacaatactgattcttctcaggacccaccccctttgcttctaggcctatacctaggctcaagtcccatcaggtccctcaaggtgaggtacag

SEQ ID NO: 851468 - DNA, 376 bp, Homo sapiens
atctcatctttccattggctgaatgtaagttgaactctcagccttgctgaggttgactgttaaagtgagggcattgactgggaaaaaatgagatcctataagttagaatggggacatgtgggaakattctgatgaaactggagacattgagcccctaaattctaatgggtcttctttgccagtggagaggcctttccattttcagtgaaaggtgcatcccgctctctcaggagttaactctgcatttcctgaggaaactgtaatgacaattgtcctggaaggaagacaatactgattcttctcaggacccaccccctttgcttctaggcctatacctaggctcaagtcccatcaggtccctcaaggtgaggtacag

SEQ ID NO: 851469 - DNA, 516 bp, Homo sapiens
ctacacaataatagtgggagactttaacaccccaatgtcaatattagatcaacaagacagaaaattaacaaggatattcaggacttgaactcagctctggattaagtggacctaatagacatctacagaactttccacctcaaatcaacacaatatacattcttctcaatgccatatggtatttattctaaaattgaccacataattggaagtaaaacattcctcagcaagtgcaaaagaaccgaaatcataacagtctgtcagaccacagtgcaatcaagttagaactcaggattaaggaactcactcaaaaccacacaactacatggaaattgaacaacctggtcctgaatgactccttggtaaataatgaaattaaggcagaaatcaagaagttctttgaaaccggtaagaacaaagagacaacataccagcatccctggracacagctaaagcagtgttaagagggaaatttatagcactaagtgcccatatcagaaagctggaaagatctc

SEQ ID NO: 851470 - DNA, 557 bp, Homo sapiens
tgagcacacccaggccaaacaaggtcttggcagccctggcgaggagatgccagtttatccaaaaagcagtgggcagccgtaggaggttttcagccggaagtgatgtggtcaggtttacawtttttaaaagtgtcctccggctgtgggtggggagaaggaatggccagttgctggggacaaacagggacaagcagatcgccagggcgagaggcgagagctgcttctgtcttgccactccatgcattcctgtcttccgcctgcctgtttttagtgaggctgtggctattgaggaagactgggctgcgggggacaccaaggccctgctgactggttgtagcagggccaggcggagctctgggtgttggtggcatggagggcgggctgcctgtgcctaattaaatgctggctccagccatccgctccctagaagggtcttgcagctcctgcaaatgaggatgaggcccattcattccctggaaactcaattagctgggtatggagggctccatctctagtgacaggttttattgcctgctgagtcaccacgaggacaagct

SEQ ID NO: 851471 - DNA, 613 bp, Homo sapiens
tcactcttgtcactgaggctggagtgtaatcgtgygatctcggcttactgcaatctccacctcctaggttcaagcaagtcttccgcttcagactgccaagtagctgggattacaggtgcccaccatcaggcccagctaatttttttttgtatttttagtagatacacagtttcaccatgttggccaggctagtctcaaactctggacctcaggatctgcccgcctcagcttcccaaagtgctaggattacaggcatgagccaccgcacctggccagctaattgacttttgacaggggtgtgaagatcattcaatgagagaaaataatcttttctacaaatgggtggagcaactgaatatccaaaggtaaaagaataaatttggacccctagctcacaccatgttaaaatattttaaaaatggatagtgtagtgcctgctactctggaggctgaggtgggaaaatcatttgagccgaggagtttgaggttgccgtgagctgtaattgcactgctatactccagcctgggcaacagagcaagaccctgtatcttgaaagaaacaacaaaacacacattttaaaaaaccactaaatttaaaaagagcccaaagtat

SEQ ID NO: 851472 - DNA, 529 bp, Homo sapiens
agcatccatttgggcaggcagctggcrtggctggtggctgagccactgtggctcggggactccaggtgtctcctggacagaaagagccctggtcactcatggctgcagcatagccatggcgacaggaaagtgctgctgtacattgtgctcctggggctggctcccaatggacacccaatggcatctcccccactgtactctgggatgctggcaggggtgatgggcactggggtaagagccttggcaagcccttcgctccctgggtgtgagaccttgggctcctggatgcctgggtttctgtgtcctatttttcccatggaagatgtttggggtgctcccacgaaatggggagggccctggggggtcaggattgtattattaaagccagaaagtctggggttccatttttagcacaaggcaggcagcccatgagccacagcccagtggccagcctgtgtgggaggggagtgggggtctgaaggagtgaggatcctgttaccgcaggctccactgcagccccccagggtgg

SEQ ID NO: 851473 - DNA, 529 bp, Homo sapiens
agcatccatttgggcaggcagctggcgtggctggtggctgagccactgtggctcggggacyccaggtgtctcctggacagaaagagccctggtcactcatggctgcagcatagccatggcgacaggaaagtgctgctgtacattgtgctcctggggctggctcccaatggacacccaatggcatctcccccactgtactctgggatgctggcaggggtgatgggcactggggtaagagccttggcaagcccttcgctccctgggtgtgagaccttgggctcctggatgcctgggtttctgtgtcctatttttcccatggaagatgtttggggtgctcccacgaaatggggagggccctggggggtcaggattgtattattaaagccagaaagtctggggttccatttttagcacaaggcaggcagcccatgagccacagcccagtggccagcctgtgtgggaggggagtgggggtctgaaggagtgaggatcctgttaccgcaggctccactgcagccccccagggtgg

SEQ ID NO: 851474 - DNA, 575 bp, Homo sapiens
atcctccgagtctcagggcacactcgccttcaagtttatgttgttactgctcccctgccckgcgtgctcttctcccacactgcgcttgccgctctccttaccctgtttcgggtctttgctcacacctggccttttcatgaggtgtgcctgcctagtttatttcatactcagcctgactttctctaatttcctttagcctgctctgcctttttttctatatatttgccatttttacatgcgatatgatttacctgttatatttattgtttataatagcaatagcattgttagaatttaacattgaatagattttgctgaaactgacctttctttccttgtgcagatttgctttatctgtacttttttggaacatttgctttatacctttaagttgatacctcctgcaccttttcctagagttgagagagaaactcaaaaataatttgactatcagattcctaagcagagaaacaaagaaagggcctacaaatgagttagattatctggaatttccaagattcctaagggtttgctctatttgtataggattctttatgccagaatgctgtatttgt

SEQ ID NO: 851475 - DNA, 634 bp, Homo sapiens
cttctttatcaagtcatcttacctctaattcttttccagtrtgccaactccaaagtcaacattaaaaatgtaaatggacctgtgtaaatatcacagagagcttttccttatacatctcaatgctgagagttaaaatattcccaggttaaaatttttttaaagtaccaataatagagctaaatacaatgacatttgcttttaaaaggtggatattttatttctgctttttgaaaatacttatttagtattgacttggaagccaatatggtcctttaataagtaaagaaaataatatgtttaaaaaatgtaaatgttttacaaatctgaaactttcataatggattaattagaaaacaagcacattgccatgctttgaaactcatgtttctagacatgacagctgtagtaaaaggatgaaaacacgtgtcttcactaagcgcatggccaataaatgggacccaagacgttcaatctgttcagtctaaccaaggatcagaaatacgtaatttagcaggaaactataaataccagtgctatcacagccacacatacacacacacagacataaaataaccaaacatctgatttctaggaaagagataacactaaaggcatcataggtttaactgaaata

SEQ ID NO: 851476 - DNA, 596 bp, Homo sapiens
tgaagatttagctccaattgtacagtctcgtaaagggtacctagcgtagcttagaaaagacaataccccaaaattcacttttacgctactaaatatttttgcttattatgattttgttgaggaaggattggagctggtaaaaagggcacaggcatttgtgtagtggtctgaagtttgacggccaaaaaataaacataggaaaaaaaatcatgactttcagatgtgtgactttgagatctggcacaggctgaattcaagtttacctttgcactattaaaaaaaaaagtttgctaggcagatgggtaaacagtagagtttatcttactttataatgagtgttaaactatacatgatctttagcctcaaaattgtttattcacaaataataaagagaagcattgcagccatacctaaaaaagacctcattttcatacctgattattttatctgcctttcacttatgttgctgtgtttttaaagttatagcagttgttaaaagttgtaaacttatttataaaaacttacgaaacttttagaaaacttctggtatatacacacacacacacacacacamacaaacacacaaagcaggggcg

SEQ ID NO: 851477 - DNA, 605 bp, Homo sapiens
tttattctagtagccttctgcttgcatgaacccatacaaaataactcatattacctattaaatatatttatattgtgcattttttccttataagattggtgaaacatcacatacagtgactrtgaattatcttaagcatttttttcttttaacggatttaaggaatataaggatacttccagtttaaggtagaacaccgaaacacagatttagttgctatatctctgagatccctctaaatcaggggttcataactagagtacatgaacttgaatggatacaatcttgtattttatatatctatttacagtaacttttgagtgaaaattatctttccttcaagatgtggaagcaacgagctccagtaatgttagcaatatttatagcttctattatcattaaaaatcataggcagtttcatgtcataatttagacaagtaggaatgcagataagtaggaattttgattatattgatcaatactttgaaattatgatagatattaggtatgaacttaacatttttacttaaggcatgagtggagatatatttgttgttatatcaaaaatagtttaaaaatatgtttataacttcttttcaatgcaa

SEQ ID NO: 851478 - DNA, 670 bp, Homo sapiens
ttatttataggatccactctttgggttctttttaaaataagtgaggtgaaaaataaagtgcatgtatctttatttcctaagggtgttttagtataatggaattgatgggtaaagggcatacatattttttaattgtagtacttaccaccaaattatctatttgaaaagtaatcagcaacttaaactttaagcaggagtataaaacatcctcacaaatattgtggatagaaaactgtttcattcctcttttaatttaaattcttatgccagaaatgcgaaggactttttcctatgtacacaagtaacttgcagatctggagaagtgtactttgcccaattttagagtgtttgatgatttgatttgaaagaattccctgtcaaatgaaaatgtacttttcatctaatgtgtatatataactgatatatatgacatattatatctggtatatatgtatacgtatcagtaatatatatatatatatatatatatatatatatatatatatataacttatgatatataataaacaacataggctgggcrcggtggctcacacctttaatcccagcactttgggaggcggaggcgggcagatcacttgaggtcaggagttcgagaccagtctggccaacgtggtgaaaccccgtctactaaatatacaaaaattag

SEQ ID NO: 851479 - DNA, 555 bp, Homo sapiens
tggagatgccaggaactgcagagtcccaaagaggatgtcacaagccctggcttgtggagtccctaggtctgtggtccctgaatggctgcagcttttctctccttcttgttactcacaacatggtgagcaaggggtcgtgtttcagcactgtttgtgtaacagctgtttcagtcctgctatttggtgggcccaagttcttgtcctgtgtccaggaaaaatgaagtatgcggacaacaagcaggcaggttgtcccaaagaatgtctgagcctgactgattctggggtttttatgtgcccagaagtgaggaagtccatgctgattggcccatgggtagccacaggcagacctggaaaaagcaccattcaattggccaaatggtcctcaatgaagttctcactccaggctgcaggttcccccaggaactggcagcctggtctccaggtttcaggctgtcyctggactgaaggtagagtttcactgggaacccatctcttcctccccaggaacctgtctgctattaacatgccatccatggcacctggactgtctatact

SEQ ID NO: 851480 - DNA, 607 bp, Homo sapiens
ggagtttattaagtagtagtaattcacacaatcaccaggtcccacaatagcccatctgcaagctgaggagcaagaaaaccagcctgagttccaaagccgaagaacttggagtccgatgttcaaagccaggaagcatccagcacgggagaaagatgtgggctgggagactaagccagtctagccttttcacgttttttctgcctgctttatatcccagccaagttggcagctgattagatggtgcccacacagattaagtgtgggtctgcctttcccagcccactaactccagtgttaatctcatttggcaacaccctcacagacacacccaggatcaatactttgcatccttcaatccaatcaaatttacactcagtgttaaccatcacacttgctaactgtaacacttgctatctggcaatctcttctcgctaggacaaatccttaactgagaatgattgtttgtttcccgttccaacttacctgcttctcactgatggctgatacattattgcagctcatgaaaccattgcccarcccctcccctcaatagaaggtgtacttcctaagtgcagaggttttgcatgttttgtacatttttatattt

SEQ ID NO: 851481 - DNA, 616 bp, Homo sapiens
cagtctgactccagagattaagctatgaagtgtattttatgctacctcttgcatcatccatatttttcatattggccaaataaggcatagagaatgtacatgtctttttttttttttttttttttttttttttttttttgcagtcttttcctcctcacttgggtagcaaggcctgaaggtaaggatgctggtcagagccaggagacccagctctagccctgaaacaactgcttgtaatttcctgtttggaattacacagtctttaaattagtcagtgcaccactgttgaacttggtttctttactggcagaatgatagaagtggactaatgatgtccaatatccctaccattcaaaaatcaatgaaatcagtgctgaaaaccccaggcaatgggtcctggcctagtgaccgatggcctcagctggcatcatcttaataatgcttcagtaactgatctggacccaattggaagattaattacattcatcgcctccctcatcccartccttattttttcccccctcagaattgcttgccttcatctttctgaagccttctcagagttaagaaatcctgtcttcttcctcaaagccctattctgagtcatcactgcttt

SEQ ID NO: 851482 - DNA, 594 bp, Homo sapiens
atgctgaataacagctgtactgggcttatggcttgctttctttggttgtggaaaaatatatttcatcctcttctttgctgttgttgatatggttcayattactcaaagatgtctaattctcatgtcttaaattgagactgttggcactttctgctgactcattgtgtcttaatcttccaaggtggtccatttttacttaaagaaaaaggttattttcctccaaagtggcaggttctacaaaatgaccatctggtcccagcttccccatcacttcctttattcaaatgacactagtcacagatcttgaacttgagagatgactttccatgcctgtaaccttgaatcagtggtttctgtcctttactgataacagcaagtaaaaaaatgaaagtctcttaggtgcccccctgaggccagagttcagccctacactcctgcctcattcctttttcagagaattttctcagttgagctctgaaaatcctgcaagttggacagagttccctttccatgaagagtctcagaccaagttgttaatctcctttatttatgttcatctttggtacagtttcaaagaataataactggcaaatt

SEQ ID NO: 851483 - DNA, 631 bp, Homo sapiens
ttatctcttaattttatgtttgtatgtatatacgtacatataatatttggaaatatcaagattgaaaaatctaagattgacaattattttgaccttgtggaaaaatattttaytcagtcttcaaaagtgcaatgaaaacatcaaaaattttctctatactagcagttttttaaacaaatatatctagtttgaacaaaaacaatttttcagacagcataattcatcttatcttctcatacctatgcacagaggcataatgttaatatattcaggccctttgattggagacttaacatttacactggcataaaacattaatactatcatccaagcatgaaaattccaaattaacaggaaccaatgctgctattcaggcaaattgggagttagtatgagaaacagaagcaattctataacacatggtttaacaggatattaaaaatatagatttaaggtttattcttaatatatgataggacaaggcgttaatccatttgccatctctgctttgaattatgctttctttccatgaatttaatatgtatacccaatgaggattccaggctctgaatccaaactgcttagcttcaaatctcactctgccaagtaacattgggcaaacttcccaaaa

SEQ ID NO: 851484 - DNA, 517 bp, Homo sapiens
caaagccagagacatcacactacccaacttcaaattacactataaggctaagtaaccaaaacagcatggtactggtacaaaaaaaggayacagaccaatgaaacagaatagaaaacttagaaataaagccatacatctgatctttgacaaagttaataaaaacaacagggaaaaaactctctattcaataaacagtgctgggataactggctagtcatatgcagaagaatgaaactagacctttacctttcactatatacaaaaattaactcaagatagatagattaaagatttaaatgtaagatctcaaaatcctagaagaaaacctagaaattacccttcttgacattggccttggcaaagagttttttgctaagtttccaaaagcaatggtaacaaaaacaaaaattgacaagtggaacctaattaaactaaagagcttttgcacagcaaaagaaatgatcaataaagtaaagagaaaacctacagattgggagaaaatattagcaaactatgt

SEQ ID NO: 851485 - DNA, 569 bp, Homo sapiens
ttgcaggcgtgagccaccacaccggccacaatatttcaaccaagatatccactagtgtaatttttatagacatagtatttgtttcctagaccattcacttcttataaaattrcacaattttaattgttaaaataatccacataagcaacattagttaagaagatatctgagtttgattctcaatgctactttcctttataatttctatatatttggataattttattcaacttttagaattctatttatttttgtaacatggagataataataatacaacatagttacagaaactttaagaataatttatgtgaaagaagttttaaaatgttaatcttatacaaatgctggctaaaaataatataccatagtatttataaaaagagatgagatgggataagaatgacagcatcattaagcacttgtcccaggaatttattccacatctcagtagtttctatctgatttcaaggatccataggaattataactgattcccccatttctttatgtttctaacagactggaaacatcaaattagaattcagtcttttttctccccatggctt

SEQ ID NO: 851486 - DNA, 449 bp, Homo sapiens
aaggaatataataagaaggaattatattcggctttcccagtaccaaatcagtattagtcagggttttccaaagaaccaatagggtatgtatatagatacataaggygggaaatttttaggggaattagctcagacaattatggtggctgtgaaatcctatgactgccatctgcaaactggagaccctgggatatcagtagcatggcttagtccaagtccaaagacctcagagtcaggaaagctgctggtgtaactgaaaacctcaggacccagggggccactggtataaatcttggagtccaacgctcaatgagcctgaagttctgatgtcaaaggcagcaaaggtctgtctcagctctcagagagagaattcactttctgtattattgtcttcaggtccctggccaattggatgatgcccaacaatactgagggaataccttccccac

SEQ ID NO: 851487 - DNA, 516 bp, Homo sapiens
attacaaattaaatgtgtaattgatattttaataagtatattgcaaaaagttttataattataattagggagaaaatattatgaaaataaatgatttttggaagatasgggccaacaacttttgagaatatataaccattgaacaagattttgaaaaattgatggaacttcagaagtgttcctgatttcaagaatgagagaaaaaaaattattggaggtcatatatgaatatgacatgacaggattatttagtaattttctgtggctaaagctcagaatgcttaagggaggtagtttttgaaaatctgaagtgataaactgagataaagaatcctgtttttttaattcaaaattgcttggaatatcttgaatgcaataagaaagcatcatttttttaacaacgaagctcatctgcctgctctttatatgaaaacttccattatagttgtacctatagaaagctgaccacaatctattccaaaaagctactgcttaaaagaatgttatgttacctga

SEQ ID NO: 851488 - DNA, 636 bp, Homo sapiens
agatattgtgttgttctggaaatttagaaaatgctaataatataaaaacgttataaatgcttaagtagaaaagaagaaaacactgcacatctaaccatcctaataataatattttcctatgtttacttttcatgctagttgtcatgtcagtgagcttttataccttcctgtacacatttagcattatttcagaagtctttgttcatgtaactgcattcatcatgatggcacataatatcccatccagagaatcatcaaatgaactgtttattattgcacacttgtgcttttattttcatcttgtgctaatatttgtcaatcattatctgtagttccagacattatactaacagcttctaggctttaacttccataaggattatttccaatgattcctagaataatgccatggtgacaacagaatgcacatattattttgcatcttctctattatattttgagattgatgtaccagaagcagaattactatgtcaaaagttataaatgcttcttggttagatattgtacaaaagakttgtactaagttccacataccaaacaacttgtaccaagttagaatgctactaggtttataagagagcatctctttcagcctttcttttttaatctaaaatg

SEQ ID NO: 851489 - DNA, 310 bp, Homo sapiens
acacaagattgtactaatttacattcgcactaacagctataagagtttccttttatccacatcctcagcggcatttgttatcttctgtctttttgataatagccgtcctaactgggtgagataatatctcatggtggttgtgatttttatttccctgatgattattgatgttgagaatttttaatacacctactggcattggaatgtcttattttaacaratgtctattcagatcctttgctcacttcttaattggattatttttcttcttgctgttgagttgagttccctgtatattctggatagtagg

SEQ ID NO: 851490 - DNA, 496 bp, Homo sapiens
ctggaagaagataaggatctmcactttcaccacttctattcaacatattacttgaagtcctagccagggcaattaggtaagagaaaaaaaataggcagaaataagttaagctgtacttgcttgcagaaaacaaccttaaatataaaaaatcataaacaaatgaaacttataaaactcctaagccttctcttgatcctagtgtctggaaacctttatgaactcaaaaatataggaaaccaaaaccacttttaaatagacaagtagataaatgaatgacttttagattctttctccaaagttctaatctagtacatacccataatattctcttcaatgaactttagaaatgaacctttccattttagtatcagtattctactactgaccactgttttatttcaatttatctcattccaaaacagttctaagactcatctcagaattcagactctcaaaactctaaatttcatgacaaaaaactataattacaatgaag

SEQ ID NO: 851491 - DNA, 495 bp, Homo sapiens
gcttataagcctggttatccaaaaaccacatacactaattatataaatcttwccaacttctgaggatttttattaaacaatatttaaactagaaagtttgatacatactaatagtctccttagttctctgagaccaaattttgttactaccaccagcctaagcagtctccatctcattatcctatcttattttagttcctgtaaattattatctgacattattttatatatttggttatttgaagcactcattagaattttaaacttcattacagcaggaacctttttattcttatttatcactgtaatctcaacatatagaaaaaaacttgatgaataaaagaacaataaaaagtggccttgctatatttcgttttttaccaataaaataataatagaaatgataacacatatttttataatagtacaatgtctttattgaagatcatatttgtcaaatatcatatgcataaaattcaatgtatcaatttaaaa

SEQ ID NO: 851492 - DNA, 605 bp, Homo sapiens
atttaacatattttcagtaattaagtgctaaattagatacactagtaacctctatttcataaaaccttcaaatgttataaaaatcatgacttgacaaaaagcatattctacatataatatggaaaaaagttgactgtattatttgtgatttttttaaaaatgaaaaaagttatcaataaataagcatgtagtaatatatttgttatatggttatatgactcacttggtaataagagttactgtaagaaatcaaatgctttgttcttctacattaataattgtgttgattttaaaggaaaactaaggaccatcatcatcatttattggggttttagaagaggtctttcactttggtgagaaaaatatgtgtttacaaatattatgaaatttgggctattatccctagattattttaaatcccacagtctgaaaaaaaaattcaaagttgacttgcaaaaatttcaaacgtttttaaaagacaaagtctcacagtagcttcttaaatcatagctgtttcagcatgttgtatcaaatgagttcrattacatctatagcaaattcatatgtatgatatagacatagcacatatctgtatttattttaca

SEQ ID NO: 851493 - DNA, 573 bp, Homo sapiens
attttttaaaaaatgggcaacatatctgatagatatgtctcaaaaggagagctacaaatggcaaacaggtatatgagaaggtgctcaacctcactgaccatcagagaaatggaaatcataactacaatragatatcatctcaaatgatatatctcaaaaagatatcatttcaaatgatatatctcaaaaagatatatcatttgagatatcatctcaaataaaatggcttttatttaaaagacacgcaataacaaaggccggtgaggatgtgcagaaaagggaaccctcatacactgtggaaatgtaaattagtacaactactatggagaactgtttggaggttctttaaaactaaaaagacagctaccatgtgatccagcaattccactgttagatatatactcaaaaaaaaagaaaataaacatcatgaagaaatatctgcactaccatatttattgcatcattgtttacaatagccaagatttggaagcaacctaagtgtccgtcaacagaaggaaacataaagaaaatatggtacattgacacaacaaagtactattcagccattaaaat

SEQ ID NO: 851494 - DNA, 494 bp, Homo sapiens
agaagtttctatttaatattatgctgaaagataaaagcaaaaccattrgtaccttaccagtatactattaactacttaaaaaaatctaacagaaaaaaatacagtgaacaaaatatatactcacagtcataatgtttataagatttcaagggataatttttataagatttgtactagaacatacagaaaagcataaatgttactaaagaacaacataagacattcatgaaaatttgcactgaatattgtacagatgacaattatctctaccagttaaaactggatttgatgcctgtattagtccattgtcacactactaataaagatattcctgagactggagagtttataaaggaaagagatgtaattgactcacagttcagcatgactagggaggcctcgggaaacttacaatcatggcagaaggggaagcaaacatgtcctttttcacatggtgtccggaaggagaggaatgtgaaccaagtgaaggagga

SEQ ID NO: 851495 - DNA, 627 bp, Homo sapiens
acattgaatcacacattcttcagtcaacccaactaaacataaaaagtctgtamaaaggtctgagctgccactcaagagacagagtttgcagttttatccctgtttatttctggtttaataataaaaactataattttcaaagcatagtgctgaattcagagtaatcacaatataatattcacaatatccgggcaagatcagaaattgctcaacataaaaaaagaaaaatattagcgattctcaagagaaaaaacatcaaaaaagagtaacactaggtgtatttgtcaaggttctctagagggtcagaactaataagatagatgtatatatgaaagggattttgttaaggagtattgactcatgccatcacaaggtgaactaccacaataggccatctgtaagctttggagcaaggaagccagtccaagtcccaaaagtagggaagccaacagtgcagccttcagtctgtgggtgaaggcccaagaacccctggcaaatcacaggctaagtccaagagttcaaaagctgaagaacttgcagtctaatattcaagggcaggaagcatccagtacaggagaaagatgaagactggaagactcagcaagtctgctcttccatcttcttctg

SEQ ID NO: 851496 - DNA, 523 bp, Homo sapiens
agaaagatgaagactggaagactcagcaagtctgctcttccatcttcttctgcctgctttattctagctgtgctggcaattgattagatgatgcccactcagattgagggtgggtmtgcctctcccagtccactgactcaaatgttaatctcctttggcaacaccctcacagacaaacagaaataatacttaacatccttcaatccaatcaagtttacactcagcattaaccatcatactttaactttcagcttcctctctagtaaacaaatctagataaggaaatacaaagataggcatatctttgactggtatggcattacttgagaaatttctttgtaaaatttcattgatttttttttcatcaacagtaaaaatgttgactgccttcaccctaatgagtattgaatctagtctcaaattcaatttagttgccttctcagctctttcattctgtgactgtagactgatgcaatgtgttttgtttagctatactttcatgctccttcctgcaattagatta

SEQ ID NO: 851497 - DNA, 504 bp, Homo sapiens
ggcaatacagcaagatcccatctacacaaaatatttaaaaattagctgggagtgttggcacaccccattgcattcttgtctgcatgcagtgcamtgtacaggccggcaggtggcacaattgaccacttgctggtctcccgttttggcgatgccatcttagggcatatcctctgcgggtggggcctggcattggcaccccaacctctgcctctggagtcagcctcagcctccaaggcagtgtgggcctgagggtctggcttccttgcagccagcctcacctgagttctcagatggttcgagccaggagcaaatctgacggagcgggtgtggtagcaggagccggtgctgagtgtgtggactgacccccggcgtctccccgactgtcccctcttccttcacttctgccaccaccacctagttgaagccaccgtcatctcccacctgaactgcttgccctggccctcttagcagcctcaccgtgtcccctcaggccacatttcctga

SEQ ID NO: 851498 - DNA, 633 bp, Homo sapiens
cgggttttggaatcttgtcctgcgtgtctgtttgtgattctctcactctcctctggcttctggacctaccatgttctatggagcatccaaaactggggagctgacacctcagggccagccctgcactctcatttctggcgtataccacagtgggccttacttgggaggcattcggggcagggcccagcacagacgagattctcagaatgtgtggacgatggcactgtagttgaagaggggagtcctcgcttctagagctccacgcctgaatatttacaatgaaatgatgtgatagccgggatttacttcagagtaacctggagtgcagagacagaggctaggcgatgggaaacgagaatggccatgagccttggggatggcccatgggggtctgatctacatctgtctctgctttcgcatgcatttgaaattgttcataaaaatatctgttaaaccatacttgtccctccaaggccaaggcatggtataggggccaaggtgagtgaagaggccccggttctcttttggagagaattacttggtttggaatgagagtttttaatatctccctgttgatctggaagagtggggctcctgtyacgggtgggtaggggacccagtgccagtggttag

SEQ ID NO: 851499 - DNA, 573 bp, Homo sapiens
ttcttttttttttttctgagacggagtctcactttgctgcgcaggctggagtgcagtggcccaatctcaactcactgcaacctccgcctccctggttcaagtgattctcctgcctgagcctccttgagtagctgggattacaggcatgcgccatcacacccagctaattttttgtatttttagtagagacaggatttcatcacgttggccaggctggtcttgaactccagacctcaggtgatccacctgcctcggcctcccaaagtgctgggattacaggcatgagccaccatgcctagcccttcttcctctttaaacctgctcttttccctcctgtgcagtgggtagctgaattcatgggctctggagccaaacacacctggaatgggatgaatcccacaactaccactcactgctatgtggccagagttcgtcacgtcacctgtccacacttccgtgttctcatcttgagggtgggatgagaccccttccttgtgccatcaggatgctggagtmagtgggaccatgcatgggaagacctgcaggatctggctgaccttgacattgttcacc

SEQ ID NO: 851500 - DNA, 500 bp, Homo sapiens
gtttgatgttagttataggttgccaatttttaggatgaggaagttttcttgtgtttctggtttgctgagagtttttatcaagaatgggtcttgtggccgggcacagtcgcttatacctgtaatcctaacactctggaaggccaatgtgggaggaacgcttgagaccagtgtgggcaatatagtgagaccctgtctccaaaaaaacaaaaaaattgaataggtcttgaattttgtcttgatattttttgcatctatttagattattttgtttttctcttatgttaatatggtgggttacagtattaaatattgctaagtaacaaatcgtcccagtatttacctgcctgaaacaacaaacatttgttatctcacattttctgtgtatcaggaatccaagtggcctagctcatatggttctgtcccactctgatgrtgttgcaatcaagatgtcaggcagggctgcagttatctgaaggatcctcttccagcaaggctcactc

SEQ ID NO: 851501 - DNA, 574 bp, Homo sapiens
tattcatttcattcaaattcatcaaaatatttattgggagctgttccaggctcaggggaaatagccgtgaagaagatagaygcagcccctgctctcctggagcgcacattctacagagggaaacagacagtgaacaccaaataaataggatcatttcagatcataataactgatacaaagaaaataatttaggatgaaatgaaggaatgtctgcaagcaattggggaaggtctccctaaggaggtgctatcagagctgaggtccaaagaagcaggccctgtagaggtgtggggagtcacataaacatgtcagacttccaggtggagaaaagcagaaagccgtcagagcagggtggatgtagcgttaagatccaccatgtggttgagagccaagggtactgaagcagggagggtcctttgccattgtgtcgaggaggggcatgaactccagagcccaccaaggccaggcaaggttgacccatgagcagagcaggcccaggtgaagccttgggaaccccagctcaggccaggcccagctccatcagctggggccacactggaatgtgggcccctgg

SEQ ID NO: 851502 - DNA, 590 bp, Homo sapiens
gaacatgccaccttgtgctgcatacgggactttgcaggagtgatgaaggacctggagctggagagatgatccttgcccaatctaatcaagggaaattcatgaaggtgagaagaggtggtaccagaaacaaagtcagattggtgtgaggctgctgactttgacagtggaagaaggggctggaccagagcccagaaacggggctgcttctagacaccaccagcaaaggccaggaaataggtaccccctagagcctccgaggaaccagctctgcagggtttagtccagggagatccattttgagcttctgaccctcagaactgtcagatgacacattcatgctgttttaagacactaaatctctggtgatttgggacagcagccataagacaccaatacaggtgctctatgggagttcctattaactcgatagagtgtgtttagtgggagaagaccctgatctgagaaaacgcaggtgatatggttttgctgtgtccccacccaaatctcaccttgaattgtagctcccataattcccacgtgttgtgggagggaccyggtgggaggtaattgaatcatgggggtggatcttt

SEQ ID NO: 851503 - DNA, 528 bp, Homo sapiens
cttcaaattatagtacaaggctatagtaaccaaaacaccacgrtaatagtataaaagcaaaccactgcaacagaatagagaacccagaaataaagccaaatacttacaaccaactgatctttcacaatgcatacaaaacatacactggagaaaggatattctattcaataaatggtgctgggaaaactggctagctacatggagaagaacgaaactggatccttatctctccctttatacaaaaatctactcaagattttaaatctaagacctgaaaccataaacattatagaagaaaatctaggaaaaactctttctggacactggtgtaggcaaagaatttatgactaagaccccaaaagcaaatttaacaaaaaccaatataaataaatgcgatctaattaaactaaaaagcttctgcacagcaaaagaaatagtcatcaaagagacaactcacagaatgggagaaaatatttgcgaaccatgcatccaacaaagaactaatatccagaatctacaaggaactca

SEQ ID NO: 851504 - DNA, 628 bp, Homo sapiens
atcatttatcctatatatattttaacacatatatatttgagtattattctggctacttcacattgaattcctatttattctccatgaagaaaggtatgaaatggttacaaattatccccgttttctgaatgaggacattaagacaccgaagttaagtaattttctcaagataaaagtgctaatatatgacagagctgaggtgagaatacaggcattttggcttcagagctaatgttctttacagtggtgatgtttatattgtctctttttttctgcttttcctctttctccatattcaaatgacagagtcacatatatgcaactattcatttacatatgaataagtctaaactgacaagggaagaggcattattatccaatgttgtttaaatatattagcccagggctgtcttttcactttggaagattgcttagaagagattacactgagtagaaagttcagtcaatcaatgacttaattaattagtcatgcaggtataatatacccattcaacatttgctgccatatttcttgggttgttccttgaaggaagaaaaaaaaacagaraaataaaaccttattggtgatttaaaagagctatctactgaactagataagcaaagttta

SEQ ID NO: 851505 - DNA, 568 bp, Homo sapiens
cctccagctggggcgacagagggagactctgtttctaactgaataaataactaaaaatagtatatgtctctgacccaggttcttttcttctgttatatgtgtgaatatgtamctgtacttggctgccttgttgcttgaaaataaggtaaaatttcagactcttagcattctctgacttaacacaagtaaatattaataaggtttgtctgtgtccccacccaaatctcatcttgaattgtgctcccataatttccacgtgttgtgggagggacccggtgggagataattgaatcatggggccggtttcccccatactgttctcgtggtgttgaataagtctcaggagctctgatggttttatcaggggtttgcgcttttgggtcttcctgattctctctcttcctgctgccatccacttaagaagggacttactcctccttgtcttccaccatgattgtgaggcttccccagccaggtggaactgtaagtccagttaaacctcttccttttgtgatttgcccagtcttggatatgtctttattagcaacgtgaaaacagacaaatgcaa

SEQ ID NO: 851506 - DNA, 528 bp, Homo sapiens
ctgcaaagacttaaaccacagacaggaaaggcrctgctgcagtctcgacggtcaaatgcagggccccctcagctgccatcccactgaggggcgaaggcccatcatctcccttcggctcggtaactgcctggcgtagcacaagggttctctttaaatccccagcaaatggagctgagtggaaattccgccccatattaccaggcacacgtctccttccactcctcactataccctgcccatgccatggccgccttctgagaataacgctgacagttccatggcccacagcccctctagttaacttgctgtgcacacggcagcccagccagaaacacgcagccaggtcggatattgggtgcattcagtcgtgaagcctgaggcttcctggctcccactgagcacagagaagtgttctgaaggacaggaagcagctagcctcactgctcttctcagacggctgatggagaaaagctcacagctgcctgcgccgctctgcctggacttgcatcctcggccccaccccttgcg

SEQ ID NO: 851507 - DNA, 528 bp, Homo sapiens
ctgcaaagacttaaaccacagacaggaaaggcgctgctgcagtctcgasggtcaaatgcagggccccctcagctgccatcccactgaggggcgaaggcccatcatctcccttcggctcggtaactgcctggcgtagcacaagggttctctttaaatccccagcaaatggagctgagtggaaattccgccccatattaccaggcacacgtctccttccactcctcactataccctgcccatgccatggccgccttctgagaataacgctgacagttccatggcccacagcccctctagttaacttgctgtgcacacggcagcccagccagaaacacgcagccaggtcggatattgggtgcattcagtcgtgaagcctgaggcttcctggctcccactgagcacagagaagtgttctgaaggacaggaagcagctagcctcactgctcttctcagacggctgatggagaaaagctcacagctgcctgcgccgctctgcctggacttgcatcctcggccccaccccttgcg

SEQ ID NO: 851508 - DNA, 509 bp, Homo sapiens
aaagctcacagctgcctgcgccgctctgcctggacttgcatcctcggccccaccccttgcgcagcagtgaggccccccgagacactggtgcctgggcttgcggtaccgcagggctgctggacaacgggccagacgcagccccagtgtggatccagaggtctctctccgtagcaagccatggaagcacgacgggcactgtgctgagaaccctggtctgcacttctgacctggggctctggctgtgcggttctgctgagctcatccgagagtccacgcgtgcatggcggagacctgagtcagcggcagggccaccccgttatgggcaccccaaccccttattaggggtgttaatcagcacaaatgagcaactggctcatcagtcggygcaggctgacaggtgcaggaaatacggagggcaggcggggtagggggcacggaatgcttcccaacatgagggcatctcaggccagcaggcggggcccagagacccagaagcaccacaactcccc

SEQ ID NO: 851509 - DNA, 566 bp, Homo sapiens
agtgttctgaaggacaggaagcagctagcctcactgctcttctcagacggctgatggagaaaagctcacagctgcctgcgccgctctgcctggacttgcatcctcggccccaccccttgcgcagcagtgaggccccccgagacactggtgcctgggcttgcggtaccgcagggctgctggacaacgggccagacgcagccccagtgtggatccagaggtctctctccgtagcaagccatggaagcacgacgggcactgtgctgagaaccctggtctgcacttctgacctggggctctggctgtgcggttctgctgagctcatccgagagtccacgcgtgcatggcggagacctgagtcagcggcagggccaccccgttatgggcaccccaaccccttattaggggtgttaatcagcacaaatgagcaactggctcatcagtcggtgcaggctgacaggtgcaggaaatacggagggcaggcggggtrgggggcacggaatgcttcccaacatgagggcatctcaggccagcaggcggggcccagagacccagaagcaccacaactc

SEQ ID NO: 851510 - DNA, 509 bp, Homo sapiens
aaagctcacagctgcctgcgccgctctgcctggacttgcatcctcggccccaccccttgcgcagcagtgaggccccccgagacactggtgcctgggcttgcggtaccgcagggctgctggacaacgggccagacgcagccccagtgtggatccagaggtctctctccgtagcaagccatggaagcacgacgggcactgtgctgagaaccctggtctgcacttctgacctggggctctggctgtgcggttctgctgagctcatccgagagtccacgcgtgcatggcggagacctgagtcagcggcagggccaccccgttatgggcaccccaaccccttattaggggtgttaatcagcacaaatgagcaactggctcatcagtcggtgcaggctgacaggtgcaggaaatacggagggcaggcggggtagggggcayggaatgcttcccaacatgagggcatctcaggccagcaggcggggcccagagacccagaagcaccacaactcccc

SEQ ID NO: 851511 - DNA, 509 bp, Homo sapiens
aaagctcacagctgcctgcgccgctctgcctggacttgcatcctcggccccaccccttgcgcagcagtgaggccccccgagacactggtgcctgggcttgcggtaccgcagggctgctggacaacgggccagacgcagccccagtgtggatccagaggtctctctccgtagcaagccatggaagcacgacgggcactgtgctgagaaccctggtctgcacttctgacctggggctctggctgtgcggttctgctgagctcatccgagagtccacgcgtgcatggcggagacctgagtcagcggcagggccaccccgttatgggcaccccaaccccttattaggggtgttaatcagcacaaatgagcaactggctcatcagtcggtgcaggctgacaggtgcaggaaatacggagggcaggcggggtagggggcacggaatgcttcccaacatgagggcatcycaggccagcaggcggggcccagagacccagaagcaccacaactcccc

SEQ ID NO: 851512 - DNA, 561 bp, Homo sapiens
agtaaggagattatcattggtgggctagtagcttatagtagggagtcatagcacatgtcaaggtgataaggcatcacattaatggggaggagttcattattgggttttggagcccaagaagtatgaggacatgcaaatgtggagaaaaatggggaaaattaaagtaaaccctgtagtgttggattcaagttggagacaacagtatgatctcagagatttcaatatatctatataaaattaatataaatatgaacatgtacatacagatatgtgtgcatatatatctctacctccatgtactacaatatttctatgtacagtgtcataccaatagcaatgagtacatgtagaaccaagatatttgtttcttttctctactatccactgaaatgatctaggggtccttggagatttctagattgattctagaagtacaaaatgagattggaraattttctgtgacagaaaatttttaaaaatgctcaaagaacagtgggtgcatgtcaaaagacatagaaatcaacttaaagggatattcactgtggaatttgagcatttaat

SEQ ID NO: 851513 - DNA, 547 bp, Homo sapiens
cactcagttcactccctggcccggatcccatgactgccttggctctatgctcagcttgagcctgaatcaggcgtgctgtgagtggcttctgtatagggcgcaggcgtctagaataggcgaaggttggtggtgcccaaaacctcagagatgccagcaatcgcggagccccaagtggtgttacagctcttgcttggggagtcccaaggtttgggccccaagaaaagttgcagctctttactctcgtagctcagccagtgggagcgtgttatagctgtctttctcctgtagtccggtgagcaggaatgtgttatagctctttcattccagccgcccacagctgagtgagttccaagttcttgtcctgtgaccaagaggaataaggtgtgtggacactggagagtaagtaaggcagagaagaattttattgagcgacagaaggaaagccctcaactgtgaaaagggaccctgaaagtgggttgtcatctgtgaggctgagtctggrcttgtctgggtttacaatgggagaatgtgtgctgattggtccata

SEQ ID NO: 851514 - DNA, 572 bp, Homo sapiens
gattcatagtcaatatcatagtcatttattttaaaaagctgcccagggcttgttaagttgctgtcaagatgaagcactaggggatcagcatgttcaggtgaaaaggtgctgctcacggaagaggtgagaggaggctgcaggtgctgtgtgctgacttacctgagctagcacagatgcagcacacggctcacacactacctcttatggcattatcactacccaatctgccattagcgcatccaattaatggcaatagattaaattgtatagctccctccaccaccacaatctgcaaccaaaaccatccgggggacatcctaagctctcaaaaggatctttatggggaagagatttgttgagggccaagagctgagctccatgcctttgaggatgagaattctggggtcctgggtgccttttaaagtgatctgggagaggtaggctctkggagcgtatgtcctgttggcatcaccaactcccagcgctgtaaggagtcgcagaaccagaagaaggccagaggagagaccttgaaagtgtgggatcccaagcagatatctcaggtatccaagtcc

SEQ ID NO: 851515 - DNA, 360 bp, Homo sapiens
ctaacatgattatgtgggcaccatgaggacctggtaactacatcagcgcatattcattcatctccaaatttgtgtctaacacaacattgggacttctaatgctttatcaaytaatgattttttaaattttaattataactgacttatctttttgttactttcgaacaccaaactatcttaaaagcataaaatgtttccctatttatgactgattaaaaatacatcccagggaaactaagagtttgttttggtgagataatgccctttctacacacctagtcatctacagtgtctaccttattttctctcttaaattgacaatctggctgacagagtcttgccttcatcctttcacctcaa

SEQ ID NO: 851516 - DNA, 475 bp, Homo sapiens
atgctcagtgttggtcacagggctcctggcgttgttgcccctggtggcaaggaaggaactgggacacgatgtgctgacatggccgttagcacaaagcagacccgggatctgactcttccaggctttccctggacttcatcactctcagacaccgacgtgtctctagaaccatcactctgcatcccctttccatgaagacccaagggccatgggaggagctgccaacctcagatcccagatgacagggaagaggctgtgactccttcaggacttgccatcctgccttgttgctggacagagcctgggtggggaggtcgatgccattttgcattggttgacagcttccagtgcmcatcatggaacaagagagatggtgtgtacctgctcaggcatgggtaatgcactttgttgagtaaagccaataactgttttgttttgtttttgttttttcaagagttgaggtctcttggccagg

SEQ ID NO: 851517 - DNA, 548 bp, Homo sapiens
cgcttttttgttttttggtttttttgagacagagtctcgctctgtcacccaggctagagtgcaatggtacgatcttggctcactacgacctccgcctcccaggtttaagggattctcctgccatagcctccygagtagctgggactacctgcgtgtgccaccacgtccagctaatttttgtatctttagtagagaccgggtttcaccatgtgggccaggctggtcttgaactcctgacctcaagtaatctgcctgtcttgtcctcccaaagtgctgggattacaggcatgagcccgctccaggctgggggtctcttttcaagcagaaaggccagctcgtggagtagtggggagaagcaagggagagccttgagcacacaacccagaacacacagcccccttgaggtggcaggcagggtcccacctccagctgtgggccacagggcttcactctctgcatgtccagccacatctctctctaagcctcagctctgtgctttgggaaggtcactggctggaagcccagggtaggctgagggggccaggctg

SEQ ID NO: 851518 - DNA, 624 bp, Homo sapiens
aactccgtatgtttcatcaaaagatacaatcatcagggttaaaataatataccacattttcatctcacctggacatcaaattgaattcttcttttctattttatttttctgagatggagtttcactcttgtcccccaggctgtagtgcagtggcgcaatctctgctcactgcaacctccgcctcccaggttcaagccattctcctacctcagcctcccaagtaactgggattagaggcatgcaccaccatgcccagctaatttttttttttttttgtatttttagtagagactggtctcaccatgttggccaggctggtctcaaactcctgacctcaggtgatctgcctgcctcggtctcctgaattcttcttaaaatctgtagtgcagtagaacaatctgtcaagatgtcataaaaattgactttagaccaattattctaaggaaagttgggcaagagtcagtaccaatcaagaatgagaaaaccttgccatcttctgatacattcactggttccaaacactctaatgagatagctacactatgaaatattaagggactgccactgttgtaatctgatgtctcacttaagctaaggcaacrgtgaataatggattaaataatg

SEQ ID NO: 851519 - DNA, 656 bp, Homo sapiens
tggctgcctaattagacaaggtactaatgagttaaggctttctctttgtcataaactgactcttcctctgaacccctaattagtgcctctttttttaagttgaggtttatcaattatacctyaatataaaataaagtttataatctcaagtgtacagtgctatgactttttgcacatgtacacatcactataaccatctcccagatcacaatatagattatatgcttcttttccaatcacataactcataacacctcacattacagtaacttatgtatatttttatctctttcattgaattgtaaacaaaagacaaggtcctagtctttttcatacttgtagttcctgcagtccctggcatgacatatggcttatagcaggtgtttcacttttttaaaattgatgaaaaattatctatgtaattttgaagtcagagtaggtctttaaaaatatctcatgtacctagtatggccttaacaaacaggaagccaatgaaagaagaaaatacaagaaaatggaataaaagaaagcctccccacttcccaattgccaacatttagtttccatcagcaaatattttttgaggaagtgctaggtacaggctctatgttctcacaataatcagtgaacaaatctctgccctcatggagtttata

SEQ ID NO: 851520 - DNA, 606 bp, Homo sapiens
atattgaacagtgccgagaccacctcggtcggggagaccctaacccagcggcactagagaaattaaagacacacacacagaaatatagaggtgtgaagtgggaaatcaggggtctcacagccttcagagctgagagccccaaacagagatttatccaagtatttattaacagcaagccagtcattagcattgtttctatagatactaaattaactaaaagtatcccttatgggaaaccaagggatgggccaaattaaaggaataggttgggctagttaactgcagcaggagcatattcttaaggcacagatcgctcatgctattgtttgtggcttaagaatgcctttaagtggttttccgccctgggcgggccaggtgttccttgccctcattcccgtaaacccacaaccttccagcttgggcgttagggccattatgaacctgttacagtgctgcagagattttgtttatggccagttttggggccagtttatggccagattttggggggcctgctcccwacagaacagcaaaagcatatcaattatagtattcaaaatcttctagattatatctacatgttgtaagtcattttaataaaatgat

SEQ ID NO: 851521 - DNA, 514 bp, Homo sapiens
ctttcaatgccctgtgtagcttgagccctgagggcggtgccgagctgacagcctggaacattgaccaacrcgctgcaactgacgtgtaaatcaccctccgactaggggtcccgaatctggaaaaggaaatgtcatctttggactttgcccatcatgtgtttatgcacgaacagtcctttcaagtgcctctctccacctttgcagacaagtggcataatgcaggtagagatcacatttttggagtttattcctaagactggctgttagtttttataaacattccttttatctgaaatttaaccataatttttttttcttaaaatgccatatcttcctatatttagagggcaggatgccaagtccatatctactcaatatatcaaatattttcagtaagccaggaattagagcttccttttgtaatcaacaaaactcctggtaacttcatctttactaacagcctcatcctttcctgccatttctttgtttgtttgtttaataatttggtagtact

SEQ ID NO: 851522 - DNA, 506 bp, Homo sapiens
ctgttcactcattgatagatccactacaatccattgagttgccaagccagaaactgggccttcctgggtctacctaatcatgttgattgaatttcrcaaacaactttcaaatcatcccttttcaggtcctataaatgttcatccaggcaattactacagcctcctcacttgcttcttctctggacagtcccccacactgcccctgatctctgacttccaatctgacgtctacagtgcccagaggaagctctctaaaacatcaatcgttcttgtcgctcctctgacatctatagtgcccggaggaagctctctaaaacatcaatcgctcttgtcactcctggcttcagtggatactcattactatcagtttaaaatccaaagctgtatacaagttccatgaacacataaatgtgaaaatgttgcattctatatacctccttcgatttacactacattttagtatattaaatgttctgagatgacctgcagttatataggcttctcta

SEQ ID NO: 851523 - DNA, 506 bp, Homo sapiens
ctgttcactcattgatagatccactacaatccattgagttgccaagccagaaactgggccttcctgggtctacctaatcatgttgattgaatttcacaaacaactttcaaatcatcccttttcaggtcctataaatgttcatccaggcaattactacagcctcctcacttgcttcttctctggacagtcccccacactgcccctgatctctgacttccaatctgacgtctacagtgcccagaggaagctctctaaaacatcaatcgttcttgtcgctcctctgacatctatagtgcccggaggaagctctctaaaacatcaatcgctcttgtcactcctggcttcagtggatactcattactatcagtttaaaatccaaagctgtatacaagttccatgaacacataaatgtgaaaatgttgcattctatawacctccttcgatttacactacattttagtatattaaatgttctgagatgacctgcagttatataggcttctcta

SEQ ID NO: 851524 - DNA, 509 bp, Homo sapiens
ttgttagtaccctgaactttttgatcagctaatgttaattaaacattttttacctatatttatttaaaatttgcatataattttgttttcctagtttaaggattaaggtaatacttacatagttaaatgaatyggacactttgcctaatttaatacattgatttaatttgcagaagtatgtttggaaagagaaatagaatcggttccttgacattttgatagtatttacctgttataccctctaggcctagaactatttgaagagaatgcctttttattacactcaaatttctttattggttatcaatcttttcaaatttcttactttcttttgaaccaacttgggcgtttcattatttgcctcaaatttacccacattttcaagtttattgatgtgtaattgtacataatattctttatgattttatatatctattttacctaaggttatttctcctttttatttaatatttggtctattaagtctgttttatgaggtgcttagcgta

SEQ ID NO: 851525 - DNA, 521 bp, Homo sapiens
gtatggtgactatagttaataataacatattgcatacttgaaatttgctaagagagtacatctaaagaattctcaccacacacacacacacacaygcacacacacatacaatagataactttgtaagatgatggatatgttaattagcttgattgtggtaatcatttcacaatgtatacatgtacagtagttcacccttaaccacagttttgctttctgtggtttcagttacctgcaaaaaaatacaataagatattttgagagagagagagagacagagacagagacaacattcacatagctttgattacagtatgtcgttttaatagagctactatattattagttattgttgttaatctcttactgtgcctaattaatgaattaagttttatcataggtgtgtatgcatatgaaaagacaatatatttagggtttggtactatccacggctttaggtatcttggaatgatattctgaggtatccactcagaatcttggaatgtatgccctacagataa

SEQ ID NO: 851526 - DNA, 372 bp, Homo sapiens
tgtcagctgtttaccatgggcactccccagccaggagagagggttggtaccaggcagcctggttgctccatgaggatgaatcttgcatcctcagggtaataagaccttyccctgcacacacttagataaaacaacaggaatgcttactactcttatttgaaagaaacataaacttggaatcagcatatacatccttgggaaagtattttaaatgaacattgcaaacatactaccacaggcctttcttacctttaaatatttcaccagcttctgaatttgccaatattctgatggcaaatctgcacttgcttcctgacgatggtcaggtggttcttcatcttcctcactttctgaggagctatcgctaacagt

SEQ ID NO: 851527 - DNA, 481 bp, Homo sapiens
gaccaagctcctttgactgccattcctacttctgacactcctcttgtcsttttcaggacaactttatgcctattgtgccttggatcttgagaaatatgtggtaaaactggccagtggtgatggcaggcatagcagggaatcagattgaggggggctgccgggtgagagagaaaacaaaagagggaaacaggctacttgatgacggaatcaggctgcttctgcaatgacattacatgaaataatctgaaatacgatcttaactgtatctggtgggtcccgttaaccctgtaagttatggacagaacatttactcaaattgtagccaagtctaggctcatgggaacacgtgaccaattcaggtgaatgaaagggactttaaaacattaatttccagcttaggtcttcctaagactgcctgcatgttccttaacaccactccagcctgagtgtcacgtggatcctgaatgcggacttgtgtgca

SEQ ID NO: 851528 - DNA, 525 bp, Homo sapiens; identical to SEQ ID NO: 843229

SEQ ID NO: 851529 - DNA, 525 bp, Homo sapiens; identical to SEQ ID NO: 843230

SEQ ID NO: 851530 - DNA, 574 bp, Homo sapiens
gtggcacccctgccacctatcctttcagagcagtgtcagaagccagctaagacagaaaatttaaatagatttggggtctcataacataatattaaaatgtccaggttttcatcaacaatctccttkcataccaagaaccaggaagatctcaaactgagtgaaaaaaaagacaattaatatatgtcaacactaagatgacagaaatgtgagaattctctcacagtgattgtagagatactttgataaatatgctccaacaagcaactacaaatgtgtgaaacaaacgaaaaaaaatagaaatcctcagcaaagaaataagacagctcagaaaggaaatagctataaagaaggaacagatggaaattttagaagtgaaaaataccattactgaaacaccaagctgagtggaccagctcacagcagaaaagagggaacagaggaaagaatctgtgaactggagggtagcgcaatagaaatgacttaagctgaacaacggagagaaaatagagtgaaaaaaaataaacagagactcataaagcctatggttaggctttgtgtcaccacccaaatctca

SEQ ID NO: 851531 - DNA, 595 bp, Homo sapiens
tgtgtatggctgctttcatgcagccagaattgagtagttaaacaatagagacagagtggcccacaaagcttcaactattatctctctggccctttacagaaactttgctgacacctggactagaaatgtaaagaaaccagccatcaaaagcaatggagacagtaaagaggtaaggaatgcataggctttggcagggcccagggaggtcagcaatagcatctttaagaggtaggtagatgaaaggaaaaggaattcaaaatctggacaaagacttggctcaggaaagaaaatttcagatgcggaagaaaagcaatctgcagggcagttattctgggcagtaaatgacacattttcttttcttttctttcttttttttttgagacggagtcttgttctgtcaccaggctggagtacagtggtgcaatctctgctcactgcaacctccacctcccgggttcaagcrattctcctgccttagcctccccagtagctgggactacaggggcacgccaccacgcccagctaatttttgtgtgtttttagtagaaacagggtttcaccatgttggccaggatggtctcgatctcctgacctc

SEQ ID NO: 851532 - DNA, 334 bp, Homo sapiens
atataccacttgcagtatcatgattgtataaatactaaatatctattkatctatccaaaactacaacataagtatttttggaatatggaggagtgggtgctgagtatgcatgggagaagggaggctgaggtgaaggtgggagagaaggagacagtgaaatattcatcttccaaattggaaactcaaatagataatgcctaaacatgaaatatcaatagaaatgtaatatttaaacatatggtggtgcttctgggaaaaagaaaagaggatggagaagactgtttgtttgtatgtttgtttgtttaaacaagcaatatggatgaaattacaggct

SEQ ID NO: 851533 - DNA, 443 bp, Homo sapiens
tgatctcttaacttctgtagtcttgtgatcttccccctttttctacccccaccccccacattccttgttgcagtacatggcactacctccatccccattttcctctaaaaatatgcaaatggtcctcccccagcctctccccgatacttgatccacatgcaggtgccgtcaattttgcctccaatatcacttatctctatccatctctcttccccttgacttccaggctccactctatgttgagccctgataacctgcttgctgttctcccaggctaataacaccaacctccagggccttttgacaaggcaaatccaaccatctcgtttctctacttaarccctttggtaattccttaaggcggcttgtaatgcagttctctttgaatttcttaaaaaccacaaggtttttccatccttaaaagcttttgcatgggcaatctg

SEQ ID NO: 851534 - DNA, 647 bp, Homo sapiens
aatgaaataaaatatttgcaaattgtgtatctcagaggagcttaatatctagaatatataaataactcctaaaactcaacaacaaaaggacaacwcaaaagtgggcaaaggatgtgttgggataaatatagacatttctacaaacaagatatatacgtagtcaataagtacatgacaggacgcccgacatcccctgtcactaggaaaaagtgaattgaaaacctcaatgggatgctactgtatacctactagagtggctacagtaattttttttttaaggaaactaacacttggagaaattggaactcttgtacattgctggctggcatgtaaaatggtacagccactgtggaaaacagtttggtatttcctcaaaatgttaaacacagaattaccatatgaaccagtgattctactcttcattacacatcctaaggaaataaaggcagggacttgaccagatgcttttttggccaatatgctccccagcactattcacgatgcccaaaggtggaaacaatgtaagggtccaaccgcaaatgaatggataaaacaacatgtgatatgtacatacaatgcaattattttatttggccataaaaagaatgaagttctgacccatgtaacaacagggatgaagcctgaat

SEQ ID NO: 851535 - DNA, 647 bp, Homo sapiens
aatgaaataaaatatttgcaaattgtgtatctcagaggagcttaatatctagaatatataaataactcctaaaactcaacaacaaaaggacaactcaaaagtgggcaaaggatgtgttgggataaatatagacatttctacaaacaagatatatacgtagtcaataagtacatgacaggacgcccgacatcccctgtcactaggaaaaagtgaattgaaaacctcaatgggatgctactgtatacctactagagtggctacagtaattttttttttaaggaaactaacacttggagaaattggaactcttgtacattgctggctggcatgtaaaatggtacagccactgtggaaaacagtttggtatttcctcaaaatgttaaacacagaattaccatatgaaccagtgattctactcttcattacacatcctaaggaaataaaggcagggacttgaccagatgcttttttggccaatatgctccccagcactattcacgatgcccaaaggtggaaacmatgtaagggtccaaccgcaaatgaatggataaaacaacatgtgatatgtacatacaatgcaattattttatttggccataaaaagaatgaagttctgacccatgtaacaacagggatgaagcctgaat

SEQ ID NO: 851536 - DNA, 606 bp, Homo sapiens
taccatttttttcacttatttrtatattttttcattttatggggatttgcttaaaattttaggaaatcatgcttatcaatcttgtgatgagtgtgaatataaattcatatgttttatcacatttagacaggcctcttcacaattattttaaaactcacctaagttttcttttaatagcttcattatttcaatgctatatttttattctttgttcagcttggaatttattttgatataaagagcaaagttttgtttttttttccaaacgatttgccgttttcccaagaccattcatccatggccctgcacctcccccgcctggtgtgcaaagcctcccttggacccatgcctgcatattatctgggtctgggctctactccccacagcagcttcactttacaattttgtggagtttgtctcccttaacacctttatcttacatttcttccctgagtcttctcataagtctctctctctttaagtttttgcacatctaaagtgaaagaaacactttaccgtaagtattttaatgtgcttaattgtgtttggtcttcacactgacagagttctggaatcatctgtacagcaggctcatttcaggggcct

SEQ ID NO: 851537 - DNA, 619 bp, Homo sapiens
  misc_feature 603, 604, 605, 606, 607, 608, 609, 610, 611, 612, 613, 614,615, 616, 617, 618, 619: n = A,T,C or G
ccagccctgaaagccactctaagaacaaacgcactgcagggtcatggaagtgtaggaccactggctgagactgactctctcagagaatctctgtgcatgttacctgcacaaaggctctgaagatgcccatgatatttatccctgcttgctgcactttatttcattcagcatttctcatgcttacttacttgagcaagcttcccagggaattccacttagcactgcagttccacttcaggaatcaatcaaggaaatcgaggagaaggccagcaatctgcttaaagtctcatgagatctccatttccacaaaaataaacattctcatcactcagataataaaatgttggtgtcgtatataatacaaaagtgacattgacactgatgtaaaacatagatgctaactgttaaagtggagttaaaaaccatctctcactaagcatgattcagaatgcaccctgatggaagaaatcataaaagttctatactacaatwaataaataaccatagaattaaaaagctctggagaaatattttcaataattatgacagtggatttacaacaggtaaaatgtaggtgagtgttaacaagaggcatattaatannnnnnnnnnnnnnnnn

SEQ ID NO: 851538 - DNA, 513 bp, Homo sapiens
aagcatatacccacagtttgcctgctgcctttgtggctgccccctgggtggtttctagatacagaatgagattatttccctgtcactcacaattgtggtagagtgatactcccagggtggggaggggaggtctcggaatcccaggtggcatctgcagcatttggaatagccctcatctttcagaggctctggcaatgtcagctgtatctgaaggcaaacctgattccgcaaagcatcaaatccatggccaggatttgtgatgtcctcctgatcacaaaccacatcgattctcagctgtgtgggctctgtgtgcacagttcagtaccagggaactggagatggcggcttggggtcaccgtgctatgcacgcacaagcaggctgctgagyctggcaaaactgtactcctaattttcagtggcaatgcattttccttccttgctgagctgccctgaacatcacctaagaataatgccaggtgtactttaaaagcataacagcacctgggatccact

SEQ ID NO: 851539 - DNA, 623 bp, Homo sapiens
cctacaaacccagcatccccgtgttttccacaaggacatggaataggtgctcaatggactagtgtggattaatcactccttagcrcctagaaggccatagagctttttattttccctttcaagggactgttcccatgcaagtgctgcgcacagaatgccgccgtgactgcccttcctggagctcttattatgctccaactgctgctccaaccagagcttggggtgaacacggtgcttacttcacagggcgatggggaggtctcaatggcataatgcgagtgacttgctcccgttaacttctaccaccatgatgaagaccgtgatgatgatggcaactactcaatgagtttttagaggacataaatttgaggtctttgtggacgtgtgactgactgcagcagaaccagaaactcaaatcaggagaattttggctccttccaatccagttgcagagccacaggcatccctttgttcctgtaggatcctggagagaccaggaaagtgtgtgggtcacatgggtacagagagtggctcacatgtgcctttgactcctccccatctccaactctccccaccccaggccccaccttggtcagttctgtcttatctcctcataacgcctt

SEQ ID NO: 851540 - DNA, 623 bp, Homo sapiens
cctacaaacccagcatccccgtgttttccacaaggacatggaataggtgctcaatggactagtgtggattaatcactccttagcacctagaaggccatagagctttttattttccctttcaagggactgttcccatgcaagtgctgcgcacagaatgccgccgtgactgcccttcctggagctcttattatgctccaactgctgctccaaccagagcttggggtgaacacggtgcttacttcacagggcgatggggaggtctcaatggcataatgcgagtgacttgctcccgttaacttctaccaccatgatgaagaccgtgatgatgatggcaactactcaatgagtttttagaggacataaatttgaggtctttgtggacgtgtgactgactgcagcagaaccagaaactcaaatcaggagaattttggctccttccaatccagttgcagagccacaggcatccctttgttcctgtaggatcctggagagaccaggaaagtgtgtgggtcacatgggtacwgagagtggctcacatgtgcctttgactcctccccatctccaactctccccaccccaggccccaccttggtcagttctgtcttatctcctcataacgcctt

SEQ ID NO: 851541 - DNA, 584 bp, Homo sapiens
tttatgcccaccagagggcagcagcatcctagccacctgcccttctgaggctccaggagtgggcttgaagccttttccccggcaacttcacgccccacaccastattgggcaggatcacctcccttagggtgttcaccctcctgactaaaacaacaaaactttcttaaactgtccaggccttagttttgttagtctcaagctcctgtaccaccatcactgaaggccaatcagtcttcctactgtgccccttcccctgctcctcgtccggcaagctccgtgcctgggatcccccacctctcacacttaccacccacaatagatttgttttctgtgtgacaaggtaattacaagcttggggccagtaggcccaggggccagtctgaggatggtcacttcattctggctctccctgttctgctaacggtattgattttcagttttatttattatgatgatgtgtgtgtgtgatctggccctggtgacatgacatatggaggcaagagggcgagagcaaatttccttttgtcacaatttgacttcttgaaaccgcacccccaccaccaccacccagcattgtttattt

SEQ ID NO: 851542 - DNA, 535 bp, Homo sapiens
cattccattcctagatatttgcccaagagaaaggaaggcatrtgcccatacaaagactgttcacaaatgttccattttatttgtaattgccccaaactggagccagccaaaatgtccatcagtaggtgaatggataaaccagctgtgatacatccacacaatatgtgtgggaatatgactcagcagtgaaagagaatgaactattgacacacctttcaacatggatgaatctccaaataaagatgttgagtgaaagaggctagacaaacaaaaagtactgtatgattccatttatataaactctagaatcaaactaatttatagtggcagaaaggtcattgtttgcctaaggctgtggggggcgggtaggggaagaggcagggctaggggctagaggaagggattaccaaggagcatgaggagattttggggtgtgatgggtatgtttgttgtcttgattgtggtaagagttttaccacactttaaatacgtcaataaagctattaaaaaaaatggcacagagagattaagtaac

SEQ ID NO: 851543 - DNA, 446 bp, Homo sapiens
ccctggcaagggtggtggggaacgggtcccacataactgcccatgtcaagagctgtataactaaatcgggagggacaccagggataagactccytgggtttatagcctaggggcctaagaactcagaatagagcttccttagatccctttggagatacaacttgccagaggaaatataagtctgaaccattagtacctaggaggcagggatcagaggaagtacattcagaggtaagaagaattttggggctatactttcaagaagtcgtggtcgggacccaggaggtatgggtcagaaggaaaggtaggggcgcacgcatgggtgactgttgagtagagacttctggctgtgccatgatctcaaccggctaatgccgggagtttgagacaacagctttctgcctctagtcggctctgggcttccccaagaatattgaaagtggaag

SEQ ID NO: 851544 - DNA, 634 bp, Homo sapiens
gaaacactgtgagttgtgtccacttttcttccttcatctctgctctcaactgccctgctctgcattcttatttaaaaggcatctctttaactgttgttgcaaatctgtacggaaatactttaaaacattttaagtcactcattaattcagtcaactagtgagttcatatttttaaggttattttttatttttttaaaaacagggtctctgtcacccaggccagggtgcagtggcacaatcatagcccaccacagcatcaaactcctaggctcaagcaatcctcctgtctcagtctcctgagtagctgggactactgagttgctgcacagcaccatgcctagctgctttttaaaaattttttgtagagacaagctcttactatgttacccaggctggtctcaaactctgggtctcaagtgatcttcctgccttgacctcccaaagctctgggattataggcatgagcctcttcattttttaaaaatatacaccatataggtgaattggcattttaaaaatccttccttggtgatggaatataaatcaaaaaattctgtagccrgaattataaatgtgattgcctctttagaattcagtatttatgcacacaaatatttactagatatattataat

SEQ ID NO: 851545 - DNA, 612 bp, Homo sapiens
tcacttaagccggggagatagaggttgcaatgagctgagattgtgacactgcacgctagsctaggcaacagagcaagaccctgtcacagagagaaaaaaaaaagatactaagcactgagctctatgacgttgtcaatataatcaaaaggcttagctttgtatgagctccattctaagaatctgggagggctgagcctctgcgaatatcctgctgtgctgccagatgatggggccatgccttgaccttttgggtcaccaccagaataaagctgcagatagaaaatgtgggtagagagtggaagaagggatatcagagtgggaaaaaggacctccaacttcaatctgagagaattttacaagaaaagtaattaaggctatgcaccacactcaggtgtattctagaccaggggttggcaaaccgtgacccactgctagcttttgtacctaacatttgactggaagacagccacaatctgttttttccttattgtctatgataattttgtgcttcagaagtagagctgagcagttgtgttacagaccgtatggcccaaaagttaaaactatttacaatctggccctttacagaaaaagtttgccaacctctggctt

SEQ ID NO: 851546 - DNA, 534 bp, Homo sapiens
actcagcctttgaggaatttatgctcctcttgagaatcagctttgcccctttgtcttgctcagcccactggtgggggtcaatgggcacacaagaactcccakggcaacagcaggtgcttctcattcaaattcaaactggtcagtttctttcctttgttcactctgctctcctaaaaccatcatcccagtctccttgctgcaaaacttgccaagtcatgagaggtaagtcataaaaagttgaacgcttgacttttcgggctttatagataggtttgtttgcagatacgcagcattaaagagaatttagctacctgtcatttctctgacagcgcaccccaaggttgtgaacccctcagacatgtccagttcttctcttacaaccaaacctgtcttcccagacacttctgaatgaggaggcctaggaagaaagaggaaaagagagagagaaagtgtgcacgcacaggcgcacaaacacaaaatccggcttccacggaggacagcagcagcctgctgcacagtggggaccaagagata

SEQ ID NO: 851547 - DNA, 534 bp, Homo sapiens
actcagcctttgaggaatttatgctcctcttgagaatcagctttgcccctttgtcttgctcagcccactggtgggggtcaatgggcacacaagaactcccatggcaacagcaggtgcttctcattcaaattcaaactggtcagtttctttcctttgttcactctgctctcctaaaaccatcatcccagtctccttgctgcaaaacttgccaagtcatgagaggtaagtcataaaaagttgaacgcttgacttttcgggctttatagataggtttgtttgcagatacgcagcattaaagagaatttagctacctgtcatttctctgacagcgcaccccaaggttgtgaacccctcagacatgtccagttcttctcttacaaccaaacctgtcttcccagacacttctgaatgaggaggcctaggaagaaagaggaaaagagagagagaaagtrtgcacgcacaggcgcacaaacacaaaatccggcttccacggaggacagcagcagcctgctgcacagtggggaccaagagata

SEQ ID NO: 851548 - DNA, 405 bp, Homo sapiens
tactgtaaatagtcttgcacaagtcttttggtgcactacatggtgatggttaagccagagacagctaaagagttgtggagatagctgggtagactacagatattaagaaggrtgaaggtaaatagccctaaattatacccaaatgctcttcattgctcaaatataataacaatagcaataagtccaaaaagtgttaccctcaatggtatgtatcactttcagccttggtttcataaaatagcacatagttttttaacaagcataagctaaaaaaaaatgtgccacttaattagcttcacaaatggctgccttgctgttttctacttattttagggtggatttgatctgtatgtattcaatcctgaacttcagcaatataaatgaccatgcttgcccttatccacc

SEQ ID NO: 851549 - DNA, 602 bp, Homo sapiens
caaataaaaccattagatttcatacttatcaaattcattaaagttttccaattctgrcaacacattattttggcaagtatatgaagtaacacagctgatggaactataaacttgtacaatcgatttggagaaaatttgggaatatatatatatatatatatatcagatttgaaactactcacagcctatgactcagcaattccaaacctgaagaaactcctgtccacatgcccaagaagatctctttaagaatgttcacagcattatttatttctaaataatacaaaactgaaaatgttacacatgctccttcaagaataaaatgtgtaagcaaactgtgatgtattcataaataaaaatagttaaaacatgcaaaccagatatctgtatctatctatatttttatcagcatgaataaatgcccagaacatagcactaaaagaaaaaagcaagttggaaggacaaatacagtttaataatacttttatgaagttttaaatatatgcaaaagagcaccatgaattgattattaatgcaaacatatactataaaaatataatgatatgtatgagaatgatagacattaaattcaggaaactaat

SEQ ID NO: 851550 - DNA, 634 bp, Homo sapiens
tccaagagaaggctgtttcatctacatcaaaaatctgttgtttagtgtggccaccttcatcaatgctcttatctagatctgaataacttgcttgagcttctacattcagcacttgctgcttcacattgtgcttttgtggttttgaagatggcttcttttcctaaacctcatgaactaatctctgctagcttccaacttttcttctacaactccttaccactttcagccttcctagaattgatgagagttaggtcgttgctctgcattgggcttttacttaagggaatgctgtggatgctttgttcttccattccgactattaaattttctctatatcagcaataaggctgttttgtttctttttttgtttgtttatcattggtgtgctcagtgcagtagcactgtaaattttttgaagaactttttatttgcattcacaacttggctaattggtacaagaggcctagctttcagcctgtctcggcttttgatatgccttcctcactaagcttatttctagttttgattttaagtagagatatgcagctcatcctttcatttgaacccttagaggccattgtagagttattaattggcctaattmcaatactgtcatctgtcagagaccccagaa

SEQ ID NO: 851551 - DNA, 613 bp, Homo sapiens
tttattgtgtacaacatgatgttttgaaggatatatacattgtaaaataattgaatctcactaattaaaatatgtattacctaacatagttaccatttttatggtgtactatctactatatagtaatatactattttagcaaatttcaacaatacaatacattgttattaactataataaccatgttgtacaatagagcttttgaacttatttctcctatctaactgtaattttgtatcttttgagccacatctcctcaaacttctccaccctaaccaccctagtgtctggcaaccaccattctgctctctacttttataagatcaacttttttagatcccacataagagtaagaccattattagcttaacatgattcgtgatgttaagcaatttttcatataccagttggccatttgtatgtctttctttgagaaatgtcagttcaggatttttctccatttttaattgggtgacttattgttattgagcttttaaaattccttatgttttaaatacaggtattaatattttatcagmtgtatagcttgcaatttttttctctcattctgtaggttttatctttagtctgttgattgtttgctttattgtat

SEQ ID NO: 851552 - DNA, 590 bp, Homo sapiens
gttaagtgaaataaaccaggcacagaaagacaaatatcacatgttctcattcatatgtgggagctaaacaccatggcctcctggaggtagagagtagaakagcggctaccagagtctgaggagagaagcgaaaaggagggaatgaagtgaagttggttaacgggcatgaaaatactgtcagatagaagggatcaatttcaggcctcaacggtatagtagggaaattatagttaataataatttattatatagtttaaaagataagaattttaacattcccaacacagcaaaagataaatgtcggaggtgatggctatcctaattaccctgattttattacacattgtacacatgtataaaaatgtcacatgtacccccaaactatgcataactatgatatatcaattaaaaaatacaaaagaagactgcattggctattcagggtcttttgtggttccatatgaattttaagattgttatctttctataatgaatgtctttgatattttcatagggattgcattgaatctgtagatctctgtgggtagtatggaaacttaaacaatattaattcttcaatccataagcat

SEQ ID NO: 851553 - DNA, 483 bp, Homo sapiens
gtctgcagaggtttctcctgccttttgtttggctatgcactgcccccagatgtggagtctacagaggcaggcaggcctccttgagctgcagtgggctccacccagttcaagcttcccgactgctttgtttacccactcaagactcggcaatggcaagtgcccctctcccagcctcgctgccaccttgtagtttgatctcagactgctgtgctagcagtgagcgaggctccgtgggcataggaccctccgagccaggcacgggatataatctcctagtgtgccatttgctatgaccattggaagactgcagtattagggtgggagtgacccaattttccaggtgccatctgtcacccctttccttggctaggaatgggaattccctgacygcttgcgcttcctgggtgaggtgatacctcgccctgcttcagctcaggctcggagcactgcacccactgtcctacacccactgtctgacagtcc

SEQ ID NO: 851554 - DNA, 495 bp, Homo sapiens
tttggccatcttggctccacccctccaaaaatttaaaatrcatgagggaggtggagaaaagtgtagagctttttttttatgcaatcaaagttaagttgttatcaacttaaaatagcctgtaataacaataagatttaagaaataatcctcatggtaaccacaaagaaaaaaacctataataggtatgcaaaagataaaatcaagaaatcaaagcataccactagacaaaatcacctaatcacaaagaaagacaataaaagagtaaagacaaaacaaaagatctgcaaaacaaacataaaacagtagcagtaggtttttatatatcaatgcctaccttgaacttaaacgaattgaattgtctaatcaaaagacatagaatgtgtacatgtataaaagacaagacacaactatatagtgcctataagagactcacttcacatttaaggacacacatagatgaaaagtgaaggggtataaaagatatggatgtgaatg

SEQ ID NO: 851555 - DNA, 495 bp, Homo sapiens
tttggccatcttggctccacccctccaaaaatttaaaatacatgagggaggtggagaaaagtgtagagctttttttttaygcaatcaaagttaagttgttatcaacttaaaatagcctgtaataacaataagatttaagaaataatcctcatggtaaccacaaagaaaaaaacctataataggtatgcaaaagataaaatcaagaaatcaaagcataccactagacaaaatcacctaatcacaaagaaagacaataaaagagtaaagacaaaacaaaagatctgcaaaacaaacataaaacagtagcagtaggtttttatatatcaatgcctaccttgaacttaaacgaattgaattgtctaatcaaaagacatagaatgtgtacatgtataaaagacaagacacaactatatagtgcctataagagactcacttcacatttaaggacacacatagatgaaaagtgaaggggtataaaagatatggatgtgaatg

SEQ ID NO: 851556 - DNA, 612 bp, Homo sapiens
caatatagagtaacagggattagatttacttttccatctgaaaccaaataaaccagacaaaatatttgaagcaacaaaagacagcaatgcctgagagaaagggaacaaatgarcactttgattgctctaactaactgcatggagagagtttccaggctgtggctcagaaaaaaaaaaaaagacccaggctgtaactggcaaaatccctgaactgaggagatagagctataggtctggggaaatcaaggcaactggagttcacaggacagagtacttgagaaagaaccccagagatttacagagggtcttccttgagtatttcactgatcattacataaatgcaaggaagctactcataagttgaggaaaaggccatctgaaaggattaaagagaagaatgcctcaaatccacacagggctagggctattgcctgttcccctcagccagattggaaaatattacaattcatggggcattaggtagataactcagaagggatttacctcagagtcaggaataattagccccattctaaacaaagctctgatcccaactaacaaatattaaagctagacctgaaaagatcagactgtttccagatgacttaacta

SEQ ID NO: 851557 - DNA, 606 bp, Homo sapiens
attcacactcgtattcccttcattatgagcaatctaaacttttctagcatagtgtattaccctttgtcactttgtattacttttggtccttcaaggtccaaaaatragaaaaagttagccataacaactcacacgggtgtcatttattctttctgtccacagaaatgctgttttaaattatccagtcaaaaacctattgaatgcagttaattaggtctcgtatttctaagccaggcatgcatattgcccatctttcagaagacaaacatctaagctataattatcataaaaagcttatctatgagaattatactatccagtctcccaagttaatataatgcaacattgtataaaaacaggaaaatgctgagtgatattaattattacatgaaaatgttttaaaatgagcttgctaagtaattcagtggctatttttaggatgtaataggaaaagcactgcagtaccttggaacatttggtgaattgagcaacgtagagcaagttgtggctatgattgatgaagaaatgtgtatcaactgtggtaaatgctacatgacctgtaatgattctggctaccaggtaagaatcctgctggaattagaatgc

SEQ ID NO: 851558 - DNA, 619 bp, Homo sapiens
aaagccccactcaacctttytttatttttcaatacacttagaaacccaagcattggtcattaactgaaataaagaagggctttaaaaggcttacaatgttattcatccctacgcatctccatatcttgtgttgaattcattcttgcctacatttaattctggaccttgtatttagcttgcaaaccttcatatttaaaaatgatgtgactgttaatgatgtctacctaaaagctgtttctgaggagcctaaaacaaatataagcaataactacttttagctccaagtgaatggataatctacaataatcaatatacaactttctgtctggcttttctgatatgctctcaatgaaaggactttagaatgagttggcctcaccacaggtctaggagaccagatagaagtctaatgtgactttagaaaaataagtgacaaacttcctgttcttttgattatacatagaaatatgagtgcataaatcagtagcagttggccttttgtatccatgggttaagcatccatggattcaaccaaccatatactgaaaatatttggaaaaatattctgtctgtactgaacatagatagactttttttccttaccattactccctataca

SEQ ID NO: 851559 - DNA, 556 bp, Homo sapiens
cgggagactctgaaggggagacctgtgattataggcatgttctgccttgtctgtgtttgctcagtgagagaaacatgagtgattgatttccaggcctgaagggscatttgactcaacatttgtcaaatgctcccattcaggttctcatcctacactggaataaaacacaatttgtttattaaatcaatgcaaaaatgagattgtggttaaaacacagtaaacctatgccattctttggggcacatatttttcttctaaagtgaaaaaaattctggtgtaactagggaatacttacattaaatcaataccctgctgttaaaactaagttctacagaatgaatatactacaaatatttcaccaagaaaaaataatttgagctgagctcatacattattataacactatattatttttaggtgtgagtaaaataaaactggtggcatttccttgcacatggtagctttcctgtatattgtatataaaaatatatatacaaaaggtacacgtgacttcttagaagtctttctatatataaggtgttgaagatcttatttt

SEQ ID NO: 851560 - DNA, 492 bp, Homo sapiens
gatgtgtattgatagctaccattacttgaagagtatttaaaatgagtctgaagtctatacaaagaatccttgcaccatataattaaaacacctaatacayctttatatgacatcagggcatatcatatataatctctatttttcttctcccccaaatctggtttaccagttttattttctccccgccccatgtccacacatcttatgctcttgtagtgctttcaatgacttgatattatggaaactttctgggttttttcccagagcaaaattatccatctgatggtccattatccaaatctataatgaattacagacctggtatatttactttgtatattgtttgtaagttttttttttttttgagccaacagttcaaacccaggaaattttatataaaaatctggatcctaatcataatctggcagcaccgggtctaaatttttgcatgctattataataatggcctagctctacttagtaggtgcccct

SEQ ID NO: 851561 - DNA, 619 bp, Homo sapiens
tcttctgttcactacattcactgttgaaattctaagagtgagactgctgtctcacaccaaagccagtgggtactatcttcagtaggcacgcagcatcatgtttgtatttgatccagctagatgacatgtaagagaaaactttattgtggactctgtaaagtgtgacattcgtttgtgactcaatttgctcatgtatttgttcctgggagttcattacatagctaacttccagctgctttcaatttacatcataaaagaaatgcatcatattcttctcagtgtcctggtagtgcattttcctttagtttttcagtgaattctgttgtaagtaaaatggataagattgttcattattttggattattttgctgaagatgaccagctctgagatgtgaggagtaaataagaaagtaacagtagaatctggaatatcttttaaaaattaagacatcatttttaacagcagagtagccttaaatgacctgattccacagaggagccaggaaacagtatgaaactacaaatttattttgtagaaatatggaaaccttaatactattaagatgyaaatcttaatactattaagatgcaaatcttaatactattaagatgcaaatct

SEQ ID NO: 851562 - DNA, 369 bp, Homo sapiens
attttttttctctgtctctgtctctrttattttctctctctctctcgtatgcataaaacagttttgcaggattggattaggtattctatacatttgcaaatattttaattcttgtagcccctctaatataagcctaatttaatgtgaaagctcaaaaaactttctgcttaactagaaaatccttcctctggacatactcagggctacttgcaatgtgattagtgacatccttctttagtagcagaaaagaaacattccctggagctctcagaggtcattaaacagatgtccaattattgtctagatgacgtttggcaatatcactaccagatggctttattctggttatcttccaatttttatgtctct

SEQ ID NO: 851563 - DNA, 522 bp, Homo sapiens
gaaaaatttgtatttcagcataactttcacttttcctagaaaaaggtttctggtccttttagcctagagcctttttgaagctcgtgcttcycatagaattttgtctttatctcttcaaactgcttgtcatactatattgaaattatttattgtctttcctgacatgcctattgagggtaaatattgactcttattgtgtatcatgtcttcagcattgtatgtaataagtattcaggctgggcacggtggctcacacctgtaattccagcactttgggaggccgaggtgggtggatcacctggggtcaggagctcgagactagcctggccaacatggcaaaaccccttctctactaaaaatacaaaaattagccgggcatggtggtgggcatctgtaatcccagctacttgggaggctgaggcaggagaatcgcttgaacctgggaggcagaggttgcagtgagccgagatctcaccactgtactccagcctgggtgacaagagtgaaactccatctcaaaat

SEQ ID NO: 851564 - DNA, 505 bp, Homo sapiens
tttttgtttaggttcagaatgtgcatgaatgtagaaactctgataacttctaatatttgrtgagtgcaaaacagctgataattcactctttgaggtaataaagcaaaggaagtcttaatttgacattgtatctataacacattccgtggtgccttaaaaggaaacagactgaagaaccgaacaagacagcccccagggtctctccagcatgtgtcaacaacattaagagaatctttataggaggaggaggaagaactgctcacattgtatccaggataaaacagctctgtgggattttcctgaaagaccaagcaccagtccgtgttggaggttgggcttaaacatagaggaagtcaagcctacagagtacttcttagttccaataatttccaataatcttattccgtagtgactgtgaggatatcaaaagccctgtagacccttttatggcttatttatgctgtccgtacattcatccatttcttataacctcactagcattatt

SEQ ID NO: 851565 - DNA, 505 bp, Homo sapiens
tttttgtttaggttcagaatgtgcatgaatgtagaaactctgataacttctaatatttggtgagtgcaaaacagctgataattcactctttgaggtaataaagcaaaggaagtcttaatttgacattgtatctataacacattccgtggtgccttaaaaggaaacagactgaagaaccgaacaagacagcccccagggtctctccagcatgtgtcaacaacattaagagaatctttataggaggaggaggaagaactgctcacattgtatccaggataaaacagctctgtgggattttcctgaaagaccaagcaccagtccgtgttggaggttgggcttaaacatagaggaagtcaagcctacagagtacttcttagttccaataatttccaataatcttattccgtagtgactgtgaggatatcaaaagccctgtagacccttttatgrcttatttatgctgtccgtacattcatccatttcttataacctcactagcattatt

SEQ ID NO: 851566 - DNA, 610 bp, Homo sapiens
catgtgacctgtgtgtcagtgtactctaaaatgcctaggtaaaacaagtatttcacattaatagtcctttctgttacgattttctctatgcaaaatagaatgttggttgaggcacgatgattttttctacttaattttttttctgtaagaatatgcaggacttttatcttccctgtctgttttttctctaagaggtttaaaacaggacatacaaatttggtgtgtgtatttctgttgaaaggtcagaagactggtacaggtctaaaatattttgctggttacctcatttgtgaaatgagaacagctggaccaggtaatctctgaggttcttttctgctctaaaattccgtgatcctgcagttgaaaaaaaaatgtaatttttggagagcgtatccaaggttaatttaatgtgtggtgaccttcatgatctttagagttttccaagtgaggtaatagaacatgttattctctggagcagagaagcagctgygagggtactggagataggagtctgtcgtaaccactatttctcttcactattggtacctggatgcaaatgtaccacgtggcagcagggatacttttgaggttcactagagctggctcccag

SEQ ID NO: 851567 - DNA, 663 bp, Homo sapiens
aaacccacgagttaatgcttagccctcattttacctcacccatcagccacatgtaacacagttgaagactccttccttcctgaaagactttacttggttggcttggaggacaccacaccctctacattctcctagattccctccctggctgcttatcctcagtctgtgtcttgggtgcctctataactccccaggatctaaacactggagttttctagggctcagtccctggacttctctctatacctactccttaggtgatcttgtctgggctcatggctgagagcctgatgactaccaaatgtatatctccagcccaaactctcttgtaaatgccaggcatatatgtctaactgtgtattgaaatctcattcggatgtttagtagacatctcaaacttaagatgtccaaaactaaactgctgatacacacaccctccacaatcccctcccgcccctggctgccgcagttgctgctctatcctctgaattctccatttcagataatggcaactttatccttctagaagctctggtttaaaagcctgaagtcagtcttgaccactttctctctctcacaactcacctccaatccttcagctgatcctgctggtcccacctttaaaatatayccaggatccaaccactcctcaccatctccact

SEQ ID NO: 851568 - DNA, 616 bp, Homo sapiens
tttgttttttttcttttgttgagatagggtctcagtcttgctatgttgcccaggctagtctcaaactcctagcctcaagtgatcctcccgcctcaacctcccaagctgttgtgattacaggcatgagccratggtgcccagcttgtgctgctgtcctaacatttgctcttgatataattaaaactctttttttatatcgtagaataatgccatttaagtgttatattaagtggtggtgctagtgctaaaaaaatgtgccccaaatttaataactttagaacaaaagttagatgtgataaaaaatctatgaagatgaccaaaccactgctgtgatatctcatgctattaatttaggagagtgtacccagcagaatattagcagtagtgctcaaaaaactgaaagcagtattaaagcaggtatgcctcttagttcacaaaaattataaccaggcaatgataatggaataaatggaaaaaaattctggtacacaagttgcaagatcagtgctgccataatgcacccctgagggcaatctatcatctatgctaaggcatcagtattttcattttgatttgaaaagaggtgacagtgagacaaaaggtttactacaagtta

SEQ ID NO: 851569 - DNA, 602 bp, Homo sapiens
ctcaaagtagaatccaaaattcttacgaggactttcataacttaataatatctaaatcctggccactattctgaccttatttcctacctttcttcccttcattcactccagtccagccccactggcttatctgttcttcctcaaagaagccaaatgtgctcttccacaaggccgttgcacttggcacttctcactacacggaatgccccttccttacatatttgtgtggcttaatcccctattttattgaggtctttgttcaaatgtcatttatttagagaagccctgtttatcactgcagcacccatatttactctttttttttttttttttttttttgagacaaggtctccctctgtctcccaggctggagtgcagtggcatgattatggctcactgtagcctcgacctgctgggcttaagcaagcctcccaccgcagctttccaagtagccaggacaacaggcacacgccaccacgtccagctaatttttaaaatgtttatacagacagagtctcaccatgttgcccaggctggtcttgaaatcctgagctsaagtgatcctcccaccttggcctccaaaggggctaggattacaggtg

SEQ ID NO: 851570 - DNA, 529 bp, Homo sapiens
aagggagtcccaggcccatgactctttccagaaagattctccattcctcattttcctctatggctacyagtcaatttctgaggtttgactgaattatcaaattcaaatctgcccagatgtcagtgttatcattttcgtgtctcctgatggaaatattctttgattggttactaagacctctaaaccagcagagcccatagttgaggaaatgagaatgaaaaactatctaagtgggttattagatgtaataatgaacgatgttaacactcatttcttttcttttttgaaacagggtctttctctgtcacccaagctggagtgcaatggtgtaatcatagctcactgcagcctcgactcctgggctcaactctcacttcaggcacgtacgtgtctcacccaaggcatcgaaaatacctggtatgtctggcctccaagtcctgttagctttttttttgttttttgtttttgagacagagtcttgctctgtcacccaggctggagtgcagtggtgtgatcttggctcactgca

SEQ ID NO: 851571 - DNA, 496 bp, Homo sapiens
gctaggcctgattttaactaatgcacctttacactagattttcaaaaagacaacctacccaataggaaaatcacttgatctcatacacacacaaacatacagatgcatacacatatacacacatacacagccacatgcataattagacaattcatggaagaagaaatccaaaggattcataaacatctaaaacatgtttaatctcagcagtagtcagagaaatgcaaactaaaacaagatagaatttttcatgcatcagcctggcaaaaatttctaaagagcaatatattcagtactgttgggtattcaggagaatgatgacccctttctggtattgttaatgtaaactgctatacatttttggaaggaaaaattggcaatatytattaaatttgaaatgctcttacaatttcagccagcaagccaaaacaaatctatgccacagaaagtattcaagagcatatgtccaagaattcttactgcagcattatttgtc

SEQ ID NO: 851572 - DNA, 584 bp, Homo sapiens
aaaataaacatttacgtgactgccaggcgcagtgccctttcatatttgcattttgcctggtgtgaacatcgttttaccagagtatggaaatgttttcattttggacataactttctcttctaatattcgattgggactatcataggccatttgggggaaaataataaaacatatcttcaagttttaaaattttacttaattttggacatgtgcaagaaaatttactgctactggtacttgctctgaatttctaggtttcaattttggtgagactagactagttgctctgaaagatctctgcgctgtattcatcttacaagtctacttttatactgatactcattccttgggaagacataaaagaatgaaaaggtgatgcagttcattttccacagcattgaacactcatttgtcaccagcgtagaagggatttggggagagattaagcagtagcagkaatagtcaataatctgcgtctaaagtggcttgctggctttacttcagtaaattctggccatgtgaagaatacctaaatcaactatcagagttcttaacagtgaacctgtcataactatgattttttt

SEQ ID NO: 851573 - DNA, 509 bp, Homo sapiens
tgtaacagactttattgaaaattaattgctaaccaagaaggcaagccaggactttgagtctggggcttttttctcaagcaaccmtaacaaaatatcccacactggctgatttacacaataaaaatatatttttcacagttctgaaagatgggaagtccaagaccaagagactggtaagttagaattcattgcaagtcctcctctcttggtttgtggatggctgccatcttgctttgtgctcatgtgacctttcccttatgcatcatggaaagagtaagtggggtctctggtgtctcttcttataaggacactaaccctattggatcagggccctaccatcatgactgcatttaatcttaactatatacttaatggcctgatgtcaaatacagccacactgggggtttgggcttcaacatataaattttggggaggaaacaaacattcagtccataacagatgggatatggcaaaggaaatgggggtagaggagggatgggaagatgact

SEQ ID NO: 851574 - DNA, 634 bp, Homo sapiens
tattactattggatactcctaatcaactacttataaaatgcaagagtttgggtgactgtgcatgtgctacttttgaatatttttggcaaactaatgartataatgagattggctgattgcttctaatgttactagacaaattggctaaagaaaaggatgaggtcagacatttgaattaccagctcaagtactgcataaatgacctgaaaacttccatgtgtgccccaaaggagagccttatctcctgtattgtcagggctgagattattgaaaatcaaacccagaacctcatcctgtgactggctgaattacaagacaatttgaactcccagccttgtagagtgtctgttgttaaagtcagagcattgattggaaagggagagtgatatgatatggatctgtttcaccatcctaattttcaggtagaattataatcttcaatgctggaggtggcgctggatagcaggtgattggatcatgggggcggtttctcatggttcatggtttaacaccatctccgtcttggttctgttatcacaatagtgagttcttgtgcaatctggttgtttaaaagtatgtggcacctccccctctagtgggactctttgtattttggaggcaacatatttctcat

SEQ ID NO: 851575 - DNA, 431 bp, Homo sapiens
ccttaagccagcgtagcattgggtcttgcccaaggcctgctgtaaccattacatggctatcacctatatttacttaaggctttagggatctacaatcagcaggtggaaaagccagacaggcttgtaccattcccttcagagccacgagttcccccaggccctgggtggacctagagttgccttcaggtcaataggctcccctctagcccaggacataaaatgccatccaagagtcaacacctggtatcagggactccaagagactgcctggtgctctaccctactataactgagttggtacttaaggtgcaagacaaarttccctttacttttctgtctgcttttgtcaaacagaaggagtctttcattatagccaccatagctgggaatgtgctgggtttcacctgaagccagtacagctcagagtctca

SEQ ID NO: 851576 - DNA, 635 bp, Homo sapiens
aattcaacatgagagtcatcagcagatgtcaaacagaccttcaacctcatttagaaatcttgaaattcaatattcagactcatgcagcaaatgggcacatggggtttggggsggattaggaaagaggtctacacaccctatttaatgatgtagagctgctcttccaggcagtggtgctcaaagaggcccccactgcttgtatttaaatgagattctggcacagcagcgaggtgaatggtggatcaacgcctaaagcagcaatctactaaacatctccgtgactggggaaaccccaaagggctacatccaaaccttcgtacctgcagccattaatgacttctagaggagcagagctcagggagggacaacaataggtgagaagtcaatttaattttcattccctgccagaccatattcttaacataacccaatgagaatttatgtcagatgcacattgtatatctgtccctgatttaaatggcagatctcgtctccatttcagattcattcttgggcctttagctgcatttattgaaaagtggctgtattcactatgaaccaatttttcccttgggttttattactgaaatcatcaaaataaatcacctagaatgctccatcctacctggtttgaa

SEQ ID NO: 851577 - DNA, 494 bp, Homo sapiens
ttttcttcatactatgtatcaaaataaatwgtagactaaaattttaacaattgtactaaattaaactattaaaaaagaaaaaagataggtgtatgtttatcctatttgaaaatcatttcaccataaagacacatgcatacatgtgttcatcacagcactattcacaatagcaaagacatggaaccagcctagatgcccatcagcagtggactgaataaagaaaatgcggtatataaacaccatggaatactacacagcatatgaaagtgaaatcatggcctttgcaacaacatggatgaagctggaggccattatcctaagcaaattaacatagaagcagaaaaccaaataccgttctcactcggaagtgggaactaaacactaagtacacatggacacaaagaagggagcaatagacactggggcctatttgagagaggaggttaggaggagggtgaggatagaaactacctatgatgattaactaggtgaca

SEQ ID NO: 851578 - DNA, 559 bp, Homo sapiens
atgtgaaaaattggattagactccctattttttttcaaattgtgggaagtacatataaaaagcaacatggaatctgtaagttcatcagcaccttgcctttttttacagagtctatgttcgcaacatctgctttgtactctaaagaaacataacatagctgtatgtctactgatgtactatatgggattgtttttcttttcaaaatctgctgttccttgttttttgttagtttgtttgtttttgagacagagtctcactctgtcacccaggctggagtgcaatggtgtgatctcggctcactgcaacctccgcctcgtggattcaagcagttttcctgcctcagcctcccaagtagctgggattacaggagcctgccaccacgcctggttaatgtttatttttgtatttttagtagccatgggatttcaccatgttggccaggctagtctcaaactcctgacctcaggtgatccacccacctcggcctcccaaagtgctaggattacaggcgtgagccactgatgctcaaatattctwtgcaatcttttacacattactg

SEQ ID NO: 851579 - DNA, 504 bp, Homo sapiens
ctagctccgtgttaaccaattagacagcttcttcccaccccagaccccagagacctggcccaagcctggagaagacatcctgtttcccctgaggaagtggcccagattgaaggagccactagggtrtttgaggggggagtgagtaggaaatagggcaggaaggggctgacaagtagtaataacagtggtatccagtgtccgctaagaaccgcgcccccactgccacccccactgctttgtcctgacccttggagatctcaataaacttggcaaactcttactggcctttggagtccaaagtcttcccatgatcccatctcatcctcaagctggctcctccatccaccatctctcttctgtataccatcccagtccaaaaaacaatgccggccctttcttggtttctacagaaaacaggctcacaccacacattccaggagtttagaaacgttgctgagcactaaatgggcaccaggcaccatcacattgcctggcaaatatcct

SEQ ID NO: 851580 - DNA, 336 bp, Homo sapiens
agtgcaagtctcttctgcctgcagccttggttcctccytctgttctccagcaatccaccactgctcctcaggacgactgcaaacaccagacggaagtgcatcattttggccacagtgtcccaggtcgaaacaccacctctgactccaaacagagccatgagtttgtcccttgaggctcgggctatgtgcacaagttttcagaacgccttgtttcttgtcaaaaactaaactgatgtttttcctggcatggcttttggaagggagcatgattgctgattaaatatgaagtggtttgaaacctaagtgtctctctgaataacgtaatgtttactcccc

SEQ ID NO: 851581 - DNA, 336 bp, Homo sapiens
agtgcaagtctcttctgcctgcagccttggttcctccctctgttctccagcaatccaccactgctcctcaggacgactgcaaacaccagacggaagtgcatcattttggccacagtgtcccaggtcgaaacaccacctctgactccaaacagagccatgagtttgtcccttgaggctcgggctatgtgcacaagttttcagaaygccttgtttcttgtcaaaaactaaactgatgtttttcctggcatggcttttggaagggagcatgattgctgattaaatatgaagtggtttgaaacctaagtgtctctctgaataacgtaatgtttactcccc

SEQ ID NO: 851582 - DNA, 563 bp, Homo sapiens
taaagacttgttaaaggtgatttttgacagtgcttgattttgcagtatgggctgactttagagcttaacccctacatagggtatagctctagtgtggtgaatatatgctacatagatatacactgccctgtactggggaataattttacatatatggtggcagggactagtggaaaaagttttggcttgaggagaagtgatcatctcctggttctatttctgtcctaccaactactagctttattatggtatacattgcttaacttctgtcctccagctttttcctttgtaaattctgaaacctgtcaactcagtacttaggaaaggtgtgataaaatatttgatctcctgaaatgtatgctttgccttttagctaataaagtagcttcagtgtagctttagctgtgttattacagtagtacagagtttagaattgcctgttctaaagttgttgagcaaaccactgaattcccttttaaaaaacaactatgagatggtgaattcagttacctkaaattttttttaaataatagttttctcctactatgtaatagaagaattac

SEQ ID NO: 851583 - DNA, 540 bp, Homo sapiens
atttgcctgtttatttccttagagttagagggtrcaacactgtctttggattcttcccctgtcacgtctataaagactctcaaggacaaaggtttatcttacattatgaagcaggcttttagctactctgttttccatcacagtttttcaatgtgggatggggttaggggttcagtgctgggttttcaagtggtcttgcttgttgatctgaatttcaaggttaattatgaactaactgtttcaggctggtttccagaagattctggtcttcagatttatttggaaattaaacagttaaaattgaatacctctcagtttgtagcattgaggcatatctggttaatgtccctcttttcagaatctctcctcaccaggggagctaatagaccaagcaaatgaatttggtgaagagaactgtgactgctgtctgccctgtatgacttttcttgtttgggggagcctccttgggtcattctgcaagcacccattatgtgtaagcctctgtgcttcttacggatatagagaaaaatgactcagttc

SEQ ID NO: 851584 - DNA, 564 bp, Homo sapiens
ggccctaggtgctctccctttggagggtgcttatgtgaattacttacttacgcacttttcaccagggttttctaactgttccaaagtaaggcctcctcctgccctcctgstgctgcgtcaaagtcctgccgctcctcctggggtggtaggaaccaggctccattcattaattgttatggcccttccatgtgacttatgaacatgaattggtcatcattttgtgtgcagtgtctcaggtggggatgtgaagagagataagatacggttcatgccctcaccatgcttgctttttagtgggagatggacatgaaattaaaatgctgattcttgccataagtctgttcaaagcttatgtgattccagtagaaacagcagcagaatttgtaactaataatcagtcctttaacattgttggttccagaatgggctacatttttcaattacaacttgggtgcaaatggagaaaataaattcaggccatgtctaaaattattctgatttttgaaaatatggtctgaccatattttcaaaaatacataattaataaattacaattcattaatt

SEQ ID NO: 851585 - DNA, 597 bp, Homo sapiens
tgaacaatttaatttcaatgttatactgaggcagcacagcgcagcacttcagagcaacgactttggggccagaccacctgagttcaccagctccccatctcctgcctgcataaacttgcacacattgtcttactaatctgtgtttcagttttgccatatggaaaatggggtggagggggaggatagcagtacccatccttcagtattgttatgaggattaaatgagttcacacatgtaaagggtttgaaagggcttgccacagagcaagcactcaacatgtcctcactcttattattcactattaatcatgagtccactcagttgaattatcaaaattcatctttcattgttctgccctccatagctcctcttttatcttattttcatgtcttttatcagtttcctgtgttctgggagaccatctgaagtttgttttctttactaaattgatcttctgtgttggacctggcattcgttgcttccatgcagttttaattcagcagccatgtctttaatctyctcctaatctcttcttatcccagattattccagttgtaggattgctggttctaagtgaattatgtaccatcttttga

SEQ ID NO: 851586 - DNA, 610 bp, Homo sapiens
taatgcctagaagggcagcctggaatggaggcaaaaatcacagactttggggccagatgaggttgccacttgtgagctgggtgaccctgggcaggtcgcttctccatcygcatccccagggaaggtcctcaccaagttattctgccaaaaaaagaatccattcaccgaacaaatatttattgggcaattcctgtgggtcaggcgctggggacatggcaggacataggacggtcaaaggtctctgcccccgtggagttcacacttgtggagagagcaggcaatacacaagataaataagttgcatattgcatttgagaagatccatgctagggagagaaatgaagcaggaaaaggagatgggatttcaatgggcggggcaggaacagcctggtgagcaggtgacagctgacaacgatctgtaggaggtgagggagggagccgcggggaggggagagtgttccaggcagtgggaacggtgcacaggccctgagtgggggctgtggctgttgtgtttggggtgtagcaaagaggccagtgtgtggaacagggtgagcgagggagagagactaggaggacgtgagggccaagaggccgtggggggcggatcctg

SEQ ID NO: 851587 - DNA, 634 bp, Homo sapiens
ctgttcatgatagcaaagacttggaaccaacccaaatgcccatcaatgatagactggatcaagaaaatgtggcacatatacaccatggaataccttgcagccataaaaaamaatgagttcatgtcctttgcagggatatggatggagttggaaaccatcattatcagcaaactaacagaaaaacagaaaaaccaaacactgcatgttctcattcttaagtgggagttgaacaatgagaacacatggacacagggagaggaacatcacacaccggggcctgtcgtggggtggggggctaggggagggatagcattaggagaaatacctaatgtagatgacgggttgatgggtgcagcaaaccaccatggcacgtgtatacctatgtaacaaacctgcacgttctgcacacgtaccccagaacttacagtataataaaaaaaaagaaaaagccctaggtactaattatttatcccacccttttaaatgctgaaggagaacattaataagcagacagatgggagtactaacaatacaagacccaaataacatattcgttcttacctgatgtggactgcttcatcatgttatgcattaagagacaaagtataaaaagtaaaaacatgtagaatttatt

SEQ ID NO: 851588 - DNA, 412 bp, Homo sapiens
gcataatgatgaaatgataaaataatatcctgtgtacttccttttagaggatgattcacataaaattggccatcttttcctgctgttgtatattaatatcattggtccactgaactgcaatgatcagaattatgactttccttgaataaagcatcctgtttcctacccctaaccctagaagagtactctttcagggagaacctatttttgcagctcatcttattttggtagtttttcaccaatcatcttatttgcaatttcccaactatttaattgtcatcttacattaatattattttaataatcagactgttccattgttcaaaytttaaaaataaatgaaagtcattaatgaaaagtattgtctcattccattataatgagcttcctcaagtatgttttcagtgatgaa

SEQ ID NO: 851589 - DNA, 601 bp, Homo sapiens
tacccagtttattatttctagtccattcaactcataacaacatccagcagyactttacccacaggtgggtgtttattaggtttttatttcttttgtccaggtttattgagtttgaagagtaggcagggatttctgtttttatgagtcacttgtcagctgtaatgaagtcttcttcactaaaaaaaagatgtgaggacaatcttgcgcagtgtcataattattctaaaaatacatcatgcttaattgtatccacaaaggttttaaaaatttaaacatcagttttgagttttagggctttcttattggtgaattatcaataattgtagtgctttcttgaaaagttccctggggtggatttccttagttgcatataattctagcctcttcagcctactaaggataaaagggacatgaagtacacatatctgggaattaattacatttttctgctcaagagccaagtcattttcagaaattgatgtcaaataggtcttccatagctgaaagtgctaggtgtctcttcacatagttaagatttccccctattcagaaatattagtttctgatgacaatggaaaattccaaatgcagcagcttcact

SEQ ID NO: 851590 - DNA, 602 bp, Homo sapiens
caatcttttccttccaattcatttatcatgagcccccacatgcagctgagaggctcttccctgaggggatgcggtgrtaattggtcctcccacacgaggtccccggctggtctgtcagcaccacagccaagcgtcaccatctgtcagcccgtgctgtgtccccacctcgcgtcctgcagccgggggtgcagagggtgacagagggagatggagatcgtttttaacgtgatgagcgtgacagtcacccgagagcggtcacagacagacccacccaggacaaagctgtcaggaggcaatggagagtcttcacccgtgttccatccacggccttctaacggccggtgctgtggaaatctcattcaagcacacaagctgatgagaagtcaagatgacttcggccatggcacctggccccagaagaaggctggatttctaattaggacggaagaaacaggaactgcccctgctccttggtttctgctccctgggggcctgctgcctggaaagccccgcggggggctggcacgaagggtgtttggggcagcgccccagccacgtgggcaggctgggaggtggccagcacaggctctggggtccctcag

SEQ ID NO: 851591 - DNA, 602 bp, Homo sapiens
caatcttttccttccaattcatttatcatgagcccccacatgcagctgagaggctcttccctgaggggatgcggtggtaattggtcctcccacacgaggtccccggctggtctgtcagcaccacagccaagcgtcaccatctgtcagcccgtgctgtgtccccacctcgcgtcctgcagccgggggtgcagagggtgacagagggagatggagatcgtttttaacgtgatgagcgtgacagtcacccgagagcggtcacagacagacccacccaggacaaagctgtcaggaggcaatggagagtcttcacccgtgttccatccacggccttctaacggccggtgctgtggaaatctcattcaagcacacaagctgatgagaagtcaagatgacttcggccatggcacctggccccagaagaaggctggatttctaattaggacggaagaaacaggaactgcccctgctccttggtttctgctccctgggggcctgctgcctggaaagcccckcggggggctggcacgaagggtgtttggggcagcgccccagccacgtgggcaggctgggaggtggccagcacaggctctggggtccctcag

SEQ ID NO: 851592 - DNA, 618 bp, Homo sapiens
actttaatgtctgtttatactaattctatttttgtgtaatttctgggctgtttttactgcttcttcaattttgaactttattttcgtgcttttctgtaggtctattaatatttaaagaccagacagtgtgaattttaccttcttataggctggatatttttgtattcctaagactcttgagctttcttctagaacaaagacatttggaaacagtttaatcctctttagccttgcttctcaaccttgataagccagatcagagaacttgttctctattttttcccactactgaggcaatacacgtcttagcacgctaaccaaagccctgtatttttcatgattttccactttttctggtgggaacatgtccaaggattttttttctgttccttttgggtgattctttctccacctccactctccacctttggtgagaagcttcctcaccagatgcactgctgcactcagctgaatattctgggaaaccctctgtaggtctttggggcggtttgtgcatccctgtcttaatactctgctctccagtctcatgctaccttggcttcccaggctcctaaytccttttgaaataaaggaggcctttccttgtgttgtagcctg

SEQ ID NO: 851593 - DNA, 618 bp, Homo sapiens
actttaatgtctgtttatactaattctatttttgtgtaatttctgggctgtttttactgcttcttcaattttgaactttattttcgtgcttttctgtaggtctattaatatttaaagaccagacagtgtgaattttaccttcttataggctggatatttttgtattcctaagactcttgagctttcttctagaacaaagacatttggaaacagtttaatcctctttagccttgcttctcaaccttgataagccagatcagagaacttgttctctattttttcccactactgaggcaatacacgtcttagcacgctaaccaaagccctgtatttttcatgattttccactttttctggtgggaacatgtccaaggattttttttctgttccttttgggtgattctttctccacctccactctccacctttggtgagaagcttcctcaccagatgcactgctgcactcagctgaatattctgggaaaccctctgtaggtctttggggcggtttgtgcatccctgtcttaatactctgctctccagtctcatgctaccttggcttcccaggctcctaactcyttttgaaataaaggaggcctttccttgtgttgtagcctg

SEQ ID NO: 851594 - DNA, 573 bp, Homo sapiens
gtccccttggcctctcccggctggggccttgctgtctgtcacccctgaacggagctgatgctgacaccccrgaacagcagggacctggaactgttccagtcacctgcttcaagcagcaccttgaggacagaccttcacctgcacttggagcatttagttgaactgcagttttgataataatgtaactgtgtgcaaacactagagcaagtgactgtggtgtggaagggcgaatactcgggaagtgtgggatttttgtctgagaagtttattcagcaagcagctaattcatggtaacataaagaaagttgatatgaaaactgcccttcccctatatccctaaggagaccaccaagaagaccaggacatgctattacgtatgttctagaaatgatgaaggggagcactggggagctaagatacatgggtttaatctcagattcacttccgatgaaccgccctccttcgtgcatccactctgaaaggcgtggcctcagtacgaatttgggaagcttttgcagtggcagaagtcatgaaattagggggcagcaccttagggccatcaaaagggagggt

SEQ ID NO: 851595 - DNA, 573 bp, Homo sapiens
gtccccttggcctctcccggctggggccttgctgtctgtcacccctgaacggagctgatgctgacaccccagaacagcagggacctggaactgttccagtcacctgcttcaascagcaccttgaggacagaccttcacctgcacttggagcatttagttgaactgcagttttgataataatgtaactgtgtgcaaacactagagcaagtgactgtggtgtggaagggcgaatactcgggaagtgtgggatttttgtctgagaagtttattcagcaagcagctaattcatggtaacataaagaaagttgatatgaaaactgcccttcccctatatccctaaggagaccaccaagaagaccaggacatgctattacgtatgttctagaaatgatgaaggggagcactggggagctaagatacatgggtttaatctcagattcacttccgatgaaccgccctccttcgtgcatccactctgaaaggcgtggcctcagtacgaatttgggaagcttttgcagtggcagaagtcatgaaattagggggcagcaccttagggccatcaaaagggagggt

SEQ ID NO: 851596 - DNA, 597 bp, Homo sapiens
accagtgtcttacagaaaaattactctgcctgaaaaataaacatcattcacaagggcctgagcagacatggctacaggcacgagacagagcagatgagctcttaagaactcagccagtatacccaacttggttccaagagctgcggtgccaccaccaaaaaccatcaagaccaaagacaggaatggcctcattgtctcttccacggcaatcctggagccaggattcagtttggtgcatgctcgtcaccatgcttagaaaagcacgtatggctccttttggtagctgctttccttgctttatttttaaacatttaaaaattataagcagatgactatacataaatacggaacccaatgtacatgaaattctagccattcatgtcaaattcacttttgatgtttccaacagcaacaattgatacagatatatattcagcatcccaaattcaaaaatccgaaatctgaaatgctccagtgagcatttttttktgtgtgtgtgtggggcggggggagggtcatgtcagcactcaaaaagtttgggattttgaagcatttcagagtttgggttttcagatttgggaaacaaccagttaagta

SEQ ID NO: 851597 - DNA, 564 bp, Homo sapiens
tcttggcctcccaaaatgttgggattataggcatgagccactgtgacaggcccaattctttatttaaatactttcagtgagaaattggagaattgttamatatgtagacccttccttgctatacaatgcattttaaaaaaacaaaactacaataccattattacatcttaaaattgacattagttccttatcatcatcacatatctagtcaggaattaaattatcctgattgtcttagaatttttcttccagttggtttgttagaatcagagttcaaataaaaaaaaataaagaatcagagttcagatctacacattgcctttggtttatggttcttttaagtctctttcaatccctctttgttttttgttttgaaattatttgttgaaataatacggttgttttccccgttctccggtggtaaagcatgtccgccctcttgagtgtgataaagggtgcgtgcctctggagcacagtcctgtgggcttaggtggttcccttgtcacattctcagttctcacatagtcaggcctgttttgttaccttctgttctggttctctggt

SEQ ID NO: 851598 - DNA, 643 bp, Homo sapiens
tctgagttctcagcttccgtagcaattagcaatgtagaagtgaattaatttacacaattggtttcagaccaaagaaagtggagggtgaccatgaggcggggaggagtgggggtgagaacagatttctaagctgtttttgaggcagattttatctttttgaagatgaagttgaaataaggaaaatagaaaggcagagactttgaattggcatcatcaatgaggccttcgcctgggagcgaaatgacttcttgaggttggaacttgagcctcatctactggggaggattcttctttccgacacagacatgtcacctcctgtctgcatgaggtgagttaaccttctagcgaaatagaataataagaaccctgaaaaaggtattttataaatgaaaccttagttccctgagaaaatacagctcctacatgagcaaggagatttagaatctttccatgagatcctgggatagaggaggaatcgcttactcctaagattttaagttccgtacaaagctgaggtaaatgcccacaaaaattgacctcagaacaaatagtctgcaaataaaataataggcaaaacattttggaatstgttttcaaacctaacctaaaatttcaggatccagatttcataaggaaaagagag

SEQ ID NO: 851599 - DNA, 619 bp, Homo sapiens
tgcggtgatgctggtgtaaataaacctgagcattcagttgtataaaagtatagcacaygcaattatgtactgtacataatgcttgataataataataaactgttactggtttatgtatttactatatatcttctcattactttaaattgtactgcttatacttataaaaaaatgactgtgaaacagcctcaggcaggtctttcaggagggattccagaagaagacattgttatcataagagatgacaggtccatgtgtgttattgcccctgaagagcttctggtgggacaagatgtggaggtggaagacagtgatattgataatcttgaccttgtgtaggcctaagctgatgtgcttgtctttgccttagttattaacacaaaaaagcttaaaaagttaaagaaaaatttttaaaaattaaaaacaagaaaaagtttaccgaataaaaatttttgtacagttgcacaatgtgtttgtgtttcaagctacagtgttattacaagagtcaaaactcaaaggttcaaaagtttataaaaagtaagctaaggttaatatattactgatgagagaaaaatattttcagtatatgtagtgttgcctaaatatacagtgtttataa

SEQ ID NO: 851600 - DNA, 629 bp, Homo sapiens
acaaaaaagcttaaaaagttaaagaaaaatttttaaaaattaaaaacaagaaaaagtttaccgaataaaaatttttgtacagttgcacaatgtgtttgtgtttcaagctacagtgttattacaagagtcaaaactcaaaggttcaaaagtttataaaaagtaagctaaggttaatatattactgatgagagaaaaatattttcagtatatgtagtgttgcctaaatatacagtgtttataaagcctatagtagtgttcagtaaaatatttgtaataaatttagtgtagtcttaattgtgcagtgtttataaagtctactagagtgtacagtaatattccaggtcttcccattcactaaccacttattcacatacccagagcaattccacttatggtatgtactatacataccactttaatgttttgtgccatgttttcattgtatcttctctatgtttagatatattagatacacaaataattagtatttgttacaattgctcaaggtattgagtacagtaacatggctgtaaagttttgtagcctaaaagaaatagactataccataagcctaggtatgcrataggtgataacatctagatttgtgtaagtacattctgtgatgtttg

SEQ ID NO: 851601 - DNA, 590 bp, Homo sapiens
cttttatgcaaaagacaggcaatcgtgaatgctggcaaaaatacatagagagatgaaytcttatacgatgtcagttggaaaggaaataaataaagccactatggagaacactatggaggtttctcgaaaaaaaaaatacgtggtagccaaggagtggttactgcaggccttgtgtgagacccagtgctggactggctttagatctaactcagcaaaatcctggtggtagtggtgcttgtgtcactctaccccccagcttcaggtggctcagaacagagagaaggagagactgtttgggagaaaataaggaaagagaacgagcttttcttcttggtaatccagaaaattcttccaaattgtgtccaagaccatcaagttagtatctctactagtctggaaaaaaaaaaacaaaaacagcattactgggcttatgtgccccctcaggcagatgcagatgcagcttagatcacaacacaccagtccttttaaacatctggaaagcattcccaagaagtaagggtacaaataagcccagactatgaagactacaataaacacctaactcttcaatgccaagacaaagacaaaca

SEQ ID NO: 851602 - DNA, 667 bp, Homo sapiens
ctatttaatatataaaatttgatgagtttggatataagtgtacacccrtgataccataacctcagttaaggtagtaaacatatccatcactcccaaaggttttcccatgtccttttttttttgtttttgtaagaacacttaacatgagctccatcctcttaacaaatttttaagtgcacaaactgtactttgaattataggtattatgctgtataccacattatctagaacttacttattttgtataactataactttatacccactgaacaacaataaccattgtgtcctcctcctacctcctggcagtcaccgttctattttgcctttctataccttggccattttagatatctcatataagggaagtcattcagcatttgtctttctgtcactgacatttcacttaatatgatgtcatccagactcaggtaagttgttgcaaatgttaggatttcgttttttcaggctgaattttattccattgcatgtatatttcacatttttgtttttctttacccattcatctgtcaatggacattttggttattttcatatcttggctattgttaataaagctgccataaacataagagtgtagctatctctctgagaccctgaattcagatctttttaatatatgcccaggagcaggattgctgaatca

SEQ ID NO: 851603 - DNA, 578 bp, Homo sapiens
cacagccccatccctggagaaaagggccagtgagccgtgcctgatgctgggacaggtccttaggccctggccggctcccagtgcctgtgcagccacagcgcccacccctggcaggattttcgccctgcctggccggcggcctccatgcggccttaatgaccacgaaatcgggcctgcacggtctgcctccacacccggcctgcccaccccagacacaagacagcctgacctccaggcctggccctggcctccctgctcctcggagactccccaggccctcctgggcctctcccagcccttggacagctcttctcataacaccctgaaagtcaggggcaaagggcccacgatccccacttggcaggagggaaactgcggtctcacggggtgtggtgaaaggacgtgcccaaggtcgcccacggagcatgggggtagtagcgtccaaaggggacagggtctcagggatctctgggtttgctgggycccgaggcaggccctgagggaggctgagcagactcacctcgggacttcattccaatgaagcggttctccacgatgtcaatacggcccacgccatg

SEQ ID NO: 851604 - DNA, 650 bp, Homo sapiens
tctgatatggtttgcctgtgtccctacccaaatctcgtcttgaattgtacctccaataattcccacatcttgtgggagggacccagtaggagacaattgaataatggaagcgatttccccccatactgttctcatggtcgtgaataagtctcatgagatttgatgttttacaaggggtttccccttttgctaggctctctctcttgcccactaccatgtaacaagtcccttcgctctcttttcatcttctgtcatgattgtgaggcttccctcgccatatggaactgagtcaattaaacctctttgctttataaattacccggtcttgggtatgcctttattagcagcatgaaaacagactaatacctcttaatgcaagtattttctagtttgattaccttatcttgaatatctccatgtaaaataatctcatgatttaatttttatctttttttttttttttttttttgaggtggaatctcactctgtcacctgggctggagtgccgtggcacaatcttggctcactgcaacttctgcctctgcagttcaagtgattctccygcctcagccacctgagtaactgggattgcaggaatgcaccaccatacccaactaaattttttgtatttttagtggagatggggtttc

SEQ ID NO: 851605 - DNA, 597 bp, Homo sapiens
aaaattggatagtcatcttctattagcattattactcttagaggctaattatggtcaggaaaacaagttttgtttctgttactgttgcatgtttgttttcttcttttgctttgtttgatttgattttgttttgcccttattctccatttagacaccattgttcattcaggctgctgctaattcttatctgtacattcagtgtccacaaagtaaacactctcttctgttttcaaatgtcaacaactcattattaataacttactacagtgttacattttgtttcttcaaggcacgtgatggttaatactgagtgtcaattgactggattgaagaatgcaaagtattgatcatgagtgtgtctgtaagggtgctgacaaaggagattaacatttgagtcagtgggctgggaaaggcacttaatctgggtggacaccatccaatcagctgccagcacagccaaaatayaaagcaggcagaaaaaaaacgtgaaaaggctagactggcttagccttccagcttacatctttctcctgtgctggatgcttcctgccctcaaacactggactccaggttcttcagctttgggactcggactgg

SEQ ID NO: 851606 - DNA, 656 bp, Homo sapiens
atttgcctcacctgctagactttttttttttttttccaaaatcaccatctgtggattttggatttacagaatgccttaatcattgtcacagaatttttggcttctgacaaggtaactctgtgactacctgacaaaccacttcagaacttagtggcttaacaaaacagtcattttattatctttcatgattgtgtggttgactgctccagtgggtaatacttctgttcagtgtaatgtcagttagtactttggtcactgggcatctcaacaaggctggaatatctaagatgtgtaccgcttacaggtggtagatatcttgaaagctgtggtcagttgtcaggctgggcttttctgtccaagtaggatcaaattattcctcgtcatctggcctttccatgcagtctctccagaaaggtggccagattgcttagatgacagatcaaaacaaaaagaaaaaggttaccaggttttcttagggtttagatacagaactacttcagtttgtttaaagtaattacatggccagcacagttgtaggaaaatggaaaataaactgcctctaaaagggaktaaaaagaaagaaacaaaaacaaaaaagtgacatctttaatctaccacagggagaaagggattcaaggtagaataaacaacattta

SEQ ID NO: 851607 - DNA, 502 bp, Homo sapiens
gttgacaagtcatcaataaatgcactgactagaacaaaataaacatagccatatgtcatattctaagaaacctaccttaatgtttctagaaaaatgaatccattactgaacaccttttaagraaagttgttaaccagctagaattgcaactatcatctgacctgacttcctatgtcatgtataccaagccagattgatgattatcttgcttagattcatatacattacagttaaggctcagccctggtaccacaatcttatcacactaccaaaaaagaaaaagaggttagatttagcatgctcttactaacaatctcagcatgtgctcagaaataaagttaataatcaagagaagacttaaaagaaatgtaatcctaaaaggtcagaggctcaaagatcatggcttgcccattaccaaaattagtgacaatgctttttatattaaacaaatgtacaaaaacttttcccattacttaaacaaaacttgaggtattaaattaat

SEQ ID NO: 851608 - DNA, 582 bp, Homo sapiens
ttaatataaaactccaggtaaaaagaccatttttgtaacagaatgaatactgtgcttcagagtactgtgggctggattgaacatcaaactaatatagctatgggatgtgagggcgattggctgcaacatctgttaacccactgattgccagggttgattcagctgatctggctgggctaagtgggtgtccccttcctccctcaccgctccatgtgtgtccctctcgaagccgcacgcttggtcgaagaggatgaccatccacgatagaggaggaccagtctttggtcaagggtatacaagcagctgcactcccctgctagaacttccaaacaagctctcaaactaatatagctagggaaattctgaatatacaaaagtctgaggcttattagtgaagatatagtatgttcgaaaagaaataataaatgtataagaaatagcaggtaatttttactatggctgaattgctwggtttcaagttaattttagcagaaggagcaatctcaatataaccatttatataccttaactatgatgattaattataactaattttaactgctaagaataaccatgtgacca

SEQ ID NO: 851609 - DNA, 550 bp, Homo sapiens
ctgctttgcacaaaagttctcagcagtcgtgaatgccaaatatgtttcctggccatgcgcccatgccastggagggtaagatatacccacaattctgaacatcttcagaaggcaaatcaaagaatggatactacatttcccactacatatactaacactggaactggcctctgaaaatcaggtgactgattttttttcaatttttcaattttttttcttaagacagggtctcactatcacccacgctggagtgcagtggcacaatcatggctcactgtagcctcaacctccccacaggtgaccctcccacctcagcctcctaagtagcagggaacacaggcacgcgacgacacacctggttaacttttctatttttgtagagacagggttttgccacattgcccaggctttttttttttttcccaaatttttaagcctatagaaggacttccagggacatgaaaggaaagggaaatgataaagaacttcaaatagcatagtctgccctatctacctttgaaataagcaactcttcactctcctattactt

SEQ ID NO: 851610 - DNA, 622 bp, Homo sapiens
aaatagtctagaacttaattatgtctgtatgactgctgttattattttcaggctaactgtccaccasggtttgctcttggggcctacaggctgcccttaggcccttgccatgtgctaccctctgttcacaacagggtaattacttcatccttcatgcaagcatgggaatttctttctgaggcttcttcttcttttaaaggactcacctaattcatccttaataaataatgaattatgctcattcattttttattcatactgcaaaccatttaaatttatcaatttgctaagttctgtggtagatacagaagaaatgactcacttaattaggccagacccacccaggatcatcttcatttgttgaaacttaaagtcaactgataagtttgtaatgagctcataaaaagaaaacgctgcatgccaaatccaattctgatgtagtgcttgacataatggatattcttaggtcagggatattcttaggataggctctcgaaagacatttccttgttgttgttgttgttggatttttttccaacttttattttaagttcagcggtacatgtgcagaatgtgcaggtttgttacataggtaaatctgtgccacggtggtttgctgcat

SEQ ID NO: 851611 - DNA, 402 bp, Homo sapiens
acattggaagtatcttaaagttcatttcacatatatattcctgwcacagcaagtctactctttagtatattctcaatataaatctatgtacattttagcagcattatttgtaataatcttgtaatggtaacaacacaaatgtccatcaatttttgaatgaataaatatattgtgtgatattcatactgtgatcctatacagaattgcaaatcaattaaatttatatagcaaacatacaaataacacaaattggccctggataattctgagtaaaataaaacagacctaagagagtacatactgtacaaatttcagttaacaggcaaaactacctaatagtgttagaatagtaatgacctttggacgggaagctactgagagaggcatccatgattttattta

SEQ ID NO: 851612 - DNA, 540 bp, Homo sapiens
aagaggcagagcttgaccttgaamctgtctgcccctgccacaagccaggctgtctccaggggaaggtgctaaggccctaaacggggctccagaccagccgggcactgtgccccccattgcccaggccccactcagccctgtctgcaaccacccgcctgtccctgtcacagcccagactcaattcttctcccgcagctggtactggttgtcatggcaacgagttgtttggaaagctgtgggatgatgggctgtgccgcagtcaaggatggagcctggaggagccagcagtcatgggctgcttccagtcaagccaggcaggaagctggctccaccaccgcactcaaaccagcccccttaaaggctgcagacccaggaatcccaattctgggcatctggtccaaataaatcatgtgaagaagggaggagccagacgcacaaggatggtcacccctgcactacttacagcaggacgaaattgcttatgtcactaacaggtaacctatttgagtatttttcttgcaccaagcactgtgttaaatg

SEQ ID NO: 851613 - DNA, 529 bp, Homo sapiens
ctgggtgtcattctgaactgccctctctccttctccacccacaaccaaaccatcaccaaaatcaccatctattttgctttcaaacttctctcacatccctcttcttattgtcaattctactgccactgcatcacccaaaccagcttcaactgctccgtctccctcaccccctacaactcaaaagaaaacaggtgcaaggtgagaacaagaaatttgcaatggccgggtgcggtggctgacgcctgtaatcccagcactttgggagactgaggtgggcagatgacttgaggtcaggagttcaagaccagcctggccaatatggtgaaatcccatctctactaaaaatacaaaaaattagccaggtatggtggtgggtgcctgtaatcccagctactcgggaggctgaggcaggagaatcgcttgaacccaggaggcggaggttgcagtgagctgagattgtgccattgcactccagcctargcaacaagagtgaaactctgtctcaaaaaaaaaattgtcaaaagaaatc

SEQ ID NO: 851614 - DNA, 569 bp, Homo sapiens
tgcctaaacaattagcaaagataaagaaaatgaccatccatggtagtaatgaagttctggagcaatgggatattctcacactggaattaacccatttgaaggsattttttaattcaaaatttaatttcaaaattctgaatgagcagaaactgcaacccagaaattcctcttcaaggaatttatcctaagatgactgggcacagcactgagcacttactctgggtattttctcatttaatcttcacagcaatcagcccggtaaggctgggaatattgagcccattatacagaagagcaaactgagagttaaacaaataactcccaggatgcttgtaagtatcagggctcaaaccacaagcttaaaagcccccactctgctgtctccttggcataaatgtcttgtcctgtggaggaagcagactcaggagaaatatcttctgggtgcttcctgcctgggtgcgtcctagggaggcagtaacgcagcaagtaagagaagggacatttatggaaccacaagggcagccctagaggctatgaagaggcttggaggcagccatctggccatgggg

SEQ ID NO: 851615 - DNA, 569 bp, Homo sapiens
tgcctaaacaattagcaaagataaagaaaatgaccatccatggtagtaatgaagttctggagcaatgggatattctcacactggaattaacccatttgaaggcattttttaattcaaaatttaatttcaaaattctgaatgagcagaaactgcaacccagaaattcctcttcaaggaatttatcctaagatgactgggcacagcactgagcacttactctgggtattttctcatttaatcttcacagcaatcagcccggtaaggctgggaatattgagcccattatacagaagagcaaactgagagttaaacaaataactcccaggatgcttgtaagtatcagggctcaaaccacaagcttaaaagcccccactctgctgtctccttggcataaatgtcttgtcctgtggaggaagcagactcaggagaaatatcttctgggtgcttcctgcctgggtgcgtcctagggrggcagtaacgcagcaagtaagagaagggacatttatggaaccacaagggcagccctagaggctatgaagaggcttggaggcagccatctggccatgggg

SEQ ID NO: 851616 - DNA, 612 bp, Homo sapiens
aatagtttcatctcatggtacccttaacagggtayggggactccccaaaccacagtgagaactactgctcagataacaaaaagcaaatttgtctagcaggctgtccagttttcctcagagtgcccccagcaaaaataataatgaaaataaaaagcaaaataatcacagtaagataccatttcacagccagtaagatggctataatcacaaagacagtaataagtattaccgagaatgtggttatcggaatcctcatgcattgctagtggaaatgtaaaatggtacagacaccttagaaaataatttggcagctcctcataaagctcaacatagagctttgacccagcaatttccactccaagatctacacccaagaaaaatgaaaacgttatgtccccacaaaaacttatacatgagtgttcagaggcattagtcacaatagccagaaagtagaaacaacccaatgtccaccacgtgatagaaaaataaaatgtggaatgctgttggcaacacaatggaatgttattcggcaataaaaaggaagtaagtaccggcacatgcttcaacagggatgaaccttgaaaacactatgctaagtgaaagccaatcaca

SEQ ID NO: 851617 - DNA, 583 bp, Homo sapiens
aatcagaaactcaaaagaatgtaaccatttgtctctcacctacctgtgacctggaagccccctccccatttcagttgtcccacctttctagacggaaccaatgtacatcttacatataytgattgatgtctcatgtctccctaaaatgtataaaatgaagctatgcctcaaccaccttgggcacatgctgtcaggacctcctgaggctgtgtcacgggcgtgcatccccaaccttggcagaataaactttctaaatgaactgagatctgtcttagatttttcaggtgcacaaactgaaaacggaaactcaaacttgtaggccaatattcattgcaacattgttcacaataggaaaatggtgaaaagggtccatcaacagatgaatgaataaaatgtggcataaatatacagtggaacattattcagccataaaaaggaatgagattacacagtacaaaatggatggaccttgaaaacataagtcaaagaagccagacacaaaaggccacatattaaatgattccagttatataaaatgtccagaataggtaaatccagagagacagaaaacagactttgcagt

SEQ ID NO: 851618 - DNA, 655 bp, Homo sapiens
ctgagattttatataaatgcttgcatgctgtagatatcttttggtaatttggtcctgggtattttacattgttgttgagccacaggattaaacaactctggagccattctacctgtgggcttattgttatatgagaaaataaaattccttgttatttaagccacatgaatttggtttgtttttatgtacagggaagcctcctaactgcgataatctaactctatttaaacattcctcgttgttgagtccttaggctcaataatatctatattaaatgtggctgggctggcagttttcatttggctgcatgtttactgatatatagacagttttagtttctcctttaacccatgttgcccaatccagaaaccttttgtatttgtattttatttctgtgtgctatggtctgattgtttatgatttcccccaatttatatatttaacactaatccccactgttacaatgtttggaggtggagcctttgggtgatggttaagtcatgagggtggagccctcatgaattggattggtagatgcrtatggggctgtcctagtacaatcaggctgctataagaaaaatacaatttatagacaatagaaatttattgctcacaattctggaggctgggaagtccaagcccatagtgtcagcag

SEQ ID NO: 851619 - DNA, 177 bp, Homo sapiens
atccagtggaattagtgctccrtggaatacagcttggaaaactctgatctctcacccgtaaggcataagacgtggaagaatatctcaccattaaagaggaaagggtaagaagggaatttgaaagtctaagaaacatgagcctccctttagacttttgcatccaccatgggatccctc

SEQ ID NO: 851620 - DNA, 594 bp, Homo sapiens
cacttttttcttttgaaaagtatgggttatggatatgaaatctatamatgccacatcttcttttaccccaccaggaggaaatcagtcttaagatgagcttatactacggaaggcagagctgagagactgaaagaaacttattccttgatgacgtgattgcaatactgcatcgatccaacctaacatctgcacttcctcttgattttcaattacgtcagttaagccaatgtgagtacggctttgtgttcttttcaatcaaatatatccagatatactatacttgattacttactgtagttatgaaaaacacatagacattctcttttacaattatagatatagttttctttgacctaaagaatttagataattcatttagttgacatctgaaaatgattgccttagggtcaaaaatgcatggtttctcttgaatagtaagtattcaagatgatttgaacacttcaaaatcaacaaaacattgtaatgtttgcttaattttagctagaatgaaaagtaagtacaaagtgcagcaattgacctactgaatctatgaatgttgatcacaaagcttgaggtattaatgaaagaatgatt

SEQ ID NO: 851621 - DNA, 599 bp, Homo sapiens
atgaaagaatgatttaatgttaattacaaaaactagaaacatcacatttmatatttttaagaattgttacagaagttaacacaataaatattaactttgaaaatgtgacaaaaattaatgctttaaaggagcactttggtactttttcttagctgagtaaatttcctcacagtttattcgtgtgtcactatttgcaacaacttttgctgccacaaggaaatgaaaatgttgtggttttaatttgtaaacaaatggacacaaaaacaaacaacatattacacaattttttaaaaagtaaaatcatctcatttcaaagtaccatttatttttttttaaatgcaagtactagacaggcatttttagtgattatgttaaagttaattgtgaaaagaatttccaagttgtgagtaaatagtagaaatatcagggttgttttttttttttgctttgggaactctaaaagcaaattccacactgtcagctgtgaatattagagggttgaagagggtcctcaggtatgcagcacaaaataggtgtgctgcatgtacaatttaagaaaaaaataaatttattgaaaaaatatactgtatatatatttt

SEQ ID NO: 851622 - DNA, 563 bp, Homo sapiens
ttaagaaaccccactaatgtgaggagctctgtaagcatgtatattagctgatacgcaactgattttttggatagtaatttacattcaaaatatgaggcactgtaaaaaatatatgacattttaagamacagtttcttcctgtcatttaagggttaatattcttgtcaatgtcagaaacatttgaatgcatgcctctgtgtatagcaagatatttaaatatttgatttaattcatcacccaagaacttcatgttgaaaatattttgttgagaacaagtggtcattaattcatttacgcttaacactatttctccatttcaacatttgatccagcttttaaccaacaacccgtaattgccaatgtaatgaaataagcatacagatattgtgacactatgcactttaaatattcttcagctttgctgtctgcatttactcatgccccagtttgatttctcatattccagtctgagatatgtttgtcaatgtttgatatatggcatggctgtcagtgattggtctaccaaataaaagtctcaaatttttatttcagccatagtttag

SEQ ID NO: 851623 - DNA, 623 bp, Homo sapiens
tgcctgaacataaatttcaccgttacacctttaccacattttcttcagagaatatttatgattcattatttcctaggcacaattctatgtatgaaagattgtgagaagtaccaggcatatagacgactcagcaacagcttaaacctactaccaattcacattaacacttgctattaatttgctcaggattttatttatttgaatctattgggggtggggaggggaggggagtgaaatgatatacatttggaggcaccctcaggtaatcacactatagaaataatgctgctagttaagaggtttgttgcaaagatgtaaagcagcatgtacagaatttgttggacgtctgctttaggtataatttaatatctccacgtatcttttaatagactaataaaaaaccatagttaactacagttttcaaatagcaaataacatataatttagaggtgaggaatacagaagaaggtttttatctatacagtgtgacttacctaggtacgcaatctttaaacaaaatgaagaagaaacatgttttctgttctcagtgctattgtaggttatgggaataaattmatttagaaatttgttctaaaataatgaactaccaaactgataatagc

SEQ ID NO: 851624 - DNA, 623 bp, Homo sapiens
tgcctgaacataaatttcaccgttacacctttaccacattttcttcagagaatatttatgattcattatttcctaggcacaattctatgtatgaaagattgtgagaagtaccaggcatatagacgactcagcaacagcttaaacctactaccaattcacattaacacttgctattaatttgctcaggattttatttatttgaatctattgggggtggggaggggaggggagtgaaatgatatacatttggaggcaccctcaggtaatcacactatagaaataatgctgctagttaagaggtttgttgcaaagatgtaaagcagcatgtacagaatttgttggacgtctgctttaggtataatttaatatctccacgtatcttttaatagactaataaaaaaccatagttaactacagttttcaaatagcaaataacatataatttagaggtgaggaatacagaagaaggtttttatctatacagtgtgacttacctaggtacgcaatctttaaacaaaatgaagaagaaacatgttttctgttctcagtgctattgtaggttatgggaataaattaatttagaaatttgttctaaaataaygaactaccaaactgataatagc

SEQ ID NO: 851625 - DNA, 632 bp, Homo sapiens
tggatatttcaattagatcaatactcttatggaagcttctaattcaaaagctctttgaattcccatgtaatgtcactaaaattgaattggtcaaacagagttaaaagatattaacaacaaacactatatcagagtgcctaagtgtgtccctcctccattatagacccatttttcagattgggaaagactaggaactgaccaatagccagtcaaaaggcacatgtctggcagaaaaaatacagtggaaagaaagtgagaatatattttgagagtttccatattaaaagtctgtcctttacaaccacaaggactcatattccttagtgaatcattcctgctcttcaatacacctgctttagtccaatttagaaaagtttccctgcaggaagaatagattgtgttagcatagatctaattcaataaatcactatcttatttgcatacacagaacatgtatcttagaatggcatgtagagacatcagacctaattaaaatattatttaattgaaatcaytttagtagttatcatgtgtaaaataacattaattccaccctcatgcctatcttccctcatctgtaacaatttggatcttataaatgtaattcatacagttatcctgacccacacaca

SEQ ID NO: 851626 - DNA, 468 bp, Homo sapiens
tcattagagaaatgcaaatcacaaccacaatgagacaccatctcctgccagttggaatggtgatcattaaaaagtcaggaaacaacagatgctggagaggatgtggagaaatagggatgcttttacactgttggtgggagcataaattagttcaaccattgtggaagacagtgtggcgattcctcaaggatctagaaccagaaataccatttgacccagcaatcccataactgggtatatacccaaaggattataaatcattctactataaagacacatgcacacgtatgtttattgcagcactattcacaatagcaaagacttggaaccaactcaaatscccatcaataatacactggataaagaaaatgtggcacatatacaccatggaatactatgcagccataaaaagggatgagttcatgtcctttgtagaaacatgggtgaagctggaaaccatcattctca

SEQ ID NO: 851627 - DNA, 474 bp, Homo sapiens
ataaaaaccacaatgagatgccrttttatatccactaaaatggctataattttaaaaactgaaaacaagcattggcgatgatgtgcataattaaagccctcatacattgctggtggggatgtaaacatggtgcagccactgtggaaaacagtttgggggttcgtcatacttgaaacacagaattatcatatgaccagaaattctgctcctaggtgcaaagaagtagaaacaggccgtcaagcatccgaatacttgtatgcaaatgttcagagcagcactattcacaaaaaacaaaaggtagaaataacccaaatgtccatcaacaaatgaatggaaaaacaaaatttggtatatacatacactggaatattactcagtcataaaaaggcatgaagtactgacacatgatacaacatgagtgaaccatgaaaactttatgttaaatggaagaagtcagacacaataggtcataca

SEQ ID NO: 851628 - DNA, 587 bp, Homo sapiens
atagcgagaattgacaacgtgctggcggccctcgctcgccctcagtgcctcctcggccttggcgtccactctggccacacctgaggagcccttcagcccacsactgcactgtgggagcccctctctgggttggcagaggctgaagccggctccctctgcttgtggggaggtgtggagagagacgtgtgggcaggaaccagggctgcgtgcagcgcttgcgggccagtgagagttccaagtaggcgtgggctcggcgggccccgcactctaagcggccagccggtgccaccgaccctgggcagtgaggggcttagcacccaggccagcagctgcagagggtgtgccgggtcccccagcactgccgaccggcccgcactgctctcgaattctcactgggcctcagccgccttcccgcagggcagggcttgggacctgcagcctgccatgcccgagccccctggcagtgggctcccacatggcccaagcctccctgacggggaccgccccctgctctgcggcggctgttcccatcgaccatccaagggctgaggaggcagcgtgggactggcaggccgctccacctgctg

SEQ ID NO: 851629 - DNA, 492 bp, Homo sapiens; identical to SEQ ID NO: 847094

SEQ ID NO: 851630 - DNA, 574 bp, Homo sapiens
ttaatggttcactggtgaaccaaatgccaaacatttaaggaaaaaaatgtaccaattctctataatctcttctggaagatagaagcagaggaatatacttaaaaactcattctatgaggccagtattaccctaataccaaaactagacaaagttattataagaaaagaaaacaacatactaatatccttcatgaacatagttataaaatttcttaataaaatattagcaaataaaatccaacaatgtataaaaaaagttatacactatgaccaaattggtcttatcataaatctgcaaatctggttcaaaatttcaaaatctatcacatgcacaggctaaagaaaaaacgtcacataattatatcaataaatgcaaaaacgcttttgaaaaaaattcaacatggattaatgctggaaactcttagtaaactagaagtagagggggatttcctcaatttggtaagaaatatctacaaaaaatccacagctaacaacttatttaatgctgagacatasaaaactttctcactaagatcaggagcaaggcaaagatgtcccctctcaccactatttt

SEQ ID NO: 851631 - DNA, 595 bp, Homo sapiens
aatttatcattttagccagcagggaaataaagcatttttaatccccagaagaaagcgctggaaatagcttttatatagtcaacagttcacctggagaaagatcttaatccttgttgtttagactaggaatatcaatatttggtataaagtaactagagtagtttattactttttcccttatgaaattttaaatatatgcaaatatatatatcattagactcctgtggtggataatttcttcagattctaaaacaggtgtctagtgactgcttaattatttccaaatcacatcaaagatgaattggtaaataatgggtatgagtagtgatatgaaaatggttacgtaactacctattacttgtgtctggtaatcaagtcttattttttaaaagactattgtttttgagaattgagatatttaaaactcattataacttattcctaaaaatagaagagaagaggaggtactgtgtattcaaaaaattttttaaataaagaattcagtgtcacaaaaaaaagaattaaccagtctttatttaaattgctttgtttcacataaagaatatatgmtcattgtaaagaggaaataaaatga

SEQ ID NO: 851632 - DNA, 568 bp, Homo sapiens
gaaaggtctctacaagaagaactacaaaacgctgctgaaagaaatcagagacaacacaaacagaaaaacattccatgctcatggattggaagaatcaatatcattaaaatggccataccaccctaagtaatgtacagattcaatgctatttctatcaaactaccaatgtcatttttcacagaataagaaaacaactattctaaaattcatatggaactaaaaaagagcttaaatgaccaaaagcatccttaagcaaaaggaacaaagccagaggcatcactctacctaactccaaactatactataaggccattgtaaccaaaacagtatggtactggtacaaaaaccgacacatagactaatgaaacagaatagagaatcagaaataagacagcatacctacaactatctgaccttcaacaaagtcaataaaaataggcaatggagaaaggactccctattcaataaatgtgttggaataaccagctagcagagacatgaaaattctaagaacaaaaaagaaatgctagygatcaaaaacactgtaacagaaatgaagaatgtcttc

SEQ ID NO: 851633 - DNA, 376 bp, Homo sapiens
atggtgtaagaaaggagagggaaggtatagcaaaataggaattctgatttctcacaggaatcttggaaatgccagatgtgcccacaggaaaggaagcacagtaccctcagtctgtggcgttatgggaagtggtgactagtccagcccaggcttgccaaaggctctgtggatgaatagtcttgctaacagataaggaaaaggcagagctgggcgagaacaaggagctcctaaatttagggacagaaaaatgtaagagaagactaatctcagatgaggaaaagtcatagtgaaggctgtgaaccttaaaggcatcatcagtctatgagaaattaggtayccacatcctacaatagcccacaagatccaaaaacctctg

SEQ ID NO: 851634 - DNA, 594 bp, Homo sapiens
tctcaagtgatcctcctacctcagcctcctgagtagttgggaccacaggcatgtaccaccatgtctagctaatttatttttaatttttgtggaaatgggtmtctccctcatttgcccaggctcgtgtcaaattcctggactcaagtgatcctccctcctcggccttccaaaatgctgcgataacagacatgagccactgcacctggcctttttcttttcttttttttttttcttttttttgagacagggtctctgtcacccaggctggagtgcagcggcgtggtcttagctcactggaacctctgcctcccaagctcaagcaatcctcctgcctcagcatccccagtagctgggactacaagcaccgtaccaccacgcccagctatttttttgttttttgtaaaggcggggtctcttctgtgttgcctaggctggtctcaaacttctgagctcaagaaagttgcccgccttagcctccaaaaattgctgggatacaggcacgagccatggtgcctggccctttgtattcttataaagtgatggagatgcccattttataaagtttaaaatgtaggggaaaaaaacttatttgga

SEQ ID NO: 851635 - DNA, 589 bp, Homo sapiens
ggtactgaggcatgtctacaagggatcctgtgatgtgaagacacaagggttggaagtccctgagcagaacaaagtctcgcaatgggtgcacactcagtatggcacctgctactacaggttgggaccgsgggaacaggaagggaccctgttcgagatggtagcccaatataatgccctcgagaagtccccagatcgcagcccgctccagtacttgggctcatggtggcaaaaaagctctccttgagtttggataccagcagtctgctgcaagggctagagatgccaagagcattcccacctaccctttccacagaatactaagtctctcttgatttgatctctgcaagcttcttgattccttaatttttgtgtatgctgtagattcttccaatgaactttccaatgggctccaacaatctccccttaacattccatttaggctatggttattcacattcacctgtaattcgttttttttgttgttgttgttctgaagggaattgttcacccatgtctctagtcagccatctagaaaagccctctgatccctcaggccatggactggtctacaggacttgcagtagcttgg

SEQ ID NO: 851636 - DNA, 487 bp, Homo sapiens
aatatataaggatccaagctgtattatggttgcctaaagttacaagtttaattctgttcaaaaattartagaaaaaaattttgacattttcattaggattttaggtgattaattttgacaatttgagagcaaagttcttactacattcactaagtaattgcagaaaacatctttttgcactgggcattttattgtcttgaaagatattttcacacaactaaggactttttcaatttgctctaccacagaaatttgccattttccttcatcaagaaatttcaaaacagcttccagacttgtttttttcactgattcagttggaacatgaacttctgcatcttgacttgattatgcatcaatagtgtgcctttattttaaactgaaaaaaaaaaacctctgcatacacattttagaaaatacattattgattataattataatagtaatgaatattcaaatcagttaccaattataatttacataggta

SEQ ID NO: 851637 - DNA, 294 bp, Homo sapiens
gggctcgtagtattcaaggaagaacgctcgaggctgcagaagaggaaaacgctctagaaagctgagcggtacaagggtgctgtggagtcgggtcaacagggcaagaagggagcgtcctcggtgggaggaggaacccctgtaggggaaaagagaggctctgcgttaagggaacccgagtgaggggatgcccccactgacggaccgcggtggggacttccaacctgaggrgcccggggggaggggaaggttcggtgctgggaagacagggggaggggacccggggggaggagggag

SEQ ID NO: 851638 - DNA, 600 bp, Homo sapiens
caaaaactgagtagtagcaagatatrttgtaaagagcaaaagaacaaagcttccacagtgcagaaggggacccaaagggttgctactgctggttcgggcagcctgcttttattctcttatctggccccacccacgtcctgctgattggtagagcccagtggtctgttttgacagggtgctgattggtgcgtttacaatccctgagctagacataaaggttctccacgtccccatcagattagttagatacagagtatggatacaaaggttctccaaggccccaccagagcagctagatacatagtgtcgattggtgcattcacaaaccctgagctagacacagggtgctgattggtgtgtttacaaaccttgagctagatacagagtgcccattggtgtatttacaatccctgagctagacataaaggttctccaaggccccaccagagtagctagatacagtgtcgattggtgcattcacagaccctgagctagacacggggtgctgattggtgtatttacaatccctgagctagacataaaggttctgtacgtctccaccagactcgggagcccagctggcttcacccagtggatccc

SEQ ID NO: 851639 - DNA, 608 bp, Homo sapiens
agtttttggagactttagggtagaggtcttgcaagtattttattcacttagttcctaarttgttttattatttagtacttttaaaaaattttggtaaaatatactcagtgtaaaaatgtatcactttaaccattttcaagtgtgcaatttagtaacagtaagtactttcaaattgttgtgtaaccatcatcactatccttcttcataatcttttcattatcccatgctgaaactctgtacctattaataataactctcaattttctcttcccctcagtccctggtaagcattattttcctttccatctccatgattttaactattctaattacttcatataagcagaatcacacaataattcacttattgtctttttgtgtctggttcatttcacttagcataaagtcgtcaaggttaatctatgtagtagcatgtattagaattttcttccttattaatgctgagtagtgaatttcattgcatgtatttgccctactttgtttcttcttctctcaatgggtatttgggttgtttctactttttgaaaattgcgaatgatgctactctgaacatttctgtaaaaatatatctttaggccgggtgcgtt

SEQ ID NO: 851640 - DNA, 600 bp, Homo sapiens
gctactattctatgttgactttacatggaatatcaaataagggaaagcaagttattaatgataataacagtagctaataataattgcgtttttaccatttggcagacatytctggttgagacattcacaactttcttataaaggtgacatttatattaccattgcacagataaggaaattgagactttgagtgactttccagctaataagtgctaaagttgggattagataccaagtctgactctagggttcagaattttatgccatttgttttcctttttgctatctttaaatgggctcttccatttgatggtgttggaaggttataaatataaatgatggtccttatttgaagcattatgttaagaaggatcctgaagctctatctgggctcagtgagaaagagtgatatttaggtttggtgatgtctgcactggggatggcgaccacaagcatgtatgctgtcattgttattttagcttagcttttccactgttctgagacacctgtcttgttttctcatttcccctttttcatctttccaaatttcaaagtaccaaatggatagttacaagagtagtttttatttaagaataaata

SEQ ID NO: 851641 - DNA, 656 bp, Homo sapiens
atacaatgcataattattaactgtggtaatcatacagtgcaatagattattaaaacrtattcctccagtgtaactgaaacttcataccctttgatcaacatcttccctttccccattcttctccctctctccactacctcagcctctagtaaccaccttttcactctctgcttttgtgagatcaacttgttaggattccatatataaatgaaattgtacagtatttgtctttctgtgcctgtcttattcacttagcataatgtcatccagttccatccatgttgtcacaaatgacaaaatttcccttttaaaggctatataatattccattatatatttgtaccacctttatctattcatctcttgatggacacttaggttgattccatatcttgaccattgggaatagtgctgcaatgaacatgggagtatagatgtctctttgacataccaatttttacactaatttacatcctcaccaaccatgtacaagggttccctttcttccacatcctcaccaacacttgttattattcatcttttttataatagtcattctaacatacatgaagtgatatctcattgtggttttagcttgcatttccccgatgattagagagtttgagcattttttcatagatctgttgactatatct

SEQ ID NO: 851642 - DNA, 590 bp, Homo sapiens
tcatctagcagtaaagatgtccatagcagataaacattatcttagagagtcaatttgctgatgactaccaatttaaagatacaatagaagaagtcrtcaatatctctgatactatcaaaacatattctaaaatctagattgcttgagcagggtaatgggtactagtactacaaaatgaaagtgacccttttaaaattagtcttttgattcatgcaacaaacattaattgagcatttattatatgacagatattgcttctgcccttaaaatatacagaatgtgatgtacagacatctaaaaaaatagtaacagagtatgtgccacatacacacacatatgagagaggaggataatagataatgtggtagaagcacaaagcccccaagaaagcaactctacttgggaagaggggcagttggaaaagtcttaacaaggaggcaccatttaaactgtgtcttgtaaaattttagcaggtgtgaagaagaagagcatagtcattccagacacaggacaccaagtgtaagggaacagggcagtgggaaggctgctaggagcatgagtggctcaagagaagtatgtacccagtacat

SEQ ID NO: 851643 - DNA, 600 bp, Homo sapiens
gactctattagaatcgaaacttatttcacttttcattttgcaaacaagaatattaaaacctaataaatgtaatctaagtttcaataatctcagtcataaatagaagatttcatggaaaaggattttattaatatatagctaataatttttaattacaatgaactcaatgtcttctggaaatagttgaaatataaaaaattcataaataaaattcatactgggtcacatgttaattttgaaatatacagcttcacaaatcaattaattagatattatttttgccattgattttgacatctttggagagagactggcaggtatttgaataacatgtgcagtgaagtgacaattaaatctaaaattctctggaataattacacttccaattatccttaatagtgctgccgatcacattttgttgttgttgcttcttaatgaaacaaaaaatattgtcctgatgtgcccttttcaggttcatcttcttaaaatttttttaactttttagaaaaacyattaaaagtagttgcagtagaaattcacattatagcaaggtaattttttaacggaattctgataagaaagtggcaacaatgttttcta

SEQ ID NO: 851644 - DNA, 633 bp, Homo sapiens
actattttacactttatggatgtttactcaattatttcttttttattataaatatctgtcatatacatttttgtacttaaaaatccttgtgtgcatttaaaactatttctttatagtcttaaaaatggcgttctggatgaaatacgaatttttgaaaaggctattggtaaatatggtcaaattatctaaactgctttctggaaattttctactaattaatcttccactaaaatgggtttattttaaagtttttattgcaattaaaagaggtaaaccctttgcaaatagatagtcatgggctgcaaagtcaagctggctattcaaactcaatgacaagtttttttttttccctctcaacccactttctgctgctctcccatttcacatacacaatgtgagatgaaggtcaggtgagataagggtattaggcatgacttacaaaagctataggcacaggatagctagctgacttctggtatggtaataacaatattggtgttactatttctattcctacttgcttttggcacaaatkacagccagttctgcaaatgctaaagctgttttccactgccaacatgttctactaatgatcactgcaaaaatgccagctgcagctatggagggaagtat

SEQ ID NO: 851645 - DNA, 548 bp, Homo sapiens
ggctctcccttcaacaaaagcaaagarggagagagatttgaagagaaatcgtgaattgcaagaaggggacaacaggcatctcattcttgactaaatgtttattgagctgcagaactggtagagccacccgacacatcccctggacagaacatgagggagatctcaggagatcttgatgtttgttccctggagttaggggtccaaatgtgaacatgaagactggtgcttatttctcagccggtcatttcataaggcagaagcctcactggagcagctgcatcagtggagtcaccagggttgtaggttacatgggaggaacatgaagggaacatggccacctgatggactaactcctagtccatcaggggtcccacacaaggacctcaggagctgccatggctcaagatcctgtctcaaagaaacaacaacaacaacaacaacaaaagaaggtgcataacacttgagaaagaggcagcagaagatgtagatgatatggagctgttcagatgatgccctcccttatggaggggtttggaggcataggtccc

SEQ ID NO: 851646 - DNA, 557 bp, Homo sapiens
ttgttcatttcccctttcttttattccatttcatgttgggtcctgccatatcctgttcacttcccccttgaaacaaatcaccttaaatatttcttcttggcctattctgtaatttcaaaatcctaagtagtttcagaggaagaatattaaacacagttgtggttctgtcaccttttcttgttatatcctgaaaaattaagaaaaagatggctgctgtggctttaaggaataaatcaagttagctgaggaactcaacaggcaggagtgctttgaaagcaaatgatgagtctctcgtgattctcaagtaaagcctgagaaagtagatttaaatgccctggtgtactatagaagaggctgaaaaaacactgacacaggcattcaaacactgacacaggcattcaaatcagagcatcctcaattcacacctgttttttaaacccatgcgtgcgcrcacacacacacacacacacacacacacacacacacacgttacatggaacgtttcctactagcctgtaaactgaatataggctaaaaaggtagaactattaataaat

SEQ ID NO: 851647 - DNA, 668 bp, Homo sapiens
agtccaaggagaagcagctcccacccacagggtggtccagtcaaagcccttagggcccctttggraatggaggatcagggggatgctacagccgcaccaggagtcggtcagagcacgaggctgagaaggctctcagtggtcacggcctcccaaagccaaagcacccaaggactgccgtgggaagtggaggtggctgctgaggtacttggcctcctggaaccaaacatctagaaatgtgggaacaatgcgggaagggggcttcctgttttctaccaggatactcaggcgatgatgtgtagacatggtcaataattttacagctacacacagggtccctgcatgtgtactcaaagccaggtgtcagggaaacccagattcattctacgaggttccttcccacaaagaacttcagtttaatgaaggagacagacatgtgaacatataaaagacaataacatttaaaatgccactttccagtgaggtcagagccagcttagaaagtggctttgcagcagcaggggtatggtttatggtttaccaaccaatctcacacccaccaagggggctgagcgaggggagggacttgctctggtcatgctgtgggactcccaacccagtgctctattcaccgaccaaggatcctcccatcccccacttctgctggggct

SEQ ID NO: 851648 - DNA, 571 bp, Homo sapiens
atgatggcaaacactatggaagaatcaattatttattatcagcataagtctgtggtcyaccttctgactgctgaagccccagtgtcttttgctttctttctcttcccctgggcaaactttctctctcacattcacatcctctcttatgtctccggaggaaggatgctctgtggctcccttagcagcaaatgtggaggaatttgaggctgatggggacacagcctttctggcccagcttagttgagaccatgaaggctgcctcctactccctctgtcccatgctggagaatggaacattctattcctgatcctgcagacaaaatgtcgttatggtgattcatggactcagaattccagaaagtccaggctgaaaggggcctcagagggcatcctccctactccatggccttgcccttgtctctccacctccccgatagaaggcactagatctcaatataagccccagggcagcaagactgatctagcttccccattattccgcttgggaataatgcccaaggaccactaggcctgagtctcacagctccaggcctggaaaggagcctacttg

SEQ ID NO: 851649 - DNA, 528 bp, Homo sapiens
agccctaacccagcctgggtttggtggggaaggttttctggaggagagagcatacagtgaggcctcaaaggatgagaaaactggccagacaggcaaaggaaccttatctattaaacagtactgatctctttaaccagaccaattcaaatgttgcttcttccaaggattcttcccaaattggcaagacctacatagccctccctccaggcctggcttcatgggcatgcagcttgtgtcctcacataggaccctgcactcggtttaatcctctgctgttgttgtcttgaaattagtagtaatttttgaacaagggccccacattttccttttttcactaggcccctccaattttgcagctggccctgcctcccttaggtcttgtcacttttgaccttgtattacatttgtccactcaaatgccrtatcttttgcctggtgaacacctgcaattccaggtgggtctgactcatctctgtcctcagggtccagcacagaggcaggcacccaagagacatctgtaatgatgtt

SEQ ID NO: 851650 - DNA, 536 bp, Homo sapiens
gagcctgccagtcagaagcagcatctggtatctctcccaggctggacatgagcttggaatccagggaccacctgagtcaaaccagcagctctgaccccaatttcaggcagggggtgatgtcacacctcttggattctgtggaggaggagctggaggcgatgggggccacatagaacagagagcagacagtagggcaaggcagtggggggcactggggtctgaagaataagaaagcctggggcaagaggatgctgtttgagcccagctctgcaaggcgactgtgtccaggtcaccactcccaatcctgcccattgggagaactcatagaaggaacatcaacccaaggaaggggtacaagcacctccgcagccccttcgtttttctgatggggattctgatgtcgagggttttctagcctgctttgaagaggcatgtttagaaaaggagagactctgacacccrtagagggccgtggggtgggggtgtactgtaattgactagggggtacgcagtgcgcacaggaggctggggctaaa

SEQ ID NO: 851651 - DNA, 623 bp, Homo sapiens
gggaatgtaaggtagtgcaccaaatctggaaaagtatggtagtttaataaaagtatgcaattataatatgaccaggtattgggctcttgtgctcttcttcttggtaataaaaacttatawttataagaaaatccggtatgctaatattcctagaagcttcattcaaaataggcaaaaactggaaacagatctcagtgggtgaatggttacacatatatactaagcaataatgttgaatgaactcttgatacacacaactttgatgaatctccaggaaatcatgccaagtaaaaaaattcaattcccaaagttagcacgctgtatgattccatctatgtaacatttttgagatgacattttagaaatgaagaaccatttactagctaccaggggttagggatagttataaaagaacaatacacggaaaccttgtgatggaactattctgtgtcttaactctggtggtggatgcatgaatctgtacatcacaaaattgtatagaactgaatacacacacacacacaaccacaaatgagtgtaacaagtaaaacttccaattctggacaagattgatgaattataccaatgtcaatatcctggtgtgctgttgtactatagttttg

SEQ ID NO: 851652 - DNA, 549 bp, Homo sapiens
gtctcactctgtcacccaggctggaattcagtggcacagtctcggctcaccgcaacctctgcctcctgggttcaagtgattctcctgcctcagcctcctgagtcactgggagtacaggcatgcaccaccatgactagctaattttttgtatttttagtagagatggtgtttcactatgttggccaggctggtcttgaactcctgacctcaggtgatctgcccgcctcggccacccagagtgctatgattataggcatgagccaccacaccggaccacaaacacaatttgtaatattcatttaagaactagtaactagggttatatccgtttaagataaacaagtaatatctatttacaaacagagttcttaaataacaaaaataatatttcatctaaatactcattaaattttattttcattgttgaataatatttcwttgtgggactaaacctaatgttatttaaactagtataatatatgtaggcattacatctagtttgtcgacattataatttgtgcttctctgaacattcttgtccatgaactc

SEQ ID NO: 851653 - DNA, 644 bp, Homo sapiens
aatattttagcaaatataatttaactatgcagaaaataaagtttatgatcaagtgtgtttatcataggaatgtgaagtgtttaaaataaaaaaatatcagtgtaatttgctacatttaaaaactaaaacraaacaaaataaaagcccaatagatagtgacaattcattccataaaatcaaacagtcattccaggggaaaaccctcagcaaactaagtgtagaagataaattcctcaacctgttaaggaatatttacaaaaatcttacaatgaacgtcacacataatagtgaaaaacggaatgcttactctcaaaatcagaaagaaagatgaggagttccacactcaacactttggctcaatattgtactagaagtaatggccaatgcaattagttaaaaaaagagaaagagagataaaaggcatctagtctgaacaagaatctaacaaaagtctttatttacaaacgacataattgaagcaggatatttccctgacctttcgtgggacttgtgacaggggtgacttgtttacccagcctgcagttttcaattccttgcgggagggagtacacaagtgaacggggcaggagctggagtgtgggaattttggaagcagccagccactatggcaggggcaaactcca

SEQ ID NO: 851654 - DNA, 638 bp, Homo sapiens
agatgttgggaagatacctgggcacacaactggcatactgcgggcattctgaaaatggagttgatatttctggtaggctttctcaaaggggcaaacactgagtgggagtgaattagaggcaaggagacatgacatgagaagtgcaaaacagagagggagaaaagtatgtgagaggtggtcagaagagagggaaataatttttcatatataaaaagcttcaataaattcagtagagattaatatatacactattgccacgcatggtggctcacacttgtaatcctagccctttggaggccaagggggacagaatacttgggcccaggagtttcaggacagcctgggcaacatggtgaaatcacatctctacaagtaatacaaaaattagctgggtatggtggcatgtgcctttagtcccagctactcaggaggctgaggtgtgaggatcacttgagcccaggaggttgagactgcagtgagccatgacagagccattgcactccagcctggctgacagagtgacatcctgtctcagataataataatacatacactattaytttaaacgctaggaacacattggtgcagttggttttcaatcaaatccacatccccagccttataattactgtttctgg

SEQ ID NO: 851655 - DNA, 629 bp, Homo sapiens
ccctgtcacagtggaaagcttcacagagcagaactcaattggcacccacagagggagcatttagacaagccttagccaaaggtgaatcatccattgcagtggttggaatctgagttccagtaagccttgctactgagtgataaagtgctctgggggtctaattctaaaggtagtctaggccacaaggattgcaattcctaggcaagtcctggtgctgtgctaggcttgaagtcagtggactgagggtacacgtgacttagtaagacaccagctggggcagccaagggagtgcttacattacccctcccccaacactaggcagcacagctcacagctctggaagagacttcttccctctgtttgagaagagaagaaaggaaaagggactgtgtcttataaattggacaccagctcagccacagtaaaagaatacccggcagagtcctaaggcaccaatttcaggcactagcttaaagacatttctagacataccctgggccagaatggaacctgctgcctgaagcgaaggagccagtcctggcagaattcacccatgstgagtaaagagcattaggtcctgaataatcagaagtggtagtcaggcagtacttactataagccttaggtga

SEQ ID NO: 851656 - DNA, 572 bp, Homo sapiens
actacagtgggagcgactgattagttttatttttttaaaaaaatcacttttgttgctaaatggcaagtaacttagagagtcaaaagagggaaraaagacgactttatctgaagattagcaaagagccagggaagagatgctgaccacctggactaggcagagggcagattaaaaatgtattatcataatttgaggaagatttgaatatggagggtgggaacaatggaaattcaaggttgttctggatcgaatgaccattattagataagataaatgtaagtaatgctacattcacaaataactatggaaaccacatagcctcaatctacaaagtttttttcttgcttatgttacttgtccattcatggataggcaggggcactctgttcatcactgtcactcagaaattccggctgatggagaaagccttcctcctgaacatcaaaggccatagtgctagagaaaaaagagcttttcagtgtctcatattagctactaaataccatagcctggaggtgacctatatcatttccaggcataactcattggcccaaactaactacatagaacct

SEQ ID NO: 851657 - DNA, 630 bp, Homo sapiens
aggctggaaatctaagatcaagctgtgggcagaattggtttctcccaaggcctctctccttggcttgtagatggcatctccttccagtgtatttgtgtcctcatctccccttcttataaggacagcagccatagtaaatcagggcccacatgagtgacctcattttaccttaattaccttcttaaccggcctgtctccaaatacagtcacacattttgaggtcctagggggttaggacttcaatatatgaatttgtgagagtgggacacaattcaacccatagcaggctagtccctggctgcccacctcgtcagggactattctgtgggattctgtgtaagcagcagcctcgtcctgcctcccagtcctgaggaagtccatctcgtgggcatggggaagccagtgtgtctgagttcgtattaaagatgctctgaacaagaagaaaacccattcgcagcatggatgggcctgtccctctatccatggatctgtgctctttgtcttgtgggayttgtggacagaataaacggtgatctgggctttttactcatacaaatgaaatgactggtgtggtgtcggtgtgtgtgaaagggaagagtcactggatccaagtaagccagactcctgccc

SEQ ID NO: 851658 - DNA, 613 bp, Homo sapiens
atggctatgagtgagtcactggatgtttagaaaaattgatcaccgatttatacacattgttcactttattcacattactggaaaatcagagctgcaacatttaaactaaaaggcttaaagttatatgagagaacaagggacactgatatttggaatttctttgacttactgctggaacccaatgtgatcaagacatctttaatgggcattctaattggttgctttggccaaagttttggtgtgaccgagagaggggggatgatgaagcctagttaggagctctcctacctaccagggagtaacaacttgtgccggagggaaatatgaacaagaaccatgtaacagaccaaggtcaatagcagtggcagctctgtattgagcatttattcagtgtcaactactgtgctgggctcaccttcacaacgagacagtattaccatcatcattttaccagttaacagttacctacataaggccacaccgttcataagtggtcgaatgataatgatgatgatattaacaatcatcatgagaacttacctggcattgtgcttttctgtttacagaargaatttaaataaataattgcatttgatccttatagtatgttggt

SEQ ID NO: 851659 - DNA, 682 bp, Homo sapiens
ctgtaaacactttcagaccggtaggaacttgtatgtaaaattaaaagtctgtaaatgaaaaataaagtacaaatgtactagtggcaaatatatcataaaagattaattgattcctatataccactgtaccctatccttagtgaggaacataaacaaaattgaggaaaaaattgctatgtcccaaatagcttaatcgggttggatgtgtttcctccaatactagaaaaaaaaagtcatatggtttcactcaagcaaatgtgataatttaaaaaaataacttatgtatgtgtgataagcagtagaatgggcattaaaatgtctacatcttaatccctggaacctgtgaatatattaagttataagtggaactaaggttgctaattggttgaatttaaatggggagattatcctggattatccaggtgtgcccaatgtagttacaagagtaactacattgttagtatgtagaatactacatactaacatgaagagagaggtggaagaatctgtgtcagagtgacgcaatgtgtgagactcaacctgacatcactggcttygaaaatggaaggaggccagaaaccaaggaatggtgacaacctctagaagctgaaaaagaggtaaaaaaaattcttttctagacacttcagaaagaaccacaactctgccaacaccttgattttag

SEQ ID NO: 851660 - DNA, 629 bp, Homo sapiens
ggctctttcagcacgtggtgccaacctaagacatgaggcctcctgctggagctccaggaaactctagtctctgccctcctcttgcatcygtaggatcgctgggctgctgctggggcttggcaatcctcagagaccttggacttgtctgcttggagataaggcacagtcatttcatctccaactgctgccaagccctgctggctggcaggacatttggactctctctccctgggttttcccaggacagaggttacagatccttcagctcttaggctgatgtcacttccactccttgatctcagcttacaggaaaggtggagagaaaaggcgatcagagcagagtccctttctgaagacacacttggtcctcccctgcctgggtctgcaggggtcagaagcatttccatagcagtcattttcatacaggccctggctcccattaggcaaccttcctctttggaaaacccaatagccaggaatttaaaaggcaggactcttttctcttaattttctcctgaaaaacccttccctgaggcaaccagacccagctgctgcccaaataggaaggaaggtcagaattgacaggaattcacaaggaaagagagcataggtttatatttcagggtatc

SEQ ID NO: 851661 - DNA, 645 bp, Homo sapiens
gagaatagttataatacaaattagatatagagatgatcatggacattataaatcattagtataaacattattaatcattaacttttaatattactctttgttgtataaccaaggaataaccggcgggtatagggacaggggctgaagggacattgtgagaagtgaccaagaaggcaagaggtgagccctctgtcacacctgcatcagggccgcttgagggctccttggtcaagtggtaatgccagtgcctgggaaggcacccgttacttagcaaaccgtgaaagggagtctccgtttccttggaggagtcagggaacactctgctccaccagcttcttgtgggaggctggatattatccaggcctgcccgcagtcatccggaggcctaaacccctccctgtggtgctgtgcttccatggtcacgctccttgtccactttcatgctcttcccgtactcctggttcctctttgaagttcttagaagatagcggtagaagaaatagtgaaaatcttaaagtctttgatcgaatttctgataartgcacagaagaaaacgctgacgtatgctgccttccctctctgcttcagctacctaaaaggaaagggacccctgtcctatgatcacgtgacttgcttgaccttatc

SEQ ID NO: 851662 - DNA, 553 bp, Homo sapiens
ccacccaggctgcactgcagtgatggcgcgggaggcaccagctctgtggcctgtgtccagcagctgcgggtctgaaggartagccagagaggagcacctgaaccccatgggcttggacttcctggggccccgctgggatttcttcgctgctctagctggcaggacacatcccggcctcttccacccattcccccatgtggctgaagacattccaacaatggggtgggcccataatagttagccctcagtcagttcccggagcacagccctgggagggggctatttctctccccactgaaaacatttcaaagctgagttacttgtctgaggcctcatccctcggaagccgtctgactccagagtctgagcccccggctagtaccctatagagagggggctctccaaaggggctgctggggcatgtgtgcctgtggcagaaaagaggagaccctggaattcagcaccctgggtgccattcccagcgtttagtttctagaggcctcagtttctccatcagcttatgggatccttgtctttactgacaagaatggaa

SEQ ID NO: 851663 - DNA, 554 bp, Homo sapiens
cctttcaattccatttaaaaaacaaaaaccagcaggtgtggtggctcatggcgtaatgggcctgcccaatgctttgggaggccaaggcagrtagatcgcttgagcccaggagtttgagacaagccctggcaacatagtgagatcccatttctacaaaaaaaaaaattagccgggtgtggtggcacacgcctgtagtctcagctactcaggtggctgaggtgggaggatcgtttgagccctggaggttgaggctgcagtgagctgtgatcgcaccactgcactctggcctgggcgacagagtgagacactgtctgagaacaaaaaacgactgaaaaaaaaaatcaccttagctttttctcttagaatcttctctaaaatgtattctttgtggcattctgaaataggattcatgatgatgcctgttgatcttagggacactacctcacctgccagtatctttggggctgtgtccttcaaggacatgtccccagactgctgtgcagtgtcattttttgtgtttggtttggtggtggcttcttcccccttgctaggct

SEQ ID NO: 851664 - DNA, 649 bp, Homo sapiens
ggcaacggtaggcagttgggatccataatattggtttcataatgcaaatgccctataattccctattaattttctttaaatttaataggctgcagtggtaaaaccttagaagacttacatggaaagaattattctgtttccttcacattagcttttgacaatcagaaccctgggctaacattctggcactttctggtcatgtgagcccgagcctgtttttagtatttaatgggagaacatgaccctcattgccagaatcatgtttttctggagcacagggatagcgtggagttggaaaggcatatctctgtacttaatctatatgcctgtctgtcccaaattatatttccagtcttgatgtctttactgagtaccagacttgtatgtccctctctagttgacatatctttttggattttagtaggtatctcaaacatattttgccccaaacggagctcttgatttcgtacgtcctctcctactccacccatctacttccttgctttctctttccctacatccatgctarcaaactctgcctgcaaaacgcagccgcagtccttcttctcttgtatccccagtgcctggagcagtgcacagcacattatgaaccctggaaatactgtggaatggcggacaggactggggg

SEQ ID NO: 851665 - DNA, 515 bp, Homo sapiens
agaacataactcagtgtccgaggaaataatgttgttggactggtattttgttcatggaaagtcttcccaaaagcagtgatgaaatttacttctgtgaagattttcaaaaacctcactgattttttggcaaagccctgactcgaaacagagtgacttctctgaattgggaggatcttttatttacacggtgctgatctgagtagcaatttttctcatcctgctactggtttgatcactagagagattttgtttcctttgacttcaagatctcgggaagctcaaaagaaggaaatgaaccaataaaacacctaattggttttattgtatgatgacgtgaccaattactgtcttgtcttcctctgttttcatttttgataacatccagcagcttgtaaatgtgacagattacatgctactttgtcgacaygtaagcctccggaaaggcctgtggtacatctcaacaggattgagaaatttctatgttacattttatcctcagtcttgccatttatttt

SEQ ID NO: 851666 - DNA, 634 bp, Homo sapiens
tctcaagttgatttgaaatttgcctccatgcaatctccatgcattgtttctaactcttccctgtgaatatatactgagttctcatatttcttgtatatttaggtcttgcaactgtgattttaaaatgagcttattttatataaaaaactctcaccgatcccagttttatttaataccttttgaaattgtgcaactagtgcatgtgtgtcataaaaatcatcacaacaatctacaagggcataaatgtaagcggtagtaactatctgccgcttgctagtgattactgcctgttagagtttggcaagcatgtttccagtcttttcctatgctcatatccataccttcaaacatgtacgtgttactatctcagtctgtttgcattgctataaaggaatacctgagactgggtaatttgtaaagacaagaggtttattcagctcagggttctgcaggctttacaagaagcatggtaccacctcaccaggtatgcttctggtgagkactcaggaagcttccaatcttgccagaaggggaaagggagctggaatgtcacagggtgaaagaggaggaaaaagagagaaaggaaatgccagtctcttttaaacaaccagctgtcatgtgaacagagcaagaa

SEQ ID NO: 851667 - DNA, 280 bp, Homo sapiens
caaaccttgatataagaatggaacatactaccacacacgaaagtagggaaaacgtttttccttttctcaattatttaaaagtgacaattaattgtacctgtgatttgctccgtctcagttttgaggcatataaaggaacaatttctcacatttatgggagaatggtgtgaaagtcattgaaattgrcatgatacagaacattgccacattgggatctactgaggaaaccagacagtggaaggtgatacccagatgacactgttggagcgattccttccat

SEQ ID NO: 851668 - DNA, 596 bp, Homo sapiens
tgttgtgaggggttcagattagatacagtgagtgacgattagaaatagccaacatctagatcatagagagttgtgaatgtgttgaatagttctatgcaaacctaacccaaaaagcccaaggaagctgagaggccaaagaaagaggctgacaaattcaatttctcagaaagaaacattgaataggaacttagcaacagaagtcatgtctgtgttgctggcagtggcaagacaagatagaagatccccatgccattaccatccagatctagggcttatataccatagggaaggaatctgtaggacaatcatagggaaagggaaggatgctgtgtgaatctgcctaaaggcaggatttgtagtcaagtgtatttggacctaagggcagaatttacagtaaatacatgcccttacacaaggaatcaaggaacagtagacagaatagaaatcttagaggcattttctgaactggggttcatcagaagccaacatggcagatgagcatccaacgtggrgttgctttagtctccacagactgccaggctggggattttagaattaatgtagatgaatttggaagatattgagatgtttaaata

SEQ ID NO: 851669 - DNA, 510 bp, Homo sapiens
aaaatggctaactggaaggagacaaaaggactaataaggaagcactttatttcttttttaccttagtaggaaaaacactagtgtgtgtctgtttgtcattattacacctttcttctttatttgaggaaactccagtttcgttacgtggtaacttcctcagtcccaggaggtgattcctgattgtcataagtaaatcacaggtcacctttttcctccactagttattggtatgggcgtggatagaagagccagttctggtcagtggggtatgagcagaagtaggaagaaagcctttttttctgccattacttcccacccccactccaattgggaacgtggtttcaggaagctttgatgattagtactttggcagtgattttgagaccatcaggggagacctcaacaccccactggagacatgcagaggagaagyttgggaagagatgggcccttattgatatcgagtcccaagagcaacccagcaatcacctcctctggccttcttgttct

SEQ ID NO: 851670 - DNA, 642 bp, Homo sapiens
tttttttggactaccttttccccagtagaaactatgatttttgctttttgtttctgcttttcttcctctctccttgcaaagaccgactgagcttccttcagtaattcctccatcagtttctcattttatccatcaatctttttttgtaatttttttgtaatgttaggtcagctcttagttacaaagttaacctttaagaggtcttgcccttctgggtcctctggatctaatttggaggtttatttttttattttattttatttttttatctaatttctgagcctctgcaggaatgcagagggtgtttcctctttttcttgttgaatctcgaatgcctctgagacattttgtgtcctatgagtgagctctttgttccctttaattattagttcctcaagatcccacatttgggcctgatccctgggatcactattatcccattcaggatcaatatttggaaatttttgttcagctggcgagacttcttgcccggagggtgttgcctttcccagatggttatggccgctttcctaatcatttcrttttcttctcctgtgaacaggatatttatgacagacatcatttcagcccatgtgtaaaagctgggtcctaggaattggtccagatggtctgctaaactga

SEQ ID NO: 851671 - DNA, 633 bp, Homo sapiens
taggcatgagtttatcatagagacaaaataaaatcctaattttgtcagaggtcattatatagatttggagatacagaatagaatcattcctacatcaaaataaagtgaagaaaattatagaaataatggggggagggcactgaagttatataagaggataaagaaaggccataatgtataaatccctaccaggagccaggcactttatgtctatcttacttaattcttccacctctatgtgagctaggtgttactcctttaactccattttacagatggactaattgaagataagtgaggttatgtaatttgtctagagtcatgtaggttacatggggagaaattgtgttctcctttatagccattcaagtagatagtggcatgctaaagctggcttatactagcttttaaggccaattgagaaagttttagaaattctgcgatttatttattaaatacagccattattaaaattgaattctataagtttagaattaataaatgatactaaacacaaatgcaatagcyattcaaacctcattacctccaaattactttactacagtttactattatttataatcttgaggttacttgcatccctgtgtctgtattgtagaaatattataaaat

SEQ ID NO: 851672 - DNA, 603 bp, Homo sapiens
gtaatgtgagtgtttttttaagtgaattgcaaacaaaacagcatgatcgaatcctttagagcaaagagcctgtaaaactaaatggttttaagacaaatcctctatcccgaggtcccacattcgagagccacacaygaggcagacagatgcacgcacaggaaaatgaatgaagcgtgtgcagattatcagcgtgaaatataattcagacaaaaactggaagacaatttatgaatctgctgtggtccacaaaaataaactaatttgtttttctacattaatgactaaggtataagagaacaaaaatataataattaaaggtcgccctaagcaccgatgtcattagagcctgtgacgtattgtttatctccttcccatgcactgaaggtaggtgtgtgttttgcttagcaaccgtcactaatgaggttcacaattaagaaggttgaatccccggtcctcagttcctcgcttccctagagagtggagctttcacgcaataggttcaaggggcctccccagccctctggtgttaggttgtagtctaggtccaaaatcagcctcctctaatgagctattatgatctgagcaaagtacaagtatttattt

SEQ ID NO: 851673 - DNA, 536 bp, Homo sapiens
tgtggaaggaggtcagacttattctgtatagctctgagaggccgagctaagactcatttattcattcattcagctgatacatattgtatgctactctgtgtcagrttgtattctagacattggggttacaagcagtgaaacatttaaaaaaggacaaaaatccctgtgatcagggtgctgacttttattcccccctcaacaggaggaaatttcagggaacaaaggctcaatgtcaggatgaactttctatagccagacctgtgcaaagacggactttgaattccttgaggggataaagagggcattcaggttcgctggtttgacaatcttggtgatgttgtggttatttgcacatgacagaaccaaatgtttttttttaatttctattcatcctctttttttctgccctgttttggctcttttggaagacttggacagaccttctttctgcctgggtgagagtattttggcatagggtagcctggcatttgatggagtccatttctggtgctgggcttggcagcggtaacagagtg

SEQ ID NO: 851674 - DNA, 571 bp, Homo sapiens
tctcaaactcccaacctcaggtgatccacccgtttcggcctcccaaagtgctgacattacaggcgtgagccaccacgcctagccagagtggtgtaatttcaactgagaaagagcaaaaggtggccctttggaattgtgtttggattcacaaacatggtagatttgaaatcagtgaggcggactattcagtctcattaggaagacggactattcagtttaattaggacgagagaattaagaataaagtctcatatttttagttagaatgtctttgtacttagggagcttataaggactccctcataaataaacaatatcctaaaatgcatcctgtaatccataaaaagatgattaagtgcccaagtggctaacattcccacttaaaaagcttcctcagttatagaactatcctgtagcatgtactagaagctcaaggttacagtgaggaatcagatrtcatttaaacaccatagaggaaaagtaaataggacattgattcatatgcaaaattgatgtgatgaacctatggccctaagtcgtagctaggatattttgtaggagtgaggtggca

SEQ ID NO: 851675 - DNA, 582 bp, Homo sapiens
atataaatttcacatttttatagtgatttatctctaagtaatacaattaataatttttgaaccactktttctcattttttagaatatttgtgtattttatggtatatatacctatataccataaataatgaataaataatgaaaaatttaaatacatcaatactgaaaagggaatttttgctaccaaaattatgctatttaccattaatccttgctaggaatctgtcaaacaaatgaaacaaatttaggacagggggaaatggaaaaatctttttaaaaaatggtctatcgttcctgtgaaaaaaaaaatcttaaatttgttaacgatgcattatttctcattctaaatgagagaatacatatgcaattgcccccttaaggccaactggcagccagaagttacagtatactgttaatcatacttcttccaacagaactgtgggaatcactcaaaccagagaatcagagatgtctttgtgagggcatactcatctgtatggcatttgctatgatttaaacgtagccccctccaaaatttagatattgccaaagtgatagtattgagaggtgtggcctgtaaga

SEQ ID NO: 851676 - DNA, 594 bp, Homo sapiens
gggataaaatgtcttgattacctgattaggaaatatatttgctcattattccctgaaaacattttgcactgtgtatatttaatgctgtttatacaaaagaaaggcctattttttttttaatctactccaacaatatgtttgttcttaaatcttctggcataacattctgtattttccctgccccagacatgaagttaaccacttctcgaaggctccttttgttgaaggaaggtagttagaagtaaagatctgaggagtagatttgctagttggtgttgctgtccaccattttggtggacaaagctaaatttatttttatgtctatctatgtgtttgttgaaatgcatgagttcatactgatatacccaattccaagatgacatcccagggttcgtcctagttttctctctttccaaatttttaactcctttcaactacagtaataatcctgactacaattattcttaatatayatacttatttgatcaatcccctccatgtaaccagtcttccattgccactgctgcccccttccctgcatagataccctctccatcttgctctgggctctaaccccacagaccttgctatctt

SEQ ID NO: 851677 - DNA, 511 bp, Homo sapiens
agaaatcagtaaaacatactttttacccaaatcctcaaactagttggaaaagaaaataagcagacaaataattttgctgcaagttatcaaagagtgcaagcacacagaagagaccatatcagattggagtgaggtagatgatggatcaagaaaagcttccttgagaaggcgatatttaagctacattttgaaggaccagtaagagttaatgaagtgaagaaagacgggcaaggcattgtaggccaagggtccagcaagtttggtagcacggtgggcttgtggaactactagtcattaggaagtcttgggacctgaggtatggaaatgggagtccctgaagagggagagaaggcagcattcagagtgtaaggagaatccacagttgctgcaatgtcaatagtttgtgtctgacatagmaaaatgtgaggtgtggtagtgcttggaagcttttggtgctgactataaataggttaccttgaaaagggaagggtcctatattttaccatatttt

SEQ ID NO: 851678 - DNA, 618 bp, Homo sapiens
ggatacaaaacctacaaaattggtagcatttctataggtcaacagtgaacaatctaaagaagaaatcaagaaagtaacccctttacaatagctgcaaaaataaakaattaaaatacctaggaatatatttaaccaataaagtgaatgaccactacattgaaaactttaaaagtttgatgaaagaaattgaagaggacacacacaaaaatatggaatggtatatcatgctcatgaattggaagcattaatattgttaaaatgtccatactacccaaagtgatctaccaatgacatttttcacaaaaacacacaaaaaaatccatcctaaaagttatatggaaacaaaaaagactgaataatcaaagcaatcctgagaagaaagaacacagctggaggcatcacactacaatttcaaagctattgtaaccaaatctgtatggtactgagctaagaacagacacatagatcaatgaaacggaatagataatccagaaattaatccacatatttacagacaactgattttcaacaaaggtgccaagaacatacaataggaaaaagacagactcttcaataaatggtgctgggaaaactagataaccatatgcagaagaagga

SEQ ID NO: 851679 - DNA, 615 bp, Homo sapiens
ggagcccagctggcttcacccagtggatcctgcaccaggctgcaggtggagctgcctgccagtcctgcgccatgcgcccacactccycagcccttgggtggtcgatgggactgggcgccgtggagcagggggccacgctcatcggggaggctcgggccacacaggagcccacggagtgggtgggaggctcaggcatggcgggctgcaggtcccgagccctgccccacaggaaggcagctaaggcccagtgagaaatcgagcgcagcgccggtgggctggcactgctgggggacccagtacaccctccgcagccgctggcccgggtgctaagcccctcattgccccgggcgggcagggccagccggctgctccgagtgcggggcccgccaagcccacgcccacccggaactccagctggcccgcaagcgccgcgcgcagccctggttcccgcttgcgcctctccctccacacctccctgcaagctgagggagccggctctggccttggccagcccagaaaggggctcccacagtgcagcggtgggctgaagggctcctcaagtgccaccaaagtaggagcccaggcagaggaggtgccgagagcgagcgagggctt

SEQ ID NO: 851680 - DNA, 627 bp, Homo sapiens
ggaacacctggcctacccagagtggaaaactgctcaaaccacaaacaacagcatgagcggcctgttccataacaacatgtttttgctgcagatgatcatccagggactgtttctctgctcctcactaagaatgtttgtttcctgtaaagaatgcttttagctaatctataacctatagaaacaatgcttatcactggcttattgtcaataaatatgtgggtcaaactctgttcgtggctctcagctctgaaggctgttatccccctgattcccactttgcactttatttctgtgtgtttgtcttcattcctctagcactactgggttggggtctccacgaccgagctggtctcatcaagtggcgttcaacaaggggctcaaacccgggttgaggggttgctggagcgacggagaacgtggtaactacactggaggacaccagagtactcttaagcaatcccttggtaagtaagacggtgagcttggaagcatcagggtaacaatgggacaagggtcgagcaggcatgagtyttatttgagtctgttttggcagctcctcagaaaagggggaaggaaggttagtactagccgacttatgcagctttgtagtgttggtagagaaatatt

SEQ ID NO: 851681 - DNA, 622 bp, Homo sapiens
aaattaaccgggcatggtcgcaggtgcctcgaattccagctactcaggcagctgaggtgggagaattgcttgaacctgggaggcagaggcctcaatgagcagagatgtgcaccrctgcactctaacctgggcaacacagcaaaactctgcttcaaaaaaataaaaattagtctgggcatggtggctcacacctgtaatcccagcacttttggaggttgaggtggttggatcacctgaggtcaggagttcgagaccagcctgaccaacatggagaaatcccatctctactaaaaatacaaaattagccacatgtggtggcgcatgcctataatcccagctacttgggaggctgaggcaggacaatcacttgaacccgggaggcagaggttgcggtgagccaagatcacaccattgtactctagcctaggcaacaagagcgaaactctgtctcaaaaaaaaaaaaatagaatgatattaaatgttaaaaatacaatgcttcattagctcacccaaaaaagattccaaagcacataagacaagcctatgccttatttgtaggcccttgacataaatgaagttaagggcaccaccacttagctttcacataaacatgggtcacaaa

SEQ ID NO: 851682 - DNA, 458 bp, Homo sapiens
atactttgttgtgaggagtgtttatccattgtaggatatttagtagcatccctggcctttatccactagatgcacacaccttcaccgctctcaataggctcccccgaccactgccattcagttgtgacaaccaaaaatttctctagacattgctaactgtccctgaggaacaaaatcacctcagttaagaactgctaggctagaaaacaatgtcataactgtgtcataatttatgcttttatattattgcatttaccagtaaattctcagctggggcagcctggaaagggaaactgcctgtatcagtcagctcaagctgccataaaaaataccatagatttggtggcttaaaccacagacrtttattttctcgtaatcctggaagttggacgtctgagatcaggaggctagcatggtcacattctggtgagggcgctctttctggctggcagatggcc

SEQ ID NO: 851683 - DNA, 581 bp, Homo sapiens
ggatccctcatgacttgatgctgtcttcacaatagtgagtgagttctcgcaagatctggttgttaaaaagtgtgtggcacctctccccacagtctctctcacttgcgcctcctttcatcatgtgaygtgcctgttgcccccttgctttctgcattcgttgaaagctccatgaggtttggccagaagctgagcagatgccagcactatgtttcctgtaaagcctgcagaaccttgagccaattaaatctcttttctttacaaattactcagtcttagatattccattatagtaatgcaagagtggcctcatacagaaaattggtaccaggactgggtcatcgctataatgatttctgaaaatgtggaagaagctttggaactgggcaacaaacagaggttggaagagtttggaaagctcagaaaaagcatgtagcaccctccccatctctcttgcttgttcctgctctcatcatgtgaagtgcttattccccttttgccttctgccatgattgaaagctccctgaggtttcaccagaagccaagccaatgccagcaccatgcttcctttaaagcctgcagaa

SEQ ID NO: 851684 - DNA, 634 bp, Homo sapiens
tttttctctctctctctctctgctggatccttcctacacaaaytcaagcatgctttgagattacccatcaaaacaaacaacataaacaaaaaaaacgaacaaaaaccttcttttgacttcatgttccagctactgctcgtttatctgcttgccttcacagaaaaatgggacattttgtatcctcattgtctctactttttcacctctcattttatcctcaaaatcattctaatcggtcgtttctcctaaccataaaatggaccctatctcaccagtgacctcattttgctaatgctaatgatcatcttacttgaactcttaatatttggcatcgtgcattattgcttccttcttgacacatatccttcacttggtttcgaggatatcatgttttctggcttttgtcttatctctggctgcttcacctcaaacttcttcacctcctctcttagacctctaagtgttttggtgacccaaggccctgacccttgctctcttctcacctctatgatcttatgtgggtaatttcaactaatccagggacttaaatagcattgttagaagatagcccacatttatatctccagcctagccttttttgagcaccaagctcttacatgcttcttgatatttc

SEQ ID NO: 851685 - DNA, 620 bp, Homo sapiens
attcttttatgggttatatctaatccagtcattctttcggtgtcttatttaagaaatctttgccaaaccgaaggtcacaaaagtttcatttgtattttctttttcctttttgagacaggatctttctctgtcacccagactggagtgcagtcgtgtgagcatagctcactgtagtctcaaactcctggcctcaagcagtcctcctgccttggcctcccgaactgctggaattacaggcatgagccactgcaactgtctcacttatattttcttctagaagtttaaaaaaaaatctttgagtttacatttagcttcattacccattttcacctattttagtcaaacaatgtatatagtgtcaagtatggatctcagttcattttgtgtgtgtgtggatatgaatatccagttgtttcagcatcattttttgagaagactgtcctttctccaccgaattaccttgaaaattttgttgaaatctaattgcccttayctgtgtgagtcaatttctggattcacgattcattctgttctatagatttatttggtctattttttaagccagtattgcactgtcttgattacagtagctttatgatagttctgaaatcaagtaatgt

SEQ ID NO: 851686 - DNA, 500 bp, Homo sapiens
gatgtgaatccacatctgtctgactccagaccctgagcacactgccacaatgccatatagccttttagatggggacactgaggcccagagagtggaaggtcttgtccaagatcatgaagccagtttgrttaattgtccattaattcatcaattattgaggatctgctatttgtcaggaagcaggctagccaatgggaacacaggcatgacctagatatagttgtgcacttgagagtaattaagggagaagataagaagtgactataaattacttgaataaaagatagtaaatgacaaatatctcagggaagatagtgaagaggttgtcaaagtttggaggaggtatgcacgactttcatttgggaaaaatttgaaaattcttcacagagaaaatggtttaaaggtcttgtttgaaagaagagtagaatttgcatattggcaatgggaaagaggaagaagttcaagctgcaaaaagcgcatagaggtggaggtaaaaggag

SEQ ID NO: 851687 - DNA, 553 bp, Homo sapiens
gcatgggcatttaaaatcctttagatacatattgtcaaatgccctcttaatttctttctatacaatgtatgaatatgattttttcccctacattcttgccaactgtgggtattataattcttgtttgttaatctgacaggtcaaaaattgcattccactttagttattttattttttgagatggagttttgctctttttgcccaggctagagtacaatggcatgatctcggcccactgccacttccccctcccgggttcaagtgactctcctgcctcagcctcccgagtagctgggattacaagcacgtgccaccatgctctgctaattttgtatttttagtagagatggggttttaccatgttggccaagttggtctctaactcctgacctcaggtgatctgcccacctcagcctcccaacgtgctgggattacaggtgtgagccaycttgcctggcctagttttaattttatattacatgattattatgaagtcaacttgattttattatatttactggttgcttatttttcatacattatgaccttccaa

SEQ ID NO: 851688 - DNA, 574 bp, Homo sapiens
aatactgtgtttttccaacaggcttaaaaaacagcaaaccaggagattatatcccgcacctggctcagaggtcctatgcccacagagtctcrctcattgctagaacagcagtctgacatcaaactgcaaggcagcagcgaggctgggggaggggtgcccaccattgccgagacttgattaggtaaacaaagcagccaggaagcttgaactgggtggagcccaccacagctcaaggaggcatgcctgcctctgtaggctccacctctgggggcagggcacagacaaacaaaaagacggcagtaactctgaagacttaaatgtccctgtctgacagctttgaagagaataatggttctcccagcacgcagcttgagatctgacaacaggcagactgcctcctcaagtgggtccctgacccccgagtagcctaactgggaggcaccccccagtaggggcggactgacacctcacatggccgggtattcctctgagacaaaacttccagaggaatgatcaggcagcagcatttgcggttcaccaatatccgctgttctgcaccctctgctgctgatac

SEQ ID NO: 851689 - DNA, 605 bp, Homo sapiens
agacttactaatatgctcatggtaatacttgtattagggttctctagagggacagaactaataggatagatgtatatatgaaagtgagtttattaaggactattgactsacaccatcacaaggtgaagttccacaataggccatctgcaaggtgaggagcaaggaagtcagtccaagtcccaaaacctcagaagtggggaagccgatagtgcagccttcagttagtggccaaaggcacaagaactcctggcaaaccactgatataagtacaaaagtccaaaagctgaagaacttggagtctgatgttcaagggcaggaagcagccagcacgggagaaagatgaaggctggaagactcagcaggtctgctcttctcaccttcctctgcctgctttattctagccaaggtggcagctgattagatggtgcccacccagactgagggtgggtctgcctctcccagtcctcctcaaatgttaatctttggcaacatcctcacagacacacccaggaacaatacttcgtatccttcaatccaatcaagttgacgctcaatattaaccatcacaatactctttgtgtatgaactctactcgtaaatgtgaa

SEQ ID NO: 851690 - DNA, 647 bp, Homo sapiens
aagagtaaggactatattctaaattgtactgggacttgaatttcaggctgaagacatggcctttggtaaactggcaatagtgagcgattgaagatcttggggcagaaaagtggcatgataaaagcagtataacaataggaatttaatttggcacctgtggctaaaagtcactgagtgtgaagcaaagtagaaaaggcaacctatgtatggaggttagagacaatcaaggcctaaaataaaaaggcttttaaattagtgtaccaataatggaaatggataacaactgatataatccgtatttccaaacgactacagactaatttcttattgaatgtgaggtagaggagtgaagaaagaaaaatatcaaagccaactacagcctgaatgttactcataagttaccactctttataggacccaaagggaaacacatttgacaataaacaccaaactacactcagaatctttcctccttcctagctgctaaaatcaagggtcattagggctgacatatgccgattctctctttctttaggacaggcrgacattcagcaagtatgcaacaatacagttgtaaaagctgttaaaatcctgaaatacttatgtgctgggtggtaaattgctattgttcaagtgccttgagtgcc

SEQ ID NO: 851691 - DNA, 546 bp, Homo sapiens
gggcatatgtatctttcctcttacatgagaaaacctgcaaaagaaatattgtgggtaatgattcatcacacttcatttctccagtccctcaattggttaaaaaaaaaaaactcagcccacaggagaatcacttgaatccaggaggcggaggttgcagtgagctgagatcgcgccattgcactccagcctgggcgacaagaatgaaactccattgcaaaaaaaaaaaagaaaaaaaaaaaaagatcggccatccccatccttgttacattgactgataacttgttttcaaagaaaaaagccaatgccaaagccacctgcatacaccttccctgccacccccagcaatgggaaaatcctagagcaacagcctgatctaggcgaaggattgaggcctagagatgaactcctcagaaaccctgctcttcttgccctcagcaagtcctggatatgggacaggcagcctacccatatttggagcatcccatcatattagaaaaataggattccttggtcctgaggaacyttttccatttgcttccttcccac

SEQ ID NO: 851692 - DNA, 479 bp, Homo sapiens
ctcattatttagaggatgaaaaattacaatcattccactgaactggaagttaagacagccacccagccactttgggctcctcacacctctgaatcaataggcaaggaagggagttacagtgttggctggggtaattgatcctgcccaagaggaactggaactgctacacaatggaggtaaggaggagtatgtctggcttaaggagatcccttaggacatctctgtaccctgccctgtgattacagtcgataaaaatgacaacaatccatacaggactatgaatggcccacacccctgaagaatgaaggtttgggtcaccccaccaggtaaaccacgatcagcttgcgagatgagtgcmaagggaatacagaatgggtagtggaaagaggcaaccatgaataccagcaaccaccatgtgaccagctacagaaacgaggactgtaattgttgtatttcttgttttgttacgaatgttttgg

SEQ ID NO: 851693 - DNA, 535 bp, Homo sapiens
tatcatggaacatcggattactgactttatttttttgagatggagtctcgctccgtcacccaggctggagtacagtggcgcgatctcggctcattgcatcctctgcctcctgggttcaagtgattgtcctgcctcagcctattgagtagctacaggcgtgtgacaccacgctcagctaatttttgtatgtatatatatatatatatgtattttttttttagtagagatgaggtttcatcatggtggccaggttggtcttgagctcctgactttaagtgatatacccatctcagccttctgaagtgctgggattaagggtgtgagccactgtgcctggccagattactgactccatatcatagtatttaagtattgttaactttacctcaccgtatcaaaattatggaatatcacggagaggagtaaacatcatccaaggactttgcattctcctcyggggaaaaggttagtgtgttttttggttgtacacaggataattttattaggttaggtggaagtatgaacttgttattct

SEQ ID NO: 851694 - DNA, 535 bp, Homo sapiens
tatcatggaacatcggattactgactttatttttttgagatggagtctcgctccgtcacccaggctggagtacagtggcgcgatctcggctcattgcatcctctgcctcctgggttcaagtgattgtcctgcctcagcctattgagtagctacaggcgtgtgacaccacgctcagctaatttttgtatgtatatatatatatatatgtattttttttttagtagagatgaggtttcatcatggtggccaggttggtcttgagctcctgactttaagtgatatacccatctcagccttctgaagtgctgggattaagggtgtgagccactgtgcctggccagattactgactccatatcatagtatttaagtattgttaactttacctcaccgtatcaaaattatggaatatcacggagaggagtaaacatcatccaaggactttgcattctcctccggggaaaaggttagtgtgttttttggttgtacacagrataattttattaggttaggtggaagtatgaacttgttattct

SEQ ID NO: 851695 - DNA, 584 bp, Homo sapiens
ctgggatttgtttctctgaatgcctgtgggcactggactggtcagacatctcttacgcaaggaagaaggccacaggccacagagccaatggttggtggggcagagagtccagccaaggtctctggtctaggcatattctgcctcatgaatggcttattgactcctggtcatatacagcacactggtattgggtactgatttgggcaggagaggaaacaaacctaaatttctgtttggaccagttggtcaggagacttcccggaggaagtgaaactccagctgtgcactgaagaatgcaggggacttgattggggagcagaggtgaggggaagggaggcgtgcaccgtgcaggcagcgtgttgggctgccaggagcaggggatgtgcaagagtgagaagatggacagggagaagtggtgccaggggggcaggccctggtggggagatagcctgtaggtgggcaggagagtgggagtggagatggggctttgggstgtgcctagtcagagggagcagggaagggaagagagtgaaaggcagaagccaggactttggctagggttgtggggtgggctgcacagcatt

SEQ ID NO: 851696 - DNA, 579 bp, Homo sapiens
catggtgagtgtttgtgtatctaaacctatctcaacacagacgaggtacagtaaaatatggtataaaaaatttaaaactgctacacctgtataggatacctgcatgaatggagctcccaggactggacgttggtgtgggcgaaccagtgagtgagtgtggagagatgtggtgacctgggacattaccgctccctgcttcacactttataaacactgtacactttggcaacgcaacatgtgtaaaaacatatttttctttcttcaataataaatcaatttagcttagtgtcaatttttacttttttaattttttaactttttgatgcttttctagtaacacttagcttaaaacaaacacattgtacagatgtacaaaaatattttctttctttctttcaacaagcttgcagttgtgttttctttctttatatctttattctataaacttttttckactttaaatatttttttaagttttacttttactctttaaacttttttgttaaaaactaagacacaagcacacacttgagcctaggcctagacagggacaggatcctcagaatcactgttttccac

SEQ ID NO: 851697 - DNA, 628 bp, Homo sapiens
gttcaaggcagaatgcagcacagatttcaggacaacttggggagaagtcaagtgagaaaaatcacctaagtaatccgtttccctgtgtgcaaagtgtaatgtgtactaaagaacatgttataatcagaaagctgcattttaccaaacctttctgtgctcatccacaaaacattcacacacacatttagaaaaaattagaaaatattttcatatgaaaaactgaaaagataaaaactcataaaatacaaagctagtaaagtcagttggtaaatcatgctctatgttaaagtgagaaatactggaatggaaaaaaggcagctctcctcatactcatcacaatccttttcagtggttgaaaagtattcaggtgaaaaattcatgtaagtacactcaaacaaatataatttccttcaaatttctgagacctttacagaacaaacatgtaattttttttctgtttctcacttcccgtttcttccttcaatcacacacacacacacacacacacacacacacacaaagtgtgagcacaaaacacttctgctcaatgccatcaagtcctgatgggtatttgctttgtctgtttgcttgtcttttataaaaatwttcttccctgaactgtaactcc

SEQ ID NO: 851698 - DNA, 503 bp, Homo sapiens
ttgacctgtaaagacacacataaatttaaagtcaagggatggaaaagtatttatttctcataaacataaacccaaagcatacaggagtagctacacctatatttgaaaaaaagtaaayattaagtcaaaaataaacataaaaagagacaaagaaggtcattatataattataaagggaccaatttagcaagtaaatataaaaattataaacttatatgcacccaacatggtagcatcaagttgtttaaagctaatttatttgagctaaagagagagataaactccaatacaaaataattagacatttcaacatcccacattctgcactgggtagattattttatcagaaaatcaacaaagaaacattggacttaatctgtactatcaatcaaatgttcctaacagacatttatttacagaacatttcatctagctcctacagaattcatgttcttctcatcagcacgtgtaacattctttaggatagacccgtatattaggat

SEQ ID NO: 851699 - DNA, 579 bp, Homo sapiens
catcttagtattggtaagcaggggaatgatgtataacaaagaagcaacttttgttcrgatgccattttttctagctcattaattgtctgaaccatgtaaaaaacatcagctgaatacaaagtgcacaaacacagctgaacacggcaagccacagaggtacacagcactctacataaagcccatatactccaaaatacactagcagcactagggaagtttctcctcctctttcttctctttgatcatgagccctatcttggaagtgcttattgtatattgcccttaacgttcatatcttatgtccataaaaaccttaactcttttagcttcctctatcaaactaccttcacttatttttttgaaagtataaagttatatgtttgttgtattatttactaggaatttaacatgtcttttagttgtattagtatttatattatcaattatgttagtgctcgactaattagaaggttaatataattgactaaatttgataaaccaaggagtataatatataatttacagatatgcagataactatcagaagaataaaaatagaaattgtttagaaatttaaaa

SEQ ID NO: 851700 - DNA, 574 bp, Homo sapiens
tgattaactcagatagtttttttagttcacatctagaatattatacatcatactagttttaaaaactagtttaaaaaaacataattgagctagmaacaatccaaatatgtaccaatgttcaaaggaattggtagctccccaaatatattaggactcttcactttgaaagacaaaatcttaaagatatgattataatctttaagaaggctatagacgagataaacagatttatttaccaaattttaatttactagatttagggggcacgccctgacactagagttacattaaagataataaaatactgctgtatccaataaagtaaatgtatggaagtcattattccaagaccaaacacaggtttagataaattaatgactataagagtcataagataagtattattgaggacatgtttctatcattgaatgtgattgtaactaattggcatgactacctctttggcatacctcttggtgacatgatgagagacggaatattaggctgggtagatgagggatgtgatttaatgtggtaactcagatgcttttatttcaaattattttaagactgt

SEQ ID NO: 851701 - DNA, 633 bp, Homo sapiens
ttcttgagccgcacctcgtctgagaastactcaccaggggcctccatggtgatggccagcagggagcccatcatcactgtggagactccaagggccagggccttgactatgtgccccatggtctggatgctgccattggctatgatgggcacaccaaagcgccgggcatacttggcctccttgtacacagcagtgccctggggctgaccacaagccatcacttcccgggtgacgcagatggagccgcagcccatgcccacacacagcccgtccacaccagcgtcaatcaggttcttggcctgggctgctgtcaccacgttcctgccaatcacctggaggtgggggtacttctgtttgatgtaatgcaccatggcgatctgatacaccaagttcccttgggacgagtccaagactatgatgtcgacgcccacctgggtgagcaggtccaggcgatatttgtcatcctcacgggtgcccacagctgccccgcacagcagctgcttgttgggaatccttggaggccagagggtagtcttggttcttcttcaggtcgctgccggtgataatggccaccagctcattgcgatcattgatgataggcagcttccctttcttgctacgctgcaggatctc

SEQ ID NO: 851702 - DNA, 633 bp, Homo sapiens
ttcttgagccgcacctcgtctgagaagtactcaccaggggcctccatggtgatggccagcagggagcccatcatcactgtggagactccaagggccagggccttgactatgtgccccatggtctggatgcygccattggctatgatgggcacaccaaagcgccgggcatacttggcctccttgtacacagcagtgccctggggctgaccacaagccatcacttcccgggtgacgcagatggagccgcagcccatgcccacacacagcccgtccacaccagcgtcaatcaggttcttggcctgggctgctgtcaccacgttcctgccaatcacctggaggtgggggtacttctgtttgatgtaatgcaccatggcgatctgatacaccaagttcccttgggacgagtccaagactatgatgtcgacgcccacctgggtgagcaggtccaggcgatatttgtcatcctcacgggtgcccacagctgccccgcacagcagctgcttgttgggaatccttggaggccagagggtagtcttggttcttcttcaggtcgctgccggtgataatggccaccagctcattgcgatcattgatgataggcagcttccctttcttgctacgctgcaggatctc

SEQ ID NO: 851703 - DNA, 582 bp, Homo sapiens
tcatttatttttcatttgttacatggaatatttacatagattgtttcctgctgggcatggtggcttactccagtagtcccagcagaggtgggaggattgcttgagtccaggagttcgagaccagcctgagtaacgtagtgagacctgtctctacaaaaattacaaacttcttatactgtatggtaggataagtgcttgaatctattggcttaccaattaataaaaaaacattttgaaccgggacatggtggctaacacctgtaatctcaacactttgggaggctgaggtgggaggattttttgagctctggagttcaagaccatcctgggccaagtagcgagaccctgtctccataaaaaatattttttaaaaattttataagaaaaaaacctttttggcccaggtgtggtggcttgcgtctgtaatcccagcactttgggaggctgagaygggtggatcacctgaggccagggggttcgagaccagcctggccaacattacaaaaccccatctctactaaaaatagaaaaattagctggccgtggtggtgtgcacctgtaatcccagctacttgaagggtg

SEQ ID NO: 851704 - DNA, 464 bp, Homo sapiens
tgaacaattatacaccaacatattgggtaacatagaaggaatgtataaattactagaaacacacaatgcaccaagactgaatcatgaagaagtgaaatatctgaaagaycacttttaaggatgttgaaattgtaataaaaactctgtgaacaaagaaaagtcaatgtccagatggcttcatggaaaattctgccagacatttaaagaagaataccaacccatctcaatctcttccaaaaaactgtagaggagggaacacttccaaactcattttatgaggccattattattgtgcaatatcctttggatatttgtcccctccaaatctcatgttgaaatttgatccccagtgttggggttggggcccagtgagaggtctttgggttataagcccaggtccctcatgaccaccttggtgcactccttgtggtaatgagtgagttctcactctagtagttcccaca

SEQ ID NO: 851705 - DNA, 616 bp, Homo sapiens
gcctatatagaaaagctatcacagagctcttcaagaatgctggggatctctgcacatgttttttcttctttttttaytttagagacagagtcttgctctgctgccccggctggagtgcagtggtgcaatcatagctcactgtaatttggaactcctgggctcaagccatcctcccacattagcctcccaagtagctgggactactggcacatgccatcacacccagctacttttttttagagatggggtctcactatgctgcccaggctggtctcaaagtcctgacctcaagcagtcctcccaccttggcctccaaaagcactgggattacaggcatgagcctccacacctggctaccaatttatttctcacagtcatgaaaggtgtgtcttttggactctttcagggtgggagagtaggtcttagttgacacatctattctaacattccagtctccgtaagcctttttatacttttttttaatttttaacttttgtgggtacatggtaggtgtatatgtttatggggtacatgagatattttgattcaggcatgcaatgtgtaatagtcacataagggtaaatgaggtatccacaacctcaagcatttattcttt

SEQ ID NO: 851706 - DNA, 465 bp, Homo sapiens
gggcagctggacacgccctgagaccgcctccttaggcactgggggcagggccaggtcccccccgcagacctctgagcggggctggtcccctctcaggggctccagggtgaagtctctgtcgcccacctccacaggggtcccagctgaggctgaggaggtgggcacgtgctcctggtagagcagagtccgcagcttctcgtccaggctcttgatggtgctgtccacaaagcccaccctggggggcggcccttccccatccgactccagggccgagggtggctgtggggggacggtgggccccaggggtgggcttgggagctgggaggtggccaggctgacggcccccactgcggcaggaagcaggggagcaggytgacccaaggcgggctgtggggtcccgctgtgggggctgggctcaggtgcaggaggtggcaggggctcccttggggcactggcgtccctggt

SEQ ID NO: 851707 - DNA, 618 bp, Homo sapiens
tttacgtggctgtgagacaagaaatttcatgtatttatcccagasagtgatgccacttcactttgactactttagttataaattttagattcagcttttgtacttctataacaagagcttgttggaattttgataggtattttattgagcctataaatcaatttgggaagaattgacatcttaataatattgagtctttaagaacattgagtctgtgttcattcattaagatcttcttaaaatctttcagcaatattttataaatattagtgaaaggttgtgaatattttaaatgtactactttgtatagaatatttttgatgtcttttaaatggtgttttaaaaaatatgtttactattacctgttttagcatcagaatttttacatatttttgaaaaattttatacaaggtcaattggctggcccattctttgtgtttgtttatagttttctttctctctgtcttattctttctttcagtatttcttatgtagctttttttttttttttggcaacttatcacccagggtccccaatgtacaaccccattttgtaatgttgctttgggttcttgtcttcttttgatattacagatatagttaactactgaatgggga

SEQ ID NO: 851708 - DNA, 636 bp, Homo sapiens
agtaatggccaaagattgtcaatttcctgaattgccatttgttttttggttgttttatctycccagtctagttttctgcattgcttgcacttggatagatttaggtttaattataacatgttaaatctacatctcagatcctgtgtgttggcaatgtttttacagactggtctactacatttactgatttaatatatttgcatgctgaagttaaagggacagtacctctgccaaaggtaaaacaaatggaggaccaggcataagatacttttgataaaatagcaatatatggtaacttaatatgtgttattattatcattaattttagtgtttcgggaagtaattttcatcttcctaatattgtttttcatgccttgcttacgtttaaatttgagattttaccccctcgagtttatgtgataacagaactgtttgtctatgtgagactgggaaaaagtaattgaaggattcttagaaacaattaaggaaggctttatatatgcaatctttccaaaagttacatttactaaaaaaacaaaaacaaaaacaaaaaaatgtctgacatttgctccattttcttggccagattaaaactagaggctatagtaatagtattttgaagatgatgtgagcaac

SEQ ID NO: 851709 - DNA, 621 bp, Homo sapiens
acttcacatgtttgccacacctttctccttaaaccccttcgcccagcccaaaaagttggtatgatctgataaaggcatgaggctggccattccccaactgctggcatttgaataaagttgctttcctttcactacaccttgcttctgatttttgccactgagcatccagcagccaaacttgagccagatacatgtttacaaattcaaatgtttagaactaatgaacaattttactttagagaggatattattaatatggatcatgtggtgttcttgaaagaaatcttgacaaaataccaattatcaatacttatatttattttttcctcaaaaccacacaatggcttaaatacgtagggcaaaagaaacatttattagaaagaacaaatgttttttatatcatttttcaaactgaattgcattataataatcacaagtaaaaataaacattttagccttaaaaagatggcaaaattattaacccaatgttttattcttgaacattagagcaatataaactctaatgctattccaactctatttttgacttctttgtaacatgaaatgatgccagataaatatataaaatatrattgcaaagtcattgttttgaagtttaag

SEQ ID NO: 851710 - DNA, 432 bp, Homo sapiens
tggtggcaggtacctgtagtccgtcccagctactcgggaggctgaggcaggagaatggcgtgaacccaggcggcagagcttgcagtgagtcaagatcgcaccactgcactccagtctgggtgacagagcgagactctgtcgcaaaaaaaaaaaaaaaaagagagagaaggaaaaacaaggtcagctttttcactcttctctacttcctccttttttacacctccttttccttggatgggtgttggtggaaagaaggacatgaattcataaattctcatattgatgaaatgctactgcaatcatctcttgccagtggatgcccctggtaaggcaggyatccagggactgactctctagtgggggcacaaatggggtctacagaagtcccagctcctaacatgggagatgagttccattcaggaagacttctaa

SEQ ID NO: 851711 - DNA, 621 bp, Homo sapiens
ggatagctaatgaatactttttgtttgaattgtctatttattgatcacaaaacttattgtaatatgtctttwaaaaaaaactgccacatggaacctgttaccttacagatgttgcttaggacaagggaaagaagatatttacattttttaaaagtcagttgatgtaaataaaaccactaaagaaaaataatatgagagatgatatgaggatgtagaaaaaatttgtgagaacagtaaacaaattattctttctcgggaaacactggaataaatgtttcctatcccatcctggctgttcaaacactggcctaaccacttggttagcacaggtaccgtgtgggatttttttgtttattttttattttatgttcttcatctctctcacctagcacagtgcttgctacataaaaggcccacagtaagccaggcatggtggcacatgcctgtaatcctggcactttgggaggccgaggtgggtgaatggcttgagcccaagagtttgagacaagcctcagcaacagggcgaaaccccgtctctataaaaaatacaaaaatgagccagccgtggtgtcacgcgcctgtagtcctagctactcagcaggctgaggtgggaggatcacc

SEQ ID NO: 851712 - DNA, 628 bp, Homo sapiens
ttttttctaaaaaatgttcatcaccattaattatcagggaaatataaatcaaaaccacaatgagatatcatcttaccacagttaraatggttatcctcaaatacccccccacacacacccacacacacacactgctagtgaaaatgcaaagaaaactctactgttggtgggaatgtaaactagtagaaccactatggagaacagtatggaggtttctcaaaaaactacaaacagagctatccatgtgatccagcaatgtcactactggaaatttatccaaagaaatggaaattattatatcaaagacacatctgcactcccatgtttactgcagcactatttacaattgtaaagatatggaatcaacctagatgaattgattaaaaatgtggtacatatacacaatggagtactatttagccttaaaaatagtacatatctgtcatttgcggcaaacatggatggaactggaggacattatgttaggcaaaataagaaacagtaaattaaacatcacattttctcacacctatgtagaagctaaaagtatttatctaagagaagtaaacagtaaaacagaggataccagaggctgggaagaatagagggaaggaaaggagagggagag

SEQ ID NO: 851713 - DNA, 599 bp, Homo sapiens
ttaaaacacatatacattatacagctgtacaaaagtattttctctctgtatctttattatgtaaggtttttctattttaaaatttgttttacatttttatactatttaaacctttttgttaaaaactaacacacgtacccattagtttaggcctacacagggtcaggaatatcaatattactattttccagcagcacatcttgtcccactggtaggtcgtcaggggcaagagcacacatgagactgtcatctcctatgataacaatgcctacttctgaaatatggtttgaaggacttgcctgaggctgttttaacagttaactgtttttttttaaaataaagtagtacattagaaaatattgataaaaattatagtatggtaaatacataaaccagtaacaaaaataagtatgatgcattgtatataattctatgtgctatgcttttataggattggcagcacagtaggtttgttaaaccagcatcaccacagacatgtgaggaaggcattgcgctgccacattatcatggccayagtgtgtgtaggcaatagaaatttttcagctccattataatcttatggggccaccatgtatatg

SEQ ID NO: 851714 - DNA, 354 bp, Homo sapiens
agaaatatatttataaaagatgtgggtaattggaaaataaaaattataaaatattactcagaaaataaactcaattggtagatataacatgtttatgaattaaaatgtgttttatggttaagataccaatactccactgattgttcactatactgaattcgcataatagttctcaaggcttccatgaaaaagttttcaagaattataaaatttataattaaataaattacaacatttataattatataaattataaaatttacatgyaaatgcaaagaatctagaaaaaaatgaaaaataagaacaaaaaacaaggacttatactgcctgacatactatacctttttttttttt

SEQ ID NO: 851715 - DNA, 492 bp, Homo sapiens
ttcataagtaatgctaaggagagtttattaaactgacagaaaaagatgctaattaaactaaaagcataaaactcatgacaaaaatgtaagcagtcaaatatataatgtataacattctaataatgtaatagtgttcataaaatatatattataaaggtgaaaagaaaaaatattgaaaataatagctacaacaattttaaaggatatagaatataaaaaaatgtaaacgtgacatccaaaacataatatcttggcaaggatggagtaaatgagtagagttagtttatgctataaaagttaaattattatcagcttaaaatagcctgttataatgacaagatttttttttaggtctcatggtaacaacaaagccgaaatttataggagatagacaawaaatattaaaaaaataggaatcaaaacacaccactagaaaaaacatatcccttaaccaggaatgaagacagaaagagagcaaaaaagaaacaaagt

SEQ ID NO: 851716 - DNA, 574 bp, Homo sapiens
cagcgtgctaaaacaagaggttatcttcatgaccaaagaccatgtcaatccaactacaggatgaaagagcaaaaccagaattaatgccctgtgctcctttttggccatttagacamcagggagatgtagtaatcaggccattttagagttgctgttaaggaaaagaatgatgcctcatccactggtttgaccgtgatgagatgccaaattttgaaaattcatttagattacttaccaccacttttatttgatcattacctaggggtgggcctagaggaaattactttatgcaaacagctgaattaaataaatgacatagtttccttccttagatatgtgaaccagaaagagatcaaggagttcaaatcagatatcttttttagctgatcttggctaacaaggagagtgatagtttcctcaaaaaccttgactatcagcccattgttgagtgacttttgcaatgaaaggcataccattatcagactgaaaatgacaccaattgctgaaaacatgactgattagtttcaagaacaataatggtgtggctggagttagttgatcagactagaacagc

SEQ ID NO: 851717 - DNA, 588 bp, Homo sapiens
tgatctggcacctccctcttttttttttttttttctttgagatggagtcttgctctgtcacccagtctggagtgcagtggcgcaatctcggctcactgcaagctctgcctcctgggttcatgccattctcctgcctcagcctcccaagtagctgggactataggcgcctgccaccatgcctggctaattttttgtatttttagtagagatggggtttcaccatgttagccaggatggtctcgatctcctgacctcgtgatccacccgcctcggcctcccaaagtgctgggattacaggcgtgagccaccgcgcccggccaactccctccttttttatttgatccatgccactctaatgcatgtgacatttaaagccaatgggacatctttgtgtgcaccaaactggccagttccttacggatttcaggtcttcacatttgctgtatctttctgcttttctttaagaacatcaaatagctctctctctcttttttgtctgaatcccaaagtcacttcctcaaagagatcrtcagtgaaagctctttattaaacactatcccatccccaacaatctctgcttttaataaa

SEQ ID NO: 851718 - DNA, 357 bp, Homo sapiens
cccaggtgtctattttgcccttctttktgtccatgtgtatacaacgtttagctcccacttgtaagtgagaaattgcagtatttggctttctgtttctgtgttactctgcttaggatgatggcttccagctccaaccatgttgctgcaaagaatattattttattcattttttatggtttcatagcatcccattgtgcatttgaaccccattttgtttattcagtccaccactgatgggcatctaggttgattccatgtttttgctattgtgaatagtgctgtgataaacacacaagtgcagatatctgtccaacaaaatgatttatttttctttgggtatataccctgtaatggcat

SEQ ID NO: 851719 - DNA, 574 bp, Homo sapiens
ccttattttcccatcactagtgattgtgacatgaataaaattaacttatgtcaccatgtagatcattatatcctgaattaaggttagatttcgagaagcattatgaatttaaggaattcatctagccttagttctaaaccactttataataaaaatctttattttcccaccatagggactctataccactcttttagggctaattcacagttgcacttggacgatagcaaactgttcaatgcaaaatgctgattttatcttaaaatccatggtcatctacattgatttcaactggacagacttcaatttcatttcttctcaggaaaacctacttgcatggctttaagaatattaacttctatgtcttggataataaacgttggctgtttccccgtcaggttttggtagcatcgtggtgcctgtataaagagttcaaagctgtatagccatctgtaacagctctatttctttacaagttcagtgctcagataaaaattctaaacgttgcagccctagacacttgatgactctattaccawatgcattttatataagagatcatgatgttcctaaa

SEQ ID NO: 851720 - DNA, 626 bp, Homo sapiens
tttgctgcaaaatttatttcatrtaactgaaaaaaaagaacaaaaaacctagaagaaatacagcaagtatgctatcattactgaacctaatagaggtcccataatgaactgcaaagtttgaactacaaaaccatttgaatccaaactttaaaacagaaaatatattaacatacatttccctatctggtcagaataaactttctgaaaatggataaatactgagaattagaaaaaatattaataagcctaatgtgatagatacatatttagtgtacaggatgaccaataaaaaaagccaacataaactcttcgggaagctcttttgttcataatccctggtaataaacatttcaggtgccaaaagaatgaaatgaagaagcttgaaatctatactttgcacagaaatctatttggggggaaaaaggcaaatttaagtctaaaacaagtagcaatttttaagaagataaaattagaacaaactactgaagtctagaaaccaaaacgttaagtttgtagatgaggaatcagaagcccagtgagattaaatgacttcgttaagggcatgggcagcaaattcattaaaatccaaatttctcagtccaagttcatgtggtttttacttgtcc

SEQ ID NO: 851721 - DNA, 603 bp, Homo sapiens
gtaggaacacagaatggaacagattctrtggaaaagagtatggtagttacacttatggctttgtacccccctcaattaaaagcagaatcctgaagagatacttgtacactcatgtttttagcaacactatttacagtaggtaaatgtggaagcaacccaagtgcccaaggacagatacatggataagtaaaatatggtacacatataccataaaatactattcaggctagaaaggaagggaattttgacacatgctacaacatgaatgagtattgaagacaatatgctaagtgaaataagccagtcacaaaaaagacaaagactgtatgattccacttacatgatatacttaaagtagtcaaaactatagaaagtagaagagtggttgctaggtgctgggtgagagagtttataagaatttattgtttaatagatatagactttcagttttacaagatgaaatgagttatggagatgagtagtagtaatgtttgcacattatgaatttatagaagaccattttaagtggataaggttgcaaattttatgatacatatattcaatcacaataaaatacaaataaataaataaataaaacataaa

SEQ ID NO: 851722 - DNA, 603 bp, Homo sapiens
gtaggaacacagaatggaacagattctgtggaaaagagtatggtagttacacttatggctttgtacccccctcaattaaaagcagaatcytgaagagatacttgtacactcatgtttttagcaacactatttacagtaggtaaatgtggaagcaacccaagtgcccaaggacagatacatggataagtaaaatatggtacacatataccataaaatactattcaggctagaaaggaagggaattttgacacatgctacaacatgaatgagtattgaagacaatatgctaagtgaaataagccagtcacaaaaaagacaaagactgtatgattccacttacatgatatacttaaagtagtcaaaactatagaaagtagaagagtggttgctaggtgctgggtgagagagtttataagaatttattgtttaatagatatagactttcagttttacaagatgaaatgagttatggagatgagtagtagtaatgtttgcacattatgaatttatagaagaccattttaagtggataaggttgcaaattttatgatacatatattcaatcacaataaaatacaaataaataaataaataaaacataaa

SEQ ID NO: 851723 - DNA, 603 bp, Homo sapiens
gtaggaacacagaatggaacagattctgtggaaaagagtatggtagttacacttatggctttgtacccccctcaattaaaagcagaatcctgaagagatacttgtacactcaygtttttagcaacactatttacagtaggtaaatgtggaagcaacccaagtgcccaaggacagatacatggataagtaaaatatggtacacatataccataaaatactattcaggctagaaaggaagggaattttgacacatgctacaacatgaatgagtattgaagacaatatgctaagtgaaataagccagtcacaaaaaagacaaagactgtatgattccacttacatgatatacttaaagtagtcaaaactatagaaagtagaagagtggttgctaggtgctgggtgagagagtttataagaatttattgtttaatagatatagactttcagttttacaagatgaaatgagttatggagatgagtagtagtaatgtttgcacattatgaatttatagaagaccattttaagtggataaggttgcaaattttatgatacatatattcaatcacaataaaatacaaataaataaataaataaaacataaa

SEQ ID NO: 851724 - DNA, 663 bp, Homo sapiens
gttttatgtagaaaaagtaaattaaattaattcctctaatttttctgtgtatttttaatttattttcacttaaaaatgagactagccaactamcctgtgattgtaattttaggtaattaattttactagaggaaggtagattgcacataacaagaactgattactgacaatacaaataaaattatttaaatatgttatattcatatataacccaggaaattttaaaaaatgagtgtatgttctgattggtgtgcaaaagggcaagttgatgcatttccacatgcatttgatcaattattaccaacctttgaatagacacagtgaagggaggtatttttaaaaaatctttgttagataaatttggtctgtacacatatttcactaataatgtagttcttaaattacactgccttaataatatattatataaatgagaaattaaaataataacctcaaaaaagcatcttttgtaatgtttgaatctataggttaaagtaatactatgccaaaatttaaactaagcattttagatggccccaaggtaccagtgtaccaacaaaaattatcaggttggaagattctagatttgaccttgtgtaagtgtttaagagatatccttaaagaagactccagataaatcacaaggaatagaaagggtatttc

SEQ ID NO: 851725 - DNA, 551 bp, Homo sapiens
tgtgtctgtttgtaccagtaccatgctgttttggtcactgtagctctgtagtatagttgaaactgggtaacatgatgcctccagcttygttctgtttgcctgggattgctttgtctattagggctcttttttggtttcatatcaattttaaaatacttcttcctagttctctgaagaatgtcattggcagtttgatagtaatagcattgagtctgcaaattgctttgggcaatatggtcattttaaaaatactgattcttcctaaccatgggtatggaatatttttccatttatttgtggcatctctgatttcattgagcagtggtttgtaattctccttgtggaaatcttttgcctccatggttagctgtattcctaggtattttactctttctgtggcaattgtaaatgggacagatgaggagctttagggctgaggctatgaggttttctggatataaaatcagtgaaggagaaataagatccttttcgaagcagatgctgagaaagtttgttaccaccagaactcctttacaagatatctttgaaga

SEQ ID NO: 851726 - DNA, 617 bp, Homo sapiens
taaacctctttcttgattaagccattgtaatctggtttacagttacttataccactgtttcattttaatgtagtgagatggtgagggygcaggtggaagatggggtggcggccggattcattttaatgatacagtgcctcttcagtttttttagatattgcaaattgctcacaaaatgctattttactctttcatcaggaacatgagataatttcaagttttatttttctacgtctttgctggttcttgtcactttcaaacattttaaagttcttgcccgttcaatagtgagaatggcatctaattgtgttttaattttcatttctgtgattactagctacgttaaacagattttctgtgctcactgctcattcagatatcctctgtgttaatcgtttttattgttgtaaattttctcattgggttgtcattttattatgggtttatttttattggagatgttcttatcaaataatttattgctgggttttatgtatacccagtagaaaatatcttcttttagatcatgattggtcttttcactttgtttatcatgtctctagttagacaaagtttaaattaattatgatccaatttattaataaatttgcgtacat

SEQ ID NO: 851727 - DNA, 283 bp, Homo sapiens
tatatagcaagcagctttggaagacagaaagagtctctctccagaacagaggacaaatttgtttactggccagtttagaagaaataatatcttcctccaaaacagaaaaaaaaatgtagacaggtttgctaatagtcatttttaaaagattagggtttcttaagctcagagttcttcagctgtgacataactcaactgtgtgcaaatccccctgagcccagctcaggttcaactccgtggarcttggtgggtaagaggaactgatgcactgcctgctctgtga

SEQ ID NO: 851728 - DNA, 458 bp, Homo sapiens
caatgcttatgcagtttagggatacatgactctgtagttcctggttgtgtgccagttcacatgtgtttgtagtaggaagccccaggttataggagggattgagatagtattatgaccaaaggaccatgagaaacaaaggattatgagaaacagagggccatctaaaagagatgttgctggaaacacattcatgtgccatgtctcttcaaggtttctccttgctccctgaacataccatgcactttcatatctctggatgtttttccttatgcctcttcatcttcatgaaatgaccttccttactactttacctaacattcttcaaagcccaacttaaatgtagcttctttggcactctaccaacctactccaaytctgttccaggcactattacttgccctctctcatctgtatcacttagttattattaatccccatattatgagcacacttgttaa

SEQ ID NO: 851729 - DNA, 456 bp, Homo sapiens
tatttcctttgtttttggttcctctgactctcttttctgtcttcttttgaagaattggaatggtttttagggttttgttttatctattgcattttttagctataccttctcgtattttaaaaaattctggtagctgttctagggattaaaaatacattcttaacttttgacagtctacttaaatgaatattttaccacttcatgtaaaatgtagaaatcttgcaaccatatatatgtgtgtatatatatatatatcctttatgttatagttgttatatgtaagatatccacatacattataaactccataggaaaatggggtttgctttttaagaaatagaatgaaagtgttaatatttactaggtatgtatcatttatcattttccagrctctttattcttcctgaagattgacatttccatctggtatcgtttctttccagcctgaaaagctcc

SEQ ID NO: 851730 - DNA, 536 bp, Homo sapiens
acaaaaacccaacaaaaaatgaatcaaaattgatctagatactggaggtagcagatagcagttttaaggtaaccatgattaatatgctcaagaaaacagaaagaagatggagaaaacccgtgaaaagttggtgaatttcaagagagaattgaaatccataaaaagaatcaaacaagcattctataaataaaaaatacagtacctgaaatataagaactctctagaaggatttaacaaagaattagacaaagccaatgacagaattaatgaaatagataacagaccaatagaatgtattaaaattgaaacatatagagggaaaaaaagaggaaaatatagaaggaacattagaagcacgtgagaaagaatgaaaggtatgacatttagttgaagtcctagagaggggtggggaagaagtgatgtttgaagtgatactgctcaataattttttcaaaattgatgaaagacataattcacaaattaraccctgttaatcttaaagatgctggagatatttattagttctgacaaatttt

SEQ ID NO: 851731 - DNA, 516 bp, Homo sapiens
taaaaagaatgggatcctgttatttgcaacatggatgcaagtggaggtcatggtgttaagtgaagtgaggtacagaaagacaacwttcacatgttttcactcacttgtggggactaattaaaacaattgaacttatggagatagaaagtggaatgatgtttaccagaggctgggaaggccagcaggggaggaggtgaaagtggggatggttaatgggtgcaaaatacagttacacagaatgaatggaatctagtgtttcatagtacaatggatgactatagtcaaaaataattgtatattttaaaataactaaaagagtataattggaatgtttgtaacacaaagaaatgataaatgcttgaggtgatggatacctcatttatcctgaaatgattattatgcattgtatgcctgcatcaaaatatctcatgtaccccataaatatttactactatgtacccatgaaaattaaagataaaaattaaaaaaaaaaataaaataaaataacatgaagaa

SEQ ID NO: 851732 - DNA, 646 bp, Homo sapiens
taaattcaaatgccatagaataaagtaaagatgataaagacaagaagtttaggaaatagttggaagagggcaaaaacaaaagaacttakgagcatcaaacaaatttccatccataataaaaataataacaattaaagggagcgcagactataatactaaggccaaattctacagggtaaagaagtaaagtgaaagatatggtagatacaatatccttcacatggcaggcttcagcaaatgtttgttgatatattattcttggacaactaagaaagcaaagggtacttaggaagtaaaactggaagtatgttacaaagaaaatcagaaatcaaaataaaggaaaatatctgaggcattgcgtttaaaaaaaaagtccagaatttttaaatggccagaataacactgaaagtgtgggcaaatgacatcaataacatccaaattagcatgtaagtttatatgatttaaaagaagacgtgttatataatctatgccttctgaaaatgacttcaacaaagaaaccacacagacttctaatgctgaatcattaaatgtaggttttcttgtactttgtagagtcacattctgtcacagaacataatgaaaatcttttgtgaattgttactgatgagaaaatgtaaactatttt

SEQ ID NO: 851733 - DNA, 624 bp, Homo sapiens
taaaatatttagattagattattttggtgtgtttcatatgcatatgtatttggaatagttagctacatataaattctatttctgaattgaattccatgaatttgtttcaagtacctacttttaaagcagcgtatattttctgtgagtgataaaagaggaataatacgtgcattgtttagaaattcaccgcaaatatggcaaacaaaacaatctagaaagggatttaaacgaaaaaaaaaaaaccccaaaaatttaccatccagtagtaaaggtggattatgagagaccctgccttagagagtcataggagagcatggtcctattcagttagagccaccagaaaagtcctcacagaagaggaggtgctgaaatagactcgaaggaaaaggtttatttgtaatatgaagatgaagaaggcagaggcatagaaggtggcctgcaatagtgacatagtgcatgcgtgcatgcatgaggcaggaggtggatgggaggaaggaaaacwggtatctaaccaaatatttcacctgtgtttttggtttttgctactgaattggacagaggctgtcaccattcatggtggttctgaaaaaacaaacaaaaaagccactccattcctgattatta

SEQ ID NO: 851734 - DNA, 612 bp, Homo sapiens
agttcaatttagcactggtaccaattcttgaattttatagagaaggaaattgtaaaatgtcttagaaatgtggccacggagagaacaaactgagrttgaatgatgcaaaatcagaactacactgaatgcaacgtaatgccaatgctgttcaatgccaagagacttacaggataaaatttggctttttccttttgaaataatattagcttgctattgagtaaaatcaggtagcaacacttcataactccattacctacctgttttgtattcattaaagtgtggctttcttggcctgactgtcagtggtatgctgagatggcttgccacagctccagagtgcattgtatatatttcttcttgacttcacgttaagtgacattatgttggtagcttggaattggtcatgatgaagctatatataccaggaaaactggcacatgctgcaaatgaaggctcctgctcttccagagatctaactgttaagtatttatcagcatactactaacctgtgttcaaaggttgaactgcagaagcctctcaaatttccaccaaagtgacaataataactttgtcagcataatgctgtgttcatctaataaatacaaaattcct

SEQ ID NO: 851735 - DNA, 563 bp, Homo sapiens
agtattaccatgacctgtgagtaaggtcaatgggaaactacaacagcctgattcagacaggattacacatggyccagacccctcaggaacgaagatttgggtcactccaccaggaaaaaatttacgaccttctgaggtgcttgctggaggcaaagggaatacaaaatgggtagtagaaggtagtcaacagtaccagctatgaccacgtgaccagctgcagaaacaaggactgtaacagtaatgagtatttcctccttattttgttaaaaacatgtttgtgcatgtatacacttgtactaagaaaatatcttcattgtattcccttttcctttataatgtgatgtaagatttattgacttcatgttagcgtttaagtattgttaactttatttgggttggggattggtgtacttccagttgtacaaaggatagttgtattattttaggtgtaattatgaccttattattgtcttcatttgaagagtatgtatgatctcaggagatgtgtatgggttcaagttgacaaggggtagacttgtgatggtttttactgagtgtcaact

SEQ ID NO: 851736 - DNA, 626 bp, Homo sapiens; identical to SEQ ID NO: 827322

SEQ ID NO: 851737 - DNA, 589 bp, Homo sapiens
ctaaaacacaaaatcaagctgtagcctgagcaccttgggcacatattctcagtttaaccacccactgggttcaccttgcctgctgcctagacagagccaatttctcaagacaggggaattgcaacagagaaaragtaattcatgcagagctggctgtgtgggagaccggagttttactgttactcaaatcagtctccacaagcattcagggatcagagtttttaaggataacttggcgggttgggggaagccagtgagccaggagtgctgattggttaggtaggagataaaatcatagggaattgaagctgtcctcttcatgagtcagctcatgagtgggggccgcaagattagatgagccaattaatcgttctgggtggtgccagctgatccatcaagtgcaggatctgcaaaatatctcaagcactgatcttaggagcagtttagggaatgtcagaatcttgtagcctccagctgcatgactcttaaaccataatttctaatcttgaggctaatttgctagtcctacaaaggcaatctaatccccagacgagaaggaggtttgttttgggaaagggctgttatcgtc

SEQ ID NO: 851738 - DNA, 637 bp, Homo sapiens
caagagactcacctcaatttttaaggatacacagattaaaagtaaaaatatgaagaaagatattccatgcaaatggraaccaaaagagagcagggatagctcatatttatgtcagaagaaataagcaacaaaactataaaaaagaggcaaagaaggatattacatgatgataaagtggtcagtttatcaagatgatataataattttgaatatatttgcacctgacttagggatacctacatatataaagaaaatgtttaagaaactgaagggaggctgggcactgtggctcacacttgtaatcctatgattttgggaggccaaggcaggtggatcatttgaggtcaggagttcaagatcagcctgaccaacgtggtgaaaccctgtatctactgaaaaatacaaaaaaattagctgggcatggtggcagaagcctgtaatctcagctacctgggaggctgagacaggagaattgcttgaacccagaaggtggaagttgcagtgtgccgagattgtgccattgcactccagcctgggtgacagagcaagactccatctcaaaagaaaaagaaagaaagaaactgaagggagacatagatctcaatacaataatagtaagggactttaatatctcact

SEQ ID NO: 851739 - DNA, 615 bp, Homo sapiens
ggaaggctccagaaactgtctctccttctgctccttttgaccctcttctctctgaacttccttttctgggcaatttcatttttcctcctccttcccctactctcttgcytcaagccacagagggaccagaaatagctggagaaaataacattgtagttgttccttttagagtaagacccacaggcagaggggatcctaacataatgtataaaccctggaccaagtcagagttaaaggccctggtatctggattccccaatccgagtgaagatccctttggatttgctaaggaattccaattaatgctttagacttatgatccggggttctctgacctgtatcagctgatcgagttagtggtccccaaaaaaaaaactgaagaatggtttagagcagcagattagaaatagcctttagaagattttgacaaaatagatgcaactggaagagagagatgcagagaagctttgcatttgcctccatgaaactgtatcacggatattccccaaggtcatagattgggcaaaggtgcaacaatgtaaaatacgcccaaatgaaaccgtacctgacttttatatcaggtttgaaaagacattcaaacagttttcaggaata

SEQ ID NO: 851740 - DNA, 367 bp, Homo sapiens
ggagactaaacacccaccatttcttagacccttaatttgcgctgggtgctaagcttcctctgggtatggggtggacactccaaataggggccccaattccagtaattaaatgtrttgagccaggcactgcactaagtgctagtgtaagtgcatcatctcattggatcctcacaacaacactccatgcaagatgaggaaactgagacaggaaatttgctcctcactgcacagccagcagaaagagaggcagatccgcttggctccagggaccacgcttcttctagatgtctgtgtcaccctcaaagcctcagattgtattgtgaactaattaactagttgagcagaacgttccccaaacacatggtgt

SEQ ID NO: 851741 - DNA, 625 bp, Homo sapiens
tcaggtctgatatttatgggaatatgatggaagggcttgcatatgctgttctttcactggtggggcaggtgtttcccacagagagtcacagactacgaggtcttgaggttgggattattatctaaggcatattctatggggaagaggccttataaagctggccttcagaagaaaggccctgtgtggactccttcaatccctcccctcacttccttctcctcaatatgctcccactgtagtcacctcacgtaaccctttctttcaggtttcctagctcttgtgttccctcaccaaactcctctctttctcctctaaacagaccactaatgaaggttttcgatgtgagtggtactgccctctagggggtgtttttggctttcacaataattaggatgattttacacatttaaatgggtagggcccaggatagctcaacattcaggaactgtttaggacactaccacacaatgagtgacatttccgcatctttaactttgaataacttgccagtcrttcatgtagctgaaaacttgttttaattaggatctaacttaatttttttattttttttttgagtcggagttttgctcttgtcacccaggctggagtgcagtggtgtggtctc

SEQ ID NO: 851742 - DNA, 510 bp, Homo sapiens
agggaactagagatggaagtggggacggaactttaactttccatttgtggttcagccgaatctcctttcaaaaactccagggtgcaaaacaataaaatgagcaaaatagtgagactgtccttttaaggataggacagtctcactatgttgctcaaataaactgtccttatttttctgtttatttttggcttgagatctcttttaaaaaaaatctgagtcaattctgagtttccccactcctttccttgggggcttatatagggcaacgacatgagcaaagtgtattgggcacagaagccatcattttttacgtgtttgtcacactgacgtccagtgagatattgttgtcctttttggccctggattgttagtcattcaggtcttcttggaagtgttctgtacttttgtccctaagctttttcacactaagtttaggtggttgacttaacaatattattcccaaaatatttacatatgartgagagattagcctttgtccaaataagtaag

SEQ ID NO: 851743 - DNA, 602 bp, Homo sapiens
atatagaagaaacttataatacagatccttccacaaaggtgctagtggcctaactaggatcatatccagtatactcaaattaattaaggctaattaaatagtatatatagatcccacaatttcttacttgaaacttttggggccaatgcattttggccaacattttcagattttaaaaagcactattgtatgttaatgtgtgtatgtttatatcatatatgactaacacactcttagaaggacctactcataacaaaacacagtgatatttccacagtgaaatatgtaatggtcacatagcataaataaacaagataaatagcctcacattgtcaatctagtcaggtgtcatatctaaatgagttttggggccactttgaaaaaaactttccattttcagagcttcagagatttgggtactgtagataagggactgggatctgtcatatgggctcaacacagatcctggaagtgtrgagaggaagctacattggaattagaagactcggtgaaagtcttgtgaatgaggcagaatttgagctacagtgagttaattttctgcccctgggaggtgaggtccccacaatgccttgtcaccctgt

SEQ ID NO: 851744 - DNA, 602 bp, Homo sapiens
atatagaagaaacttataatacagatccttccacaaaggtgctagtggcctaactaggatcatatccagtatactcaaattaattaaggctaattaaatagtatatatagatcccacaatttcttacttgaaacttttggggccaatgcattttggccaacattttcagattttaaaaagcactattgtatgttaatgtgtgtatgtttatatcatatatgactaacacactcttagaaggacctactcataacaaaacacagtgatatttccacagtgaaatatgtaatggtcacatagcataaataaacaagataaatagcctcacattgtcaatctagtcaggtgtcatatctaaatgagttttggggccactttgaaaaaaactttccattttcagagcttcagagatttgggtactgtagataagggactgggatctgtcatatgggctcaacacagatcctggaagtgtagagaggaagctacattggaattagaagactcggtgaaagtcttgtgaatgaggcagaatttgagctacagygagttaattttctgcccctgggaggtgaggtccccacaatgccttgtcaccctgt

SEQ ID NO: 851745 - DNA, 488 bp, Homo sapiens
gatattgagcatacagcaaatctggggagcggggtggtaagggaggggttgcagtctccagtgtgagtcscaccccttgcccccttcttcagaggtacctcccaaaaactcccctggagcaaagagttctcgcctgcctagatccccagacttagggaaccatgagcgccaatccattaccatgactcctatgacccagctgaagtgcactggggccttgccgattttggccccagaattctccagatcatcttgggagtgtggctgggtgtgggtttcctctcgaggtggacgtggcactatttcttggctgggacagcacatacataactgaaatgccaagaccccttgctagccagcgcgtctgcaaccaggaggacagctaatggacctggagggcagtcccagagctacatgaagggtggtggtagcccacaggcagatgttatcctaccttcaggagttcactgtggggcctgggtcttacc

SEQ ID NO: 851746 - DNA, 489 bp, Homo sapiens
gcaaatgctttcctctcaacctgatccatgaagactctttttytgactcatctgaccaaaaagactaaagcaatgtttatctaagtgtcttcaggccactaacatgagaatcacatagggttacttgaagtgttacaatacaaatttctagggtctccgtccagaactgctgaatcagaatctctgggagtggactgctgaaacctgcattttaacaactaccccatggtattctgatgcacaccacagtttggtctgtagcagtgggtggcttggagggccaaacttagagtttggccaaacttagagtaccaagttggggtaatgcctatcggtcttgcaatactttgagtcctcctctattccttctcccctcctgcagtgcaccgagccgccctggcctgtggcagtgagttctttggggccatgctcctgagcgggatgagggaatcccagggcacagaggtatctctgcggacgatctccacc

SEQ ID NO: 851747 - DNA, 643 bp, Homo sapiens
ttgttaactaatttgtcctatttctcagctggtggaggacttgggttggtagggggtgttactgggccccctcaaatacctcacatgggtagatagcctccctggccgctcaggrccactgggtggaagaggctgtcacatgagcccttatgtaatggctattaggaaactctctttaagatagctgtggcttctcttttcccagtggtatcctgccctttccagaggaggctgccgtgaggtgattggaaggaatgtgtcctggtctccatcagagctgttgagtcagtcacttggccgctcagcagaattgctcaagtagactgggaaggagaccccaggatagttcatgagtggctatgttactgtcccatggcagtgccgagaggagacgctcatgcacaaaggggatcagaagcaggcttaggaagcccagccctgcaagccaagggcaaaggccagcctgctgtcacctgcaggaagggagtgcgggttcatatcctcctcctcaggagggaggccagaagataagagatcatgctcatgtaatccacacaggtcaccccgtgggtatagagctggctgaacaagggcaaaggggagatagctgctgcgtcctcctccctgggaaggcatgactaca

SEQ ID NO: 851748 - DNA, 643 bp, Homo sapiens
ttgttaactaatttgtcctatttctcagctggtggaggacttgggttggtagggggtgttactgggccccctcaaatacctcacatgggtagatagcctccctggccgctcaggaccactgggtggaagaggctgtcacatgagcccttatgtaatggctattaggaaactctctttaagatagctgtggcttctcttttcccagtggtatcctgccctttccagaggaggctgccgtgaggtgattggaaggaatgtgtcctggtctccatcagagctgttgagtcagtcacttggccgctcagcagaattgctcaagtagactgggaaggagaccccaggatagttcatgagtggctatgttactgtcccatggcagtgccgagaggagacgctcatgcacaaaggggatcagaagcaggcttaggaagcccagccctgcaagccaagggcaaaggccagcctgctgtcacctgcaggaagggagtgcgggttcatatcctcctcctcaggagggaggccagaagataagagatcatgctcatgtaatccacacaggtcacccygtgggtatagagctggctgaacaagggcaaaggggagatagctgctgcgtcctcctccctgggaaggcatgactaca

SEQ ID NO: 851749 - DNA, 620 bp, Homo sapiens
gtggcgggtgaggtccacctcttgtcaaatcagcagtggcattagattctcataggagcatgaaccctattgtgaactgtgtaggcgagggatctaggttgtgtgctccttatgagagtctaatgcctgatgatctgaggtggaacagtttcatcccgaaaccatccctccacccctaccttcgtccttccatggaaaaattgtctttcacaaaactggtccctgctgctaaaatgattggggactactgctttagggatgtcccagaaaggggctgttatgatgcagctgtccacttttgggtggtgcctgcacattgtgcagaactattaccaggcctgatctcttcttctgtgaactgatcattgggtattcccaacaaggtcataggtgcaggctgggagagaggaggcagtgaagcagaagtaggaattatgggcatttgggccacttcctcatgtaatttacttgttcttcaggacttgcttgagcctgaccacctatataccatttccatttgatgatggagtrctgctgtgcacatccaacttcatggcttagtgggtcagatagcacccagttcatgataggcagctcaggtcacatggtaacttggtggc

SEQ ID NO: 851750 - DNA, 636 bp, Homo sapiens
taggatccacagaacccttttcaaataactttttcaacatcttctgtagtcctgaatacctaagtatttggttgttcacagtccacatctttttttaaaccttttttctaaggcaaaacttaagaatagctccctcttaaattttaaaaaatatatttattatccatattaaatattgagaagtaagcagatgcattcacagaggggaaaaaatggaatcctttttaccctacacagtcacaatagttgtttgatatactataaaatttgtttataacatatctgctttttctctccatgctgttgtaattacattgtgcagagtaatatttagaaatatcaacaaatagatgtgttaaattaaaaacaaagtgtcaaaccaacttcctttgcctacccccaaaatcaaaaggaaaaatcctaggcaccttaacagcaaactaaaaacatctagacaaaacaatgagattagcattccaggaaagcagaaacattataataatttaataacaaatttatatcaacgatcatatggatgaaaattttgaaaagcagaaagctttcaagaactgcgagccaaaatttcaccaaaaaaaaaaaamaaacaaacaaacaaacaaacaaaacacaactttc

SEQ ID NO: 851751 - DNA, 591 bp, Homo sapiens
cgatatgctttgctatagtcttttccagatcagtgctggagcatttgtcctcctcctgaaccccatgtggccggaagacgcctgtccctgtcagaaggctctctgcaggaaggcagaaggctgactccagcatgtgccaagagtttaatcggagtttggcggaaattggccactcaatatcgacagctgatattgagaagtggatggatcaacacaactgaaagtggtttaggggcaataccaggtgagcagtcgatggagtttcaggtcacaaagaagcaaggacttgcactgctttaaaatatctctatcactttttgttcacttatgtttatagtgagcaaggtggtcataagttctgggacctgggattgaattctggctcttccacctccaaggagggtgacttaggtgagtcacttagcctctgcgggtctaaggttcctcaaatgcccaggaggaatactgaggggacctgtctggggktgggggggcctgtggtgaaggttaaatgagttcgtttgtgtaaatagattaccaccccgcccagggtgagggccaatgacaagagcaaatccgaataaagtgctt

SEQ ID NO: 851752 - DNA, 474 bp, Homo sapiens
tggaagccctttaccagattggttccagataacaacataattaatcacaaaacaaaaatgaacaccaagaccatacaaaattaaagcacagattccaggtgtgttcgagagacgtaaccccaccctggtaagcgctcagcatctaatggaaaagaattccatcacctttgaggacaaggtttaaaaagaatctgagttggcatttagtgttttatgcttgtcttgtcaaactgggtaacatgactaaaggagtaatacaatgaagttaaaatgatactcttagcaactccgtagagaccttggagccacaagagagcctttctcttattaggaaagggaaagagctaactttyagacccttactcaacagaagctattaggctgctcctgctctccaagcccacgcccaagcccaccaaacccccatgccacttgcagcataggtctgctcaaggtgtctttgaggagtatagg

SEQ ID NO: 851753 - DNA, 520 bp, Homo sapiens
agtggctcacttggcttttatagaacactcactgggtccatggagtcttttttaaaaaataccatgacatattataaatatcaacttgacacactaactagaaaataaattttgttagcaaaaaaaataacaccatattacactatcaagttaaacatttccttccttttttctttttttttttgagacagagtctcgctctgtcgcccaggctggagtgcagtggtgcaatctaggctcactgcaaggtctgcctcccgggttcacgccattctcctgcctcagcctcctgagtagctgggactacaggcgcccaccaccacgcccagctaattttttttttgtatttttagtagagacggggtttcactgtgttagccaggatggtctcgatctcctgacctcgtgatctgcccccctccgcctcccaaagtgctgggattacaggcgtgagccactgcgcccggcctccttcctwttttatttcctttaagtactaacattggctatgaaaggtgtg

SEQ ID NO: 851754 - DNA, 545 bp, Homo sapiens
ttcaacaaatttataagtgaaagcaatggatccatgaatgaacagtaaagcagtgattcccaacttttttggcaccaggggccrgtttcagttgtggaagacaatgtttccatggatggggtgggggtatgtgtgtgatggttttgggatgaaactgttccacctcagatcactaggcattagagtctcataaagtgcttgcaacctagattcctcccatgtacagttcaccatagggttcgtgcttctatgaaaatcacatgtcactgctgatcagacagtaatgctcgctcagccaccactcacctcctgctgtgtggcctggttcctaatcagcctcagactggagactggagggggggcctctgtgctaaacagataggtacatataaggagaaaaatgccagagaagatagacttagatggctcctgctagatccttggacggagatgttgtctccgtcttctttctgttcctttccctctgctgatcacaaacacagccttatttataacaaggtgggtgtaaaacaagcctgtgatat

SEQ ID NO: 851755 - DNA, 488 bp, Homo sapiens
tgggaaaatttattctaaaaaatcagttctgagaaatattatagtgggtctactgattwgaaagataaaatataaattctcaaggcctgtgctggggggttgagggcagaggagaagggacaagaagaaaactgaaaagaattagactgatgtcagactttccaaaaaaaaaaagaaaaaaatatacaaagcaagccagaaaggtagcagagttttattttttaaattttaataaaacaaatgtaagtgcagtgaggctaccaagattcatcatgaatcaatacaaacattggctgttattttcaacagatctccaaagaaagagcagcaaatgtggagcaaactcaaaacgaccctgagctccagtcatccatgtaaatggctacacaagcaacatgttagcacctcttctccccactaccccatgttgagctgagtccgctcagagacgtaagggggtaaggagaggataaagaggaatgttttcc

SEQ ID NO: 851756 - DNA, 589 bp, Homo sapiens
cactttagggagaataaagcttcaggaaaagaaaaagacaaaagtgtggtcatsttttttttgttgttgtttgttttgttttgttttcctgaatctttgcatgaagtttgtcctgaaaaaaagctgcattcttacttacaggagtcacagtaactcctattcagaattccttaactagttcattaactaaggaattaagaataatattcctggtagtagttgaataacaagatgaaaaagttctgtgttcttggaggtaggcatcaaaatttatttttctttattgggaaaatagcttaataagcctgcttgggtaattcagcttgagttgagatttctcatcagggagcagttattctgaagaagagaggagactatgcagcggctggggggtctgggaaggagaacatgaagcgcaaacggaaaatgtaggaaggaaaaaaaatagaaggccttttgagcacaacgggggtcatacaacacatgagttacccttccctgccctccctcttggcctcagcaatgttcctaaagtcactggaatttgggagtacgtgtacttttgaataaaatgataaaagatattttc

SEQ ID NO: 851757 - DNA, 604 bp, Homo sapiens
agattttaagctcatgagaggcacgtcctgccctgtgcctcattgccagcaacctctgtaaccctctagaacctgaaacttaatgataactgtgtggggagggcctgccagagggcttggctttgacacttgtttatggagcaggcaggcgtgttgcacccctgtttgcaaaaatggggctgattttattcttactgtgaaggtctttagctattttcttccagagaagtactacctttcctgttctctctcttttctaaacgtttctttgaaatataatacataggcagaaaagtgcataggagtgtacagcttgatgccttttcattgacggaacacacctgtgtaactggcatccagatcaagagacagaatatcccataacctctgaaattgccccactcccctgctccccaccacggtaaatcactagcctgccctccaatgatacagagcagttttgcctgttcttgtactttacataaacggagctacacagyatgtgccttcttcgcgcctgtttcttttgttgcaacatttagtcatttagtcagatttagccacagtcttgcctgtggttttcaatccttcattctggttgtta

SEQ ID NO: 851758 - DNA, 642 bp, Homo sapiens
aaaaaaagaaaaaaggagaggttgcaatcctagtctctgacaaaacacactttaaacgaacaaagatcaraaaagactaagaagggcattacataattgtcaaggcaacaattcaactagaagatctaactattctaaatatatatatgcacccaatacaggagcacccagactcataaagcaagttcctaaagacctacaaagagacttagactcccacacaataatagtaggagactttaacaccccactgtcaatattagacagatcaatgagacagaaaattaacaaggatattcaggacttgaactcagctctggatcaaatggaactaatagacatctgcacaactctccaccccaaatcaacagaatatacattcttctcagtgccacatcacacttattctaaaattgaccacataattggaagtaaaacattcctcagcaaatgcaaaagaatggaaatcataacagtctctcagaccacaatgcaatcaaattagaactcaggattaagaaactcactcaaaaccacacaactacatggaaactgaacaatctgctcctgaatgactcctgggtaagtaatgaaatcaaggcggaaatcaagaagttctttgaaacccatgagaacatagag

SEQ ID NO: 851759 - DNA, 494 bp, Homo sapiens
ggctgctttgagggtcacaggaaagaaaattatgcctgcacaagcaccttgaaactgcaatatgctgtgcaaatttcatatactaattaattaattgataagttcatagcctgcattattkacaaaaacaacttgatttaaaatgaaaataacaaattgtaagtaagcatacacacacatctgttgaaaggaacaatgataaaaaaaatagataagatagaacaaggaagaattaaatgataaaagggcttaccatgaggggaggtatctaaatttgtcatctatttaccccctgtatctgaatcacctgctgtctggccaaaacgtagattcttagcccgtttctagacctgctaaatggccatagttgagggcagatatgcaaacagcatattttaatgtttcaatttccagacaatttacactatggtttgagaaacattgtccaaagttttagaaaattactaaaagaaaactgcaaatttaacttgtgg

SEQ ID NO: 851760 - DNA, 591 bp, Homo sapiens
cactgatactgcttaattatccagataagtgatcggcatccaagcatgagtggcagcgtaaatctcaaagccatcatctttgttttccccccctcctcktctctctctctctttttatttatttattttttggaaagaaagtattcatttaagtatcactgagatacgtattttaaaattctcattaagctttaaacacaaacagcagttgtggctgtgttaattttttgttgttactcacatcacaggaggaaaagggatagtgtttgcagtggccaaaggtggccagcagcttctgccccctccctccttccagccatttactccagaaggctcccccggcctcaccccgtctccgtctcccaccctgcccttgtgctcactgcagggagcgaccagcccccctctggggctcacaccacaggctgggagcatctgctcttccagcccgggtggaggctgggggtggccagggctgccttctgggcgggggagcccgcccctctgcctcttcgccttctgtcttggctggtaattttatcccgtgaagaatcttttcccccttctctcttgctctctctgtcttctggg

SEQ ID NO: 851761 - DNA, 584 bp, Homo sapiens
gaagatgtaagtaccttcttcagaaggtgacaggagagggagagagtgaggcgggggagtgggcatacacttttgaaccatcagatctcatgagaactcactcactatcatgagaacagcatggggaaagccatccccatgatccaattacctcccaccaggtccctcctttgacatatggggagggatttgggtggggacacagagccaaaccatattattccaccactggcccctcttaattctcatgtccttttcacatttcaaaaccaattatgccttcccaacagtctcccaaagccttaactcattccaacattaactcaaaagtccaagtccaaagtctcatctgaggcaaagcatgtctcttcctcctatgatcttgtaaaataaaaagcaagttagttgcttccaagataaaatgtgggtgctggcattgagtaaatgctccaaaattggccaaaacaaaggggccataggccccatgcaagtacaaractcatcggggcactcattaaatcttaatgctccagaacaatctcatttgactccatgtctcaaatccagggtatgctgatgcaagg

SEQ ID NO: 851762 - DNA, 674 bp, Homo sapiens
gggagaccctgcttcttggagcagggagaatgttttgttctatgcatactgccatgcatattcaggaaagcagcagaaggaagccaggagagggatgctaagatgctttattcacctagaaggaaaagtaagaaaggagaagtagcattgtcctgacttaaaccagattagcatgctcctaacacagtgggcttgaaaattctgtgtgtgacgccactgtgcccagaaagaaggtgaacagatcagcaatctatctggttgatccgtcccacattcataggctccttgcctgataccaaccccattctcctgtctgggcccctggggctactggggtgcagtttagattttgccactagaaggctctgaggtgggttaacagcaaggaggcttcatctgtcgaggctgaacttgactcatttctctcttcctgctctgaaagatctccagctgcgttgccaaaccagcacagaccctacagggagatgaatgacccaggaagacaggaaggtaacaagcacacaaggtcactccactgagcaaacggcaacatttgagcctccccaaatttgaatataaacctctcctattatcaaggtcccactgagaaggtacaatttgaagattacatccccttgyaagttggatcccaaagaaattaaggactgatatcg

SEQ ID NO: 851763 - DNA, 486 bp, Homo sapiens
ctctcagtccccttatttttcgtgaccttgacaactttgaggaggactcatcaggtatgttgtagaatgcacctcagtcatggtttgtgtgagattttctcatgattagactgggmctatggatttttggagaggagacaacaaaacttaagtgccctttttatcccatcagagcatggggcacatggtatctacatggcatcacggatggtgctgaccttaatcacattgtcaaggtactgtttgcactaaataaaaagcagtgtccacatctttatctctccctcgcatcatccttccttccttctccccttaggctgaggtcaggagacaaaagagggagagttgtaacttcttcaacccttcatgcttttgtttatttcactgtttccctaaggatctgggcttttggaagacaaaagccagagaaatacaagcagcatattatattctggccttgatgttctctacctctgaggcaatgag

SEQ ID NO: 851764 - DNA, 541 bp, Homo sapiens
agaaactgtcctaaactctttaagtgtaatgattatgacaactcctgacaaataatttcacgacatccctatgaaatagatagtaatatacctttttaaaggtcaaggaaacttcagtacagagaagttttgtgacttgcatgtggtcacacagcttaaaagtgatagtgctgggatatgaacccagacagtctggactcagtggccttgatcataatcactgtgccatcctaccacactgatgctgagtgtctagagtaacctagatacacaatgaatgagcctcttctcacagaccacacactgtttttttctctgtccatttcaacacgatgcttgtaattctaagaaagggtaaatacataagcaggttactccagaaatgtaatctgctttccagatgggtcactagcgactgattctaaamgtctttaatgccacttgtgtgcacaggttttaagctctcagtgaaagctccacgcagaaagggtgttgtgttacaggaaattagccataagataaattaaattcgctacttttc

SEQ ID NO: 851765 - DNA, 271 bp, Homo sapiens
tctctcattttccattaatagtcaatttcactagctttgaatctctyccttggaatattcccaaaaatctatcagatcttcctgtctcttctcacctcccccaatccattctgcatatcagaacaacctttacagaatactccatgaaacacaaagcctaaacgtgaaatatggtattactttgattaaaaaccttttagattctctattgcctacatgctaaactcaaattctctacaaggaagaggttcctcaaatcttaactttctct

SEQ ID NO: 851766 - DNA, 603 bp, Homo sapiens
tatcacatttatttgatctatacttgaacatcattttcagttcatacgtttgttatcaaatagatggagcatccagaatctgtgagaaagaatgaatagctgtagagaacacacagacttaagcacagagtacgtatgctcaatagacctatagttagatgtgaatattatgtcaaacacaaatagtggaaagtgaaggcaatgatgaatgtgggaaagggaagctaaatattaactaaatgtggaagtttctcacttatgtgttagggagctcagagtccctttcagtattaagcaggaatgtctcctttggtctgtgctctgccttctgcaatgacaaatttcccttcaacaaggcaacctgtttggtagttgactcttgtagtgtggttggcccttgaataacacaggtttgaaccacgagggtccacttacatgccaattttttttgcccaaatgcagatgaaaaatacagtatttgtgttatttgaaacttgtgtataccaagagcccacttttcctgtatgtgggttccacagggcagacagcaggacttcggtatgtaaggatctggstgtgtgaggggatcctggaaccagtccc

SEQ ID NO: 851767 - DNA, 644 bp, Homo sapiens
actcttctactgtccctccttccactctgatatcatcaattgactgtgaactctcatactttcccattcttacaccatgctgtcctcaactagaaatactcarttgtctcttcagagattatctttccttcagggtcacaactccctggagtttcaactgggccaaaggaaactgtgctttagaaaatggcaaaaactcttctcacactgcccaaagataataggagactacctctaattacagaaatatatggaatttgaggttcttccacccaaaagtaacacaactaaagataagtagaatatgacagtgggagatctattttgactgtataaagacatgttctttctttctttttaaatttcaatcgctttgggagtacaagtggctttgagttacgtggataaattgtatagtggtgaaatttgggcttttaagacatttttgaatagaataaatcacagatacatatgtgttttttaaacgttggatttggtaacaattatataaagatctttaggaagatttcagtgaaattatatattctaatgtgttagaatattatttttcatgcctcaataatgcacagagctcaaatctctttaaccagactttccaatgatgacagctcaaggtgtacttc

SEQ ID NO: 851768 - DNA, 645 bp, Homo sapiens
atttgaacctgagtctacccagtatgcatttgctcagtagttgggtaggttctaggaatgccagaaggcaaatgatatagctcctgcttccaaatgaggagtagacattaatgatcaataataataataataatatacagatagcactgattctttgtttagacagtggaacatagtgaaggaactataaagtgccctgcttatttgtaacattttccattcctagacgcaccacgtcatacatttgctgaatgtatgaaaaggttattgaactaatgcataacatttgtttattacaaatgttacaaatgttacagacactagagatatagcagttagcaaagcagacagaaatccctattctcgtaaacaaatgatttaggtgtaagtggaatcaaggttgatgtcagagtccagggaaagtcacattctttgaccctccctgctccctgccttccataaaggtagtgtatttaatatatgtagaagaaagttaaaaacaaaacaaaacaaaaacacaaggtgtccttgaaggggaccrgaagctgcaaaatggtagcatgtgtttaagcctactggctctgctttggagagtaaggagagtctagagactgcctcgcacaaagctctttcaaggtctaggct

SEQ ID NO: 851769 - DNA, 615 bp, Homo sapiens
gagggaagctggggggagacctgggggccttggcatcygagatcaggatgttcggctggatggtgagggttggggagggaaaggctaggaggggcagcagggacgcttggctacgtggctgaatgtcccgggtggggttgctgccacaggcaacctgctttagtcagtttcccatcatggattgtgtaatgatggagacatttttgagtgtgagcattcgtcatgcagccaaacaatatgtgatcggaaatgagaaggaacgatcattgttgtgtccagctggaaatacatatttggattataatagatattcatttatttagtcttttaaattgtatgcaggcctatgacatgccccaaccgcaggcactggggactccatgtgaacaaagcaggctctgtcggctccttgatggaggacattgatttttgggaaagatgaatattaagcacaaggtcagtcttttaatcctatttgggccttcaactgattgggtaaggcccctgtacactggggagggcagtctgctttactcaaagtctgcccctttaaatgttaatctccaaaaacatcctcacagcaacatccagaataatgtttgacgacacatctag

SEQ ID NO: 851770 - DNA, 615 bp, Homo sapiens
gagggaagctggggggagacctgggggccttggcatctragatcaggatgttcggctggatggtgagggttggggagggaaaggctaggaggggcagcagggacgcttggctacgtggctgaatgtcccgggtggggttgctgccacaggcaacctgctttagtcagtttcccatcatggattgtgtaatgatggagacatttttgagtgtgagcattcgtcatgcagccaaacaatatgtgatcggaaatgagaaggaacgatcattgttgtgtccagctggaaatacatatttggattataatagatattcatttatttagtcttttaaattgtatgcaggcctatgacatgccccaaccgcaggcactggggactccatgtgaacaaagcaggctctgtcggctccttgatggaggacattgatttttgggaaagatgaatattaagcacaaggtcagtcttttaatcctatttgggccttcaactgattgggtaaggcccctgtacactggggagggcagtctgctttactcaaagtctgcccctttaaatgttaatctccaaaaacatcctcacagcaacatccagaataatgtttgacgacacatctag

SEQ ID NO: 851771 - DNA, 285 bp, Homo sapiens
attatagcagccttaggaaaccagcacgggggtgaggytgcaccctgcccaggaagccagagacgaccacgtacgcagggactttagctcgaacctgattaggtcagtggacaccgcccccatccccaggacggggaggtggctggggccactgcagccacagcatgtgtctgctcacatggggcttatttttaaagggattgtcctcacctgctgctgtctgtgtttataaagttggctagagaggagaaatcttcctttgccagttttcagctttagctctga

SEQ ID NO: 851772 - DNA, 642 bp, Homo sapiens
acttggatccctttcaaactgatactgtttacatttttgctaactatgtaggaatggctgaaggctgaagaaggraaggctggagaacaccaactcctggtgacaattcagttttggcccccaacttttcattttggcccagcaaaacaaaattcctgtgattaagtgtttgtgcttcttagaagacaatttagcagtagttcattgcccttcatagcatgccctttggggatgcttacttaaagcttcatacttggccaggtgcagcagctaatgcctgtaatcccagcactttgggaggctgaggtgggcagatcataaggtcaagagatcgagaccatcctggccaacatggtgtaaccctatctctactaaaactacaaaaattagctgggcatggtggcacacacctgtagtcccagctattcaggaggctgaggcaggagaatcatttgaacccgggaggcggaggttgcagtgagccgagatcgtgccactgcactccaacctggtgacaaagcgagaatctgtctccaaaaaaaaaaaaaaaaaagcttcatacttacagctgttcaattaagaattccttccaacctgttgcatatctttacctgaaaagggggtctagtttctccatctcct

SEQ ID NO: 851773 - DNA, 638 bp, Homo sapiens
tcaagtgaagtaaaaacctaaagacacctgtaaagcaacctaagttcagaatccttttgaagttttttatgattttcccacaagctttaactttactttgtccatacctagtacatctgcaatatttttttagggctcacctttatcaggttttacaaaggtattcaacttggttttcataaaaacaactctttgtctttgtgagctcacatttcatcagcttatgtaatatttaataaaattgcataattaaaacaaccaggtgtgaacaggtttgggaactgtattagtccattctcacactgctaataaagatatacccaagactaggtaatttataaaggaaagagttgaattgactcacagctcagcatggctcaggaggtctcaggaaacgtacaatcatggtgtaaggggaagcaaacatgtccttcttcacacagtggcagcaaagagaagtgcagagtgaagcaggggatgggggagaggggaaaagccccttataaaaccatcatatctcgtgagaactcrctgacgatcacgagaacagcatgagggtaacggccctcatgattcaattacctcccgctggggccctcccacggcacatggacattacgggaactacagttcaagat

SEQ ID NO: 851774 - DNA, 521 bp, Homo sapiens
acaaaaaccagctccctttatatcatacttctcaatattaattagactagactgtcacacatcacatctgttaaagacagtatctttgaaataaactcacgyacaaactaatttagtgaaggccagattcctaccccctccccgaaaagcaccacaagcaccctgcccataaatgaactgtgtgtgtcaagtggtacaaaaaataattttggcaagacgacacaatgtgatgaatctatggagtaaaatgtaagacttatcaggaagaagaatacatgctttatactggttttgagatgtgttctgtttattgatgaaaatataattcataaacattcaagaatagtgcattcaacatgtaaacacaattatcaaatatacgataaagcaaattttccatattggcatatacttggaaaacagtttatcattcccaaaaatgaacataaaaatattagaagcaaccactatttaacatcaaaccaaacaaaattaaagcacctaaagtttggtaactcaag

SEQ ID NO: 851775 - DNA, 602 bp, Homo sapiens
gttctattgtgtttagatttaaaatatggaactatttagaaagaattaaagagattatgtttatttgatttcargttatctcagcaagaaacatatttttcatacctctttggaagaacagcaggtcaaatgacacatttgtgagtgactgtttgaaatatttcagccacgccgcagggtccgcctgacctgggcaccgtagatcgagggaacaaaggcttatgttttaaaagttcctttaagagcctttctgggggaggggaaagggggacacgggaagctgtcacaacctcgctttttatttttatcctatgacactaatcagtttaattatatttctaacccatgacttgggatcataattaattcttccaaatgcaaacattatattgcataattctgcaactttgcaagaatcaacacagtttgtttcaaagtcacccacattctttgaactccagagtttcccagtctgtgcaaattcattcctccctttgagtaggttttgtttctggctatgttcaatagcaaaggtgggtctttattcttaatgataaaacaagttgcagaacagtttcattaaagagatccaggatctgaag

SEQ ID NO: 851776 - DNA, 606 bp, Homo sapiens
aagcaagcctcccacctcaacctccagagtggctggaactgtaatcccacaccaccacaccaggctaattttkaaaagtctttttgtagagatgtggtctccttactgtgcccaggctggtctcgaactcctgggttcaagccatcctcctgcccttgcctcccaaagtgctgggattataggagtgagccactgtgcctggcagagttctggaattctgatagagcactaatgacaaatactagagcagatcctaggctatggataggagtgggtggagtagatttgcctaggatcacaggtctagagagtgagagagccgaggctgaaactctcatctccccacatggtgcactcagaggcaaattgtattgaactgaagagactgaattaaatgaggttttgggggacaggaccagatagaacctaaagtggccttcatactaaagggccaagcacagcttatagcagctctgctgggacttgggaatagttcctgacagtcctgcttctaagggagctactcacagaggcaacaaccttccattacactcgggggaaaacaatagcttttgaagggtggtcctctagcatcaacctgctgag

SEQ ID NO: 851777 - DNA, 626 bp, Homo sapiens
actttttcaatgtggttactagtaaatttaaaactatatatgtggttcaaattggatttctattgaaaagtgctatcatagaactttgacaaaagtctctaatgaagtagaagatggtaaaaattgttaatgaraagatatggaaatcctgaaagggaatgatgtggttacttgagtacacatatatacattttaggaaaaagtttttaagagttactaaaagtacaggtgtgcggaatgtctttctgttaaatactcattaagagctcatgtccactcaaggatgccaaaaaagagcctatgaagaacatatagaatgaatatatcttattaatggactatgaggcattgtgcttggcacactgaggttcaaaaactttatccatctctttacatctcgttggctggaattaggtcattaaacacagcaaaggataataggattatcccaaggacccagggtaaagagttcacctttcttgaaatcaagtcatctcacccatatacctgaatgcaatttgagtttttaagcaggcaataaaggcgacaattgctgtatgtaacaatcagtgcgtgtcacggtgtccgggttaaaagataagtatacttcacaggattcaacctga

SEQ ID NO: 851778 - DNA, 534 bp, Homo sapiens
acttcagtccccctgaggagctgggactacaggcatgcgccaccatgtccagataatttattgtttgtagagatggggttttgctatgttgcccaggctggtctcaaacacctggactcaagtgattcacctccttggcctcccaaagtgctgggattacaggcgtgagccactgctcccagcccaatatgcatttcatttagacttaggtaaggacaaaaattggtttcagattgaaaaagatacacataaacatgatcctctctctgtctctctctctctctctctctctctctctctttctctctctctcaatgctacaacatgggtataccttagcacttatttttttactgcaagggggaaataagagagtaaggaagctcaagcctcttctaaaatataggattttyttggatggtgtatacttctgtctacatttgtaaaggcctgtaataaactaccacaaagttatgtcttcctctggtaactgactcaattatgtcatccccttgagcatggaccaaaggacag

SEQ ID NO: 851779 - DNA, 613 bp, Homo sapiens
ttaaaattggtcctttcttggttgatttggggtgtggggggagggaatgaaaaatgtgttgctcattcattatatgtacatggcaacatctgttccctgctaatgtttcagctgcggtkctgccattagagtatgttaagtaaccatagaaatgaactttctggttgaaattactaaggtaaaggtaaaaataggtaggcacgttacttgggctaatgttcagctgggatgcaccagctgctgaaacactacacgttttcatgttgttcggtaaatagttatcatcctgacacctccaagtgcaatctgccccggctgccccagctcctcccttgggaccctctagattttactataatccagccactaaagggataatgcctggtacagcaagggctccaggaccctgctggagcattaggttcaatattttgaatggcacccctgtaaattgccacactttctggaaaggagacttccaataaaagactggaatgtttctacccctcaatattgagcagtatagaattatccattcaagttcctaacaggaaagggatgcccactgaaattaagataatttgatcagagtctatttataagggaactattt

SEQ ID NO: 851780 - DNA, 513 bp, Homo sapiens
tctttctttctttctttctttctttcaggttctcactctgtcacctaggctggagggcagtggtgcaatgatggctcactaaggtctcaaactcctgggctcaaagaatcctcccacctcagcctctaaagtagccaccatgcccagctatttttttttttttttattctttgtagaaacagggtctcactatgttggccaagctggtcctgaactcctggcctcaagtgatccttctgcctcagcatcccaaaatgctgggatctaagatccaatctaagatccagctgaggcacaagccaccacacccagcctcaattggatcttagattttggtgcccagaagtgtacatgctacaccaggggtgggcttgaataaagcagagtggaaggggacaatcacctscctccccagagtgcacgatgtcctattactagtatgtttaataatactaatattagtataatagtatactaatattattagtatatcttaggagacattactatttc

SEQ ID NO: 851781 - DNA, 529 bp, Homo sapiens
gagattcactgttatgagaacagcatgggaaagacccaccccatgattcaatcacctcccaccaggttcttcccatgacacatgggaattgtgggagttacaattgaagatgagatttgggtggggacacagccaaaccatatcactccaccccagcccctcccaaatcacatgtcctcacatttcaaacccaatcatgccttcccaacagtccccgaaagtcttaactcatttcagcattaattaaaatgtccacagtccaaagtctcatctgagacaaggcaagtcccttccgcctatgagcctgtaaaatcaaaagcaagttagttacttcctagatacagtgggggtacaggcattgggtaaatacagctgttctaaatgggagaaattggccaaaacaaaggggctacaggccccatgcaagtctgmaatctggtgggacagtcaaagcttaaagctccaaaattatctcccttgactctatgtctcacatctaggtcacgctgatgcaagaggtgagttccca

SEQ ID NO: 851782 - DNA, 555 bp, Homo sapiens
ctcccggctgccttcatggtttggcgttgagtttctgcagctttttcaggcacactgtacaagttgtcagtggatctgccattgtggggtctggaggatggtgactgtcttctcacaactccactaggtcrtgccccagtagggactctgggggctctgaccccacatttctcttctgcactgccctagcagaggttcttcgtaaggacctcgcccctacagcaaacttctgcctgggcatccaggtatttccatacatctgaaatctaggtggaggttcccaaacctcaattcttgatttctgtgcacccacaagctcaacaccatgtggaagctgccaaggcttgaggctcgcttcaccctctgaagccatggcctgagctcttcattggcccctttcagccatggctggagcagctgaggagcagggcaccaagtccctagtctccacacaacacggggactctgggcccagcccagaaaaattatattttcctcctaggcctccagacctgtgatgggagaggctgccatgaagacctctgacatgccctg

SEQ ID NO: 851783 - DNA, 569 bp, Homo sapiens
ccctggaaatctcataccctgttggtgggaatgggaatgtaaaataataccactttggaaacagtctggcatgctttttttttttttttttttttktggacacaggatctctctgtttcccaggctgttttcaaactcctgggctcatgcaggtctctcaccttggcatcccaaagtgttaggattacacgcataagcctccatgcctggttctgttacactcttaaagagttaaaagatgcacataccctataattaaatattatgctcctagatatttacccaagacaaaacagacacatatttgcatgaagacttacacacatgttcctatcaactttgtttataatatccaaaagctggaaacaactccaatatgcatcaaaaggtgaatgggaatgtcctgaatggaagatcatcatggcggataggaggcaggactagattgcacctcagactcagacggacagagcagcgtgcagaggctcgcattgtgaattttagctccagaatgactgcaagaacaaaccaggaattgcaataagacccacagaccctctgaaggaagc

SEQ ID NO: 851784 - DNA, 601 bp, Homo sapiens
ttgataaattcgtctacattacaattaatatctcttcagtraagtacatcatataatcacgaactgggaggacatttgaagtgcctataactatcaaagagctggtcatttggaataatttgagaactcctacaaatcaataaagaaaaaaaggataatataacttaattgaaaactgagcaatagaaacaacagacatttcacagaagagaaaacatgaatggccaataaatgtaagaacaaaagccaatcctagtactaatcaggaaaatgcaaatctaaagcaatgaggtaccattttacactcactaaattgtaaaaattatgaagtctgaaaaagtgtgagaagcaatgtgtttcagacatagctaaaaggagtggtaaagtggcacagtcattttggggaacactttgttataatattcaagtcacataacttactgtacttctgggtatttcctggaaaatttcttgcacatgtgtcccagaagacatatataagaatgttcatagtgacactgttcagagtagcaaaaacctgcaagtaacccatttgtctggtgccatggttagaatgtttttgtccccttaaaattcatat

SEQ ID NO: 851785 - DNA, 296 bp, Homo sapiens
cggggtcgaccagctgccgcccgcgagctccggacttagccggcgcctgcacgtgtcccgggtcgaccagcaggcggccgccggacgctgcggcgcaccgacgcgagggcgtcgattcccgttcgcgcgcccgcgacctccaccggcctcggcccgcggtggagctgggaccacgcggaactccctctctcacatttttttcagccccaccgcgagtttgcgtcygcgggacttttaagagggagtcactgctgccgtcagccagtaatgcttcctccttttttgcttttaggttt

SEQ ID NO: 851786 - DNA, 610 bp, Homo sapiens
agacggtgacattttcacgaaggagccacagcccgcatcaccccctgaaagctctgaagttgcgcacgggtgggtcacgcagcaggtggatgtctcagttcccatagagtttagcagagcaggcggctccctgggctggaagaggtgcgatgctctggaaaccccccgcgggtgtgtatgtgagaggacaccgagatgttcagcgggctgttcagtgaggaccagacccctccgatttgagcaagggaggtgcacttcgcagggtcacaccgtcctcatcgcccagcctagacctgcccctcaagtccttctgcggactcccttggcgagggggtggcacagaatcagcatgtggcatcgcttaggaaaggacgagtccacaccgccctgtccctccctccagggctgcgcaccacggggtaggacagacagcgcatgctggttttgtagttagcaggtcggcgaccaatgggctggaaaccgttaagacaccataactcccagcactcctagctagggacgcgcctccctatccttcgcttccatactacacaccgmccccaaacccagcgcatgctgagattgtagtccgttagcctcgcgaccaatg

SEQ ID NO: 851787 - DNA, 581 bp, Homo sapiens
gagccatcgtgactggccggctacgtttatttatttatttttttaattattttacttttttttagttttccattttaatctatttatttatttacatttatttatttatttatttatttacttatttatttattttcgagacagactctcgctctgctgcccaggctggagtgcagcggcgtgatctcggctcactgcaagctccgcctcccgggttcacgccattctcctgcctcagcctcccaagtagctgggactacaggcgcccgccaccgtgcccggctaactttttgtattttgagtagagatggggtttcactgtggtagccaggatggtctcgatctcctgaccccgtgatccgtccacctcggcctcccaaagtgctgggatgacaggcgtgagccaccgcccccggcctatttatctatttattaactttgagtccaggttatgaaaccagttagtttttgtaattttttttttttttttttttttttgagacgaggtttcmccgtgttgccaaggcttggaccgagggatccaccggccctcggcctcccaaaagtgcggggatgacagg

SEQ ID NO: 851788 - DNA, 595 bp, Homo sapiens
aaaatacaaaactagccgggcgcggtggcacatgcctataatcccagctgctaggaaggctgaggcaggagaatcgcttgaacctgggaagcggaggttgcagtgagcygagattgcgccatcgcactccagtctgagcaacaagagcgaaactccgtctcaaaaataaatacataaataaatacatacatacatacatacatacatacatacatacatacataaattaaaataaataaataaaataaaataaataaatgggccctgcgcggtggctcaagcctgtcatcccctcactttgggaggccaaggccggtggatcaagaggcggtcagaccaacagggccagtatggtgaaaccccgtctctactcacaatacacaacattagccgggcgctgtgctgtgctgtactgtctgtaatcccagctactcgggaggccgagctgaggcaggagaatcgcttgaacctgggaggcggaggttgcagtgagccgagatcgcgccactgcaacccagcctgggcgacagagcgagactccgtctccaaaaaatgaaaatgaaaatgaaacgcaacaaaataattaaaaagtgag

SEQ ID NO: 851789 - DNA, 494 bp, Homo sapiens
cggggcctcaccgccgccggcggcaccgcgcggcacccggggcggccgaccggccctcggcgatccccgcggctccccccaccaccgccgccgccgcagtcgcggccggtcccccggaaccgtctcctcccccgcacgcgccgcaggccgacccccggaaccctccgggaagcccaccgggccccacgcggggcgccaccgacccggtccccaaggcgcgcgccgggggacgcggacgccgggccgatcagtggccggcggcggcgccccacgaggcggtgccgggttcggtcccaggcggggccaccaacggacgtgaagccggtgagccgctcggggggaagaagaggatcggcgggcggcgggcggggaagagggcacagacgggcgagggccggggaccgcgagggcaagggcacccgggagcccgcagagscggcggctcggggagaaacctcaggcacggccgggccaccaggaaaacacggccgcgg

SEQ ID NO: 851790 - DNA, 576 bp, Homo sapiens
ctccatcaaaaaaataaaattaaattaaaacatataacaaaattaaggtccaattaaaggtaaatatatatagcaaaaaaaaaattcaagctctgataaggttaattgtaacagattgtgccagaattttgagatttctggagatggacagagcccaagagtttccttctataacaatttctgtgaagtttcttacactcttattcaatttgaacgtggataaatgggttttctctgttttgttatttaagagattcatgataaggaaggcctatttatgcatgattcttaaacaattattgagtcagtggtgtctgctgaggaagggcacagaatctcatgcccacagaagcatgatgttctgtcagataggagacttctcccagagccagaacttcatctttcaaatggaattagagattttcacaggcatacattgctctgaagccctatcagaggcttagcactgagaatatgaccaaagaaggtgactaataaacatatgacctagtactctgatctacagtgattctaccctctcaaatagctctkccctggctctggaatcttttctgg

SEQ ID NO: 851791 - DNA, 566 bp, Homo sapiens
acagtcattctgccagaaatggtctgggacttccccatacatgggacacgtagatcaactttctccaagaaccaccaacctggcatgcagtgatgacctctgcagtagacagggatttaggcttgattgttgttcatctctttggagacataaccctaattgtgaacttctaaattaatggcctgacaattagatcagcagctaagataaatttcagtttgcagccccaaagaagatgttcttaattagacagttaatcattttcaatatggaagcctaaacacgtagaatgtggcaataacccggaactctcagttctgacaattgagtgaagtaatcaccccagattcaggttcctcattggctgacaatgagatcaaacacccacaccagcccagtgaacaccatgaggtgtcatcttccctggcccattagtgaaccaggaacagatatttagaaaatattcagtaaattggggagtcccacagagtcagaaagtttgcttgagatartagagggtggcataaaatttctaccgaatatgaattttaatttttactttagtg

SEQ ID NO: 851792 - DNA, 609 bp, Homo sapiens
aattttaatgaaagctctttctgcatctattacaataatcatgaggtttttgtctttcgttctgtttgtattatgaatcacatttattgatttgcatatgttgaaccaaccttgcatcccagggaaaaagcctacttgattgtggtggataggctttttggtgtgctgctggatttggtttgccagtattttatggagaatttttgcatcaatattcatcaaagatatgaaatttttctttcttttgcttttcttccaggttttgatatcagaagggtgctggcctcataggatgagtgaggaagatgatcctcctcaaatttttgggagtttcagtaggaatgataccaaattcttctttgcatatccagtagaatttggctgggaattcgtcttttcctgggctttttaaaattgatagtctatttattacagattcaattttggagcatgttattggtctgttcagggattcaatttcttcctggttcagtcttggaaaggtgtacatgtccwggaatttatctatttgttctaggtgttgtagtttttttgcataaaggtgttcatcatattctccgatgtttatttctatttctgaggagccag

SEQ ID NO: 851793 - DNA, 593 bp, Homo sapiens
taacaacattgttgtatgtaatagaaacatgcttacactacacatgggcacaaaaactttcctctgggcatagacatttgcarcatttgcagtaataacataacaatggaacaatcagtattgacagaattgtaactatggttataaattgtattcacatttacttatctggacatggtcctcttagcttcggctgtgtgtacactagtcagcttccgggatgtgactagagcagagtttgaagaatccttaagcttcagccatgcttagactgaccagcctccagtgtggtcagagcagggcggttgtcctttttaccggtggctgagatttgccatagggctattcgagtggggcaatctgggtcttgttggctaatccacaggttgtcatcaggactcgctactgtcactggttttagatggctatggtgaatccaaggtgtggcacctgcaactttaacagcagtgggagtagacatgattacaatatggcgcctatcgtatatgggtcctagagtggttgaattccattttttacctaaacgaagtccctaggtttgaaagggtgtactgggtctgttagacttatag

SEQ ID NO: 851794 - DNA, 593 bp, Homo sapiens
taacaacattgttgtatgtaatagaaacatgcttacactacacatgggcacaaaaactttcctctgggcatagacatttgcagcatttgcagtaataacataacaatggaacaatcagtattgacagaattgtaactatggttataaattgtattcacatttacttatctggacatggtcctcttagcttcggctgtgtgtacactagtcagcttccgggatgtgactagagcagagtttgaagaatccttaagcttcagccatgcttagactgaccagcctccagtgtggtcagagcagggcggttgtcctttttaccggtggctgagatttgccatagggctattcgagtggggcaatctgggtcttgttggctaatccacaggttgtcatcaggactcgctactgtcactggttttagatggctatggtgaatccaaggtgtggcacctgcaactttaacagcagtgggagtrgacatgattacaatatggcgcctatcgtatatgggtcctagagtggttgaattccattttttacctaaacgaagtccctaggtttgaaagggtgtactgggtctgttagacttatag

SEQ ID NO: 851795 - DNA, 631 bp, Homo sapiens
taagagtatgataccaacctggggaacatggcaaaaccctgactctactaaaaacacacaaatttgytgggcatagtggtaggcacctgtaatcccagctacttgggagactgaggcacgagaatcgcctgaactcagaggtggagcctacagtgagccgagatagtgccactacactccatcctgggcaacagagcaaggttctatcttaaaatatatacacatacagagtttaaagtctgtgctctcctctccttagctgccttttgactgtgtaagtgtatgtttgggaagggaggggtaggatgaggacaggccagcagagagtcaccagcactggctaaaggtctcagaccaaattttatactcttgaccaggagaaacttctctgttattctaatcacattaaactcaagcattttctttttttctttctttttttttgagaaatcacatcgaacttccaaaattataaagttgaaaatatgtaataattgacaattggaaacaagaaagaggattagctataaaaataactcaggacaatgtatttatcatgaaaagatggtcttggtggaagaaagtttcatgcccagccagcccattcttcaatatctgctaaaaaaaaaaa

SEQ ID NO: 851796 - DNA, 552 bp, Homo sapiens
gtattagcaggatttatgaaagtgagcctctcaaaccaggagcagggcaagaagtcaaggttggcttagtcaaaaagagggttcagttaagcttgactaacatttggtcataaaggkagtgcttaaaagaacccagatttttttcccatctgatctcaaaataaataatcaccaaaaaaggctttgtttgaaaaatgagtgcccacttcacctgagaaaacctccatcttcttctgtttacctttgaatttagtgtagaaaaagagcacttgtcattgccacagttttaattttgctttcactcttaaaaacagagagtcagggctgggtgtggtggttcatgcctgtaatcccagcattttgggcatggtgatgcaagcacacctgtaatcccagctacttgaaaggctgaggcaggagaatcacttgaacccaagagtcagaggtttcagtgagccaaaatcacaccactgcactccagcctggtgacagagtgagactccatcaaacaaaacaaaacaaaacaaaacaaaacaaaacacaaaattagaa

SEQ ID NO: 851797 - DNA, 552 bp, Homo sapiens
gtattagcaggatttatgaaagtgagcctctcaaaccaggagcagggcaagaagtcaaggttggcttagtcaaaaagagggttcagttaagcttgactaacatttggtcataaaggtagtgcttaaaagaacccagatttttttcccatctgatctcaaaataaataatcaccaaaaaaggctttgtttgaaaaatgagtgcccacttcacctgagaaaacctccatcttcttctgtttacctttgaatttagtgtagaaaaagagcacttgtcattgccacagttttaattttgctttcactcttaaaaacagagagtcagggctgggtgtggtggttcatgcctgtaatcccagcattttgggcatggtgatgcaagcacacctgtaatcccagctacttgaaaggctgaggcaggagaatcacttgaacccaagagtcagaggtttcagtgagccaaaatcacaccactgcactcyagcctggtgacagagtgagactccatcaaacaaaacaaaacaaaacaaaacaaaacaaaacacaaaattagaa

SEQ ID NO: 851798 - DNA, 479 bp, Homo sapiens
cgcatcagaaagcttatccaccacaatcaagtaggctccatstgtgggatgcaactttaattcaacgtacacaaatcaatatgtgatttatcacataaacagaactaaagacaaaagccacatgattgtctgaatagatgcagataaatctttgcatccataaaattcagcatccattcttgtaaaaactctcaataaactaggtattgaaaaaaacatacttcaatataataagaaccatgtatgacaaacccacagccaatatcatactgaaagggcaaaagctgaaagcattcccttttaaaacgggcacaagacaaggatgccctctctcatgactcctatttcagatagtattggaagtactgggcagagcaatcaggtaagagaaaaaggcattcaaattgaaagaaaagaaattaaacaacacctgatgtcagacgacatgattctatatcttgaaaacccctattgtctca

SEQ ID NO: 851799 - DNA, 624 bp, Homo sapiens
tatagagttctacatactatctaatataaagtgtaaaattcagtgcttttcagtttatttacaatgctatgcaactgtcacccttatcaaattccaaaatagtttcatcaccctytcaccaaaaaaactccatatccattaagcagtaatttatcattcatccaccgaatttccttggtaaccactgattgactttctatctctagtactctctttctttctttccttttttttttttttttttttggtgtctcactctgtcacccatgctagagtgcagtggcacgatctcggctcactgcaagctccacctccctggttcacgccattctcctgcctcagcctccagggtagctgggactacagatgcctgtcagcacgcccagctatttttctttgtatttttagtagagacggggtttcaccatgttagccagcatggtctcgatctcctgacatcgtgatctgcctgcttcggccacccaaagtgctgggattacaggcgtgagccatcacacccggcttctatttctagttttctattctagtcactttatagaaatataataatataatatgtgaccttttttctttggcttttctctttgagcgtgttttcattat

SEQ ID NO: 851800 - DNA, 550 bp, Homo sapiens
gccgggatcgcgccgctgcactccagcctggacaacagagcgagagtctgtctcgaaaaaaaaagaaatttatacaacttagccagaagaataaaaaacaacctcttaacagttttttcaaataaaaaaagtgagtttgaagagaagggaataaaggggactttcagtttaatgtgttttttattttttgagtcagggtctcactttgttgcccacatggaagcgcagtggtgtgatttcagctcactgcaaacttggcctcccaggctcaaacaatcctcccacctcagcctccctagtagctgggaatacaggtgtacatcaccacaactggttaatttttgtatttttgtagagagagggttttaccatgttgctcacactggtcttgagcttctgggctcaaacaattcacctgccttgggctcccaaagtgctgggattgagccactaggccaaccaagttttttgtttkgttttgtttttgagatggagtctcactctgttgcccaggctagagtgcaatggcacgatcttggctcactgcacc

SEQ ID NO: 851801 - DNA, 619 bp, Homo sapiens
atgatgtcatatcaaagactcagtgtagatctgtgctgctgtcaaattaaacattcagaattgactgtagccagactggcctttgggattcaaagttcatattgcttagccygtgcattgcttctatttctgctactatgttcaccttgtttataagcccattgggtgatgatgggggtgacagggaagtaagaatgacccatactcacggaacaagacattctgtccacatcattatcaaaatcatgctctgatacggttaccccttagtagggattcatatagaacagacatatctttatgtaatttacccagtgagagaagtttatccacaaaagtttttctatttttttttttttgccaggaattttgtaatcatgttccttccgtgtcattggtcatgtagccaattcatgggccacagcagtgttgcaggagtgagtatcataggatctcaaactcctgttcttaagcaatccttgcctcaacctcttaagtagctgagactataggtgcaccccacaacgcctagctaattttgttttatttttagtagagattagattttgctatgttttccaggctgttctcacactccccacctcaagcgattctccca

SEQ ID NO: 851802 - DNA, 619 bp, Homo sapiens
atgatgtcatatcaaagactcagtgtagatctgtgctgctgtcaaattaaacattcagaattgactgtagccagactggcctttgggattcaaagttcatattgcttagcccgtgcrttgcttctatttctgctactatgttcaccttgtttataagcccattgggtgatgatgggggtgacagggaagtaagaatgacccatactcacggaacaagacattctgtccacatcattatcaaaatcatgctctgatacggttaccccttagtagggattcatatagaacagacatatctttatgtaatttacccagtgagagaagtttatccacaaaagtttttctatttttttttttttgccaggaattttgtaatcatgttccttccgtgtcattggtcatgtagccaattcatgggccacagcagtgttgcaggagtgagtatcataggatctcaaactcctgttcttaagcaatccttgcctcaacctcttaagtagctgagactataggtgcaccccacaacgcctagctaattttgttttatttttagtagagattagattttgctatgttttccaggctgttctcacactccccacctcaagcgattctccca

SEQ ID NO: 851803 - DNA, 528 bp, Homo sapiens
acacaagctttaatcgctgattcaatcaagcggaagaaaggatatcagtgattgaagatcaaattaatgaaataaagtgagaagacaatattggataaaaaagagtgaaaagaaatgaacaaagcctccaagaaatatgggactatgtgaaaagaccaaatctacgcctgattggtgtacctgaaagtgacggggagaatggaaccaagttagaaaacactcttcaggatttatccaagagaacttccacaacctagcaaggcaggccaacattcaaattcaggaaatacagacatactccttgagaagagcaacccaaagacacacagttgtcagattcaccaaggttgaaatgaaggaaaaaatgttaagggcagccagagagaaaggtcgggttacccacaaagggaagcccatcagactaacagcagatctctyggcagaaaccccacaagccagaagacagtgggggcaaatattcaacattcttaaagaaaagaattttcaaccaagaatttcataaccagc

SEQ ID NO: 851804 - DNA, 578 bp, Homo sapiens
aaccatgagagacagcaaatttgataaggcttctcaaagaggcatataattctgtgagggggtaaccaagtaaaaggggcccacttaaatttatcatgacctaattatagrcatattctttattattattattattattattattattatactttaagttttagggtacatgtgcacagcatgcatgtttgttacatatgtacacaggtgccatgttggtgtgctgcacccattaactcatcatttacattaggtatatctcctaatgctatccctccccctcttccctgacctcacaacagtccccagtgtgtgatgtttcccaccctgtgtccaagtgttgtcattgtacaattcccacctatgagtgagaatatgtggcgtttggttttctctccttgtgatagtttgctcagaatgatggtttccagcttcatccatgtccctaaaaaggacatgaactcatcattttttatacctgcatagtactccatggtgtatatgtgccacattttcttaatccagtctattattgatggacatttgggttgggtacaagtttttgctattgtgaatag

SEQ ID NO: 851805 - DNA, 612 bp, Homo sapiens
ctggatccctaagtccttattcgtaacctcctctttggacaaggttttggtagacaaagccagagsctcttgcactgagaaagacaaattctcctcttgcagtgaaccacaggtaaatgctccaatagagagtccaagccaaacctccgggtgttattcatgacccaggcaagtctgctttctcattccccctatctctagaccgttttccatttgggcttccttttcttcttttatcctcaaagaaacatgtttccttctagtaggtttggctgccaccactagggtcctggctacaactggccctcaggtaactctctcacctctgagttggatagtatcctctctcgtccccatacacaagtgtttctcttcccagacaccttccttacacaatttcccatttctttctcatctcacccttgctttaatcaacatagttctttcccctgagattactcttcagcctttcttgttgaagcactgcccagtggttctcttgggatttccatttctctcccctcagctctcttggtaccaaattctgtaagcttctctggtttttggtttctcttccttcttttccttccaggcaacatttactcaatctag

SEQ ID NO: 851806 - DNA, 617 bp, Homo sapiens
gctaaaatgttaaatgaaaaagacacaatatacaaccatatgtaaagtactaatacagtagatgtttcaaatatatgcactcacacacagagtaataagagtacacacatmtatgctaaaattttaatagtgactaattatgtttactgtaatgtgggatgatctttctatttatatcatgtgtattttctaattgtctaaaataactttttaaatttctttataattaggaaaaaatttaaagttgattttagtaaagtctataacctttgagtcagtaattagtcctttgagattttgctcaaagaaataatcctgaaggaagaatacatgtgcataaacatgttcatttaaatattaacttaaaaacaaattttacaattttttacgtatttggtatttaaattttttaaaattattataaattcttaaccctgaaatttccagcaaagtatatcacgacaaaaatgatttttttccataacatattatggaaaaatgtgagtggtagatatgaatgtgacttaattacttatacgaagctgaacagcaatgtaagtgtggacactgaggtttccagcacagctctaatgactccatttggacaactacttgta

SEQ ID NO: 851807 - DNA, 585 bp, Homo sapiens
catttcctaaatttctttagattctaacactttctcttagtgctttccaatgtttgatattatttttaatgctttgtgtctaraactgaaatgtggtcttcctactgaggttagaaaatgacttatattttatttgttatagacaatttctaacaattctgcttaagaaaactagtagtccagcaaagtgtattttaagcctgtatatcacaaatatattcactctcacacacaaacacatacatgtattcatgtgcgcacacacacgctgcctgtagaaactggtatttgcattttttatgtctagggcagcatgcacactactcctttttatcttgcaattactgctttctcacaatgaaaatgaccatagagtcaaaccagaaagataatggaagctaggtacgcaaaataagtagaagaagaatgtaatgttctttcccttagatcagcggtccccaagatttttggcaccaggagctcgttttgcggaagacaatttttccatggaccagggagttggtggggtcgggggatggtttcaggatgattcaagcacattacatttattgtgcactttatttc

SEQ ID NO: 851808 - DNA, 613 bp, Homo sapiens
aatttgctgaagtcttgttcataaacttcctagttattgaatgtctattaagttgttttgacattcaagtttatttagcagatatttattgaggacccattatgttccaggaacactgttctaggtgcttgagaaacaagaatgaagaaaacaaataaacaaaacaaaaacatagatcccctgcatttaaaaagatttgattctagtagtgagattaggtgataaatatttaagtatttaagtataataagtaaattatttactattttagaaaatgataagtgttatgaaagaaagtagaccattgtacacaggatgtggaatgtcaggaaatagagcaggatgagcaggatttagagtgatcaggatggctgttttagagtggcaggatgggcctcagtaacaatgtgagaattaagtcaagacttgaaataaatgaagggcctggccaagttcatgtccagaaaaaagagtccagtggacctgaaaatagagtgagagaataggayagcagtatgtaaaacgatagcagtaaagataagacccatcatgtaagcctgtataaagactggctttttctctgagtaacatgaggaattatttgcaggttatg

SEQ ID NO: 851809 - DNA, 564 bp, Homo sapiens
tttttttattgtgttttttccaggttttggtatcagcgtgatgctggcttcataggawgagttaggaatgagtcctgttcctcaatttttttgaaatagtttcagtagaattggtaccagttctttttgtacatctggtagaatttggctgtgaatctatttggtccagtgatttttatcttattttctggttagcaggttattattattattattattgattcaatttcagaacttgaaatttatctgttcatggcttcaatttcttcctgattcaatcttgggaggttgtgggtttccatataattatgtggttttgagacatcttcttggtattgatttacattcttattccactgtatttcaagagtgtgattggtattatttcaattttttaatgtattaagacttgctttatggccaagcatgcattcaataaaagagtatcatctttcatgtgcagatgagaagattgtatattctgtggttgatgggcagtgtattgtatagctgtctgttaagtccaattggtcaagtgttgagtttaagttcaccatttttttg

SEQ ID NO: 851810 - DNA, 496 bp, Homo sapiens
caattatttcacctacttgatcttttcttcacttttatttgcagatatagaactaacctactagayaggcatgtaatattattgattattgaacctgggacttttataaaaagtgatttattgtttgctcttaataataataaatagtcatatctttataatatttagactagaattttttcatccattataaaaataaagtttttctcatattatcttcaagacttattttatcttatccttaaataataactcttgaaagtttatttaggtcctattgatatcaaacatcattttgggaaataatctatgggatcatttcatgacctatttttttcatgtcacaaacattcatacttcatattttgtcaaagtcaagccagtggaagggagaaaatatatgctgaagaatgcgacaaattaattattaattaatacctggttccccaactggattgtcaaatgttcaaatcacttgaagaaatcttgagtttaa

SEQ ID NO: 851811 - DNA, 528 bp, Homo sapiens
catgtgcatatgtgtttatggtagtacgatttatattyctttgggtatacagctagtaatgggattgctgggttgaatggtaactctgttttaagttctttgaaaaatctccccagtactttccatagtggctgaactagtttacatttccatcagcagtgtgtaatcattctcttttctctgcagcctcaccagcgtgttattttttgactttttggtaacagtcattctgactggtgtgagaggttatctcattgtggttttgatttgcattctctaatgattagtgatcttgagcactttttcatatgcttgttggccatgtgtatgtctttttctgaaaagtgtctgtgcatgtcctttgctccttttttaataggttgcttgctttttgcttgttaagttttttaagtttcttataggttctggatattagatctttgtcaaatgcacagtttcttaatattttctcccattctgtaggttgcctgtttactctgttgatagtttcttttgctatgcagaagc

SEQ ID NO: 851812 - DNA, 528 bp, Homo sapiens
catgtgcatatgtgtttatggtagtacgatttatattcctytgggtatacagctagtaatgggattgctgggttgaatggtaactctgttttaagttctttgaaaaatctccccagtactttccatagtggctgaactagtttacatttccatcagcagtgtgtaatcattctcttttctctgcagcctcaccagcgtgttattttttgactttttggtaacagtcattctgactggtgtgagaggttatctcattgtggttttgatttgcattctctaatgattagtgatcttgagcactttttcatatgcttgttggccatgtgtatgtctttttctgaaaagtgtctgtgcatgtcctttgctccttttttaataggttgcttgctttttgcttgttaagttttttaagtttcttataggttctggatattagatctttgtcaaatgcacagtttcttaatattttctcccattctgtaggttgcctgtttactctgttgatagtttcttttgctatgcagaagc

SEQ ID NO: 851813 - DNA, 369 bp, Homo sapiens
ctgcctgctgtttgcccttgagcagcgaatattccagcagaggggacagtacccaggcccatggcacctctctagaggtctaagggacatgcttcatccttaactgttgccatcagaaacagcytgagtgaggcaagcaggattgaactctttcctaggaagcttgatgcccttgagtgcacatgccatttggggtatacagcaaagatcactgtctaggaattttcaacttgttcaaaatttctatgcatcgcatgttaattaatatgaaaggcaccaggctggtggtaagcattattgtgaaactggtgcacctttcaatagcctcggcgccatgtcttgtccatccgtctaccctcctggccacct

SEQ ID NO: 851814 - DNA, 559 bp, Homo sapiens
gtggaattaaaaatagcatatttaaggaagtgatttcattgactctactgcatagaaaagtcactagaagggtctatggccatactacctgaatgtgcccagtcttgcctgatcttggaaaagtcacaaaaaggaaattcacccatgggatcatcgaggctccagatctttggaaaaattaaaagtccatggaataatccagggagcaacatgactgggtgagttcatagaggaaagaagacaattttgtgggtaagagtggagaggagaaacagcattagagtaacatccactttagaaagcagtgagtgttgggaataatttccttcttacaaaacagtctgtccatcttttggaggggagctaaccgagggaatgcctgaagagcagggtttaattggtagaagacaaataacttttacagaattctaatcaaagtaattaccaaacatcacagaaatttctcacactgaagggaaktgatggcacaggtctttttctttcttatgaatctaagtaattctggccgaaatgtcacgggggaaataaaaagtcatgg

SEQ ID NO: 851815 - DNA, 618 bp, Homo sapiens
ggttcaaagggcatgccatttaaaaaatattccttgtatatgagatagcttttaggaagaagtcaaaagatgctgtctattgtgtcacatacttcatagcactatcattatccatagcactatcattaaggcactgcaagttgtgcggtagtggtggctttggatacatctgaggtatgatagaaaaagaatctttaagatacacaggagctaaataaaaatgggcccagcatgtcatgacacaatgcttgcatttttttgcagtaagtccttccttttcaaactgggttactcccaaggcacgtaggcacagggaacaagtgctacttaaagcaacagaataaacacacgtcatctctagtaaagtgctattttatttgaaaaactttatttgaaaaaaaaaagaagtagatgtattaaaaaatagattgtaaagttgcttatattttaaagaggaaacactaggtattatcttggtcttctggtggcctgctttgtacagtatctcctgatcctgggtaaataattaacttttctttccatttargttaccttagtggagaagtttagtgactcagttagttgatgaggagatactgaaggatttaagggaggtta

SEQ ID NO: 851816 - DNA, 634 bp, Homo sapiens
  misc_feature 355, 365: n = A,T,C or G
acggtccctcaaaagctccatgtgaggaggaggctgactccccaggggaaaaatcagtactcgagaaagaagggctcatggatgcagggtgagcccaaaacctgatgyccaacactgccttgaaagtgtgtgccaaaatccagggctctttttgggagcggatccaatgcttttggagaccataaattcctccagacaggaaccattgattggcataacaaaaggaagccctaggaaagcatctgtgaaggaaccaaaatgcatcagagtcttaaagaatttgatgacccccaaaatgttaagccacactaaacttgactgtgagtggaaaaaaggcccccgcacaaaaggttcngtggttctcnaaaaaaaaaaacatggggtcgcagggagtttttgaaaaataccagtgcctgaacaaccccatcccctgcccatcatccatccttccctaccaccctgtagagattctgatccagttggaaggggcaggagctgtattgttaaaagccaggtgattttgatatgagtcagggccaagaaccagtgacatcatcagtattttatcacacgtatcagtttccttctgattagaaaggttaaatgcaagctagaaaaaccgaaaataaaaatc

SEQ ID NO: 851817 - DNA, 524 bp, Homo sapiens
gctgggattacaggcttgcgccaccatgcccagctaatgttgtatttttagtagagacggggtttctccacgttggttaggctggtctcgaactcccaacctcaagtgatctgcccgccttggcctcccaaaatgctgggattacaggtgtgagccaccatgcctggccggggattttctattttttaatttgtttctaccaaatttcgaattgacagtgcacttttaagacagttgctttaaaatccctatcaggattcacctcagtgctggcatctgttgattgccctttctcatatgaattgtgattttcttggctcttagtatgatgggtggtcgtcaataatattggagacattttgtctattaggttgggagactgtaggtcctatttaaatctttcattttagcaggcagcactctgtttagctttcgcacaygggtcttggtctacagttgtggtctgtggttccagtggcggtttaattttcagcagctttgcagggttatcttggtctgcatgg

SEQ ID NO: 851818 - DNA, 600 bp, Homo sapiens
aacctggaacataaaataaatctccatgagtctatactgacaaataaatgattgaataartagacaaatgaggaagaatagacaaatctcaaagcagaagaattccaaataatttatgcagatactccattctcaaggaggtccttaattgtgagttgtgcctggtgacttccttccaaagagtacagtgtgggtaagggagaggagaggatgactttagagcagagaaacttgacaaacactgcctcagccaggtgatggaggtcaatgtcagcagtgataagagtcaccttgagagcatgttccctcaaaatgatgtgatgtatatttgcatctgtgttaattcattgaagaaggactggaagaatgccaatcctttaatgtttcgtttcaattttgaaaggtgagagtgcattcacaccatctgttcactacttggtagtacggctctgttctgttggtccgtgtgtgcatttccaacgtgtttcttatgcaagagaacttggcatgctgtggccacaattagtgaagccaagcccatcactctgtcagcactcatttactaaggcattattttcctgcagttcaggttattagaac

SEQ ID NO: 851819 - DNA, 600 bp, Homo sapiens
aacctggaacataaaataaatctccatgagtctatactgacaaataaatgattgaataagtagacaaatgaggaagaatagacaaatctcaaagcagaagaattccaaataatttatgcagatactccattctcaaggaggtccttaattgtgagttgtgcctggtgacttccttccaaagagtacagtgtgggtaagggagaggagaggatgactttagagcagagaaacttgacaaacactgcctcagccaggtgatggaggtcaatgtcagcagtgataagagtcaccttgagagcatgttccctcaaaatgatgtgatgtatatttgcatctgtgttaattcattgaagaaggactggaagaatgccaatcctttaatgtttcgtttcaattttgaaaggtgagagtgcattcacaccatctgttcactacttggtagtacggctctgttctgttggtccgtgtgtgcatttccaacgtgyttcttatgcaagagaacttggcatgctgtggccacaattagtgaagccaagcccatcactctgtcagcactcatttactaaggcattattttcctgcagttcaggttattagaac

SEQ ID NO: 851820 - DNA, 616 bp, Homo sapiens
taggctatgtgaccactaacataactgcagtatttccattttgcggatgggtaattaagttgcatggaggcgaaggcatattactragggccccatagctcctaagtgttgacagcaaaacaacattttaggctttgtggatggcagaccagtgttcttaacacaacaccaaattacctgttttgttaactccacatttataaatatttgtgacagtttaggtgaaacttaattctagcatgttaacatgaactcaacatacttagtgtctgttgagtctgggaacattggacctctccacagtccagtgagcagagacagaaaacagaaaaacctacaatcaggtaccatggtcggtcaaaaaagttagggaacagccagaggggtgtcagaaaagggttcccataagaagcctgaaataagtcttagagactgagtttgggaccaccacttagagatgagggtttgaagcaggaaagggatgcacggagaccttcatcttctagagctaatgttggcagcatgtagagtacactaaagggaaagggagctggaggccagtaaggccggaggtatttacaggcattcaggtgagaaatctgggattggctaaggc

SEQ ID NO: 851821 - DNA, 421 bp, Homo sapiens
ggtggcccaccacattaaggccatggtaatagacaaaatgtttagaaattatccttctagttgctgaaggtcaaggaggcctgggggccggggcaagggcagtcaggaacactcaaaggggtcagggtagtaggtacttatcagctagtatcaaagaatttctatattattaactagcgagagatgaaaaccctaacacagggatagaaaagcaaatactgcatgttctcacttctaaatgatgagactacgtggaaagaaccacagacctggagcctctcagaaggtggaggattggaggagggagaggatcaggaagaataacyaatgggtactaggcttaatacctgggtgacgaaataatctgtacaacaaactcccatgacacaggtttgcctatgtaacaaacctgcacatgtac

SEQ ID NO: 851822 - DNA, 625 bp, Homo sapiens
tgagtctttccaaaaatggacacagctgggaagtgacaaagtgaggattcggacatgagtctgtatggctccaaacctaagcctgtaaccataggacccccctgcctcccctctaggttctctataccttccccactgccctaccaggtggaggccttaggctaccctggctgctgctggcttggcctaaaggctgatgctcccagccagacctgagcaagatggccaacctccggggaggagctgaggcaagggccaagagctcaggactgtggctggcagcggtggctgtgctcagctttcccaggcagtggccaaactcaatgctgcagccagagaagctgatggggaggaggagcgaccaggcttggtcagtctggaaggtcccagatgcagccacgggctacccttgtcctttccccttcccaggcacttccccaaacgtgggaccctcagcctgggtcacatgggcttgtaggccgtgaggaaacaaccattctgggcattcctgagccttgggggaggyggctttccttccgcccactatgggaaccctccagggccctgtcggtgccttcgctggggaaggaggcctgccagggaccagctcgttccagttcctcct

SEQ ID NO: 851823 - DNA, 541 bp, Homo sapiens
ggtcttccatggtgtgctggagggcctttctgggtttgagaacagcacagcctcttgtcccctagacctgtcttcttgatggggaaagttctgagactggacaaggtgagcagagaggacggcctggtggagtgtgaggaggggagagcattcaccacagcccctgggccagcctcacccacccttcctagaggacagcacaatgaggggacagaggccagcagctggccatggcaggctgagtccaaggctgattgattctgggtgcctcgtcttctctgataagtggtagcttgggaccagaattaaatttatttgaaacacgtaaaggaaaatgatgctttcccactgcaatctggacaggcagattcacacctgatacctatacctgcttctctatgaaggcarcagcaagtattgccaaacagaggtaaggagcatgatacatgctctccctccctttccacagaccccggtgaggaaagctggtcacgtctactgtcaggcaaatagcccagaagcttttgagtgagctgagggc

SEQ ID NO: 851824 - DNA, 614 bp, Homo sapiens
agtattattatgtgtttttgaaccccacaaattattattgttttttcatacagtcaatgtttatttttgtgtaactgcatgttagtcgaggtctttgctccttattctttctttttgtcttcagttttcctaaaccttccgttagagagtttcctttttttctttcttttttttcaaaccacattctttagaattcccttcagtgaaggttttttggtagtaaacatagcttttgtcaacttaaatatgtttttatgtcatcctattctttaaattaagcttcactgagtatacaggtctagagtttacttattttctcttagcattatttcagtttcttctggtttctattgttgctgtttagaagttatctgcatatctaattgttggtgttttagacatttttttttctctttgaatgtctttaagatcatctttgtctctggaatatgacatctttactatgatgtgtttgtttttatgatgcctgaaatttgttttactttctgcatctgtrtattaatgtcattaattcttggaaattcaattctatctccaacctttgcatatttctcattttctctattatcttcttttgaaattctgtaaagact

SEQ ID NO: 851825 - DNA, 592 bp, Homo sapiens
atactgctcgacatgtaagggagtggttgtttacatgtatcactttgagagaactgaagaaaagctcaataagaaatttgccgcaacatggatcaaactggaggtcattatgttaagtaaaataagccaggctcagtttatttgcatgttctcactcatatgtgggagctaaaagaaatgaatcacataaaggtagagagtacaatggtggttacagaggctgggaagggtagcacggatgaagaacacttggttaaggggtacaaaaatacagtaagatacaagaaataagtacagtgttcaatagcactgtagggaaactatagttaacaagaatttattgtatatttgaaaataggtagaagagacaatctgcaatgttcccaacacacacacaaaataattgtttgaggtggtggatatcctaattaccctgatttgatctttatgtattgtgtgcacatatctaaagaaaaccctcatgtacctcataaatacatgtaactattacatatcaattaaaaaatgatcatcatsatcaccaagcacatgtctttctaggcaaaaataaaatgatccgtgtttcttgtat

SEQ ID NO: 851826 - DNA, 594 bp, Homo sapiens
ataatacaaatgaaacaaaaagttagtttttggaaaaggtaaacaaaactgacatacctttagccagactaagaaagaaagagggaagacccaaataaataaaatcagagataaaaagggagacattacaaacaatactgcagatattcaaaggatcattagtggttactaggagcaactatatgccaataaattggaaaaatctagaggaactggataaattcccagacacatacaagctaccaagattgaaccatgaagaaatccaaagcctgaataggccaataacaaataatgaaatcaaagccataataaaaattcttacagcaaacaaaatccagggacccaatggcttcactgttaaactctatcaaacatttaaaaaagaataccaatcctactcaacctattctaaaaaatagaggatgacggaatacttccagtttcattttatgaggccattattaccctgatatgaaaaccagacaaagatacagcaaaaaaaaaaaaaagaaaaagaaaactayaggccaatatcaccaatgaatattgatgcaaaaatcctcaacaaaataatggcaaactgaattgaac

SEQ ID NO: 851827 - DNA, 624 bp, Homo sapiens
ataaagaaaagttccagcaaataggatgttcactgtggcatcaatattatcagaccacttttgcatggtttggtacattgttcctaaatgcttagctttgggcctggttctctaacccttgcctcaataatgtgtgcaactcaatactctccaaataaactccttttaatttaattaatcagagccagctactgttgttctcatctgagaaccaaaaccaaaacgaaagtcaatgccaggagcactacaaggaaaaaagggcccagtcatttacagcctgggaagccagtgactcttgatagacactataggcaggtagttgcatgctagatctggggtatagacaatgtgccagctgaggttggaatgttagagcaaatgctaccaaattttcagaatatttgtgtgtagtagacttaactttctgttttcaggaaattgctacaagaaagagatgaaaaccttaatgattagcaactgttctatttctaagaaagatatgttaagtcttccactgtaattgttaatttgtcaaatccttcttgtagtccagtgtwtgctttatatattttgaacccatattatttcatccatacaaatttagaattgctgtattatcctggt

SEQ ID NO: 851828 - DNA, 671 bp, Homo sapiens
aatagatgagagaaattatcaaataactaattgaaggtaaatctccagggttaaaagatttgactctttaaattgaaagaggctactgaatctcaagaacaattaattaaaataggtcacatctggattcctcaattctgaaattttggagcacaaatacatagataagggttttaaatcttttgaaaagtaaaagtcatgatatgtacaaaagagagaattctaggcatgagattctcctatttgtttgtttgtttgtttttctgcaacagtggatactggaagataatgaatgtcataggagttgtgagagagcattatttttggcttacaactctgtatgcaaaagttctaccagatgagtcaataggattaaaagaaaatcagacaaataaagaatcaggaaaacaatcttcccaaactggtaggtgaaggaaaatctccagatagcagctgtgcctcaggttttaagaagaacaaggcagataagagcagaaggacagaggatgagcatgtagttctgtatgaggtaattaatatgtccaatcatatgtaatggttaaataaatcaaggcccatccacagagcctgataaatgtcttmtaagactatttgttgacacgcccataatatcttaagtaataaaagcagtttacaagataatgatttgc

SEQ ID NO: 851829 - DNA, 671 bp, Homo sapiens
aatagatgagagaaattatcaaataactaattgaaggtaaatctccagggttaaaagatttgactctttaaattgaaagaggctactgaatctcaagaacaattaattaaaataggtcacatctggattcctcaattctgaaattttggagcacaaatacatagataagggttttaaatcttttgaaaagtaaaagtcatgatatgtacaaaagagagaattctaggcatgagattctcctatttgtttgtttgtttgtttttctgcaacagtggatactggaagataatgaatgtcataggagttgtgagagagcattatttttggcttacaactctgtatgcaaaagttctaccagatgagtcaataggattaaaagaaaatcagacaaataaagaatcaggaaaacaatcttcccaaactggtaggtgaaggaaaatctccagatagcagctgtgcctcaggttttaagaagaacaaggcagataagagcagaaggacagaggatgagcatgtagttctgtatgaggtaattaatatgtccaatcatatgtaatggttaaataaatcaaggcccatccacagagcctgataaatgtcttcyaagactatttgttgacacgcccataatatcttaagtaataaaagcagtttacaagataatgatttgc

SEQ ID NO: 851830 - DNA, 625 bp, Homo sapiens
tctcagttagggtctccttagagtttratatgaaaaggtgttagctaagtacagagctggtacctgagagagtaaaaggaaactctaaggtatcatggaggtagcaattgcaggacacagctcccacccctagggctgagagaaccaagggaagagacaggaattattaagacttggagcatagatgagaggtctgtggagctgacattaggacttgggaggaaggcgtgcatggaggctgctgctggatctctgaacctgacctcgggtctggacccctgaggagaaagccctggcaggttggtgcatgtggggccgagggacaatagcttaacaaccagcataaaagagagcagcatgggacacgcttcaaccatgcgcatggatggctccaaaacctgtgtgtggctggcccaggacgcagggaggctgcagggggaagagacaagttaaacctgacttgtctgggaagcaccattgtcctcaggtcactttcctctgtcaagcctggtgctgaagttatctgttgtctccaggggccaagtattaagagtaatcagaaactcagtcctttcttctaggagcttcccttcttgcatgaaaatcctgataaaactggaaaaaa

SEQ ID NO: 851831 - DNA, 611 bp, Homo sapiens; identical to SEQ ID NO: 845087

SEQ ID NO: 851832 - DNA, 611 bp, Homo sapiens
gtgttccgcacgggggctccaccagggcagggatggtggtgagggtcgctcgtgggtcccctcgsggggagcagggtctggtactcaccagggcgcacgactaggacttgtggaatgaattcatcgtcgcctttagcttttagtcctttgaagagccctgagagtggaaatcaagagattttttccacggggaagttctttttacaaagcgttgatttctcggcacccggcagggagggcaactggcagggtctctggcgcaccttctgcgcggtggagccacgggggctcagctgggcggtggtgcggccgtggggtggtaggtcaagagctgggaaaggaaaaagcaaaagctgggaaagaagccggggagcggtggaccagacatccagacctcctgaaaggctcatgaaggggcacaggcaggatcttctggaagtgagaattgttttgtttgtttgtttgtttattgtagtagaatggggaaatggagagagaacctgaaagagccccaaactcgaggacctattgctccccaagaataacatcttccagaagaactagacagaaaactaggcgtctgggaactctgaaatccttggaggagtagc

SEQ ID NO: 851833 - DNA, 424 bp, Homo sapiens
atttattggcacagagtaaacactatctattagttcttcattctgctgtttctaaattaacacaaactttattagcatttgggcatatttccttcatggccttatggtgttatgtgtcacactttatgcttcagatatgattcttaaaatcataacagaagatatgatttaaaaatcaaagatttttaaaatctttcgcatacttgtccttgaaattcccagtaaaagggaagccatcagtcccatagtcctaggggccttcccgactgtacaagaaatcactacttcatgccccagtgcagtgttttagaggagaggctgcaagtcttgggaaagtggcccygcattcagagtgagacctcaggggctgtgaattctgactccacttccttgtggttgaatcatcttgtcaacttccttgatg

SEQ ID NO: 851834 - DNA, 645 bp, Homo sapiens
cttgtccaggtcactttgcatctgctgctgggccaggtccttctagtggagcaccttgtcccgcagctgctcctccagctgggcctgcagcagggcctgcttctccagggctgccttggcccggctctytgccagccacaggcccgtgctcagtcccaggcccgcctcctggacagctcgtgatgtccgggccagctcccctcccagctgcagcaggtcctttgggagagagcacaggatggggatgggatggggctcgctcccaactacaaattaaaactacgctgaggccaggcgtggtggctcacacctataatcccagcattttgggaggccgaggcgggcagatcacctgaggtcaggcatttgagaccagcctgggcaacatggtgaaaccccgtctctactaaaaatacaaaaaattagccaggcgtggtggcgcactcctgtagtcccagctacttgggtggctgaggtgggaggatcacttgagcctgggagttcaagcctaagtgagttgtgattgtgccactgcactccagcctgggcaacagagagagactgtctcaaaaaaaaaagaaagaaaaagtattttaagtccataatacaggttaaatcctttcctttcctgaatgaactgtacca

SEQ ID NO: 851835 - DNA, 604 bp, Homo sapiens
aagtccctcagtgtagagatgagtctgtagaggaggttgacacaagcttgtgaaagacccagtatgccaggctaagggggtgggaacagtgagggacactgagggttttatggcttaaattttgacaagtgtatctacatatagacaactaatgtaacactccttttttttttttttttttttttttttagagatggagtctcactctgtcgcccaggctagagtgcagtggtgagatcttggctcactgcaacctgcgcttactgggttcaagtgattctcctgccttagcctcctgagtggctgggactacagactgatcccaccacatctggctaatgttttgtatttttggtggagacagggcttcgccatgttggccaggccggtctcgaactcctgagctcaagtgatccacctgcctcagcctcccaaagtgctgggattacaggcaacactttttttaattttcttttttgagacagagtcttgctttatcatccaggttagagtgaagtggctcagtcatagctcactgcagccttgacctcccgtactcaagcaatccttcytcctcagcctcctgagttgctttcaatttttt

SEQ ID NO: 851836 - DNA, 446 bp, Homo sapiens
tatttgagagaaattaaataccaaggggtaaaattttgtgcaataggccaggcatggtggcttatacttgtaattccagcactttgggaggccgaggcaggcagatcacttgagatcagtagttctagaccagcctggccaacatggtgaaactccgtctctacaaaaaattcaaaaattagctgaccgtggtagtgtgtgccagtaatcccagctacttgggagactgaggcaggagaatcgcttgaacccaggaggcagaggttgcagtgagcagagattgcaccactgcactccagcttgggtgacagagtgaggytccctctctgaaaaaaaaaaaaaaattgtggaaggccacaaaccattgcaacaactataattcattttaccttcaataaccaatgttcaccctcttaggggcaatatcactcccattaaaaatgctt

SEQ ID NO: 851837 - DNA, 616 bp, Homo sapiens
aatactgcaagcaattgtaacatgatggcaagtttttgtgyttttaaacatatctaaacatgaaaaaggtatagtaaaaatataatagaaaagactaaaaatggtacacctgtatagggcactgaccataaatggagctttacagaactgggaagtttctctgtgtgcctcagtaagtgagtggtgagcgaatgtgaaggcttaaggcgttactgttgtactgtagactttataaaacactgtacacctaggacacactaaatttatgtaaaaatcttatttttcttcaataataaattaactttagtttactgtaattttttatctttaaaagctttttaatttttaaatgttttgactcttgtaataatgtttagcttaaaaacataaagacattgtacagctgtatgaaactattttctttatatcctcattctacaagctttttattattcttaaattttggggttttctttaactttttaaactgttgtttaagaaaactaagacatgaacacacacattagcctaggcctacacagggttaggatcatcaatatcactgtcttctacctccacatcttgtcccaggtcttcaggggcaataacatgtgtg

SEQ ID NO: 851838 - DNA, 524 bp, Homo sapiens
cgaaaatcagtgatatgttatgatgtttaagggatacgggaaatatgtaatatgaactaaatgtgaacattttatttttggttcaatgtactttgactcagccaataaamacttaataataccttaaatggtgtgtcacaatccaagctaagatagagtataaatacctccttccagcctagtaccttttggcagaaattccacaaagacctttcccctaactgactcctataaacttaatacggtcagctcattttcatgatttttaagggatatgtaggatttatggggactaaaacacaagtttccattataaaagagaaaatggatggatcttcaactgtgttttattcctaatgagaattctatcctttaccaaaactactcaggggaaaaaattctttccttttataaaatgtcacttgtttaagttgtaaaccaaattctttttattgtaatctaaaaataaaatattcaacaccatcaattagcaattctttgtggccgtgtgtgttgtgttgtgt

SEQ ID NO: 851839 - DNA, 563 bp, Homo sapiens
aatatttaatgagcccatacctagctctagatgagttactattcagattaagttctgaaatccttcattttacaggacattatcttcttcaatatttcccattgacacttttccagctttttaaatatcttgtgtttttctttcttctacagaaaaaaaggtttcttaaagatattactctttcaaatgtcctttatatttttaatgtattatctcagttatccttgattttaacagacaatttttatattttgccccaatcatcttacaaaatataaaatcacaaatacaaaataaatatgtagataaaacctacctttatacatacttttataatcctaactcttcagtctaatctaagagcatattacttgtgtctgcattgtttagggagaataagtaactagaggtacattatatgtactggcccttttacatgagattatttgcttcatatcttgtagcaagaaggtccagagtttgttttgatacagaatttttcrtctctattgcatcagactttgtagcaaagatatatacccaaggaaaatacccaaacaact

SEQ ID NO: 851840 - DNA, 583 bp, Homo sapiens
acccagccaggaaactgtacttactcattttgaaagagatatgtaactgttggctaccatagctccttcatacagaattatgggctcagtagatgccaaatcttccacattttcaggtgatgcytaaattcctacaatctctctctctttaaaatatgttgtggtcttaaaacaaacaaataaggcaagtggatcacctgaggtcaggagttaaagaccagcctggccaacatggtgaaaccccgtctctacaaaaatacaaaaattagccagggatgatgatgagtaactgtaatcccagttactcaggaagctgaggtaagagaatagcttgaacccgggaggcagaggttgcactgagcctagatcaagacattgcactccagtctgggcaacagaatgagactctgtctcaaaaacaacaataacaaaacaaaaaacaaaacaaacaaacaaacaaaatatatttatgggccagtcatggcttagggtaagtgggttgttagttaccagcaaattctctcttctattttctgtaaattcaatctctttctttttacttgccccttttcataagtatttg

SEQ ID NO: 851841 - DNA, 647 bp, Homo sapiens
gctcctaatggttcattcgcccatgggcaagataaagacacttgcaaatgcaactacgatacaggkcaggctaagaagagtgcattatgattggaataaaccatgatttagtcattgagagcatagccttttattttactaataataagttttcatgatatataaaacatctgaccctggttttaaagaggagtggtaattggatatgcagagactgtgagacttgccaggtagtaatgacagcaggaacaaaccacagagaaagcagaagtaatagtaatatctggcatctaagctatgcttactgtatgcttggcaccactataagcatttacatgagttcattcattttattttcacaagagccctaggagctggaactattattttcatctccgttcaataaatgagcaactggagcacggagtgtgtaagtaatttgcctaagtgagtgagtatggagtttggtattcaaattcagtctggttcacatccaggctattttcagcgatcagcggaccaatcagaatttgagaaactagagggataaaactaaaaaaacacatattggaggggatctcagacaaagaggagtcactgattgtttctgagctgagaaatgactaaagtcttcagaaagacacctg

SEQ ID NO: 851842 - DNA, 657 bp, Homo sapiens
taaagaaaataagatttaggggcacagtgcaacacgtgccctgaatgatctcatggtagaaatctaattttgcttctatttatttggggttatagataggattatatttctcaggcagagaaagtcattaatcaagaaaggggcctcttaatccttttccctattttaatgagacactttaaaatgccttgcgttggtgaatggcaagtgtcagctgggtgtgattagcaggcttttgtggcaggtttgccgtggtactgtgtgctcaggtattcaccggcctaatcctgcctgcctatcacgggggcagaaatggacaaagatggctttatggcctcactcaagttgcaggctggtgagtgggcatttgagagctttggtgccacagtctggacaatggcatatgggatacgttcttagaaatcagccccccagtattagcgtagcccctaagcagaatctccaaagtaaataatacataccagcaacagagtttcaccgtcagtgtatgggtgggtccctccttcattgaaatcagaacgtctaacctggtagaaaggtgccagagaactgggagtccccctgttccctctgtcccctctcttccctccctcyttctttcctttcatggccagcagctgtgctcatcactgggga

SEQ ID NO: 851843 - DNA, 492 bp, Homo sapiens
ccatgcctatacatataaagaaattgtgaattgtagactatttgaaccttttcagatttagaagcagtcttttaccaagtactttcttatacattgaaagtcaatgagtgttcagggattagctagatgcaaagmctaattcagaagtgaaggaatcattacatataaattaatacaatttgataacactatctatctttctacctctgtttctttttcttttccatatgtcttcactgaaaggtctgttgtaaagttcctggcctgtggtaggagacttccataaactttacaggcttctcctatagtcttatgacaagcctcatattatttgtattaaggattaggttacactataaaccccaggtacatcgtaaaaggatctataagacccagatactcattatacatcatgatggaatttggtaaaacaaactgtggaatttttttcagcaagcaataaacaattatctgtggacctgtcagagtatt

SEQ ID NO: 851844 - DNA, 638 bp, Homo sapiens
gagctctttaaagttcatgtatggatcttcaaagattgaggttaaaattgttttatgtagaagactttttaaaaaatgtttaatcagatcctaattttagcaamtttagagaaaggaacatacaaaacaaaaaatttataacattataatggagatacagtaaggcagagaaagttttatatgtcctttggggttgggaatagatttttaattgtgggtaaatctctgtatggaattatatgaagagacccaaatcttctcactccatacataaataaagtaataattgctttggtagtaccatcaagcaaaagcagatattggtatgatctgccttagaaatcaagacaaggtcagtagagcacttcaatcaaaaaagtacctccctgcctctgctgatgtattgcttatcaatatgtgtaagttattactttttccagactaagtattcactcacagttcattcagagttcaacatttactttccccaagtaattggctatgagtggcttgcattaggaccatatactttctaacgcctaaagtaatcatctttctttttagacaattcgccagaagtttcccctcctaacaacaaggcggcttggaacaagaggccattcaaagtaagataccag

SEQ ID NO: 851845 - DNA, 581 bp, Homo sapiens
ctcaattctttataaggtaagcactttgggatgtcttaaacatgagccatttatttctttacgtagcattctatctaaattcttgcaatatattttcagtaaatatgttatttatggctggakatacactgtctttttttttgatgagaaagcaagcaatttaatagtgcacgtttaatagtgtatgtgttttaattgaagtttacattaagtaaaacaaactcaatttctttttacagctaataatgagtctatatgtgacacacttattaatatgtgaaaacttagttaaattttattaactctctaaggtgttttcagattaaaataacacagtggattttttttcacaatgccagtgttttggcagaaagcagaattaggcacccttatgagattaataacttgaaaatctcaaaaacctctaactttaatgcattaatgtctaattctcttctcaaaccaaatcagagttcctaagtgtctgcagaaggatctcgaagacatcctaaataaggacaaactgattgtccttctaggcaaacatttaatggaagacagaaagaggctaattcttgaca

SEQ ID NO: 851846 - DNA, 503 bp, Homo sapiens
tatccatgtacaagcacaaatccagttctgtagcatgtatagatacacatgtaatacttacagtttgatatctttaggacgtcacctcattrctttgtcacttttttccttcctgaaagttctttgtagtaagttaacagcaaattctcaacattttctgttacaggatactatggaagcaacataaactacccagagtctcacaggctcggatcaatggtgaatcagcacgtttctgtcatcagcagcattcgttcactgcccccctacagtgacatccacgatccacttaacattttagatgacagtggtagaaaacagaccagctcgttttacacagacacatcatctccagttgcatgtcgaactccagtcctaggtaaattattttagcagttcttgaaaacattttaagaagttgttaacctcaggtatgcaacattacttgagggagatatgctgaggtgaactgagcaagcatgtttccacggttgatttattac

SEQ ID NO: 851847 - DNA, 623 bp, Homo sapiens
aatgcttgcacgcatctagcagatcagtttttttcacccatsgttcattgagataagcaaaaatagtccctgattcaagccttattactttctctataaaaaatgacccctcattaagatcacaacataattttaactcaacactaattgttatctttaactaacagtgcttgaagaaatacgcaatttgaaattagatccaagcaaggtaagtattgtcttgattttcaagatggaggaaaggcagaacatttcaccctgatagggatcactgttggcttctactcctccagggctgctcagctctacttgcagaattgaccgcctctgctcccaagagcacctgccattgctcacccatctaccaggacatcaggattgactgggtggagaccacgaacctgggaccttagcatcttgggtacaaagcaggagctagggcacatgttgcatcgttacccagacttctgacttgttgaccctgtttacctggtttctgcctttggtcttttgattagtaactccagttttctggtgcaactggaatcccactctaccctagaatctgtttgtttgagattctgatagttttcctaacactcttgccagctcgacctctccag

SEQ ID NO: 851848 - DNA, 623 bp, Homo sapiens
aatgcttgcacgcatctagcagatcagtttttttcacccatggttcattgagataagcaaaaatagtccctgattcaagccttattactttctctataaaaaatgacccctcattaagatcacaacataattttaactcaacactaattgttatctttaactaacagtgcttgaagaaatacgcaatttgaaattagatccaagcaaggtaagtattgtcttgattttcaagatggaggaaaggcagaacatttcaccctgatagggatcactgttggcttctactcctccagggctgctcagctctacttgcagaattgaccgcctctgctcccaagagcacctgccattgctcacccatctaccaggacatcaggattgactgggtggagaccacgaacctgggaccttagcatcttgggtacaaagcaggagctagggcacatgttgcatcgttacccagacttctgacttgttgaccctgtttacctggtttctgcctttggtcttttgattagtaactccagttttctggtgcaactggaatcccactctaccctagaatctgtttgtttgagaytctgatagttttcctaacactcttgccagctcgacctctccag

SEQ ID NO: 851849 - DNA, 602 bp, Homo sapiens
tcttctacagatgaaatgcataggttgaggttagggagagggacacagagcatccatgtactttacagtcataccaccttccaggarccttcatgtgttcagctgtctggaagcttctggaaccctgtcgtttcggactgttagagaagcttcattacataggcattattgattaaaccattggccattggtgatcaaattaaccttcagcccctctctcctccctggaggctgtgggatggggcagaaagtcccaaccctctgattaggccttggtctttcagttgaccagccccatcctaaagctacctcagggctgccatccatcaattaactcattagcatacaaaaagatgtcactggaaattttaagtattttaggagttgtataccaggaaatggggttgaagttcaaatatatattttacactatcacagtccaatacgctggtttctcatggactagttcatgctaatcaggctcaaaacaaactcctttataacttggaaatttttttttattggcaagggaggatatgctttacttgttaattagaaatttatttattttccttccatttttccaatttctgttcttacca

SEQ ID NO: 851850 - DNA, 684 bp, Homo sapiens
atgtagaaagagtggatgtcacctgttcttaccacagaaatgataactatgcaagataattcatttgttaattagctaatttaactattttacagtgtacatgtacttcaaaacatcatgttgcacatgataaaaacatacaatcttatctgtcagtttaaaaaaggcaaacaatttgccttctcttctaagggtatttccaagtcatttaaaatggttacattttttgatgacagcattgaaaagcaaatgcatttttttattggacatgaaattgctgaagttcattttaattaaaaatgctttcaaacaattttatattctttataaaattaatgtgctaaagtattatggacttctggtttccagtctagcatgtcatgagcttagaagtcaacaatccatcctaataacaaatataaagctgagcaaaatgaaaaatcaacaactcttctaagatttttagatctttcagagaagtaaaagttcagtgcaaaccactgccatcctcccaaattggagaaacagacaggcaaatactgagtgccacaatttactgaaatacwaacccagtagaagaaatctccatgggtaccagtggtaggttaggaaaacctgaattctaattgacaaattgctgaaagcttcacgtgaacaaatctgagtgtgaaaaactccggaagg

SEQ ID NO: 851851 - DNA, 609 bp, Homo sapiens
agaaataaaagagcagagatagagataaccacttccgtagtstgaatgactccatcatggtaaactccttccctcttagagccacccccctgacataacaatctcttgtttacctagtgcttgtcaaatgtacttccactgctaaaatacccatgattcatggaaaaaatgatggcgaaaagtcattccttttctttttgtatggcccacttttgaatttttgcattgctttttctaattactctttctcttgatcacaggggacaaagatattcttgtctagacactgccataaatctaaaattttggctttggggaacaggtaaaaacattagagcaacctgctgtcagacccacttcatgcataaggcaactaagatcctgcaaaggtgatgtgatgttttggaagtttatataaataatgctattccctgccttctagtgcaagtaacaataacactgcgtttttgtaatgcagctatatcaagccagcagcttatagactttctggtgatgagcatattctttttgagacaatattttaaaatcagaaggcttcacatagaactatgtagaaacaattgagagatactgtggatcttagccctg

SEQ ID NO: 851852 - DNA, 582 bp, Homo sapiens
gttaggtaaaagcaatatgtgtgactccccagcaagtcatcaatcacttgttggggctggatgtgtgttgcattagttggtgttcaacagtttgtttttttatstcaggcaacaaaagggttcctcctgtcatcctgagattagaatgctctctgtacatcaacatggtaggtatggacaattagattcacaggagtgttggaagattagaagagtcctcaccacctggtccagacagaggagccaggatattcagcattcctttagattttaaatgaaagccaaagtaagaggcatagctcctgattttcatttatacagtcaataacacagaagaaatgaatctaccctagacattcttaaccatgaagccatataattttttccttcttgtgatttttcatgtacagtgagctcatgctatgttttgatatctaaggactgaaatgacctaagaaggagcaataaatttagacataatccttatagatttggattctaataaattatttactcatttatggggatagaaaaatcattaatagcagacatgctgtgaaaatttagacctgagttcctgtg

SEQ ID NO: 851853 - DNA, 553 bp, Homo sapiens
acatgctagaataacattcatatttttttcacaggtgaagatggcgatgtgatttgtttgaattcagatgacattatgccagttgctttaatggaaacgaagaaccgagaagggttaaactatatggtacttgctacagaatgtggccaaggtgaagaaaagtctgagggtcctctaggctcccaggaatctgaatcttgtggtctgaggaaagaagagaaggaaccacatgcagacaaagatttctgccaagaaaaacaagtggcttactgcccttctggcaagcctgaaggcctgaactatgcctgtctcactcacagtggatatggagatgggtctgattaatagcgttgtttgggaaatagagagttgagataaacactctcattcagtagttactgaaagaaaactctgctagaatgataaatgtcatggtggtctataactccaaataaacaatgcaacgttccygatttctaatcttggttctgagagccatttggtttcagttgtagcaatccccataccagctgcctgactttcagtagaatta

SEQ ID NO: 851854 - DNA, 656 bp, Homo sapiens
ggcaacggtaggcagttgggatccataatattggtttcataatgcaaatgccctataattccctattaattttctttaaatttaataggctgcagtggtaaaaccttagaagacttacatggaaagaattattctgtttccttcacattagcttttgacaatcagaaccctgggctaacattctggcattttctggtcatgtgagcccgagcctgtttttagtatttaatgggagaacatgaccctcattgccagaatcatgtttttctggagcacagggatagcgtggagttggaaaggcatatctctgtacttaatctatatgcctgtctgtcccaaattatatttccagtcttgatgtctttactgagtaccagacttgtatgtccctctctagttgacatatctttttggattttagtaggtatctcaaacatattttgccccaaacggagctcttgatttcgtacgtcctctcctactccacccatctacttccttgctttctctttccctacatccatgctarcaaactctgcctgcaaaacgcagccgcagtccttcttctcttgtatccccagtgcctggagcagtgcacagcacattatgaaccctggaaatactgtggaatggcggacaggactgggggtgactac

SEQ ID NO: 851855 - DNA, 626 bp, Homo sapiens
tgtataattcttgatatatgttgctagatttagtttgctagttttgtattgtttttgaggatttttgtgtccatattcataagggatattggtttgcactttttttttagatatactattgtctagttttggtatcagaattatcctaacctcataaaatgagttctgaaatgttttctattttttatataagtttgtgaagttttgatgttaattctttaaacatttggttgattgaccagtgaagccaattggtcctggaattttctttatgggaaattttttgattgctaattcaatctcttttcttgctatatgtctatttagttattttatttcttcttgagtcagttttggtagtttttgcctttctaagaaagtgttcattttgtttagattatttaatatgttaccatatatttgttcatagtagtatttcttttggggcccaactagcaacaaattctctggttctacatatggggaatgtcttaatttctctttcctctttaagaaatagttttgcttagttgacagtttttttttcttttgtcactctgaataygtgattgacaccatggtttctaataaaaaattaactgttaatttagaggatcccttttatg

SEQ ID NO: 851856 - DNA, 624 bp, Homo sapiens
ttattgtttaaattgacgaataaaaattatatatatttatgatgtacgacatgatgttttgatgtatgcttacattgtggaacagctaaattgagctaactaacatgcattctctcacatacttatttttcacgtgtggtgagaacacttaaaaactaccgtctttggccgggtgcagtggctcacacctgtaatcccagcactctgggaggcttaggcgggtggatcacctgaggtcaggagttcgtgagcagcctggccaacatggtgaaaccctgtctttactaaaaaatacaaaaaattagccgggcgtggtggtgcgcacctgtaatcccaggctgaggcaggagaatcgcttgaacccaccaggcagaggttgcagtgagccgagatcgcatcactgcactccagcctgggtgacagagcaagactccatctcaaaacaaaacaaaaccaaccaaccaaacaaacctcacaaaactactgtctgcagttttcaagtgtgcagtatattgctattaactgaagtcaccgygatgtagacttcttgaacttattctgcctgtctaaatgaaattttgttttctttgaccatcgtctccccggtccccccgctctccagtc

SEQ ID NO: 851857 - DNA, 451 bp, Homo sapiens
ctgcgtaaagagtgtgtcagggctaagagtgccacagctgaaagagcatacttcttcagtgaattgcagtggctcagtagaagcaggagatcctctggrgaggtgagtgggaattcgagccattaatctatgacaaggaattgaggcctttattctgcaggtagtgggcagtgattgaaagtcattgaaacaacattttgcatttgagaaaacaaattactctggctggagtgtggagaagggactggaaagagggaaggggtcatgatggaaggaagaggaaaaagcaagtttagaagaaaatggaattttaaaatattagcctagagaaaaaaaaatatgtatataagggatgtgtgtgtatctttttgttttataaatgtttaaacatatttttaaaatataggcagaatagtctaaccccatgtgcctgtcacacaaccacaacaat

SEQ ID NO: 851858 - DNA, 614 bp, Homo sapiens
taatgccagaaaacaaaggagaccattgaatatagatatggttgtcattaatttataatataacttttccttttaattttgaaaaattaaaagctgctaaagagttgaaagaatargacaatgaacacctatataaccttcactcagatttaccaattgtcaacatgttctaagatacaattttcctcactctatatgtatttatttttctaaaacatttgaaaacacattgtagatgtcaagacacttcactcttaaatacgtgggcacatatgtcctaagaaaaagacattctcctttatatctacagtgtaattaccatacccaagagggttaataacaattcaataatatcatcaaatacatggtcaatatttaaagtttcccattttttaaacagtatgcgtacttgcactttttaaatcgagaaattaataaaagtttatgcactgtatttggtattcatctgtttttagccttaaagtaattttaaaataaatagcaatatggttaatgctcacaattttaaggctgagcttcttagagtggttatatagtacagtatattgattgaagaggagtcactatgttccagaatttgattaacatatttg

SEQ ID NO: 851859 - DNA, 607 bp, Homo sapiens
tagaaaatgcctttcttctgggatccttcctttaccactgtggtggtcattagagctgtctgcaaaaattcctcctctccctttgagataataagagtgtacttccttggccctctgaagttacaggtaccatgtgacagcctctggccaacaaaataaacagaagtaacatgtgccagcattgagcactttgcggtcttctccttttccacttgcatgacaaccagcagtgtcctggtagtgtctgccgaggtcctagattgaggaagaagcctccagagaccttggtagacatttagcaggagggaggaataaatctttgatattgtaagccactaagatttgggagctctttgttatcaaagctcagtttaagtcaccctgactgacacagctacttactagtttcgtgaccttgagaaagtgacctacctgctccagtttgccatctattcccctgaaaatctaggtgttagcattcctactccatasggttggagggcaaaatgagctccatatccaaagtgcttggcacatcctggcacctgttaagtatacatggaatgacaggaactgttaccatttaacacgctggcttctctcccca

SEQ ID NO: 851860 - DNA, 541 bp, Homo sapiens
aacagactactgaatgtagttttaaccatttaaatttgtctcccatatatttttcttaaacatttggtacttgtaccacttatctgctcttaaggaagggttgataaagaagcaaacaaacatgtactaagcaattatttaaaaaaaagaaccaatcatgtcacccttgataacctgattttgggggaggatttcatgcttgtgattctatattgcacttatatggtacagtcataccttctgctggtaaagttgtccctgactcacgtgatgttactgaacgtgtctctgtgtaaggggtttatactggaaagaacatcaagacttctagttatactaccatctaaacaagtttgtgaacaactggcctagctctctctaaacatgattttacttatatcatttcaataatacacttttcagaaacacayttattatgtaagatggtatgtgaaagaaatgccatcttctctcactgtgagttgaaattgttgttcttgtagttctttccctgttccaaagcaatagtgacaccacccag

SEQ ID NO: 851861 - DNA, 666 bp, Homo sapiens
ctgggatgccaccttcccagaatggcctgtggttgggaggctgggttctgcagctgcagcactgcctcgctccccatccagctctgctgctttctttcgatggaaacaygaacatctctaagcctggacaacctcttaataaacaacagaaatacattggagagaaatacagcaggggtgggagtgaggagaaacctttaagagacttacctgttgaagatcagaacctgcattctccatgctgcgagttgatttttttttaaacgaagtgcccatgtggatctgacatctgctttctgagtttgtgtggatgagacacacactctagagtctgtcagagaagattctagagaatagaactggtctcacctgggatcatgcaagacaaatcaatagcagctgttaagataattgtatataggactatagtcttgggaaaccacaatatgctaatcacttgatttaattttgtgactatctgcagatgtggatatgaatttaaattgcaacctcacaatgttgtgtctacaggtacaggttaaactgaaggaaggtggaagggtttaagagcctatctgttaaatttcaagtctcaagtaagccaagtcaatgtaagtcattgctgatttggagcaagtctttgtaaaacgtacctgatttgcttta

SEQ ID NO: 851862 - DNA, 601 bp, Homo sapiens
gcaggcagagcttattcctacagtagcagctgttggataggaactgttgagagaaagaaaggagaagatgrcaatgcacttaacagtcactaatcagaaacttgtaccttgagtattcctaaagaaggtgtttatatttgaggtggtggtcctggcacattttaaacatctaaacatcactgtaaagagagaattccatttggatccagttcatgttgacctttactccaggggcttcctagcagaatagctcttgtgatttgaaagcaagagccacatgtaggaagctgactccgcaagcccttagtagcattctgacatcaacacgtgtaagaccagaaactgagctaaaccttggctgttgagcacagtaagaaaaaccgtggctttggcattagaaagacttgggtttaaatccagactcagccacttactggctgtgtctccttggcaaggtacttaacctcctccagcctcagttgtctcatcagtaaaatgggaatagtaattcctgttttacaggattcttaggaggatcagaaatgacctatgtaaatgtgagttagcattatgacccagcaattccactcctgggtatctg

SEQ ID NO: 851863 - DNA, 502 bp, Homo sapiens
gcagacagcccagcactgtgccttgggcctgatagttaaaaatcaacccctgacctaactgcttgtgttatctacagatttcagacattgtatggaaaagcattgtgaaaatccccatcctgttctgttccattctggttaccggtgcatgcagcccccagtcacgtacccactgcttgctcaatcgatcacacgaccctctcacgcagacccccttagagttgtaagcccttaaaagggacaggaattgctcacttcgggagctcggtttttggagacgtgagtccgccgatgctcccagctaaataaagccctttcctttcacaagtcggtgtctgaggggttctggtctgcagctcgtcctgctacaacatatttcctatgttattatgttatttttatttattcatttattttgagacatggtctcactcmgtttcccaggctggagtaaaatagtgtgactgtagctcactgtagccttgaactccagggctcaaag

SEQ ID NO: 851864 - DNA, 606 bp, Homo sapiens
aaaagagaccaaaactccattaattaatattaaattatttttaaatgaattaaaatgggctatttctatactcgcaagggcagagataacataaagattttagaggtattttacaagagcttacacagggggaattatttctttctctccttttttaccagaaatgattattatatagatccttttggggagtacagttacctataaatatttccagttataaagccagagtctctaggcaccttggctctctttaagctacttccaattaactcaagttttatcactagtcattatggaagacaaataggaatgaggttctctcctaccactgagaatgaggtcagaatgttggaagaggtagaagaagtttattacaatcctgatggcatttgtagtcagctagaacctcagtgataagtttccaaaataaaagcttggcaattaagaacttaaaaaattttcagacctctcatttcacctggcctkgaatacttgtcttggtgttcaaatgactaagaaagaatatataaacttcatgtcataggattggacagacaataagcttccaataagtgttatttcctttaccccattgaaatttat

SEQ ID NO: 851865 - DNA, 581 bp, Homo sapiens
agtaatgtaggaagagcaatcagttcaacaccaagggttggatacttggcaatgctcaatacattcttaaagaatcattcattttaagtgagagtcacttcttttttgcttctagttcttaaagtagctcctcatcttgttgtgggtatactattcagcaagcagtaacagtcaccatcttttaaaggttctaattttcctctctgatttttttttcttgcatagtgtatagtaccagcatatacagtttctgagtgcatgaaaaatcgtcaaaaaagatacaggtagaacagaaagcccagaaataaaccctgctgtaattgcaaatgtttttcaatgagggtgccaagacctttcaatgaggcaaggatagtcatttcagcaaatggtactgagaaaactggatatcaaagtgcaaagaataaggttgcactgttaccgtacattatatacaaaaattagctcaaaataggtaacaaatctaaacctaaaactgtaaaactcttagaagaagacatagaagaaaarctttatgacattggatttggcaatcatttctttgttatggcaacaaaagtaca

SEQ ID NO: 851866 - DNA, 587 bp, Homo sapiens
cctgccagattggtatatttgttataattgatgaacctacatcaacatatcactgtcacccaaagtctataatttacattagggttcactcagtgttgtgcattctatgggttttgacaaacatataatgacatgtatccaccactgtagtattatataaaatagtttcactatactatgtcctaatgatgatgtgtgttctgcctattcatctcacctttctccccaactcattgcaaccactaatccttttacttcctccacagttttgcctttccagattgccatttatttggaatcataccgtgtgtagcattttcagattggcttcttttacttattaatatgtatttaggtttcctccatgtcttttcatgacttgatagctcatttctttttagtgctgcataatattccattgtctgaatgcaccacagattatttagtcaatcaactactgaagaataacttggttgkttccaagttttggcgattactacttaagctgttataaacatccatttgcagattttcatgtaaacataggagcatgattgctggatccgatggtaagagtaggtttagtt

SEQ ID NO: 851867 - DNA, 680 bp, Homo sapiens; identical to SEQ ID NO: 827553

SEQ ID NO: 851868 - DNA, 608 bp, Homo sapiens
cttaattttgtatcctgaatctttgctgaattcatttaccagttctaggaactttttagataagtctttaaggttttctaggtatacaatcaatcatgtcatcagcaaacagtgacagtttgacttcctctttattgataatgaaagaaatgaaaattaagaagacaatatcaacttgacttttcaatagcaaaataaagcagactggccatatcaagtgttggatggagtgtgtatccaggattttcttttactttgatggtagaaatataaactggtacaactgcgttggaaaacaatatacagctgacatttgcattctttaaaatctagcaattctactccaagttcaattcaaggaaaagcttagtacatgtgtcccccaaaacatgtacacaatagcactgatcataaaggaacaaaatggaaataatacaaaaacatatagacagaaaatatataaattatggtatcttttcacaatagagtatrtttagctacatgcaacaacatggataaacattagtatcattttgctgaatcaataaagtaagtctcaaaagacaacatacagtttgatattcttgtttgatattcttgttttgaaa

SEQ ID NO: 851869 - DNA, 629 bp, Homo sapiens
gtctttgaaaaattaaattcactgcctactttctagcataacccattaaatrctagataggtgtaaccatttggaaactggatttgagctggtggtgttatccattctaatcctcttggctttctttttctggtattccagtagtttctaagttacgctcatccattcaagcagcatttacccatttgtgagaaataattgttctcttgcaagaaatacgttttgcgcttgtgaaattcccagtaagaactgctgtcagcttgagtggacaaagtaaaacctacctgaaatggcgattgtttgatgtgactggggcatcttcccttctaagtgtcacgtcaggcaaacgatgctatagctactctgggtttttgttgtatcctgtctcaaaatagacataaaataatatctctaatccttgtgcactttgggttacagtcccacatgtcaaaataaaagccagccgggaattgctggaagtctcacgaaacgtcctctccccgcggtgatgcaccctccctctagactgaccagtccacacctgtggtgatgcattctgagagacagccagtgaaagtagctctttgccagtcatgtaagcccagtctggacatgtatggatccttaat

SEQ ID NO: 851870 - DNA, 630 bp, Homo sapiens
ctcaaattgtggtatccaaggaaagtcttggaaccaattctccagggatactaagggtcaactgcatttgcaaataagaaatcaagaaatgtccttctcctgcacaggcgcttcacttaaaagagattcaacacaaacacagcacagaggcacttgtgtgtgatataataacataaaaaattatacttggacagcagagaaatggcttcatattttaaaaactataaaatctgctaatgaaccacaactgattctgctgtagttttcttaatgcatccttccgtaaatgcacttgcactagttattataatacaatgatatatttcacacttgaaaacacaaaataattcctgtatctgcttggagattcatttttacttctattcaaaccaggttatacaaaatatatattacaatttaaaagaataagacaataatttctaaaattaaagtctatagtgaaagaaattactctataggtcttctctttaacatatctgractaaagagaaataagcttttaacccaggtagacactcactgagagaccttacatagatagaccttactaaaaggcatgcaagaaacagaatcactagtaaaaagcagaatgagaagtcaaacagttct

SEQ ID NO: 851871 - DNA, 596 bp, Homo sapiens
ctttcattgtctcactttgtaaatctaagagtttaacacagtgatttgccatagaatgtgcaatgaagacacacatacaaaagcactttttagaagctcatcaaccaaatggaataaggaaatgccatcttctgtcattctcagacctgaggacaggaaagtctactgactgtcaacaaaaaaaagagataagacacaaaataataaaaatcacaaaaagaggccaggcgtggtggctcatacctgtaatcccagcactttgggaagccgaggcaggcagaccacttgagctcaggatttcgacaccagcctggacaacatggcaaaactccgtctctacaaaaaatatagaaatcagccaagcatggtagcatgcacctgtactcccagctactcaagaggctgaggtgggaacattgcttgagcccatcaggtcgaggctgcagtaagctgtgatggcaccactgcactccaacctgggtgacagaaygagatcctatctcaaacacacacacacacagagacacacacacacacacacacacaaacacacacacacgaacagatgttcaacttctagtcatcactacagtttt

SEQ ID NO: 851872 - DNA, 490 bp, Homo sapiens
atctctttatctactcgttgattgatgggcatttgggctgcttccatatttttgcagttgcaaattgtgctgctataaacatgcatgtgcaagtgtctttttcacgtgacttcttttcctctgggtagatacctagcagtgagattgctggatcaaacaatagatctccatactgttttccctagtggttgtactagtttacattctcaccaacagtgtaaaagtgttcccttttcactgcatctatgccaacatctattatttttttaattacgaccattcttacaggagtgaggtggtatcacattggggttttgatttgtatttccctgatcattagtgatgttgagcatttttccrtatgcttattggccatttgtatatcttcttttgcaaattgtatattcatgtccttagcccacttttggatgggactgtttgtttttcttgctgatttatttgtggatcctgaatattagtccttggatgg

SEQ ID NO: 851873 - DNA, 590 bp, Homo sapiens
gagtggggggatttggagtcatggtcagggtttggatcccagatctgctgtgttccggtaattatgtgacttcaggggccytaagtgagccttcagaacccatttccttatctggaacatggagggaaccatctcttcaggtagctgtggttcatggaacaccagcaggtggaagccacccaaggaatggtggctgctgtgttatcacagaacgttagttctccagcagacttgagaagtcattgagtccagtggcttacatgtcttgacctgcagagcctcgtgtggacacttgttgtgtggaccagatagtagcagcacacctggggtggaggggcggggctggggcactgcgggaggcctggagccttgctcttcagtgctcttctctccccatcgaagctttaaggaatacagttgaaaagtgaagatagaattactatacaaagaggaaagtgaagaccagaggaggaaagtaacatgtctgtggtcacacagccaaaatccagttgcccagttcccaatatttctctccctactgcatcgtaagcctcagaaagtaacttataataaaaagctgttgctacagt

SEQ ID NO: 851874 - DNA, 526 bp, Homo sapiens
gttgaaggtgcaaacagtgactcaccgcagtgagcacttccttgctcccaggtgtggccgggccagcaggggcatgcatgccagacgcaccagggggccggtttgtgggtcagacactccatctcgacacaaacaagtggtcagaaaggccagcgcttcttggttttgtctctcaactgtgagttcatattggtcgtagccgggactaggggtcatcccaaggacagcttgaactcactgtgtggagtgggtcaggaaagctccaagatggaggaaaaccagctgcgaggtgggagggaacatagccctgcctgtcctgccaaggagaggcctggggatgacttggggagaagcagtcatggtcagcacagagggaggccttcacctgccttacaagctggcctgacctcaggtcctgcctggtcaaacagtgtgacatgcaggttgtgrctggaggaataggcgtggggccccagccccttgctatagttggcggccatagcgatttgctgacttcttgcaaaag

SEQ ID NO: 851875 - DNA, 656 bp, Homo sapiens
ccgagccacttggaggggttcctagagttgtggcccccagcttttctaaagggatggatgatagggtcaggggtagaggatttgtgatccttcaagtttgcagggcttccygtgttctaagtggtaacgatctgtcttctgcaaatgggttacagcgtgctgctgccagttctgaatccccagtagcccggacttgggtgcagttgaaatccatttccctttttgcctttagtgaggcatccccctcctccttattaaagaagaatacatgtcgctgccatttgccacgcatttgccatagacccaggactattagcatctttaacccacgtaaccacactggggatggctggggaatgttcatgtccccattttacaggagtggtgattaaggctcaaaggatggaggtgatggatcaaagtcgtctgccaagtggtggcagcattggttctcagaccgaggcccgtctacacagtgctgtgcctcctcccaccacgaatgcacgtggcccactctgcccacgcgtccctgggtgtgattatgaggcacttggggaggggcttgcttgcctcaggtgaaagctgggcttgatgcttccagcggatgtaaagtttgcaccaggaatggatccccagttccagagggacctccaaac

SEQ ID NO: 851876 - DNA, 442 bp, Homo sapiens
aagaagaatgcatgttgcaattctgtttgcattaatgtagctgtgtccctcaaatagggtgctactaaaaggaaatgtttcttagaatcagtgacattttagaatcaaccattastcaatcagctcctgtccttccaaccacggttattttccattccctcacaggggcttatttgcagtgtgttaagtttcttttgacaatacacactttctaagtgtttttaagggccttcaatgctaaaattgtgtctgtctcaaatctcaaaccagattcctacagtataagcatcatgtctgagagttcagcctccccagaacaatcctagctctgaatcccagtgtggttcgggagttgctcacttcaaagtgaagttgaattagaaaaacctaggaataaacaagcctctcttttgttttctgttgttctgaatataatttggca

SEQ ID NO: 851877 - DNA, 614 bp, Homo sapiens
tttattttggttaaggatatttttctactgcttgacatgttcagtwatttttattggatgatggacattgtgcgctatgttgttgaatgtctggaatttgttgtcttcctttaaataaagtagaattttgtttttaataggcatttaaactacttgtagatcagcttttttttgtttgtttgagggctatttttaagtattgtttgggtggatctatgttagcctttattccagggctatgttagtgccactatttaggcatgagacttcttgggtctctactgaatgcctgttgtagacaataaggcctcttctatgtgattagtcagaactggaatacatctctatcctgaatgagctttgagaattgtttagcctattgcttgtagtaggtagacttctaaaatgacccccaaagacattcacctttgtgtattcccctccaattgagtttgggcaggatgtgaatatgattattcttgtaactacattactttatgtgggaaaaaggaaaattttctaagatgggcttgatttcatctggtaagccctttaaaaagagatttatctgactgattgctgagtaaaaagtccattatctgaaaagcctggtt

SEQ ID NO: 851878 - DNA, 619 bp, Homo sapiens
agcctggtggtatagtacaaagcaaaatttggttatggtaggagcagtacagatacatctggatcacaatctaaattctctccagggaccaaatacatagatttaccccttgggttattggtctggtagactcttaatttttaatagggtttatataatctagacttcttataacctctgccccactggatataggtattactcagttgaagttaaaaattgaatataggattatatgcaatgctttatctataactttcttgtaaggataaactcagtacatctctggttttctaatattttggaggaaatgttacaaataggtaaggaaagtttgagcctcatttacgcatgagggtggacccctcctgaatgagattaatgtccttataagaaaaggccagagagctagctcactctctttcagcatgtgaggacacaagaagcccagagtctgcaacctgaaagagggccctcactagaacccaatcatgctgaygctgtgatcttggactttcaggctccagaactgtgagaaataaatttctgttgtttataagccatccatttcatgacaatttgttatagtggcctgaacaaagacaataggtataaaaga

SEQ ID NO: 851879 - DNA, 576 bp, Homo sapiens
atcagttgcaaagccataagagcaaaacagtcttccttgaagaagaagaaattcagtttcaagacagcagcatcagctccttcctgagagttccagcctgcgggcctatcctgcattcttccaacttgccaggacccacagtcctacaagttctgtttctgtggaaaaccctgactgatatctcattaatgtagacctccatgctaaaaatctaagagactacctaaacacttcctcctgccgctggcttttatacagttgtagacctttcaaattattcttcaaaataaatatcagatctaatcttgtaattctagcattcaagtctgatgtctattacctagagatcaaagtccagactcttaagtagggcaaacatggttgctcatttctggtctctgcttactagtccatttactgctgtactactcacttcccttgcacttatcacccagagggagatgcttccatatttttgaaggcaccaccatattttattcctctatgmttatgctgctcctacaacctcaaatatttttccttacagagcacctggcaaaaatatactcaatgttc

SEQ ID NO: 851880 - DNA, 248 bp, Homo sapiens
agatggaggctagataggaggctgtgagctgagtggagaaaatggcaacacatarcgaagaatttgagcccatagttggtgcacaaggacagtaaaactaagcaatgggagagaaatatgtcaaattattgctggggtgatttgatttactctttcaaaaatcattttcatgacagataaatggacacattacgacctttcccaacatgagtgtaagtaaatgcaaactcttataggagtataaattg

SEQ ID NO: 851881 - DNA, 633 bp, Homo sapiens
atgaaggtgtgggatttgaaggaagaaagcaacaaaatatggctggacctcagaagatagtgaggtatgtagatgaaggataaatctgatttcaaaaccatgagcaaaggccagaatagctctggtggtttaacgcccagtgctttttattgctttatgaaatacaaattgtgaagccttaaaattgtattgcgcatagcgaaacgtagggggagtcacctcggcccacagcccctctgtcttgttagttgttgttgtcccatccatgagaaggacaaagcggtgccatgaacacaggggaagaggagagacccagggatgaaagccaggacaggaaagatgaactcagtaataggaacaatgaggaaacagtgtggggagggaataaacatttatttcctaatacaaaccagatgctctaaatatattatctcattcaaccttcaccacagccacgaggagcagatagatgattgaagaaacacgaggttgaggaacttgcccaagaacacagaactgcattgaagttgagactccattcagaacctaataacacaacattcytctcctcgagatgggaaaaatagcacttgtaggatagaagaaaactgaagatgaaagttattacacaga

SEQ ID NO: 851882 - DNA, 515 bp, Homo sapiens
tgaacacaatatggcaggcaaaaataaaaaaaatagataaattaaatcaaaccaaaaatcttttgcaccacaaaggaacctatcaacaaagtaaaggaacaacctacagaatgggaaaaaatacttgctaaccatacatctgaataaggggttaatatactaactatataaggaactcaaacaactcaatagcaagataataaattacctgttttgaaaacgggcaaaggacctgagcaggcttttctgaaaagaatacatacaaatgaccaataggtgtatgaaaacatgcttgacatcattaatcatcacataaatgcaaatcaaaaccacaatgagatagcacctatggccattccctgggaatttagaattattactaaaagatttcagtttcaatatgtgcttaccttttgaagaaagaatctgtaaatgcctggaaatgycatcatataattttaaaaacagagaaagtcagtccatggagtcagagaagaatgaagcagatggtgaga

SEQ ID NO: 851883 - DNA, 577 bp, Homo sapiens
tccttgttaaaaataatgtagaaaatgcaaaaacataataaaaaaatccataatttccagacaccaaatataggcagacacccaattttccataatttccataatttccagacaccaaatataacccccataaaaatatagtatgttttctgaaacctgttttggtcctatacatgcaaagacatattcaatttctccatttgtatactcacaaacaaccctatatggtatagtagatttcataacgcagagacacacttacagtatacttgttaaaaaaacttctggcactataacttcaaaaacttatttttaatatattgatatttcatcttatggctgcacatagtttatttttttgttgttggatatttagctggtttccaattatttacctcagtaaataatactgtataaatctatgtgatcatggctataaaaatacatctggttttggtgtattccttttatgttaagatactagacttctkgtccaatattttcataaattgccatgaagttgtcacagagtaaattcacagttctatagatagggagtggacttctcctgaataaa

SEQ ID NO: 851884 - DNA, 577 bp, Homo sapiens
tccttgttaaaaataatgtagaaaatgcaaaaacataataaaaaaatccataatttccagacaccaaatataggcagacacccaattttccataatttccataatttccagacaccaaatataacccccataaaaatatagtatgttttctgaaacctgttttggtcctatacatgcaaagacatattcaatttctccatttgtatactcacaaacaaccctatatggtatagtagatttcataacgcagagacacacttacagtatacttgttaaaaaaacttctggcactataacttcaaaaacttatttttaatatattgatatttcatcttatggctgcacatagtttatttttttgttgttggatatttagctggtttccaattatttacctcagtaaataatactgtataaatctatgtgatcatggctataaaaatacatctggttttggtgtattccttttatgttaagatactagacttcttgtccaatattttcataaattgccatgaagttgtcacagagtaaaytcacagttctatagatagggagtggacttctcctgaataaa

SEQ ID NO: 851885 - DNA, 621 bp, Homo sapiens
agcctggtggtatagtacaaagcaaaatttggttatggtaggagcagtacagatacatctggatcacaatctaaattctctccagggaccaaatacatagatttaccccttgggttattggtctggtagactcttaatttttaatagggtttatataatctagacttcttataacctctgccccactggatataggtattactcagttgaagttaaaaattgaatataggattatatgcaatgctttatctataactttcttgtaaggataaactcagtacatctctggttttctaatattttggaggaaatgttacaaataggtaaggaaagtttgagcctcatttacgcatgagggtggacccctcctgaatgagattaatgtccttataagaaaaggccagagagctagctcactctctttcagcatgtgaggacacaagaagcccagagtctgcaacctgaaagagggccctcactagaacccaatcatgctgaygctgtgatcttggactttcaggctccagaactgtgagaaataaatttctgttgtttataagccatccatttcatgacaatttgttatagtggcctgaacaaagacaataggtataaaagaga

SEQ ID NO: 851886 - DNA, 605 bp, Homo sapiens
tctttgataatctaaatgggcttcatccaatcagttgcaaagccataagagcaaaacagtcttccttgaagaagaagaaattcagtttcaagacagcagcatcagctccttcctgagagttccagcctgcgggcctatcctgcattcttccaacttgccaggacccacagtcctacaagttctgtttctgtggaaaaccctgactgatatctcattaatgtagacctccatgctaaaaatctaagagactacctaaacacttcctcctgccgctggcttttatacagttgtagacctttcaaattattcttcaaaataaatatcagatctaatcttgtaattctagcattcaagtctgatgtctattacctagagatcaaagtccagactcttaagtagggcaaacatggttgctcatttctggtctctgcttactagtccatttactgctgtactactcacttcccttgcacttatcacccagagggagatgcttccatatttttgaaggcaccaccatattttattcctctatgmttatgctgctcctacaacctcaaatatttttccttacagagcacctggcaaaaatatactcaatgttc

SEQ ID NO: 851887 - DNA, 253 bp, Homo sapiens
agccaagatggaggctagataggaggctgtgagctgagtggagaaaatggcaacacatarcgaagaatttgagcccatagttggtgcacaaggacagtaaaactaagcaatgggagagaaatatgtcaaattattgctggggtgatttgatttactctttcaaaaatcattttcatgacagataaatggacacattacgacctttcccaacatgagtgtaagtaaatgcaaactcttataggagtataaattg

SEQ ID NO: 851888 - DNA, 633 bp, Homo sapiens; identical to SEQ ID NO: 851881

SEQ ID NO: 851889 - DNA, 619 bp, Homo sapiens
acacataatcgattatgtgtattataaaatatatgatacacataatcgattatrtgtattataaaatatatgatacatataatcgattatatgtattataaaatatatgatacatgtaatcgattatatgtattataaaatatgtaatacatgtaatcgattatatgtattacatattacatatataatagatgtattacataatatataatagatttgctaatgtagcaaatgcaatatgaaactgtcaagttaggagaaattgggagaaattgtctgaaggagtgacacttatctttcacatctggaatctagtacaatacattgctttattcttgtaaatatgttagtcaaacacacgttttgggtattaatgtttattctctacagtgtaaaaagagaatgcagggctgctaacagattccagtataaaagattgataatagagtcttaacaaactgctgggctgatgtgccactctaactttataagcctaaatttccctgaaaaaaaatttaagtaacggtataaaacttcaagtgccactttgtcattgttgttggttttaattattacagcaatcagtagccctcaagctatttcccccatcttcctgcag

SEQ ID NO: 851890 - DNA, 619 bp, Homo sapiens
acacataatcgattatgtgtattataaaatatatgatacacataatcgattatgtgtattataaaatatatgatacayataatcgattatatgtattataaaatatatgatacatgtaatcgattatatgtattataaaatatgtaatacatgtaatcgattatatgtattacatattacatatataatagatgtattacataatatataatagatttgctaatgtagcaaatgcaatatgaaactgtcaagttaggagaaattgggagaaattgtctgaaggagtgacacttatctttcacatctggaatctagtacaatacattgctttattcttgtaaatatgttagtcaaacacacgttttgggtattaatgtttattctctacagtgtaaaaagagaatgcagggctgctaacagattccagtataaaagattgataatagagtcttaacaaactgctgggctgatgtgccactctaactttataagcctaaatttccctgaaaaaaaatttaagtaacggtataaaacttcaagtgccactttgtcattgttgttggttttaattattacagcaatcagtagccctcaagctatttcccccatcttcctgcag

SEQ ID NO: 851891 - DNA, 534 bp, Homo sapiens
ctttgcctagagcaacgtcctggaatatttccccaatgttttcttctagtgctttcatagtttcaggtattagacttaagtcttcaatccattttgattagatttttgtatatgttgagagctaggggtctagattccctcttctgcatatggttaaccagtttttccaggatcatttattgaagagacttccctttccccattgtatgttcttggcacctttgttaaaaattagttggctataaatacatagatttatatctgagttctttattctattccattcatctatatgtctatttttatgccagtaccatgctgatttaattgccataactttgtagtatattttgcagtcaggtagtgtgatgcctctagctttgttctttttgctcaggattgctttggctactggggtcctttatttctgtgaagaatgtcattggtactttgatagcaattacattgagcctataatttgctttgggtgataytgtcattttaacagtgttaattcttccaacccatgcgcat

SEQ ID NO: 851892 - DNA, 426 bp, Homo sapiens
ttacttttttgtctacaaatttgttctgatcaggaggccccccctggagtctctgaatctgctgcgattctgggggctgcccaaattgtgaatcattcattgcttgattaaattcctttaaacttaawacagctggagtttttaatagatggtgtcagaagcagggtccgaagtagagctttaacgaccccaggagtgcggagtgaacactcaaggtacccgcaggacccacctgtgtccgctgatctctcagagcagctgggaatcatgggtaagttctctcttaaattttagagttccatggatttgtgttttgagctctctgagtttctttgaacaaatttctgttccaaactgggtttggaagtcacaacagaaactggactaggtccaggatcagatttgatccagtaattaactgtcttg

SEQ ID NO: 851893 - DNA, 525 bp, Homo sapiens
ctggtggcttccatatacgtctcctctcctgggctgcaagtaataactgctaattgcctggcattgctytaaagggatagttggaaatcacagccttcaggagaggcatctttaaactaaatgaaatgttgtgtggaaaagggtttagtcagtaagcttaaactgaagagtttaaaaaatactgatgtggctgggcacggtggcacacacctgaaatcccagcattttgggaggctgaggcaggtggatcacctaagctcaggagttcaagaccagcctggccaacattgtgaaactccgtctctactaaaaatacaaaaattagctgggcatggtggcaggggcctgtaatcccagctagtcgggaggctgagacaggagaattgcttgaacccgggaggcagagtttgcagtgagctgagagcaggccactgcactccagcctgggagacagagtgagactccatctcaaaaactaaataataaataaataaataaataaaatactgatgcttgggtccccct

SEQ ID NO: 851894 - DNA, 609 bp, Homo sapiens
cacaaacatgtctccaaacatgatgtttctagtacttaaacaaaaatcggataaggaaagccagtttttgcaaagcaattatgastaggttgattggaatcaaggagcaatccaaaatgagaaatgcccaacccaaagagacaggtgcttcaggaaataatttattcacttttttaaactaccatttagtgaacacttactaagtgtcagatacaatgctaagcattttacatgtcatattttattttattctcacagtaacctaattttaatataaggaaactgaagttcaggaagactctgtagttttcccagtattacacaggtagtaagtgatagagatgtgatcagacccaactctaccaataaattgaaagctgttctcactgaaaacatttaccataggatgtattaagacttgttcagtcagctcaattcatgtagccttttattgagaatgtataatgctgcaggattcatgctggagaccacacagaatatacagctgagtgagccacagtccctgcccttcaaccatgatttgtaagagaacagttggctgcggggaaatgagatacacaagttaacaagtaacagacaaggagtgga

SEQ ID NO: 851895 - DNA, 637 bp, Homo sapiens
gggagataatttttttcttattacgaagattccacatggttygttcttccaatacttggctatgggtaattctttcactcatccaaattctcagacttagatgaaacccaagggaagattgaactcatgcatcccagtaagattagctctttaatgtttaataatcattagggaaaaagagattccacaaccttccccaataacttgtctcagagttagattaaatagaaggaagacaataaggattattaaaattcctcatgccctatgcaagtctatttgcaaatgctaacgggtttctcaggaagtcaagcaatttcctttcttcctttctcccccacctttgctctctgtctctgtctctctgtctctctctctctgtctctctctctctctctctctctccctctctcgtgtgtgtataggttgtttgccctgcctgaattagggaagaaaaatgaggtcctccacataacctgaatcagatttcctatagtggagttgttaaggaatagagcttaggctttcagaaagatagattctgttacatattcaagctccactgtctgattttggggtagcaagttctttagcccctctgagcctcagtttcttcagcaagaaaatagagatgaaa

SEQ ID NO: 851896 - DNA, 583 bp, Homo sapiens
gttgagcaccttctcatgagcttgttggcaatttggatattcatttttcggaaatgcctgttcaagttttgactcattttttaatgggccgtatttctggatatatagtttttggagaaaagacctttgttgatttgtaataagttctccctgctgggcatcacctgaattcctaacccacaaaatcaacaactatttgtgataacacagcttgggaactgctgagtgggagaaccttctggtgaagcagctcacagtagagcttgggtcctagagatctaagctgtgatggagtcagtcagtgtggaagacagaaggatcctggttctctgtgatgggaattccaccacctctgggcatctaagatgtactcactgagacctagctctgcctaaccatggaaagcactgaataatactgaatacataaaaataaatgaagatctaggcccagaaagaggcatcctttctatagagcactttatgtggcttcctgctctaaggcagtcagaaaagagatcaagaagttggaaacagggccaggcrtggtggctcacacctgcaatcccagcaatttgggatgc

SEQ ID NO: 851897 - DNA, 608 bp, Homo sapiens
agcaacttttaaaatatatctgatgatattatccataaaaattttcccaacctctctagagaggccaacattgaaattcatgaaatgcaaagaaccccygtgagatactatataagatgaccatcctgaaaacacatagtcatcagattctccaaggtcaaaataaaagaaaaaaaatattaaagacagctagacagaaggggcagatgatttatagaggaacccccaacaggctaacagatatttcagcagaaaccctaaaattcagaagagattgggggcctgtatttagcattcttaaaaaaaaaagaaacttggcgattcctcagggatctagaaccagaaataccatttgacccagcaatcccattactggttgtatacccaaaggattataaataattctactataaagacacatgcacatgtatgtttattgcagcactgttcacaatagcaaagacttggaaccaacccaaatgcccatcaatgatagattggttaaagaaaatgtggcccatatacaccatggaatactatgcagccataaaaaggatgagttcatgtccttttcagggacatggatgaagttggaaaccatcattctc

SEQ ID NO: 851898 - DNA, 595 bp, Homo sapiens
tattgattgatgtctcatgtctccctaaaatgtgtaaaagcaagttgtaccctgatcaccttgggtacatgtcttcargacttcctgatgttgtgtcataggtgcatccttaaccttggcaaaataaactttctaaattcattgagacttttctcagatactttttggtttacaacgccaatactaaataatctaaaaaagaaattaaaaattaatgccatttatgataactacaaataaatacctaggaattaaccaaagaagtaaaagatcttgctaatgaaaactataaaacactgatgcaagaaattgaagaggacaccaaaaaaaatggaaagatatttcatgttcatatattggaagaatcaatattattaaactgtccatactacttgaagcaatctacagattcaatgcaatccccatcaaaatactaatgacattcttcacagaaattaaaaaaatactatcttaaaacttatacggaaccacaaaaaacccagaatagccaatgttatcttgaacaaaaagaacaaacctggaggaatcacattacatgacttcaaattatactacagagctgtagtaaccaaaa

SEQ ID NO: 851899 - DNA, 600 bp, Homo sapiens
aggtaggcaaggctaagctatgaagtttggtaggctaagtatattaaatgcattttagagttacagtattttcaacttatgatgggtttaccaggacatacccccatgtaagtcaaggagcatctgtactgtaatttattaaccatccaccatttgtggacattgctttttgtaattataataaataagacgtcaataaataacttaagtcactctgcactcatgtatatattatgggataaatatcttgaaataaaactgggaaatctaagttatatttatttcacatttcgatagatactgccaaattgtcttccaaaaacattcaatgtactctcccacacaaaaaaagtatgtgactgccagttttccatttccaatacaaagtatcaaattttttaatctctaacaatctgataggtgaaaactggtacctcattatagtgctaatttgcaatttactaagtataagtgaagatgaggctgggcatggtggcttatgcctgtaatcyaacattttagaaggccaaagcaagaggatcactagagcccaggagttcacgaccaacctggggtaacaaagtgaggccctgtctctac

SEQ ID NO: 851900 - DNA, 505 bp, Homo sapiens
tcctagaaagaaagggggcaaggactagaaggaggggttggcctggaacacaggagggacagcttctccctgctggctgtcagaaggaagtgacagtgggtacaggtagggtaccaggaggaggtgggtggtggagccctagtcatggtcctgattttctccctgaagctgatgagtccccctgctgagacggcagggcctggatcctgagcgtgaggctggggatgaggtgcaggtttggagcagcaactgctgcagacaagtgaagggattgtcagtcaaggccttggccacctaaataaactagaacttatgagttcaaggtgggccagctgccaacagtgtgtgatgtagttcagcagcctcgggcyggagtgcagaggcaggtcctggggctgctctgaggacatggactttcggttgaggatggtgttgggctcggagctcaagtctgctgctcgacgtgatgtgtcccatctgtgtggcaggtgcctcaatcaggaac

SEQ ID NO: 851901 - DNA, 613 bp, Homo sapiens
acatgtggtatttggttttctgttcccacwttaatttgctaaggataatggtctccagctctacccatgtccctgcaaaggacatgatcttgttctttttcatgactgcatagtattccatggtgtattatgtaccactgtttttttaatccagtctatcattgatgagcacttaagttcatttcatgtttttgctattgcgaatagtgtttcagtgaacatacacgtgcatgtgtctttataatagaatgatttatattcttttgggtatatacccagtaatatgattgctgggtcaaattatatttttgtctttaggtctttgaggcatcactatgctgtcattcacaatggttgaactaacttacactcccaccaacagtgtataatcattacttcttctctaaaactttggcaccatctgttgtgttttgactttttaataacagccattctgactagcatgagatgatatctcattgtggttttgatttgcattttttcatgattattgcccacatgtatgtcttatttgaaaattgcctgttcatgtcatttgcccactttttaattttgtggtttcttttttcttataaatttaagttccttatag

SEQ ID NO: 851902 - DNA, 590 bp, Homo sapiens
ggctcctttttcatttctgatttcatttatttagatctctgtttttttttttcttggctagtctagtcagtggtttatccattttgtttatcttttcaaaatcctaacttctcatttttttagacttcattttgtttagctctgatctttattgtttcttccttctatttctgagtatggcttttctagttctttgaggtgcatcattaggttgtttacttgaaacttctccatttatttgatgtaagcatttattgccatgtagtttcctttcagcgctgcttttgctgtatcctataggttttggtatgttgtatttccattttcatttgtttcagattttatttttatttttttctttatttctttattgacccagtggtcattcaggagcatgctgtttaatttccatatatctgtagtttccaaagttcctgtttttcactgatttctagtwctatttcattatgctctgagaagattttggtataattttgattttcaaaaatttgttgagacttgctctgtgttctaacctatgatctatcccgaagaatgttccatgtgctgatgaaaataatgtatattct

SEQ ID NO: 851903 - DNA, 611 bp, Homo sapiens
agagataatctgactttttctattattcaaccatatactttcttttgttgtttttatttctttaattttccacattgacagatataattgtatgtattcactgygtcttaaatgtataagcattgtggaatgggctcaatctagctatttaacatgtgtgttatatcacatagttattatttttgtggtgagaacactttatatccactaagcattttttaagaattcagataaactttcatcataagctttgcttaaataaaaaatctagtaagtgattcaagtctgtgattgaataatattccatatatttaggtagtatatggattcaaaatgagtagaaatattgacaaacatcccatgctaataatctactttgtaacttctcataaatctgtagaggaagtagtagtagagagaggaggggagataaggctataaataaacttgattccatgagtcacacaaagaaaaagtatcttttctttatggtaatgtaatatttaagacatttgtaatattcataattgtattactttctttacattatacatatatgctttttaaacatgagctgcatgataaattcaaagtttcagtgccatatgtaa

SEQ ID NO: 851904 - DNA, 565 bp, Homo sapiens
atgaaaactttgctcataaaaagaatttaagtaggactgttggctgttgcagagacagcggttgtccttaaacatcttttmtgccccctgcatatttcagacccctacaattaaaaagaataatgctataaattctggccagtttcatgtggatggaagtatcaggcaatgaacatcaggagcattgaagagctttcacatctttgtcaactgttgcaataactgacagtacagaagagatcacagactgccatcagcttggcttcttgagtgactgtgtagagggcaccgctaggtcacacatttgagacatgagatatgagaagaaggattttcttcagtttcgaaatgagtcagaaaaaaggaaaaaatgaaaaagagtaaagacacctatgggaattacagaacaccattaagcaaacacatattcatattacaggatttcaagaagcagaacagttaaagaaaaggacagtcagattatttaatgaaataattgctgaaaactttccgtcttaggagagatagggcaaccggatccatgaaactcaaaggtgcttgaata

SEQ ID NO: 851905 - DNA, 564 bp, Homo sapiens
aagcagacagaaagagcagagagtaaaacacagataagacagctggggcacagagggaggttgggggagagtctcttgggtaacttccaaacttcaccctcatacaatgggccccagtaaaacagcgggccttaataaacacatgcctttcccttcagatgcactaagatagggaagctaaaagcagactcaggggatatgcctgcagctgcaggaagatgtatgcagacagacacataactctccctcccagataagcacaacaaagagacacagaagcagtccaagcctctgataaactctcccaccctgaatccttaaaaactcttaatctgggccggggcgtggtggctcatgcctataatttagcacttagggaggccaaggcaggcagaatacgaggtcaggagtttgagaccagcctggccaacatggtgaaaccccgtctctactaaaaatacaaaaaattagcctggcatggtgtcrtgcgcctgtagtcccagctactcaggagcctgaggcagaagaatcacttgaaccagggaagccgagattgcatttaat

SEQ ID NO: 851906 - DNA, 645 bp, Homo sapiens
ggccggggcgtggtggctcatgcctataatttagcacttagggaggccaaggcaggcagaatacgaggtcaggagtttgagaccagcctggccaacatggtgaaaccccgtctctactaaaaatacaaaaaattagcctggcatggtgtcgtgcgcctgtagtcccagctactcaggagcctgaggcagaagaatcacttgaaccagggaagccgagattgcatttaatggagattgcaccactgcactccagcctgggcaacagagtgagatttcgtctcaaaaaaaaaaaaaaaaaaaaaaaacaaactcttagtctgtaagagagtgtggctctgacctaactcagccagctgccccctcaggtttatttaaaataagcctgtccctgttgactgaaaacccacccttcatgtttctctcctctttctttaatttttacagatcaccctccagcgaattatgctgagtgtaaaaaaaaaaaaaaacccaatagattatatactgtaaaattctatttgtataacattcttgaaaagacaagattacagaaatggagaacaaattcgaggtttctgggrgttaaagtcaaggtgtgtggggacgggtggaacggaagtaagtgtggttataaaaaggcaagat

SEQ ID NO: 851907 - DNA, 330 bp, Homo sapiens
aggcatgattgggactttaatgttccctttctttttttgggagtttcattcatatttaattttccagtcaatcctttttccttcacctcccttctttstccgtttaattctatgcatttgaatctatagaatcagtatgaaatattaaatatattcatcatcttcagcttagttcctattttcccttttcatctgtcacgagatgaatatgtgtttaaatgtcatttagcgtagttctgaatgtttttcagtgctagcaaatatatttgtggctaatttatgattcaacaatttgtcaattttaatcaaattgatagaatagtgctttta

SEQ ID NO: 851908 - DNA, 589 bp, Homo sapiens
cttaatgagaacagtggctttcttccaagtgtcccattcagaaatacatgtaaragaaactagagctaggatgaaaatatgactggctggctaaattatcttctcttgaaatcatgctccccttgaagaagccaattgcttctccaggcggtcaaggaagtcaggtttggaagttgctgtgaggctcagagctccaaagagcaggctgtattttgaaaatgtaagatcctagtaacagcactgccttccacgtgagttatgctatatggtttttcaggcgggcccatgccttcatccattcaaccatctctcctgactcctcctcacagcaggagctgctagggatgagactccagtcttagagttggatccatttcttccacctcctgataggacttctaggaccagaaacaggatggacatgccaatcttgtgttggagtgacaaatcacaatcatgtgtggatatgcttgcacactaaccttttggtacatgccttagacactagcctaagattcatttactccatggtataaccacgaatgtgtctttacagcaactgtggggtaggcagaagggtggtggtgtc

SEQ ID NO: 851909 - DNA, 605 bp, Homo sapiens
ctcatgacatttctgttgaataacaggctcttctctgtagcttttttaaaagaaattaagaatgtactttgttctaaaatacttaygagacttccttgtccataaatgaaatgtttctcctttcactgcattttccttatttctatttttgcacgtgacagttttgttcttgttattacctagttccgtagtaagagtgtggatgctattcatgccaatttgattgcttagggtgaatgattatgcaggcagacgacacataggcttttataatatttgttgcgaacttcactgagtccattaaccaggcaaatatacaatcttattatgttaatgagtctgccctggcaagggctgccttcgacgatcagcaaagtgcatcagtgtctttttagggatgtttcaggaatctcataaccagaactgatacattccttttgcagtataaaggtggcatcatgagtatttctggaaagaactggcttgcttcccttcctgcaatgactcagaggcccttccctgctggggattttaaatagaaggcgttctctctatcatgtttagatttcctctgttagcacacggaaaaatacatagtggatgtc

SEQ ID NO: 851910 - DNA, 625 bp, Homo sapiens
aacaggcattgaggtggcgagaaagaccagaccccagggtctggagttgctagcaactgagggagaagrtcaggaggtcagcagaagacaaaaaaggaagggattgcagatgggggaaccggctgggatgaggcatctggtgccagatatagctcagggccaagtactggtagtggtggacatcatttcttcataggagcaggaggaggatgggggaggagtgatcgggaggtggcaaccaggagcaaagaggacaagtacatgtttagcacccctagccctgaccagaagcaaagaggacgagtacctgttcagcaccaccacccctagccctgaggtataggggatgtgagaggaaacggggtttgttaaagacggttgcagggagtcagggtctgcaggagtcaggcggcaaagcaatccaggttcagattaagggagctgtggaggcggtggggaggggcttccagaaggtgggtgcgggtgcagaccccgagagagcacggggcttccaagtccagagcagcagcggcagggcgatgtgtgtctttgagaacgcctgttaccacaggccagcccacagagggagagagtgggattgacaataattgaagaagagaaagaa

SEQ ID NO: 851911 - DNA, 625 bp, Homo sapiens
aacaggcattgaggtggcgagaaagaccagaccccagggtctggagttgctagcaactgagggagaagatcaggaggtcagcagaagacaaaaaagkaagggattgcagatgggggaaccggctgggatgaggcatctggtgccagatatagctcagggccaagtactggtagtggtggacatcatttcttcataggagcaggaggaggatgggggaggagtgatcgggaggtggcaaccaggagcaaagaggacaagtacatgtttagcacccctagccctgaccagaagcaaagaggacgagtacctgttcagcaccaccacccctagccctgaggtataggggatgtgagaggaaacggggtttgttaaagacggttgcagggagtcagggtctgcaggagtcaggcggcaaagcaatccaggttcagattaagggagctgtggaggcggtggggaggggcttccagaaggtgggtgcgggtgcagaccccgagagagcacggggcttccaagtccagagcagcagcggcagggcgatgtgtgtctttgagaacgcctgttaccacaggccagcccacagagggagagagtgggattgacaataattgaagaagagaaagaa

SEQ ID NO: 851912 - DNA, 625 bp, Homo sapiens
aacaggcattgaggtggcgagaaagaccagaccccagggtctggagttgctagcaactgagggagaagatcaggaggtcagcagaagacaaaaaaggaagggattgcagatgggggaaccggctgggatgaggcatctggtgccagatatagctcagggccaagtactggtagtggtggacatcatttcttcataggagcaggaggaggatgggggaggagtgatcgggaggtggcaaccaggagcaaagaggacaagtacatgtttagcacccctagccctgaccagaagcaaagaggacgagtacctgttcagcaccaccacccctagccctgaggtataggggatgtgagaggaaacggggtttgttaaagacggttgcagggagtcagggtctgcaggagtcaggcggcaaagcaatccaggttcagattaagggagctgtggaggcggtggggaggggcttccagaaggtgggtgcgggtgcagaccccgagagagcackgggcttccaagtccagagcagcagcggcagggcgatgtgtgtctttgagaacgcctgttaccacaggccagcccacagagggagagagtgggattgacaataattgaagaagagaaagaa

SEQ ID NO: 851913 - DNA, 209 bp, Homo sapiens
cccaggtagaccccaattccgcccaagcccaggacttcacctctccatgcttgctgagccckagcatattgtgaaggtttccagagggggagaccatctgtctgctcgcgaacgcacatggccctcaggcagccgcctcttcctaggatcctgctctcataccctgtggggctggagcagccgctgcacagcatttggcagctggtgca

SEQ ID NO: 851914 - DNA, 390 bp, Homo sapiens
  misc_feature 13, 82, 108: n = A,T,C or G
taaattctgattntaaaaaggaccctaagcagttccttctttagccttatttctgtcttacaataccttatattcagctaanagaaagacaatgacacttttaccatnctttcttggaatccttttatccaaatgtacagattttaggatacctttcctgtctaagttaatgtgggcagcagtttcactaatttttctgccactacataacacgggttgttgtttttccagcctccaaagcaattttctcactacctttccaggctctakgaaacagtccgttgctgctttctggtgtctctgctccccactcctaaagccaagggcacatattctagattttgttatgacagcacatcacctctttgcatcgacttctgcatccattgt

SEQ ID NO: 851915 - DNA, 590 bp, Homo sapiens
actcccttttcattacacacagccgaagtgcagggctgtgcggtcagagttcttacacaagagccgggaccacgccctgtagcctttttgtccaaacaacttgamcttagtgttttagcttagctctcatgtctgcgtgcggcggctgccgctgctttaatacttttagaggccctcaaaataaaaaactatgctcaactcactctctacagttctcaaaacttgcaaaatctattttcttcctcacacctgacgcatatactttctgcccccttccaccacctctcagcaagctgaactcattgccttgactcgagccctcactcttgcaaaagactacatgtcaatatttatactgactctaaatatgccttccatatcctgcaccaccatgctgttatataggcaaaaagaagtttcctcactacgcaagggtcctccatcattaatgcctctttaataaaaactcttctcaaggctgctttacttccaaaggaagctggagtcattcactgcaagggccatcaaaaggcatcagatcccatcgctcagggcaacacttctgctgacaaggtagctaaagcagcagc

SEQ ID NO: 851916 - DNA, 596 bp, Homo sapiens
atccaaaagtagatgtttatgcaccttctatttacgacattggcaccaacmagccaattacagcagtggagataaggccatgaaatacagacataacttctggggtctactgctagaaattaaaagatagttcctaaagaatggggaactgctttaagttgagaaaccaatgcaaaagtatattttaaacgatttctgaaaaaatacactccatgcccatattacagaaattctcggtattatcctaataaaaaatctggaatagtctgtgagacagattcaactgcagtgtagtatataataaaaatagagtacctggttttaaataccatatatactgtgataataattagattcctatctccagaccagatattccctctgagtaaacagactcacagtgaacttccaacttcatatcctatgtgagtatctcaaagtcctaacatgtccagaaaatccttatgcctaccctactctttctcatactatgtttgttgctcaaacaaaaacccagaaatctatcctggatttctcaatttctgtcagcccccatactgcatccaaacttgttaattctggttccaaaatatatt

SEQ ID NO: 851917 - DNA, 465 bp, Homo sapiens
aataactatgacttccaaatcaagcctttagagagaactctcatttgaaataccgtatgtctatgctattgtagtacaaagtattcacatatctgtgtaaagactgcttgtaaacagattccagtaagttttatggaatggagtgggaggcaaggttgtgaatatgtaggtatcatacagcataaacaatctcctgagttcttaacaaagctctagattgcctatgctgggtatggttctaccattgagaactcttccactaattcagtcctatcacaaaaacttggtttttaaaagatgagccctccaaatacagagaaatgtgcatcatgaatattcttgtttaaaagtgttccattttaggccgggcayggtggctcacacctgtaatccaagcagcactttgggaggccgagatgggcagatcatttgaggtcaggggttcaggaccaacccggccaacat

SEQ ID NO: 851918 - DNA, 609 bp, Homo sapiens
atcatttattgactttggaacatatgtgtgtaagagtaataaatggttgaggtaatactggttgagtttaactgcatgttaattaaagtgatattatcatattttaaaataaacataaattaagaagataaattggaagaaaccacaacagttcagaactgagaagctgttgctatttgtttcttaaaacaaatcaagttatacaacaaagtcgttacaaagcacagaaagttattttgctgacatataaaatcctgctttctggcaagattatccaatgagtatagaatattcttgtgttcgctcttattaagggtagattagatactccaaaccttatttgtcacttgaagattgaaaaattgacactctactctttttttaatgaaattattttataaattgtattagtctgttcttacactattataaagaactacctgacattgagtaatttacaaagaaaagaggtttaattcattcagttccacatgctgtacaggaggcatggctagggaggcctcaggaaacttacaatcatggtggaagggtgaagggaaagcaagcatgtcttcacatsacggcgggagagagagagagagagtgcaa

SEQ ID NO: 851919 - DNA, 588 bp, Homo sapiens
aataaacacatttcaaagatttatttaactcattaatgaggcaaccagccaaatttagttaaaaygggggagagcatttcagaaatatagtcttttagaaacagcatgctaaaataagtgtgttaagttggaagaaaatttcagtatggtaatacccaacggtagataaaacttggtaacctttggacttctttttctttgaagctcttccagacaaaatcaagttaacacactttacagagtgtaggccctagccaaaataaacaacaagtcaaaaaatatatattcctgtatcagtccattctcacactgctgtaaggaactacccaagactgggtaatttatgaagaagagaggtttaattgacccacagttctgcatgctgtacaagaaacatggcagggaggtcaaaaaacttacaatcatggtgtaaagcaaaggggaagcaagcatgtcttaccgtgggggagcaggagagtgagggagaaaagagggaagtgctacacacttgcaaacaaccaggtctcatgagaactcactcactatcatgagaacagcaaggggtagctgcccccatgatccaatcac

SEQ ID NO: 851920 - DNA, 404 bp, Homo sapiens
ttttctcttacttacaattgtcttaacattttttctagcttactttattgtaagaatgcagtatataatacatataacctatgaaatatgtgtttatgttatcaataaggcttctgatcaacagtagggtattagtagagtttttggggagtcaaaaattatactttgatttttgactgcatggagagttgatgccatgcaagtcctgcattgttcaagggtcaactgtatttgtaaataatttatacttaaaagatttcaaagtattatagaaatacaataaactgttcagctcttgaaatgcatttcataggaaggcttatamattaatgcttaatggctaacttattttttattaaaaaattttttagtcaaatgattttaatcaacttataataaccagt

SEQ ID NO: 851921 - DNA, 634 bp, Homo sapiens
agaactacatttattgatcagacacrttcgctagaacctaactggaagaaatatcctgaaaaaatgttctaaagcccatcaagtatttgcaatttattttgctttcctttttttgtagcatgttctgtactattcaagacagtgcttaatggtgtcccgtaatcttggttcagtgggatatgatcctaatgaaaaagtaagtatttaaaagatattctcaacaactaaattaaacttatcatggttttactttctcgtctccacactgtgttcagtggacagatgagattttgttaaggctgtgtggtcattgatcactctagcattgtgtgtttctataggtgctcagtctttaggtattctgtttttcattgtgggccacagtctgaatctttttaattttgtatttatatctttagcaaaaattgaatgcatttacaatgtgtttcctttgtttccagcagaataactaagaaaacatttgttcttaaagactgggcatttgagagatttaattaaactattgagtttttctttcatttacttaatacttttttttttttttgagatggagtcatgctctatcacccaggctggagtgcagtggtgtgatctaggctcactgcaacctacg

SEQ ID NO: 851922 - DNA, 669 bp, Homo sapiens
ctctctgttcccgtggttgaaggatccatttctttkctgtttcccgaaaaactcctttcatgtttccttctcatcactgtgttctgttgatccttgctcctcaattctcctgccagccattttccctggaaatgttctaccattaacaagtgtctgactgtttaatgttctctctgaaagttcagaaaatgacatagacaatgtctaattattagcttgcacagtatgaccagcgtcaacattgttacattttgcataattttatggacagaatctgttttacttaaatatcatcagactaatttactctggatcaatgggcaggctgataacaattataagatgattgtgcagacatagcctattataggggcatatccatttcatcctaagtgatcaaaaaagaagtggcataatgttttgatgtattaactggtgcgttttattacactattttttgagatggggtctcactctgttgcccaggctagagtgcaatggcatgatcacagctcagtgcagcctcaaccttctgggctcaagtgatcttcccacctcagtatcctgagtagttgggaccacaggtaatgtgctaccacacttggctaatatatttttatgttttgtagaaatggggtctccctacattgcccgagctgatcttgaact

SEQ ID NO: 851923 - DNA, 481 bp, Homo sapiens
tttctttctcccttccccttccctttccccttctcctttttccttccttccttccaacagggtctcactctgtcacagcctggagtgcagtggtgtgatcactgctcrctgcagctttgaatttctgggctgaagtgatcctcccacctcagcctcccaagtagttgggactataggtgcacaccagcatgcctgactccatatatatatatatatattttttttttttttttttttttttttttttgggatagggtcttgctttgtcacccaggctggtctcaaactcctgggctcaagtgatcttcccatgtcagcctcccaaagttctgggattacagatgtcaatccctgtggctggcaggctctcattttttacctgagctatgacaatggccagctaactgttttttcttcctcaaggctgtgcactcctcctccaagcatacaccgtattacctctaaagtagtattttaagat

SEQ ID NO: 851924 - DNA, 481 bp, Homo sapiens
tttctttctcccttccccttccctttccccttctcctttttccttccttccttccaacagggtctcactctgtcacagcctggagtgcagtggtgtgatcactgctcactgcagctttgaatttctgggctgaagtgatcctcccacctcagcctcccaagtagttgggactataggtgcacaccagcatgcctgactccatatatatatatatatattttttttttttttttttttttttttttttgggatagggtcttgctttgtcacccaggctggtctcaaactcctgggctcaagtgatcttcccatgtcagcctcccaaagttctgggattacagatgtcaatccctgtggytggcaggctctcattttttacctgagctatgacaatggccagctaactgttttttcttcctcaaggctgtgcactcctcctccaagcatacaccgtattacctctaaagtagtattttaagat

SEQ ID NO: 851925 - DNA, 627 bp, Homo sapiens
ctggctctctttttaaatatgaaaaggctgggttccactggcatgtgtttcacccagctcattttcttcatctggctcatttgatcttaattactagggctagttcttgaattgcagcagcttgttttaaggmgcttatggcagaaggtgcaaagcacaggcagccgacaatgtgttactaaaaggagaagaaattttcttttacataagaagccatatgcagtccaaatttatccatactgtatcactgaaatgtgtattttaaaacttcatctatgatttttcacaggtatgggtttcattctcttgtgtatttgacaaagaacctccaaaaaacagactcagcttttttaaaagtccatttcaaaatattcccagatcgctcctattggcaacatgaagggtcctcacccattgcctcctcttggaaggtttttgttgcccatctcagatcatccttctccctacagctccctcagcttgtaggtctcaaaggtcatgttgtcaaggtgccgttttcttgaaaacagcaaaactgtgaaagttcccacattcctacaagagcggaagggaatgaaaggagagggagtttgctctttctctgggtcctgagtcctctggctgttt

SEQ ID NO: 851926 - DNA, 627 bp, Homo sapiens
cctttccatagccactctcatttttatcctggttcaaatgctgayaagccatggcttgtgactggcctacatagtagggagaaggggctgggaagcacaggtgaggggcaggcaggtcacttggcaagtggattgaaaatttgtagctggagcaagtcagaaacaaggccaagtggactggagtgtcttcccaggttctaaataggctcagagagatcacatagcacactagatgcagagttcagctgcagattttagctgagcaagcaacctgtaggtggacagaggacattggctctgagatgagtggacgcaggccattgcctacctgaggactgacatgaagcccttccctcccttcccaacacatagggcactctcctccctccacatacctgaacatcagcttaggaagaacagcagaagacagggaaagtatctgagagattcagtgtcttcatcctggagatactaagcaatagatgtaagagctgtttagattattaaataggcctacttttaaaccagattagacatttagtttatttcttccctggtaacctgtgggtgcgggaaaaagtctaaattaaagaccaaatttagcaagacatcatctttgcatatatg

SEQ ID NO: 851927 - DNA, 642 bp, Homo sapiens
taagcatcagaattctatgtgtataattagtaacgtacaaatgtaatgtctcatcttgaatatctgcatagttcagcccattatgaaaagatagcaggcagagtctgacattagaagaatcagaccgcccaggggaaaacgaatgaaatacattttacagccctttgatttcctcctaactcagaggggctttgattcctagtttaaaattataagatttattatcattcctcttgcaataaaaatatgctcatttttcaagtagtaatactctaattaagaattcaggaagaaattactgggacacaatgggatgtagagctttaagagctttcaaaaaaattatcagtagaaaccactggttatttagggcccatgacagatcttcttttgttttagcaagatataaaagagaaaatgatttgtatagttatcttcctttgtcagtgataaacgaagatggatatactatgacctatcctcacatatacacacatttgtagtgggaattgtttataaaaaccatggcacagaatgtggctctgtattgaaactgcgatggcccccagatatgtccyttaaatagcacaaggaagcagtgacctgtgtttaacaccatctctcattttttttagcacagct

SEQ ID NO: 851928 - DNA, 608 bp, Homo sapiens
agggaaccatcagtttcctctctggaaatgggaataagacctaccagcagggtaatgaggattaagtgaaatcatagccgtargaactcagaactgttctgccactacctcaaagtgagaacagcattcttcccccattcactctacttgactattcagactcaaaagaaagatgtacattaaatgaaatcagcttatcttatacatgaacctcctttatttaggaaataagctaaataatactttattctttgtaaacattgtgctcaaaggtgaacaccttgaaccacctaagtgaaattcagaaccaagtttttaacactaaatggatatgaatgattataacccaaatgaagtattacctagaagaaagatctcttgttagaaaagatactctttgtcctaaatccttcattaactgtaagtcatcttcatccatcatatctaaaggaagggcttcttcttcttcctcttcttccctctcaatccttttacctgtaccacacacacacacacacaaagaaaaattagaaacaagtatcagagatgtagaactctctgcattttgggtttaaacaggaaaagcttacgctttctgaagcaatcct

SEQ ID NO: 851929 - DNA, 577 bp, Homo sapiens
gcatctccaggatccagaggctctaagtggatgaaaacaattgggtgcttgggccagagactgtgcaagcctaagcagagagagaggggtttcttaacttccctcccacgttcagtccctttggaactcgagtttgcccctaggatagaagtctgtaaggctaccagctggaaccctttgctacactgctgtaaaggctgtgcagaaaaaaatgttggaattctctcatacttggaaaattaccctttaatacacatggtttcctctctgtttcctagccataggccaggatgttaactggggtggggtagaggcagacatttaattcttgttaagagggagtaataaaatgtgaagtgatagggagccaatctatcgttttctgaatatccacaagaggcttacatttagcaacaacatttagcaaacacatgtcaggcactgtttagttgctggggacacaacatccaacatgacagttatggcttctaccaagacgcagcttaaaggccagrgagaggcaatggtttgcggtgaataagagcacaagctttgaaatcagacctgaggtagaatc

SEQ ID NO: 851930 - DNA, 590 bp, Homo sapiens
ttaaatcaagcaaagaaacccaatggtccagcatcaaaaaggacacgtagctagttcattaataaaaacgtgctttatttcatacacactgttgwcagcagtattaaccggttcaattgttttggagtgacatttggcagtaagtttcaaacgtactcaacttctgacccaatgcttctacatttaggaatctgtcttatagttaacactccccaaatgctcaaatatgctcatataagaatgcattagcattatttgtaactacaaaacattggaatatgtttccattagcagggaatcagttgggtaagctgtggtacattcagcttccaattttgtacagcagattgagcacgcatgtttatctctcctcctaaaacattgctggtggtaaaggaatcaaaggaaataaaccacaaggataaagagaacaggagagaacataatagcaaacaaaagatgtcaaacacattttggaagccggaaagtgaatgaacagatgggatctgatttagcaaaacagagaacactgaaacctaatccaacatggaagggagacggtaagaaggaagccaaactgcagaatccca

SEQ ID NO: 851931 - DNA, 634 bp, Homo sapiens
tatagtgagagatggagtctaattttattcttctgcctatagttaacagttttcccagcaccatttattgaagagactgtcctttccccattgtatattcttggtgcctttgtcaaagatgagttggttataaatgtgtgaatttttatctggattctctgttctgttctactggtgtatgtgtttttttgtttttctttctttcttaagccagtaccatgctcatttggttgttagagctttgcagtcaattttgaagtcaggtatagtttgatgcctccaactttgttcttattgatctatacctttggctattcagggtcttttgtggttttacataaagtttagaacaccttttttttcctatttttgtgaggaatgtcattggtattttgatagggattgcattgaatctgtaaattgctttgcgtagtattgccattttaacaatattaattcttccaagccgtgagcatggaatatctttccattttctaatgtgtcctctttggtttattttatcagtgtgttayagtttttatcgcatggatcttttacttctttggttaaattgcttcctagatattttacattcattgtagctattgtaaatgggattgcctacttgatttca

SEQ ID NO: 851932 - DNA, 609 bp, Homo sapiens
cactgcctctctaaaatagtaataggtctcaaccagcaccaggaaaaggcattctgcctgtagatagaaaacacctaaaactggtgatcatcagtttcctataagatctcargagctgggcgagtgggctcaagcacgtgcattaagacacgaaatggcggagttgaccttccaggagcattccaccagtaaaagggaagaactcctcgggtgagcatgtgtacaactccagtaaacacactgcacatgctaccccccaaagggctagcaggccaccgtgcacgcgggcagctcaccccaagggaagaatcaagcgagaaggccgggcatggtggctcatgcctgtaatcctagtactttgggaggccgaagtgggcaaatcacctgaggtcgggagttcaagaccagcctgaccaacatggagaaactctatctctactaaaaatacaaaattagccaggcatggagcacgcctgtaatctcagctactcaggaggctgaggcaggagaatcacttgaacctgggaggtggaggttgtggtgagctgagattgcaccattgcactccagcctgggcaacaagagcaaaactctatctaaaaaaaaaaa

SEQ ID NO: 851933 - DNA, 609 bp, Homo sapiens
cactgcctctctaaaatagtaataggtctcaaccagcaccaggaaaaggcattctgcctgtagatagaaaacacctaaaactggtgatcatcagtttcctataagatctcaggagctgggcgagtgggctcaagcacgtgcattaagacacgaaatggcggagttgaccttccaggagcattccaccagtaaaagggaagaactcctcgggtgagcatgtgtacaactccagtaaacacactgcacatgctaccccccaaagggctagcaggccaccgtgcacgcgggcagctcaccccaagggaagaatcaagcgagaaggccgggcatggtggctcatgcctgtaatcctagtactttgggaggccgaagtgggcaaatcacctgaggtcgggagttcaagaccagcctgaccaacatggagaaactctatctctactaaaaatacaaaattagccaggcatggagcacgcctgtaatctcagctacycaggaggctgaggcaggagaatcacttgaacctgggaggtggaggttgtggtgagctgagattgcaccattgcactccagcctgggcaacaagagcaaaactctatctaaaaaaaaaaa

SEQ ID NO: 851934 - DNA, 634 bp, Homo sapiens
aacaaacaaacaaaaaaactccttcatctgaattaactagtggttgctayacctaccagagtcctttgagtcttttaaagtaaaacagaaagaacagaataatctagcacatagtaggcaatcaataaatattcactgactgaaagaataaagaacaaatattacagagtagctatccttaaaagctttctatgagaaaacccacttctgttacctagaaagacagaattaaatacatatatcaaaaagcataaacaaaattggaaaaaagtaagggaattctaagcagccaaaaataataaagaagcaaaaactagagggttaagcaggccaacagccagggataccctgaggacacaggcctggccagggaagccagaacctcaggctacggtgaccacacgagcaacaggaaataaggctgggcagggttgcagagtaggggaattgaagctgagaccactccacgtaaaaaactaaataaatactcaaagggctaataatgtcaatcaaaggataggctgttaaaaggatctatttactgggatagggagtccagaaaaaaactcatttttctcagtcttaaatctgagtggaaggacggtctctccttaaacatcagaaccacaggtct

SEQ ID NO: 851935 - DNA, 614 bp, Homo sapiens
atccaatgagaatctcagcagggtgtagcctgggcatcgggattgtcaaaatccctctgggtgactctctatagcyaaggttacacgttatggcttcagtactggggagccactgagggtttgagagtatgagtgacttgttaacagaagatgtatgggagatttgtgctcaggaggaagggaacttaaagagggtcccttctaggttctccatgatttggggagtcaggggacaggccacaggccaggggataaggcccaggacatgcacagccaggctctcctacagggcaccctgcccaccctgctccttccacccctcacagacatgtcacccacccagcaccctcccctgcacgctatggaaggggagtttggaaagcgaaggccacacctcgcctcacacccatccccttctcaccccatcccccaaacccacagcagctctccctgctccaggaagaggacgtggcacaggggtcatccctcgggcaccaggaacatctgtgcgagggcacagcaagccccagcctctgggagccggaaagggctgctctcctcacagctgggctgcagctggaagcccttccgcacaggaacacaacatcagccta

SEQ ID NO: 851936 - DNA, 549 bp, Homo sapiens
gctagtattaagttctccagcttttgatccttcaccttctttttgctttcagttgtcatgtaatgcctttgctttttcttgaatcatattagagtttataggtatgtctttattacagcaatcctgcacccacataaaagctgcattttaaatattaaatacaagggtatttcaaaacaagtgcaaagtttttatgcctgctgttgtggctgcagcaacaattttgctaatttccttctcttttttttttatgatagcccttatcctggattcatttgtcttgaaatgatggacaactgcagcagcagacctcaatctatggtacatatcaagcaattcaactttttcttgtaatgtaatgacttttctctaatacttggtaacacctccagcatctctagtggcacttcatatgggtcccctggtgttattcaagatttatggtattgcactaaatgcaattaaaaamaaaacaaaacatgagaaccatagagattctcacttagtctgggcaacagagtgagaccttttccccctcccccccccaaa

SEQ ID NO: 851937 - DNA, 621 bp, Homo sapiens
acagttaatatttttgtgacttccaaccagttgttcaatcatttctcaagtgtgatacgttttaatmaaaaacgaaacactttaggacacagatattgttaacaccccatttttactacatcttttctggaacaaagtttctggaataaggaacttttttaaaaagtgggggatggtacttatgatatttctttgtttgctggaatagagaaagtggaatgataaacaggccccaagttattgtaagaatgacatgtccctcgtctactttcataggtctgtttcttcggtaagccattttctgatctcgcttagaggattttattttattgactactttaaaagatatagtaaatctagtctatctggcattttattgaccaaaataatctagtaaatggcacttctgagtttatcagcaaaataatagttgacgcttataatgatgatggacagaggagaataggctaccagccaaaaggtcagatggcaaccaaagcagacgcccagattcaggaaatgtcagaaagtgacacttttgaagagaagaaaactctccttattgtaggactgcaaagtgtgattctgggggcattctaatactggggattaagggactcc

SEQ ID NO: 851938 - DNA, 638 bp, Homo sapiens
aatcctagtagctccaatgtcacatcaggttaacagagcctgcaggttttgtgatccatattaaacatccttccaaggaacagaactgcataattatacaaataaaataaaaaagtaggtggcaacgagggagacattgtgatgtgctgtaaacatgctgaattttcagtggaatgcagattttacagtcaagaaatctgataaaacccgctcttcctgcctcaacaatgatgaccaggtatgacaacatacttgacagatgtcagcttccactgttagccagtctatgaaataaggcaacatttctatctttccttaaattctttaacagaatcttgccaaactgtatccataattttaggcatttctacatgtaaaaaaattagaagtccatctacacttgaaaaaaaacagggatgcaaagttccctcattttgtcatcgattttgagtgacaatgtaaaacttgagtttgtgagtgatggcgtgtatctcagagaaagattatagccaattgtcyatgtatagtgatgaaaagtgaataatttttttaactgaaatgtttattaaatcaataaccaatataaaccatcattcctaaggatcccgttttgcttagtgattcatattttgtgttgg

SEQ ID NO: 851939 - DNA, 589 bp, Homo sapiens
tagatgtcttagttcttcatatcacccctcatgttctagtaggctatactaggttatttcacaacatggcgtyttagtattccaataagggaacagtgaaagccatgaacatcttaaggcctacatattttattggtcaaaacaagtcacaaagccagatgggattcaagggggtgggaaataggtccatcctcttgctgaccggagctatagtgccacattacaagggcatgtagacactggggacataattcattggtggtcgctattttatctactgaccagagaaggcaggtggaattaggtgacacctgcctcgcaagtccactaggagttctgtgcagaccagcttccaaacatcacagactatttcagaagcatcatctctatcatggaatgtctcattgtttgggaattactgaaacagtgattataaacatatctgaatttgtttgggcttcgtgatattggagacaagtatcttgagttctatcccaaattggagatcagacttctgttgaagttggccctgctaaagagcctcctgataaaagaaatcccacgtgtgaactgaagcacaggtctctga

SEQ ID NO: 851940 - DNA, 542 bp, Homo sapiens
ttggacatttaaaatagtcccaactttttgttattaaaaataagatggtgatgaatatcctcatgcataaattaatgtgctgctgtgattaattccttaggatacattctcaaaagtgtggtggctcacacctgtaatctcagcactttgagaggctgaagtgggtggatcacgaggtcggggttcaagaccagcctggccaacatggtgaaaccctgtcttttccaaaaatacaaaaattagccgggtttggtggtgtgtgcctgtaatcccagctactcgggaggctgaggcaggagaattgcttgaacctgggaggcagaggttgcagtgagccaagatcatgccaccacactccagccttggtgacagagcaagattccctcagaaaaaaaaaaaaaaagtgcaagtctctatgaaaaggyaaaatccagctctactgctcctgcagcaacagctatccctggcctatcagaaatgtctcatcttctccatacgaagcctctggatcatacacctagatccaagcaattcagtttcct

SEQ ID NO: 851941 - DNA, 564 bp, Homo sapiens
ctacgtcatcttttctctatagtcatcaactccttcctattttctaatttcttcccaagttcagaatgtgtgtccagtagtttagtaatcctcgaccttggatggatgcccactgcagacctctatgcctctgtgcctgcataatgcagctgtaatggtgctggcggggatgcccataatgctgcagatttttttagaatctatgtttataaataagatgagtctgtcatattttacaattacactgtcatctaatttacatgagtttactttttaaatgagatttggggcattcctcttttttcctattctctggaagtgttttataggatttgaattttgatcattagatgtgtttccttttccttttttttttttttttttttggtacagttgtaattatgttagtcatctcttggatgtgttttagatagaactttgttaaaracatctgggcctaataatttcaggcagaagtttaaagaaaaagtagatattaacccactgattcaatttctttattggttgtaagtcttttcagatttcccatttctacttaagtca

SEQ ID NO: 851942 - DNA, 515 bp, Homo sapiens
gcatactatcatatcactgagccatatcaaaatgaagaacacgctaatgtttatattatacttatttcttgaatcctgggaatatttcttctatgtacaatttatctcaaaatattaatatayactattgtaataatacaataataaaaacatcttattgtctcttctaagaaatcaaagctccttaacttattttgccttcttcaacctatatatagtcttgaattcaggaatgatataaaagagacactagagctcagaaggaatctgtgatttatccaggcttcagtgaaggataataaatataaacatacctgaatccatctattttgacccagccccaataccaccacagcaagccaacttgctatcatccttcacatggactaaatacaatggattcctaaccggactgtatttctgtacttgcttaccttcaattcactttctatgccaaaattagggtgatcttctacaatccaaatgcattcatacattcgcttgttttgcaagtt

SEQ ID NO: 851943 - DNA, 609 bp, Homo sapiens
cttccctccaatcaccatcaagtgcgagttctgttcttctcatccgtgcctggcagcatgtgccgtagggtagtacatagctcagtaatactgaactcacctggggagttggactgtgccttagctgcagggtaagaggagaggaaagaagatcattttgccctaagataactaacaggttaacactgtctcttaataacactgagtttagacaactggtgtattatttcatgtatgaatgttaacataagattcagaggggtctctacactacttagtaagaggatagaaataaggactagttaacaatcctggcttctcatggacttcagagatcagatggacacccccataagacattcatccattttctgagtgtttcctgtgtatgtggcattgtcctagaaactgtggggttggtagaagtgtgatagagaggagacaaagaaggataagacagcatttgcctcatggtcctgccgacatgctttggatgtgagactgctcttctgtraagttaaataacacatgacaacaagacagatgccatggggtgatatgtggttaattgtcaagtgatcgtttcaggctatgagctcgcagaagaga

SEQ ID NO: 851944 - DNA, 544 bp, Homo sapiens
ttaagagtatagtgcagcaattaagagctcagtttctggaattagacagkttagcggtcccaatcttggaggtgccttctgcctccctggagacagctgtttctggacaggggccagcgggccatgtcagggagacatgagagagggaggagggagacaggcggcagcaggagcagagctggctggacagggctttgtccacttgataaagctggcatgttccttccagctgtccctgtgatgctcgcttatgtctggttttctcatgactcagagccacagggcaggcctctccagcagtagggagaatttggatttggatatggtttgagaagaaatgaggtagaagactgtcttcctttgctgccacccaccacaactccccaggccagtgctggatcccttctggtgatcagtgagcctggggacagcctgccagttagagctggtgaccactttggctggaggtctgcaggagtgtacaggacccaagagccagagaatcattcctttctcctaggaagaggcaatgagaagccagaga

SEQ ID NO: 851945 - DNA, 607 bp, Homo sapiens
tatttatattgtaaatttaaatagccaaagcattccctagcaaccttttctttccttgatttttcctgaattcttgaatccctagccaacctatcattccaatggataaattagtataaatctgaaatgatggtggttgatatttttgtctacattgatgagcaaaatgaaagtaaaacagcaaagacatacattgggccctcatttgctcttaataacataatgacttccttgctgattaaataatcgttttcaaatactggaaaagagagccttagttgtttgtgctattcacagtgtaatggttgcaagcagaacatacttttattaatatttctctcataattttattgagtctatacaaccaatcaaacaataaataaggcctttatttatagtatttgccctatggtgttcatacttccaccgtggccaatttaaacctaccaatatgatgtcactgaatgcagaattagaaagcattttacattgttcagtttttcaccattacacagtcaatcttcaatatwtgtgtattctatacgtgtgaattacacttctggttaaaaatttatttgttaccccaaagtaatgtttatggtcattt

SEQ ID NO: 851946 - DNA, 456 bp, Homo sapiens
gtgttttttgtagagatggggttttgtcatgttgaccaggctggtcttgaactcctgggctcargtgatctgcctgcctcgacctcccaaagtgctgggattacaggcgtgagccactgcacccggcctatagttagtacatatgtttttacatttgtgattatagcaattaaacagttttgtatttggcttttctcatataattatgttctaaatatttttcatattttcacagtcttcataatacttaattttagtgatagcaaaatattctatcaagtaatataataaattgcttaaacattattgctattgcaattttagtttatcctcagtgttttttaaaaagttaattgcaggctgggcatggtggctcacacttgtaatcccaacactttgggaagccaaagtgggaggatcgcctaaggccaggagtttaagaccagtctgggcaat

SEQ ID NO: 851947 - DNA, 633 bp, Homo sapiens
attttgtttacatacatttcccaaattgtaattgtaaggctattaataattttyatagagtccccttatgtctcagtctattactttcataagctgttgtctgtcaagtttggggaaacctctacttttggattacatcatcctttgattattttcataaaataaaaacaggttgtcataaaaatgaaacagattttatgacacttggaccaattctagggttctatttgttctttgtttctcaaggaaatacaatatccagggaatatttgcatattatatatactgctttctagcattattgcctgaaggtggatggtttcagcagttctgatgatgatgaattctgaaactgcttggagactgggggacaaataacagttttatatcatacagctgaacctctatatagaatgtctgtgctgagggagaatttttaggcccacgggaggttttttcatgacctctgtccatagtaaaatccatttacaactttctttcactctagggagctataaagggataagtttcttcttaagtagaagttagacaaagaggttgaaggttctgaatattttttcactttctcttctaataggaaaggatacagtaaattttgcctttcgtaagaac

SEQ ID NO: 851948 - DNA, 623 bp, Homo sapiens
tatatgcacctaacactggagctctttagtttataagacaattagtaataggcctaagaaatgagatagtaagacaataatagtgggggacttcaatactccactgacagcattagacaggtcatcaagacaaagtcaacaaagaaacagtgaatttaaactataccctggaacaaatggagttaacaaatacttatacaacattctacacaaccaccacagaatatacattctattcaacagtgcatgttctttctccaagatagaccatatgataggccacaaagtgaacctcagtaaatttaagaaaattgaaattatatcaagcactctctcacaccacagcgaaataaaactggaaatcaactccaaaaggagccttgaaaaccatgcaaatacgtggaaattaaataacttactcctgaatgatcattgggtcagaaatgaaatcaagatggaaattaaaaaattcttcttactgaacgacaatagtgacacacctttcaaaacctctgggatagcaaaggcagtgctaagaggaaagttaataacctaacttttaacttaaaagtcaacttaaragttaaaagttgatgcctacatcaaagactgtgaaagagcac

SEQ ID NO: 851949 - DNA, 570 bp, Homo sapiens
cccaaagtgctgggtttataggtgttagccactgcacctgacccataattaaatctkaaagctccaaagtaatctcctttgaccccatgtctcacatccagggcacactggtgccaagagatatactcccaaggccttgggcagctctgcccctgtggctttgcagcatttagctcttgcagctgctctcaagggctggcgttgagtgcctgtggcttttccagccacagggatcgagctcctgctggctctaccattccaggatctggagggtggtggccctcttctcatagctcctctaggcagtgccccagtggggactctgtatgggggctccaaccccacattttccctctacactgccctaggagagtttctttatgatggcactgcccctgcaacaggcttctgctgggacgtccaggcttttccatacatcctctgtaatctaggcataggttctcaagcctcaactcttgcaatctgcacacccacaggcttaacaccacgtggaagtcaccaaggccctctgaagcagtggcccaagctgtacctgggcccctttgagcc

SEQ ID NO: 851950 - DNA, 592 bp, Homo sapiens
agtctctagggagttccaaatgttccctgatcttcctgtcttcttgtgagccctccagacttttccaacctctgcctgttatgcagttccaaagtggcttccacattttcaggtatctttatagcaatgccccattcctgcgtaccaattttcagtattagtccattcttgcactgctataaaaaaccccagaaactctgtaatttttaagaaaaagagatttaattggctcatagttctgcttctgcttctgcttctgcttctgcttctgcttctgcaggctgtacaggaagcttaacagcttctgcttctggggaggcctcaggaaacttccaatcatggcagaaggtgaaggagaagcaggcacatcttacatggctggagtgggagcaagcaagaaaacaagcaagcaggaacaagaaaaaaagagagggtgagggaggtgtgacacacttttagacaaccggatcttgtaagaatttactcaccatacaataccaaggggraatggtgctaaatcattcatgagaactccacccccatgatccaatcacctcccaccaagccctacctccaacaatggggattacaa

SEQ ID NO: 851951 - DNA, 577 bp, Homo sapiens
gaaaggggaaatatactattataatcttaattattaaatctctgttttttagtggatcgatgtcctggagctgtggagtggacttaaatcagggaaattcccattcctaggtggtatacagcccctgacagtctttcccttggagtgtaggcctttgttacagagaatactcaggttgtatttcgcagtggttacttttcttttcctccttgccagaactataaggggatccttcttggctctttactgtgagaatctggcagtaccataaaacccacaatagtgtggggactcccccataggacagcattctcctaggagtttcccactttcatgctattccacagtcagcctccagcaagtcatcaaaattaccatttaagtgtttgtactggattgaatttttatcctcaaaaaaggtatgtctgagtcttagcccttcatacgtgtaaatgttacattatttagaaatagttggcygggcatggtggctcacgcctgttgtaatctgagtactttgggaggccaaattggaggatcacttgagccaaggagttcgagacaagtctgggcagta

SEQ ID NO: 851952 - DNA, 577 bp, Homo sapiens
gaaaggggaaatatactattataatcttaattattaaatctctgttttttagtggatcgatgtcctggagctgtggagtggacttaaatcagggaaattcccattcctaggtggtatacagcccctgacagtctttcccttggagtgtaggcctttgttacagagaatactcaggttgtatttcgcagtggttacttttcttttcctccttgccagaactataaggggatccttcttggctctttactgtgagaatctggcagtaccataaaacccacaatagtgtggggactcccccataggacagcattctcctaggagtttcccactttcatgctattccacagtcagcctccagcaagtcatcaaaattaccatttaagtgtttgtactggattgaatttttatcctcaaaaaaggtatgtctgagtcttagcccttcatacgtgtaaatgttacattatttagaaatagttggctgggcatggtggctcacgcctgttgtaatctgagtactttggsaggccaaattggaggatcacttgagccaaggagttcgagacaagtctgggcagta

SEQ ID NO: 851953 - DNA, 595 bp, Homo sapiens
tatgcagcacctttgagaccaggattggtgggacaggtaatgatatcaaacaaacatctattgggtatttttaattctaaaaagatgaagaattgctgctttatggtttcaattgtaaactaagttggaagatgataaaccataacaaagctatcctatccatcatgtttgttcaaagtataggtcaatcaaattcataccctatcttccaatctcaattaagtcaatagtttctaattttggccactcaaacattttactcaaacaagcagcaaaatagactcttctgactttattcgcttatcttcttttaaaggagctgaagaaaataaaatgtcccaaaggcagaccaccaaagagaaagagacaagaaagaaagaggctgggtaattcataagctgaaggatcagaggtaggaaaaccaagaaacaaaacaagatgaacaagatatagctttctcttttatcttcttttcgatacctttgatcattattggtgattttagaatcttgttcaataggctgtgtcccatttaaatggacacagatgttataaaagaggrttttctgagaactacaaaaaatgagctaaagtc

SEQ ID NO: 851954 - DNA, 617 bp, Homo sapiens
cagcacttttaaaatatttctgttttatcccttcttatgttytctcttctcttgccttaaagttatttttttttctctttatggaaaaataggcaaaggttgctttgttgtatgtgagtggccacaggcatgtggtgtggattcagttcagtttgataaatattggttcaatattcttttattcagcacatatttatggagttcctctcatgtgccaggctttgtgctttgtgctagggacacaaacataaatgacatgcggtgcctgtccttaccctttatgtgtgagtttggggtaagagtaaagggagggaactttgagaataatggattagatatttagattgagcacttttgttgtctacactaatcctgtggtggtgcaaatgaggaaaagtttggctttattgcctgtccattcctatggcagcagccttacttcttggataggttaggctgaaggacaatcctcttcatttaggacatagctaaagataaaaccagaaagcgaggaagaaggcagtgccttcctgagctcacctgagtgttgccaagagaacagggttgaatctataagttggatgaaagattccagttttaaatgttttctagcctga

SEQ ID NO: 851955 - DNA, 582 bp, Homo sapiens
attttcgtcttagtgggatattatgatggactattgaaaaatgaatagaggccgggcacagtggctcatgcctgtaatcccagcaytttgggaggccaagatgggaagaccacctgagttcaggagttcgagaccagcctggccaatatggcgaaaccccgtctctactaaaaatacaaaaaaaatcagctgggcgaggtggtgagtgcttctaatctcagctactcaggaggctgagacaggagaatttggcttgaacctgggaggtggaggtttgcagtgagccgagatcatgccgttgcactccagcctagatgacaagagcggaactctgtctcaaaaaaggaaaaaaggccgggcgcagtggctcacgcctgtaatcccagcactttgggaggccgaggcgggcggatcacaaggtcaggagatcgagaccatcctggctaacacggtgaaaccccgtctctactaaaaatacaaaaaaattagccgggcgtggtggcaggctcctgtagtcccagctactcgggaggctgaggcaggagaacggcatgaacccgggaggcagagcttacagtgagc

SEQ ID NO: 851956 - DNA, 602 bp, Homo sapiens
atcggcacataatacaagaaagtatcctaagcaaagtcccaggcccttcataactgctcttagaatatgcggagtgttagcgtgttctgattaacaaaagtctaacatctattcttactggaataaaagagtgatcataacagcaattctgacccctcccctaaggttaaggaacaatgttgactgcttctgacataacatggtgtatttatcctgggtaggataatttgatgcttgccttcccacagaaaaagaaacgcttaaagtttttgggtttttttaagaaaaaagcagcaagtaggccaggcacggtggctcacgcctgtaatcccagcactttgggaggctgaggcaggtggatcatctgaggtcaggagttcaagaccagccaggccaacatggtgaaaccccctctctactaaaaatacaaaaattagccaggtgtgatggcacatacctgtaatcccaactacttgggaagctgaggcaggagaatcacttgaaccctcggargtggggattgcagtgagccgagatcatgccattgcactctagcctggtctacagagtgagactccatctcaaaagaaaaaaaaaaaaaa

SEQ ID NO: 851957 - DNA, 505 bp, Homo sapiens
tcgtagctactgacctgcccttttctcctcactgatttgcaaggattgccagcaacrgtttgcatttacctgtcagggctaacagtatactttcagttttgcctcaggctatgtcaattctcctgctctctatcacatttattctgcagagatgttgattgtcttgacgttccacaaaacatcacattggattacctcatggatgacagtatgatgaatggatctgatgttcatgaaacaccatatactttagaggccttggtaagatataaggtgggagataggccccacaaaaattcagggacctgccacctcagtatggtttctgggggctcaattgtcactcctccaaggcaaaaggaaagttgctggtccttggatgatctaaatgggaaaagagggagaatgtatgttcagcctttttgtatttaggagggaacatatgccacatttaaaaatgctttttgaattcatctatagagttatctctaaggctgccagtttc

SEQ ID NO: 851958 - DNA, 499 bp, Homo sapiens
aacattgatgggaatgaagagtgtctccagtgcgctcatcaatagactggacatggccaaggaaagaatcggtgagcttgaagaaatgtcagtagaaacttctaaaactgaaatgcacagagaagaatgaaygaaaggagcagaatattcaggaaccgtgggttaattataaaagttatgcatataatggaaatatcagaaggagaagaaagagaagaaaacgaaggaagtatttgaagtaataatggctgagaattttcaaaaattaatgacagacagcaatccacagatccaggaagctcagagaataccaagcatgataaatacaagacaaaatctatacctaggcatatcatattcaaactatagaaaagcaaagacagaaaatcttgaaagaagccagagaggggaaaaaaccttacctggagagaggagcaaggataagaactatcagacctatgttcagaaaccacgcaagcaagaagagaataaaatgaaa

SEQ ID NO: 851959 - DNA, 416 bp, Homo sapiens
tgtataaaaaagaatcagcaccattctatacaatctcttccaaaaaataagagagaacatttccccattcatttataaaggtattatagtattaaccctgatatccagagagtacctgagaaaaaaactacaggacaatattccttatcgatacacgaaaacaatccttaacaaactataagcaaaattcagcaatatataaaaagaattatataccatgaccaagtggcgcttattccagggataaaaagttcgttaaacattttttaaatcaagtaataaaatgcaccaccatatcaacaaactaaagaagaaaatcataaatcaattcattgaggaaaaaaaattgacaacatctaatacctaytcatgataaaaaccctctgcaaactaggaataagaagtgccctcaaatt

SEQ ID NO: 851960 - DNA, 522 bp, Homo sapiens
ggtggaagaatgtatttggtagaaacctagaatatatttaatgtcatatattgactcaaaaaagtaatggcttaacattttagacttcaattagatggaaaattctctgagcctgtttcttcacttacagcatgaacatgtggatgaattaaaagcttggctatattgaagataacattgttaacccattggagagttgggcacagaattttaaatgcccatacttacagaatggtagatcagtgttctttcctctatgccataaatgttatccatttatttttaagatagataactaaatgcaatatccatttatttttaagataaataactatattattgtctatatatagttaatatattatataactaaatatatatatttagacaagctctttctctgctgcccaggctggagggcagtgacatgatgatagctcactgcagcgtcaaacttctgggctcaratggttctcctgcctcaacctaccaagtagctggaagtacagacatgtgttccca

SEQ ID NO: 851961 - DNA, 547 bp, Homo sapiens
attaataaatttagacactttgtaggcatcraagattgatatcctgataacattattagactttgagcagaaaaagattcaaaagcatattttaaaaatatgaaacctacttattttatcaaaataaaaaatatttcacggtaaaatcaatcatctctcttaatgcagttcagcaaggtcatttcttgtaggtcttaatgtaacagaaaagcatttagctcaaaaaatttctggcaggtctaaagatgtttgaattttatagctgtccttgatcacctttcttggagtgggggttaagaggaagagggctgcaggtgagcaatgattacatgaatgataagttctttgatggatcgatttttttcacgtttttaatttagaaggtaaaactttctatcacaatttaagctaaaaattatggctgagataatagaggtctgattccagtgcaagttaaagaggaaaaagttgctgctcaaatgtcaagacatcctgtggtccgggatgattaaaactaaactgtttgctatatgaatcccaaggtgca

SEQ ID NO: 851962 - DNA, 504 bp, Homo sapiens
cataaaactgggatgctccattatgatgctaatttcaagcacagctggatccaggaatgactcrtccagaaattatttatcttttgactctgctcccttgtatataatgactttactgaaaggtagactgtatacatatggtggggaaaattgcagctggtaaccttcactgtatcttaggctacaattcaaaagaaaaatcaggtcatataagaaaacttaattgataccacttgagtaaaattctcacttccaaagcaaacaaaattacaggaaatatattaactagctttttggattaaacagcttggatcacttcagtgccttacagaatgtgttagtccactctcacgctgctgataaagacctacccaagactgagcaatttacaaaagaaagaggtttaatggacttatagttccacatggctggagaggccacacaatcatcctggaaggcaaggaggagcaagtcacgtcttacgtggatggcagcaggcaaaga

SEQ ID NO: 851963 - DNA, 504 bp, Homo sapiens
cataaaactgggatgctccattatgatgctaatttcaagcacagctggatccaggaatgactcgtccagaaattatttatcttttgactctgctcccytgtatataatgactttactgaaaggtagactgtatacatatggtggggaaaattgcagctggtaaccttcactgtatcttaggctacaattcaaaagaaaaatcaggtcatataagaaaacttaattgataccacttgagtaaaattctcacttccaaagcaaacaaaattacaggaaatatattaactagctttttggattaaacagcttggatcacttcagtgccttacagaatgtgttagtccactctcacgctgctgataaagacctacccaagactgagcaatttacaaaagaaagaggtttaatggacttatagttccacatggctggagaggccacacaatcatcctggaaggcaaggaggagcaagtcacgtcttacgtggatggcagcaggcaaaga

SEQ ID NO: 851964 - DNA, 606 bp, Homo sapiens
gaaacattaataaccccaaactgtttaattttaaaggatatttaaatcttaatactagtcataaggtgacctatttgaccactggatggcttattgcaggcttcaataattttgttgccatcattagtaaaagtcgttaaccaagaaaaggcttaaatatgtatggattttctgctttatttacccttggattgcgtactgctttgaaattatttttccatagaacaggaatacagagatgctatgcagtgatgttttaggcttggatgcagaggaggctggctgtgaaaagggtgctggcctgccagtaagagaccatgctttctgtccagagtttctaattctgcaagtcagttcatcaagtcagatgaccaccttgtaaacatcaggccatcagtaaacatcggggcatgtttttcactataatgggaaaaagaatgaagaggtgactcccacttggagcagcacgttctccagtgaacacattgggacatttatttatatgatgatccaccctctgggttgctwcataacagagaataggggactgagaggacaagctgcatgacagaaaatgttctgtgagagagagaggtaagcaggcag

SEQ ID NO: 851965 - DNA, 512 bp, Homo sapiens
aaagcagaaggcagacaagttgctaggctattgagaggtgtgtttacatgragaaataatttcaagggaggaagccatgtgtttatacctcatcaatattaactgaacttgaaataatgaattgtgacattgcccttgatagtggatcaaatcacgacctccatagtgcctgaatttcactaagcatggttgcttaatgctatttcccctcacttaaattttacttgctcatgttctccattgtgcattgtgttcatcatctcttacctagactgttgccatattctcacacatctacctgtctccaaagataagcccacagttaatttgagtgcaaatggatgttcatctttcaaaaggtctttttttggagaggggggcggcgaatttaggccaacaaggttattttgctatgtctaccctaaaactatcaaaaagcaggttcttctgacattcatcatgaatagaaatatattaatagagttgttgtaaggactagaggaatacatcca

SEQ ID NO: 851966 - DNA, 511 bp, Homo sapiens
tttaagaatatttaaacaatttaattatcccctaagaatttcactttgaacagttttagtgtggcaacccttttccctatctccaaagtaggcagataaaaatcactgtggggatgtagtcctaccctagggatgccaacttccagacatgctaataggtggccagggtgttatactggttttgtctcctggacataagacatgctgaaaatacataaaaaatttagctcatcacctggatgactccttatgttaaaaaaaatcaactctgtgtatttatatgttggggctcaataaataaaatgtggggattgaaggatcttctaaaccatattatttccaatgaaccaggaaatcactacatttatatatttttaagtctagaaaccacttaaatatccaacagtagggaattggttaagtaagttataaatatccrtatttagaaactctacacagctaccaaaattttctgtcgaaggaagctagttaatatagaaaaaaaggttca

SEQ ID NO: 851967 - DNA, 493 bp, Homo sapiens
caatactctgacaggtccacagataattgtttattgcttgctgaaaaaaattccacagtttgttttaccaaattccatcatgatgtataatgagtatctgggkcttatagatccttttacgatgtacctggggtttatagtgtaacctaatccttaatacaaataatatgaggcttgtcataagactataggagaagcctgtaaagtttatggaagtctcctaccacaggccaggaactttacaacagacctttcagtgaagacatatggaaaagaaaaagaaacagaggtagaaagatagatagtgttatcaaattgtattaatttatacgtaatgattccttcacttctgaattaggctttgcatctagctaatccctgaacactcattgactttcaatgtataagaaagtacttggtaaaagactgcttctaaatctgaaaaggttcaaatagtctacaattcacaatttctttatatgtataggcatgg

SEQ ID NO: 851968 - DNA, 493 bp, Homo sapiens
caatactctgacaggtccacagataattgtttattgcttgctgaaaaaaattccacagtttgttttaccaaattccatcatgatgtataatgagtatctggggcttatagatccttttacgatgtacctggggtttatagtgtaacctaatccttaatacaaataatatgaggcttgtcataagactataggagaagcctgtaaagtttatggaagtctcctaccacaggccaggaactttacaacagacctttcagtgaagacatatggaaaagaaaaagaaacagaggtagaaagatagatagtgttatcaaattgtattaatttatacgtaatgattccttcacttctgaattagkctttgcatctagctaatccctgaacactcattgactttcaatgtataagaaagtacttggtaaaagactgcttctaaatctgaaaaggttcaaatagtctacaattcacaatttctttatatgtataggcatgg

SEQ ID NO: 851969 - DNA, 529 bp, Homo sapiens
tagtatcttatatgcaggaaaggaatttgccttaaaaagaaatgttgggtactaaaatatcaaataggcctttttttccccagtgaggaatgtttcaatatgtaaaactactttgttttagaggtactaaattaatcataaaactgagtaaaagcagaaagaaagtgatctattttaaggataccattttagtgatttctaagctaatagaattactttttaaagaaattgtaataatttataaaataccttctagctgaaagcctgtcatttgtagcttaattcaattcctacagtattttcatgaggcagtttaggggaaagaaaaactggtgctaacatacaggattcatgctcagcatgttataaaggtaagaaaaacatgtctagtatgtttagtatagtatagttttgtggtaaagacgcagacttcagcatcagactgcctgggtttaacttcagattctactrctagttgggtgactttgggtaggtaattttgtcctctgtgcctcagtttgctcttagg

SEQ ID NO: 851970 - DNA, 630 bp, Homo sapiens
ctggacttctaaatgataaaaaagsaaaaagatatatgaatagaattttaatcacatggtaaacaataaagcacccattatagaaacagcataaataagaaacaaaacatagactacctaaccctgtatgtatggtgtgtgtacgtttgtgggtagttttaatgaaatttaagaaatgcaaacttactaagtgtgcattttcctgtacctgttagtattgaaatagacaaatatgcttagcaagaaaggaaaaaaattggggtgggtaaccaataagttgataaataaggtcctaaataactgagagtttactgtagtttaagcagtcacattacttctttttagcaaaacagataaacgatcacatctgtaattaaactctggtctgattgcattgctatatctaagtgtttgcctctggtgtaataatgtgctttctcaaataggattgcttttctattgctctttattcctgaatgacctggtctttcctgaaccagggagaaaatgtgctttataatgaaataatgatttctttcaaggtttaacagtattatttgctaagttatctcttttagggtctctaatgatgcctccaggcagtgaaggagttacttttcctcaagaaga

SEQ ID NO: 851971 - DNA, 586 bp, Homo sapiens
tttattgacttgtgtgtgttaaaccatccctgcatccctggtatgaaacccagttgatcatgatggactatctttttgatatgttgttggattcagttagctagtactttaaggattttagcatccatgttcatcaaggatataggtctgtagttttcttttttggttatgtcctttcctgattttggtattagggtgatgctggctttatagaacgaattagggagggttgcttctttctctatcttgtgaaaaggatctctgtcaaaaggattggtaccggccgggtgcagttgctcacgcctgtaatctcagcactttgggaggccgaggcaggcagatcacgaggtcaggagatcgagaccatcctggctaacgtggtgaaaccccgtctctactaaaaatacaaaaaattagctgggcatggttgtgggtgcatgtagtcccagctacttgggaggctgaggcagcagaatggcatgaaccyggaaggcggagcttgcagtgagctgagatcgcgccagtacactccagcctgggtgacagagcgagagtccgtctcaaaaaaaaaaaaaaggattggtac

SEQ ID NO: 851972 - DNA, 640 bp, Homo sapiens
ccacagccaatatcattttgaatgggcaaaagctagaagcattctcttgaaaaccagcacaagacagggatgccctctgtcaccactcctattcgtcatagtattggaagttctggacagggcaatcaggcaagggaaagaaattaaagatattcaattggaacagaggaagtcaaattatctctgtttgcagatgacgtaattgtatatttagaaaaccccattatctcaggccaaaatctccttaagctgatgagcaacttcagcaaaatctcaggatacaaaatcaatgtgcaaaaatcacaagcattcctatcaccagtaatagacaaacagagagccaaatcatgagtgaacccccattcacaattgctacaaagagaataaaatacctaggaataaaacttacaagggatgtgaaggacctccttcaagaagaactacaaactactgatcaaggaaataagagaggacacaaacaaatggaaaaacatttcatgctcattggtaggaagaatcaatatcatgaaaatggccatactgcactgcgcaaagtaatttatagattcaatgctattcccacaagcyaacattgactttcttcacagaattagaaaaaaactactttaaatttcatatg

SEQ ID NO: 851973 - DNA, 551 bp, Homo sapiens
attgattcaaaaatcctcaacaaaatactagcaaaccaaactcaatgttatgttaaaaatattatagaccatgaccaaagggtatttattcccggaatgcaacagtggttcaacatacaaaaagtaatcaatgtaatacactacattaacagaatgaaagggaagaaaatcacgtgattatctcaaatgatacagaaaaagcatttgacaaaattcaacaccccttaatgataaaaaaaaaaaacactcaataaactggaatagaaggaaactagctcaacgtaataaaagccttatgtggaaagcacacaacaaacatattcagtcgtgaaagactgaaagctttttttccaaaatcaggaagaaggcaagatgccactcacccctcttctattcaacatagtgctgaaaatcctagtcagggcaattatcccaaaaaaaaaaaaaaaaaaaaaaraaagaaaaggcatccatgttgtaaaagaagaactgaaatgatctctgttcacaggtaatatgatcttacatctagaaaaccccaaaatttcacc

SEQ ID NO: 851974 - DNA, 567 bp, Homo sapiens
ttcctaccattttacagctgcctctctgactttttaatttttgctagtttggtaaatatgtgtaactgtgattataattctcaytttcttcattaatatattttcatatggttattagccattcttgttttctcttctatgaaaatacagatggccaaaaacttcaaaaccttaaatgcttgttcacctctcttgcctgcttttgctttcattctttctttcattgttaattgattcttgatagattctacatactgatcctttgtcaattttatatgttgcaaatatcttcaggcttgtggtttgtctttcattattaaaatagttgaatagggttaatattgttgaatttatcaagcttttcctttatgacttatgttttttccatacccctaggtgataaagatattttttatgtagaaatttaacattgtttttcatatattcttaatccatctgaaatcattttttctaaatgatgagaaagtttcctacataagtagccagcattccagcactgtattgaagagcccttctttcccccatctcatctgcagcatcctatat

SEQ ID NO: 851975 - DNA, 650 bp, Homo sapiens
aacactctgtacatacactcctcctggcagtaatttgtttggagaatgataatcctttggtgattgcaagtttgtagcatcagtactttggttttccatataaatggaacttgaacagtctccctgtctagtgggaggaacaatatagtctgctcagctaactaaagttctcagtggtgcagcctgagaccagccacctgcctgtacttgtggcctggaagcttaaatgtcatgatcgaaatcttcaccatgacttgagtgaacatttagaagctggggtaggcttctgagaagggcaagaacactatttcgaataatgtttgaagaatgcttcatagtgctgtgtgaaggtacagttgggtaattcaggaagctcatgccattttttgtttgaagtttttaggatttagacttaggctttgaaaacagaggaaaggaccaatgtgaaaagcagagacaataatataaaaggaagcaacaagatgaaatctttgtgtttaggttctaaaacttccataaaatgtggagaamcatcactgttgtttattagagaatttgaggataacctggacccatggttgaaaattcagttgtctgaagtatgtactgttaatgcttatgtttttctacgggtcaaggaaacatataat

SEQ ID NO: 851976 - DNA, 570 bp, Homo sapiens
catccagagattcttgttgtatttgtaggttttctgtctctttattgatatttccatttcattcatacatcattttctcaatattttcctttgtatttttttttgttggaaaatacatacttgattctaatcatcgaatttcctccttcaccaaggtttgctgtttctttgttgttgttgttgttgctattgttgttttattgctgttttaactggtttaggccgtctctgtgccaagaataagcctgagttataaacttcaggtcttttcagtttctttctgagcctttccctgggcatgtatggttaatttctaattttcctcatagatacatttgttttgaatgttctagtctttaatgtctggctcacaaaaggaaaggaagaaaaaaatggagggagggaaaaggggtactaaccctttaaatcccctgaaaggtacatcagccagagggaaaaagggcttgaagaaatggagggaaytgcagtgacaatcgtcactgactctttctctgcacctctgtgatcaaaagcagcaatcagagcatggatccctgatgtttgggatca

SEQ ID NO: 851977 - DNA, 663 bp, Homo sapiens
tctcatgactttaagggaactacaatgttttatttagtcagtaattgtgctttgaaacactgatttttaaaataaaattaatgggttgaattgatttaaaaaacccatcattttcatttgataaaatatccccacttttctaatcatctccacttaagtaataagcttaagtttattttttaagagaggttttcaaaattatgattgaagcttatgatacttaaagatctaagagaagacacactgaattatcagggtagaggtaatacactcaagtctggaatctgccaataatcagttgtttgattaaaactgtcatttaatttctctgagtcttctttttcctctctcataaaatacgtaggttgaattacatggtatttaagatcctttataatgtcctgttgtatttccagattaataaaaaacaatatggtttgaatttacaagactatctcactaaatctggggttgctaaacctagatgacactttgttaagtgtgaaacatgtggatttaaggcaaaaaatggtagtagtattttacaaaatgggtaactacattttgaattcarcatttccacatatgaccatattttgttcctcttttctgggatacccactagtacaatagtaaaaaatttaaaaagcttgaattcacaag

SEQ ID NO: 851978 - DNA, 663 bp, Homo sapiens
tctcatgactttaagggaactacaatgttttatttagtcagtaattgtgctttgaaacactgatttttaaaataaaattaatgggttgaattgatttaaaaaacccatcattttcatttgataaaatatccccacttttctaatcatctccacttaagtaataagcttaagtttattttttaagagaggttttcaaaattatgattgaagcttatgatacttaaagatctaagagaagacacactgaattatcagggtagaggtaatacactcaagtctggaatctgccaataatcagttgtttgattaaaactgtcatttaatttctctgagtcttctttttcctctctcataaaatacgtaggttgaattacatggtatttaagatcctttataatgtcctgttgtatttccagattaataaaaaacaatatggtttgaatttacaagactatctcactaaatctggggttgctaaacctagatgacactttgttaagtgtgaaacatgtggatttaaggcaaaaaatggtagtagtattttacaaaatgggtaactacattttgaattcagcatttccacatatgaccatattttgttcctcttttctgggatacccactagtacratagtaaaaaatttaaaaagcttgaattcacaag

SEQ ID NO: 851979 - DNA, 635 bp, Homo sapiens
actccaaggatgaccagattcccaggtcactcactgcctcccatgctcaaaaacctcatgactccggatcttccaatgcttcaaacttcccgtgtaccctccggacgtcacagtgcatgctaggacatytccctgtgtgtcctcctcttctgtccatgctcctttccttctgtctctaaaggaattctggatcccctcctaagacatcgcatgcctgtggtcatgccgtggaccttgttgttaccaataattcccatcccccaatcgcaagttcaagcttttcactggttacctccccatctcctccttccagccctctccccggtaccctttccccacagtccatgtctttgggagctaaaagtatgggctctgtcacttcggctctgtctccatggttaaccatcacaatcaccctcctaccctgctctcattttatctgacatgattagatgccttggaaaacgacaagcacggttaaatctgcctccgcttactccatacctgctcccgtacagccaaacataggatgagaaaaaactcacgagctctctggatgatctaacttgagattcgtaaccacagacttagcaaaaggacattcctcccgtttattcacactgtcattatcctca

SEQ ID NO: 851980 - DNA, 635 bp, Homo sapiens
actccaaggatgaccagattcccaggtcactcactgcctcccatgctcaaaaacctcatgactccggatcttccaatgcttcaaacttcccgtgtaccctccggacgtcacagtgcatgctaggacatctccctgtgtgtcctcctcttctgtccatgctcctttccttctgtctctaaaggaattctggatcccctcctaagacatcgcatgcctgtggtcatgccgtggaccttgttgttaccaataattcccatcccccaatcgcaagttcaagcttttcactggttacctccccatctcctccttccagccctctccccggtaccctttccccacagtccatgtctttgggagctaaaagtatgggctctgtcacttcggctctgtctccatggttaaccatcacaatcaccctcctaccctgctctcattttatctgacatgattagatgccttggaaaacgacaagcacggttaaatctgcctccgcttactccatacctgctcccgtacagccaaacataggatgagaaaaaaytcacgagctctctggatgatctaacttgagattcgtaaccacagacttagcaaaaggacattcctcccgtttattcacactgtcattatcctca

SEQ ID NO: 851981 - DNA, 576 bp, Homo sapiens
tgaatgcccatcaaatgatggacaccacgttaaggtgggaagtgacttaacatgtttcacatytttaggaagccatcaatatcacaaaaaatcatcaggaaaccataaaaaatccaaatgcagtgtgtgaaatgctaatagatatacatattaatataaaattatgtcagtgacaaaaatgagaaaaaaagacatttcggcatcatttgtgttataatatttccaatgcaaacaatgagttatcttgagggagaaaagatttctcggcaaagggaagaccaagaatgagatcaccctccttcccaatgcacacacccttccttccttgccctgcaacctggaaggtcccttcggacaaccacaactttgcaggcctttcaccctcctggggccatgctccttcccctcacctacctgagtgagactcagctcagactcctcctggggctgaccagcctggaggggaacatgcagccaacctacaggttacgttgaacatcagttgtgtcaccctcaagtgaccctcacccccaaagtggcatatttcccagccccatgcatttccactttcctagg

SEQ ID NO: 851982 - DNA, 553 bp, Homo sapiens; identical to SEQ ID NO: 833240

SEQ ID NO: 851983 - DNA, 432 bp, Homo sapiens
caaattcatggattgcaagaagggatgaaaaaataggatccaattacatggcatttataatagactcactttggatttaagggtatataggttgaaaaaaatggaactatatatattttatgcaaatggtaaccagaagtgggtggacatgactgtactaatatcagacaaaatcaactttaagtcaaaactattacaagagacaaagaaggaacttatatattaataaaatctttaatacaacaataaaatataataattataaacctatatgcagcaaacatcagagatctaaaacatataatgcatatatttccataattgtaaaggagaaatagacagctgtttrataatgaatagaaaaaaagacaggagattaataaaaacattgaataacaacactatagagcatgtggttctaacagacataca

SEQ ID NO: 851984 - DNA, 496 bp, Homo sapiens
ttgaacatgatgtgaacatgtaggatgcctttggatccatgaggacctctgagaggtgagctttttcataaggaggtgcatgctaataagcccaaggtgtggcaatgaacttcttgttccagatccccacatctcacccaggcttgtcttgaccttacagttgcttaaaatccctaagtctgttttacacaaaacacatttcaagcaactctcccttacatcgtatataaaattgatttcctgaatgagaacacaaaatcttttttatttatctaagttttaatgtaattatttttagttgaaaatttttaaaatatgtttctgccattctatttactatccatctcatcttggtgtcagagtccaaagtccaatgasactgtagttattaatgtggaaaaatggatagtgcatcagaattgactttaaataggaaataagtccatgttaccaagaaaagagaacaggaagggaggtgctcatgggagagccagtg

SEQ ID NO: 851985 - DNA, 580 bp, Homo sapiens
cacaaagaggtagggcaaatttctacaatgccaggccccttggcagcattttcaggaactgcagctcatgactagtgaaacgatataatcaagacttgcaagatgtgaaaggcacagttcagcttggtgactcggggtaaatgttttattgctcacccggagaacagtgccaccagtcttctgtcccagggtgtgctttccacttactggataacaggagtttggattcttaattggctaaagaggatcgttttgcttggctgattatttgtgctttgaatggaagtgagaagatcttcagattttagagcgtgtgttagagtgtgtgttcaattctaagaaaagcacttcatttgtctggttaaattagctgcgccagttacatatgtcttaaaattgaactaaaacagaccaacattggcaagatcttggagttcattgaagagaaactaaactaaatattttcaaattgtaatggtgggtaaaactaaagatctgaattgggctacaggggtttataaacttaggattctatgggaaggggtaaagaaattaatycttcagccaaagttctttcaag

SEQ ID NO: 851986 - DNA, 575 bp, Homo sapiens
gtggcataaacgactgccacagaagggattgtgagtctgaaacctatcccaacccagatctcatgcaaccagcctagatggtggccaagtacatgaaccaatctctaacatctttaacacttaaggatcaagagagaaggatcacacactctatctctggagctttaacacgtgggctgccttaactccaagatcttctgagaaagagctcccatcagcacccttggatacagcaactggcaccacactctgaaccgattgagcttctccagcaaaggcaagacttcccctgtgtgtccctgtcttccactgaagctgcccccacagttctaaataacctcatttcttgaatcctctcaagaggaggctcagatgcttctgtgtatctgtgtggccttatgccatcaaagatgcttcagcatccagctgctctggtccactgtgaccttgtgacattatgtgactaayaccagatcttttcctactgttttgaccctgggaccctaaggaagtacctgagggaacaagtggaatgagttttaatcctgcaggctttgtgcgacttgaatgacagc

SEQ ID NO: 851987 - DNA, 581 bp, Homo sapiens
catgtggcattagctgaccttgccgggcacagtgttattattgtcattattttttcttttttgagacagagtcttgctctgtcgcccaggctggagtgcagtggcgcgatctcggctcactgcaagctctgcctcccgggttcacgccattcttctgcctcagcctcccgagtagccggggctacaggtgccggccaccacaccacactaattttttgtatttttagtagagacggggtttcaccgtgtttgccaggatggtctccatctcctgacctcgtgatctgccctcctcggcctcccaaagtgctgggattacaggcgtgagccaccgcgccctgcccgggcgcagtgttatttggggctgttgacctgaagtaggtctgactgagatgctttgagttacaagcactggaagcaaattctgacgtaagcaggaaagatggttccatttactcatttataaawcagactggggtccatgcttgatagagagagggggagaaacttgcaggccagtgagaaaactgggaaagggtggtgctcccacagttaacaacaagcacatgggtgtcaagtac

SEQ ID NO: 851988 - DNA, 718 bp, Homo sapiens
gcattccttttcatggctgagtagtattccattgtatatgtataccacagtttctttatccacttgttgaytgatgggcatttgtgtgggttccacgattttgcaattgtgaattgtgttgctataaatgtgtgtgcaagtatctttttcatataatgacttcttttcctccaggtagatacccagtagtgggattgctggatcaaatggtagttctacttttagttctttaaggaatctgagagctgtttctgattgtcttttttttttttttttgaccatcagcaacagctgaaattatgaacattatgaacacatccttgtctttttgacattacgaacatgtccttgtcttttttatacatcttatttattgaaagttcttataagtaatcagctttaaaatatttaaatgtaattatatgggctataaattaatgaaaataaacattcctaagaggaataacaaactggaacatataacaattaaaatttttttccaagggtagtttttaattaaacaattattccaaaactatcaagcttgtttaaaaaccaagaagcatgaaagtgaaaagtactcacctctctccccgcaaacttcattttctagatttgacctcaaccacagtctgtatgtttaactgagctttaaaatgttacttgcagtactgagataagagattccaaagggaagggaaaatctgcccaaaggcga

SEQ ID NO: 851989 - DNA, 491 bp, Homo sapiens
tatgtataccacagtttctttatccacttgttgactgatgggcatttgtgtgggttccacgattttgcaattgtgaattgtrttgctataaatgtgtgtgcaagtatctttttcatataatgacttcttttcctccaggtagatacccagtagtgggattgctggatcaaatggtagttctacttttagttctttaaggaatctgagagctgtttctgattgtcttttttttttttttttgaccatcagcaacagctgaaattatgaacattatgaacacatccttgtctttttgacattacgaacatgtccttgtcttttttatacatcttatttattgaaagttcttataagtaatcagctttaaaatatttaaatgtaattatatgggctataaattaatgaaaataaacattcctaagaggaataacaaactggaacatataacaattaaaatttttttccaagggtagtttttaattaaacaatta

SEQ ID NO: 851990 - DNA, 361 bp, Homo sapiens
atttgaaatatcagtatgagctcataatgtatttttctctttttaaaaaacccataatttttagctctatgaaaagatttagagcaatggttgacccaattgtaatgagatctctagcatccaaatttattctygaatactgtttcccagtaaaaggaactagggctccttgaagaaatgcctgattctaggtttaaaatcctgtttgtcagcaacagcagtaaatgaacaaaatggacctggaaatttttttcatatcagaaagcaaggaatttatcaaagatgattaagatcatgccaaaaaaaaatcagtggccaacctgaataagttctcatcaggcaaagatggaataatttgagc

SEQ ID NO: 851991 - DNA, 555 bp, Homo sapiens
tccagtggctccctgccccttgtgaaacctcacagtttgaatctgcttagccacgggtctttccccacttgcctgttgccacagcgaaagaaagacacctgtaactccatctgcactgatactgagttctttggctttgggcagagctctcaaccaacttggctgttaagcaaagttgctccaagtggcaggttgcttccctgcagggtccactagactttgctctggtcactgggctggtcacagtcttagtccctgacccaggtcgtcttgttctctgttcctaagaggacccagtgagatcatgtccctatctcagtacaatctcctcctcagaaattcagagtcaacattctgaagatgactaattgacaccatctggcatcatgagctatcatatcaccatccaagatgaatttccagaataaatgactaaggagagcccccctgccaaccgccaccacctcacacaccttcaaactatgtttttactttagyattgcttgtatagtgcaatgagaatccactgttatgatataagcattccatgatgta

SEQ ID NO: 851992 - DNA, 638 bp, Homo sapiens
ctgctctcttcagagccagcagacaggaatgtttaagttagatgaagctgtgcccactgccaccccttcccccaggtgttctgtcccagggagatgggagttttatgtataagctcctgactggagctgcttcctttctttcagagatgccctgcccagagaggaggaatctagagaggcagtctgtctacagtggctttgcggagctgtggtgggctccgcccagttcgaacttcctggaggctttgtttacactgtgaggggaaaaccacctactcaagcctcagtaatggcagactcccctcccccaccaagcttgagcatgccaggtcgactttggactgctatgctcacagcgagaatttcaagccagtggatcttagcttgctgggctccgtgggagtgggatctgctgagctagaccacttggctccctggcttcagcctcctttccaggagtgtgaacagttctgtctcgctggcattccgggcaccactggggtatgaaaaaaamactcctgcagctagctgggtgtctgctgaaatggccccccagttttgtgcttgaaacccatggctttggtggtgtgggcgcctgagggaatctcctggtctgcgggttgcaaagaccgtgggaa

SEQ ID NO: 851993 - DNA, 530 bp, Homo sapiens
cactttacatagaagaactagagaaagctattaaataattttttaaaaaactgtaggtccatataattgcataggagacttctaccaaaccttcaaagcccaggtagtmccattggtcaataaactgttccagagtatttaaaatgaaaaaaaaaaaaaaatcccgattccttttgtgaagcaagtataacattgataactagattttataaaaagccagaaaaagaaaacagaaaaaagaaaaactacagaccaatatcactcatgaatattattacaaaaatgctaaatattagctaacagagtcctacctcacattaagaaaaacagtacactatgactaagtgagacttattccaggaatgcaaggttagttcaatgtttgaaaatgcattaataattccctatattaataggaataagaaaaaaatcatgatgaaacatatagagcacagtccccacaaatgctcagaaagcctttgacaaaattcaattaccaatcctaataaaaacactttttaaaaaatgtt

SEQ ID NO: 851994 - DNA, 751 bp, Homo sapiens
agaaggactaatatccagaatctgtaaagaagttaaacaaatcaaaaagaaaaaaaaccayaaaaattccattaaaaagtagacaaacggatatgaacagacacttctcaaaataagacatacaagtgaccaacaaacatatggaaaatgctcaacatcactaatcatcagagaaatgcaaattaaaaccacagtgagatgccatctcataccagtcagaatagctattatgaaaaaagccaatagataacagatgttggagaggatgtggagaaaagcaaatgtatatacactgttggtggaaatgtaaattagttaaacacttttggaaaacattatgggcatttctcaaataactaaaagtagaactaccctttgatccagcaaccccaccactatgtatatacataaaggaaaataaatcattttatcaaaaagatacctgtacttatatgtttattgagcactattcacaatagcaaagtcatggaattgacttaagtgtccatcaaaagttgactggaataaaaaaaatgtggtatgtatacactgtggaatactacacggccataaaaagtaatgaaattgtgtcctttgcaacaacatggatagagatggaggccatgatcttaagtgaaacaactcagaaacaaaaaaacaaatatcgcatgttctcacatataagtgaagtacacatggacataaagatggaaataatagatattggggactccaaaaggtgggggctggg

SEQ ID NO: 851995 - DNA, 416 bp, Homo sapiens
cacctgtttttatgcatgaatttctcttttcaaactctcagcaggtatctaaccactaaagcacattagrctatttacacaaatagatcatttttagcttctgggctctataatggcacctaagaatgttcttttaaaattttttcaagaggaatgaggtacagcaaggtggtggtggaaggtgccctgactaaacttctcggcacttttcccatttctaccctaaaaggatgaaggattagaagaacaggaaagtcagtatcctgccagaacagggggtgaacacattagcccagtcgctggtgttttccctcagtgggctctctcgccaacagcttgtcacatcagaaatgtaactcagttaaacattaggccaggggatgtgcataataaactagtttccttgtctgaaaaat

SEQ ID NO: 851996 - DNA, 583 bp, Homo sapiens
tggaattataacccagagtataaaataaccatcaatgagtctgrtataaataagtgattaacaagtaaataaatggggagaagagactaatctaccacacaaaatatttccaaaatagtttatgcacacattttaccttcaagaaggtagagcatgaatttttactccttaagggtagcctgtgcattgtacttccttacaaagagtacagtatggaaagggggggggggaagagtaactttgcagtggagcaacctgacaaatactgtcctggccaaatcatccaggtcaacatcaacagtgacccttaatagtatatacccttaatataacatgagagtggcactttatctccatggtcttccacccaataacacataacccagtctaatgaaaaagtcagacaaatcccaattgaaggacattctacaaaatatctaactagtactccataaaactgtcaaagttaccaaaaacaggggaggtctgaaactatgtcacggtcaagagtaacctaaggagacataaccagtaaacgtaatatggtatcctggatgggatcctggcacagaaaagagacatt

SEQ ID NO: 851997 - DNA, 605 bp, Homo sapiens
tgaagggaaacttccctttttaaaaccatcagatagtgtgagacttactcactatcatgaggacagcacaggaaagatctgcccccatcattcaattacctcccactgggttcctcccacaacaggtgggaattcaagatgagatgtgggtggggacacagccaagccacatcagcactcatatgttttgtgttactaaagacaattctttatttttaagtcttgtcctgtgcatagcaggacatttagcattcttgacttcactcaccaaatgctatcagtctttcaatcatcatagcaaccaaaaaaataaccccataaatttcccaaatgaaccctggtggaagttcacctcatggttctaaaatattccaaagtggaactcatcttttatcacaaatcaagggtgtatgtgtgtttatttttacttttgtatttatacatgcacacacacactcacatgcacaggttaagttctcactttgtgttatggtgctgtaaacrtcatcattgaggcagatgttgtgcaaactaattttaatcaacaggataaattacaattataaactgatctttaaatcgttttcaaaatattaaaagctttg

SEQ ID NO: 851998 - DNA, 612 bp, Homo sapiens
tttgttccttatctttctatggtaagaagctatgaaaacagcagagtgagtgaaatggtagaagaagacagtcttgtaggctcctaaaattcttatcactttgtmgagtgttctctcctcaagggtacaaacgatgtcttcattgcctggaaatgatggcgcccttgttctttatccaaagactgatgggggaaagagtaattcatttaataacatggggtcctcattacagactggccaccaatataaagcttcgaatttttttaaaatgcccactttgttttagagtggttcatggaagcttttcatagttttcacaaatgatgatcaatataataaatttataaagcccatttctttcaagtagaatcagtgatagaattattatacatattcattttaaaataaacatcttctctctatcttcagagtcaaattattaactgaggaacatactgaaaagaagaataaaatgagtaaattaatttttcctccagagatagttactagtaatactttggtatacgttcttccaataagtttttctattcatatttacacatttttaaaggttatctaaaatataccatctgtaacattttttcactacac

SEQ ID NO: 851999 - DNA, 627 bp, Homo sapiens
cctatgaagataatctcacttagcattttaaccttttcccattgctcaatcagagcaaaacaaaatatttatatgaacaaaatgcctatagtgatgatgatggacaaatgacacrtctttaatcaattgccaaattttttgattaaaggaacagcattcccttatacctgaaataaggtgaaaaatgataaaagtgatttttcttcagagtaaaatgcaatttatttttgccacagacttgtaatgccagtgttgtaatttttctttttggaattggtttttcttttaaaggcatcttaaaagtatataccataccaacacaaaatacagtatgcattttagtatatgctggagaagaccatacttaatgtatgaaatttttgtgatcgtgatggacatatgcatgaagatattgatgcatgaagtcatatttgtatatttgaaatatgcagacacaaagaatactttaaattgtgttgtattgaggaggggaaagaattttactcagtaagctgcagccatgagcactgaaatatggtttcagagagaagatgtttggaattgttctaataggctaagtgattccaaatgcaagtccatatcgcagactcctaggctctttgtgag

SEQ ID NO: 852000 - DNA, 601 bp, Homo sapiens
tgtgtgtgtgtgtgtgtgtgtgtatgccatgctaattgaatagacttcgtaatcctggaataactttacatttaacaattttcaaggcattgcataagtacatttggaacttgcaagaagtcagcaatttgtttttagacacatgaagactaagttgtgatgaattaataaactcagaggctgttgtgtcaattcactctgaaagatctcacattacaaacctaatggaacaaaaattgttttagcagttaaaaccaagagaaatacaaaaagctctttatccccggtttcttccccttggaatttccctagggaaccgatgaggacagtggaaaaacaccacacttctcaaagcaagtttcttactttttaagtgttacaagttcacggtggagtgtttttttccccctaaatttagtggatgtggttttgataccatagctttaattcacagttgccttggtaaatgagggcctttctcacctggatttggggattaaactgtgaactccccgtgggcaggagctgtgatcaataacctttgtacatttcyaaaatccaaaggagagaattagatgaaggacagattaagaccttttgt

SEQ ID NO: 852001 - DNA, 567 bp, Homo sapiens
aactaatcataccgtaatatgcactagaaaaagcaaagaacgtaaaatagtatatcatggggacattcgaatttataatcctaggagtgacatgtaagctgggcttgaaagaataaccataattttgctgaactaataagtaggttgtggaagagagtgctagctgattaggaaaacctctgctctccttctaagcacgcagttaaaccgttttccatccgtttttgccgttaagtgtggtcatatgactgagttctaaccaattagaatgagacggcaagggatgtgtagctttttcaatcctggccataacattcttcttcatgctcttctcaatgtcctttctcctttcattaggtaaaatggagatgatccccagggccatcttggaaacagtttttgaagttggtagagtctcgggcccgcttaactgctgaaagrgtaggaaggggtccgtttcattagcgcgttcaaccaaagagcgctgttaggtgagcaaaaacaaaccagttgtgtctgagccaacacccgtttgtctatgggttgtagcagttggtccacctaatc

SEQ ID NO: 852002 - DNA, 520 bp, Homo sapiens
gcgcccagtgagaacatgatgatggatccatctacytccttgtgactgggtgcacaatgaagaaaactgtttcctgtaccatgggatggaggggctcctgcccatctgaaagctgaaatttggagttgagttcaagcatgttcaccccgaaaagcactggtggttgtatatttgatgcaaagtgagaccctgccacacccaatctctgcctgaaacagaatcataatgacatcagatgataatactggagtgactaatgattgtgacctcattaaaagaaaaaggagactacttcctgctgattagagggatggtagccatggattagtcatggcaaagacaggcatggttggatctgtcactcatttatctctttctggtttttaaattgccagaagagaagatttatgaaaaatgtctgtgacttctcgttctcccttggagataatctggttttcagcctgcctccccagcaccccactcctagttaattgccttaacagccagacaggattactgg

SEQ ID NO: 852003 - DNA, 428 bp, Homo sapiens
ttccatttacattattacaaataaaataaaatatctaggaacaaacttaaccaaagaagtgaaaaatctctataatgaaaactatttgacattgatgcaagaaattgaagaggacacaaaaaataaaaagatattccatattcatagattggaaaaatcaatattgataaaatgtccatatttcctaaagcaatctacagattcaatgcaatccctatgaaaatactgaggatattctttaaagaaatagaaaaaataatcttaaatttcatatggaaccacaaaagacccagaataactaaagccatctgagcaaaaagaacaaaactggaggaatcacarcactgcaggaatcacagaactatagtaacaaaaagagcatggtactggcataaaaacagacacataggtcaatgggacagaacaga

SEQ ID NO: 852004 - DNA, 615 bp, Homo sapiens
gagtcccatacaacataactcactgaattttaaagagacttgctctgtcacccaggctggagtgcagtatgtgcaatcatagttcactgcaaccttgacctcctrgactcaagtgatcctcctgcctcagcctcccaagtagctgggactataggcatgtgccactacaggtgcgcaggagcatgccaccacacctggcaatttttttttttgaagagatagtatctcaatatgttgcctagactggccttgaacccctagccttaagcgatccttctgtctcagcctcccaaagtgcagggattataggtgtaagccaccatgccaggtcccaactcactgaaatttttttggaaaaattaaatgtataaattaacttggacagatttatatttttattctattgagttttctcatccaggaacttaatatatctctccatctttcaagtcttcctttatatccctcaatagaattttgtggctttttttaatatatagatcttgcagatatcttggtaactttattcacagatattttattactttagttgctgttgtgaagagaattttttccattatatactctgatttttttggtatgaaaaaaagctat

SEQ ID NO: 852005 - DNA, 581 bp, Homo sapiens
taaaggtgaagaagtgagagcttaaaagcatccagtaagtagttcaatttggctagagcctgcagcgtgtgcaagggactctacgccagggactgccttaccagcctagaaaggaggtactatatatgccttcaatgacaggcaggtgagtttgttttcaatatgataggcagttagaagctgatatagtttcgatatttgtccctgacccaatctcacattgaaatgtaatccccaatactggaggtgggtcctggtgggaggtgcttgggtcctggtggtggatccctcatggcttggtgctgtccttgcaagaatgagtactagtgagatctggttgtttaggtgtgtggcaccttccctcccactctctcctgttcctgctttcattatgtgcggtgcctactcccgcttcaccttccaccataagaaaaagctcgctgaggcctccccagaagctgagcagatgccagcgccatgcttcctggacagtctacagaacgatgagccacttaaaactcttgtctttataaattaccsagtcttgggtatttcttcatagcaatgcaagaacagcctaa

SEQ ID NO: 852006 - DNA, 404 bp, Homo sapiens
ccactgagacaataagacaaaatccactgaaattctaaaaataaagtgaagaaataccaggaastgagcagagcactgggcaataaaaatataattaataatttaattaggataggagccccagcaactgaattgcaaaagcatcactaacctaaagctaaaatcctcaagatacaggccaaagaaaacttatacaccagctaggatagaattctaaggagggtacagctgtctgagagagaaatgcagtcaaactaaaggaataaaaaagccctgtccaggagggaggatagccaccgtcgcagaaaattccttctttttttttttttttttttttgagatggagtctcgctctatctcccaggcttgagtgtagtggtgcgaacttggcttactgcaacttc

SEQ ID NO: 852007 - DNA, 404 bp, Homo sapiens
ccactgagacaataagacaaaatccactgaaattctaaaaataaagtgaagaaataccaggaactgagcagagcactgggcaataaaaatataattaataatttaattaggataggagccccagcaactgaattgcaaaagcatcactaacctaaagctaaaatcctcaagatacaggccaaagaaaacttatacaccagctaggatagaattctaaggagggtacagctgtctgagagagaaatgcagtcaaactaaaggaataaaaaagccctgtccaggagggaggatagccacygtcgcagaaaattccttctttttttttttttttttttttgagatggagtctcgctctatctcccaggcttgagtgtagtggtgcgaacttggcttactgcaacttc

SEQ ID NO: 852008 - DNA, 404 bp, Homo sapiens
ccactgagacaataagacaaaatccactgaaattctaaaaataaagtgaagaaataccaggaactgagcagagcactgggcaataaaaatataattaataatttaattaggataggagccccagcaactgaattgcaaaagcatcactaacctaaagctaaaatcctcaagatacaggccaaagaaaacttatacaccagctaggatagaattctaaggagggtacagctgtctgagagagaaatgcagtcaaactaaaggaataaaaaagccctgtccaggagggaggatagccaccgtcgcagaaaattccttctttttttttttttttttttttgagatggagtctygctctatctcccaggcttgagtgtagtggtgcgaacttggcttactgcaacttc

SEQ ID NO: 852009 - DNA, 617 bp, Homo sapiens
cttcagggcagtagaaagacctttcctgtcaccaatgggtcgaaggagatgttcaaggaagaggagatctgtactcttcaatcacaaactaggaacaacttgacaaccagcaagtcaggaagctgcttagtgacaaacgtgaaaagaagcacttctcatgaaactgaaattttcccaccaagaatatcagttcctcaaactcctaaatcatcatatcttaaaaatcagatgttgagccagttaaagttggtccagaggaagcatagccaacctcagagccatttcactggcatgtctcttgccttagataacttgagttccaaggacttactgactcatgcccagggcatctcgaatcaggacttgggaacttcccaggtgctgcatgtccacttggaggtcagaggaatccgtgtggcacagcagcaggagcccagggtccctacgcatgtcttacagaaatgccaagttaagaatttttcaccagctacaaagagagtgagccctctaagacctaatggaggagagcttggtggaggggatgcagggytggggacatcccaactcagaagaaagagccatgctattcataacaagacatcaagggagtcgcttgg

SEQ ID NO: 852010 - DNA, 473 bp, Homo sapiens
atggagttattaacaataacattatgttctaagtcattagtaaggacctgtcagaaaggaatcagtccctgcatcttytggggtttgatagaaaaaaaaaaaagaattaaaaaatgttggaggctgaagcatcagcaactgacatatattcatctgaaacaaagacaactttttaaaaaaggaatctgtggtgcacacagacctggaaagaaagacactttggctgcgaaatccccccatcttctctggggagactcctgcctccgcctgctgttcatcagccctgattttgatggggcgatttttagtcagctgcctcgatcattttggcacagacaaaaatcctttaaaaaatgttacacttcatcaaagtgtatcatgagacttcacggtcattatctcaatggccgctctgatgtgctacaattggcagagacacaaacggtagggggtgtatgagaagaaagccagcg

SEQ ID NO: 852011 - DNA, 572 bp, Homo sapiens
ctacctatcaccatagacaaaaattaactcaagatggattaaagataaatgtaagacctcaaactataaagtttctagaataagatctaagaaatcccctytggacatcagccttggcaaagaatttatgaccaagtcctcaaaagcaattgcagcaaaaataaaaattgacaattgagaccaaattaaactaaagagcttctgccagaaaaaaagaaaaagaaaaagaaaaaaaaaactatcaaaagagtaaatagacaactgacagaatggcagaaaattctcaaactatgcatctaataaaggattaatatccagaatctataaggaacttaaatcaacacacaaaaaagcataacaccattaaaaagtaggcaaaggacatggacagacacttctcaaaagaagacatacaaatggccaacaaaagtacaaaaaaatgctcagcatcactaatcatcagagagattcaaatcaaaaccacaatgagataccatctcacatcaggcagaatgactattactaaaaagtaaaaacataacagatgctgtcaaggctgtggggaaaaggga

SEQ ID NO: 852012 - DNA, 663 bp, Homo sapiens
catggaaagtcaagggcatagaatacataaaactatttttataaataagaacaaagttggaagacttgccttatctgatttcaagactaactacagagttgtaaaaatcaagacagcttggtgttagtgaaaggccagaaataagtcaatggaacaatggagtacataatgggagatacccatactttcaatataaacctgcaggaaaaccatgccctaaaaatgttgagggcccatctaaaactttaatttggggagattgtgttaactcacatgcagtaatattaaggcaccagatatcgggcaaaattcacccccgatatttcatgtaggttcttttctattttccctaagtgttggccagtctgagaaataaagagacagagtacaaaagagagaaattttaaagctgggtgtctggcggagacatcacatgtcggcagcttccatgatgccccctgagccgtaaaaccagcaagtttttattagtgattttcaaaaggggagggagtgtatgaatagggtgtgggtcacrgagatcacacgcttcacaaggtagtaagatatcacaaggcaaatggaggcagggtgagatcacaggaccacaggaccggggtgaaattaaaattgctaatgaagtttcaggcatgcattgtcactgat

SEQ ID NO: 852013 - DNA, 587 bp, Homo sapiens
aaaattgtaatattctagccaagaacctatggaagtgttactattctagtagaaagagaatgtagaatagtacctaaaagcatgggtcccaaaatcactgtttgatttaaaatctcagttctaccagtactcagttatataatttgaggtaagttacttaaataatcttagtctcggttttctgcaaaaaactgtaaaatgaaaataagcagagtaactgcctcagcatgttatggaaaggattaaatatgtgaatgttcatggagcaacaacagagtggaagagagtgcatacacacaccaataacacacacatgtgattagttttagtttcctctttttcacttaactacttggaaagaaaggaagatttttcactgtattacatatgttaccttttgatccgttaaaaattactcttcactatttgcttaaatatagctgcaaataccaatttataatggcatttaaaattacatgagaaatatggatggtgatattttattttttaggaaaaaaawatctaaaataatggaaatatatatctgcactgattataactactttgctgtgtctagcttccttcac

SEQ ID NO: 852014 - DNA, 648 bp, Homo sapiens
caggagttcgagaccagcctggccaacatggagaaaccccatctctacctaaaatacaaaaattagctgggtttggtggcgggtgcctgtaatcccaactgctccagaggctaaggcaggaaaatcccttgaasccaggaggcagaggttgcagtgagtcgagatcaaaccactgcactccagcctgggtgacagagcgagactctgtctcaaaaaacaaacaaacaaacaaaaaacactaagactctgcggtgcctgtcatacatccttttagaccaaagcttcatggaaatgtaattatagggagatgagatgacaaggtgcttgctttatagaaaggtaaaaatattccaagtaaataattaagtgggacattcttgaacagagtttgtgatagttctgggattagagaaaaatgagagggagacagtttctttctggaaaaattatcaaaagaaatgttgtcaataattttacatatctgatgataaatatgtttgaatcaaatcatttaggtatgtgaacttagaaagagctctatagaactgtgacaaatgttacagctcaatgtcttcctcattgttaaatgaaaccaccagaattactgggcttagaagaatcattgagtctgaaccccgttttagctcc

SEQ ID NO: 852015 - DNA, 593 bp, Homo sapiens
gtgttcccgtgaagaagcaaattgtttcttttaccagaatattcatcagagatttgtraaattttgaaaacaacacaaaaccaccagtgactttcttgtgattcttcccttggactgcatctaatttcagcttctttctttctgctctttaaaattgctaatatctgtaagagtatgcaatatcatgccagctttaattcaagtgaagcgaaaattagaggtaaacttgctgattaagtggtctcatatcacatatcacacagaagctaaatgtagacacttagatttaaattgttacaagggctctccaaaattgcattcacaaaaccttcattggtatgcatgagcagctgtctcgttatccattccacccagtagcaagctggtgacttccttatcaaaggctatatacatcgtggactaagactgtaattgccaattgataaagcattgatgcattgaccacaaaattgcaaccagcggactcttattcattgtgctgagatcaactaatctattttgacaatcaaccgtacactcaatatttgaacttttctgtaaagcctgcccttactctgacttgatggtgtgca

SEQ ID NO: 852016 - DNA, 558 bp, Homo sapiens
atagagccagagtaagaacttgtctcaaaaaaatagtaagaaaaaaaaagaagacatactgtgtactattctgtttgctaggatgatgacttgtgaatttcaaatggtggttmtgcattttctaaagttattaacaaccatttgtacacagcaccacattttaattggactaggacttctatttcactccagtacctaggtgcagccagtgcttcattaaataacactgataatcagttcataagatcttacttcagtgagtgatcatctgtcatgacagacttgaaaacaggtttgtaatgcatgaatttatcagttgtcataagcaagcaaaggaattggctttcaatgtgtctgtagctatagtaatgaggagatttgttgagcctatacttaatcttctatattgtaatttaagaaaaccaacttaactatgttcaactaaattgtacatttcattaaaatttgaaaatcatagtaacaagacagggatttctgagttataatcaataagactaatttaatttaggggtagctgaggagaaagatgaaaatcaa

SEQ ID NO: 852017 - DNA, 558 bp, Homo sapiens
atagagccagagtaagaacttgtctcaaaaaaatagtaagaaaaaaaaagaagacatactgtgtactattctgtttgctaggatgatgacttgtgaatttcaaatggtggttatgcatttwctaaagttattaacaaccatttgtacacagcaccacattttaattggactaggacttctatttcactccagtacctaggtgcagccagtgcttcattaaataacactgataatcagttcataagatcttacttcagtgagtgatcatctgtcatgacagacttgaaaacaggtttgtaatgcatgaatttatcagttgtcataagcaagcaaaggaattggctttcaatgtgtctgtagctatagtaatgaggagatttgttgagcctatacttaatcttctatattgtaatttaagaaaaccaacttaactatgttcaactaaattgtacatttcattaaaatttgaaaatcatagtaacaagacagggatttctgagttataatcaataagactaatttaatttaggggtagctgaggagaaagatgaaaatcaa

SEQ ID NO: 852018 - DNA, 568 bp, Homo sapiens
agcacccaaaattactgcagcttcacagacatcacacacttaaaaaaagactcctggcttcctttcaaattccatcagtcaacttttatcaaccataggggaagcagaggaggataaacactgcctgcgataccatttgggttttaggttttgggtttcttccagttaagtttgcaaaagtgtgaaagtactaaagaacagaatattgttcctcattcttactatacaataaatacttccaaatatgtccttaaatgcaatcctttgtgattcccttaattaatcttgactaatccttgaaggaaccatgatagcaaaaatttagtgtctagcataaccttactacagtttccctttttaagttctcatttgaatttgataagttaatatgtactttaaaaaaatccacatcatttctattcaatggcacttgaacttttaaaaaatgtttcaaagaaattaragctagatatgattggaaataagcaaaacgagaaagagttgtcctatgtgtatgtagcacaaccctccctgtgtcctttaataaaaagcaggactctggtcattc

SEQ ID NO: 852019 - DNA, 595 bp, Homo sapiens
tttaacctggtatccaagcagtccagattcccgttcatctggtagctcctctgtgaatcgtctcttctgtgcctggggctgacttgggagtgggggctggggctggggctggggctgggggccagcaggcaaggcagttttgacaggagcagcaggaataaaaggaccacccatcggactctgggaccaaaacaaaccaaggaagaaaaaaagtgtgagaatgcccaaggaataagtaaacaatgattacaatatactttaaggatcaataagtatcatatgaattttgcatcttcaggtccttagtttccttcatgtataatttggtaacattatcacctaagccttctcaccttcatcctagggaaacatgaaattgacaacctatatacagtgctttgaacttttaagaaaactctgttatgcatttgggctactaggagtaaacatgaccattaacaaacagaactccaaccactgacagtcgaygtgattagctttctgtaataagctttctgttatttataaatgctgctaatgcttgtggaagaagcaatttcatcttccactcccttagttatcactaagctactat

SEQ ID NO: 852020 - DNA, 538 bp, Homo sapiens
ttctcatgtgacccccaagaccaggcagagatggggtacaggaaggagacatgtgtaaacttaaaggccactctccctccccactcatcaccttcccagcagccctggggctggggcactggtcgcatgstattcttcaccccgagggtctccctccggctcctcctgggaggcaatgatcatgacagctgctgcagtgagatggctgggcctcacacacgcagccaaatctgacttcagttctcagggtcgtaatattaatagcatctccatccatacacctctcatcagggaccagaataggctctggtgctttaggtgcattacctcattcagtttaattcccacaatgaccccatgcggaaagatgatcccccatttacagataagaaaaccaaggctcagagaagccaaacagcccagttggagaggggtccctggcatgagaggacaggcttgtctgcccccgggccactggccgtactgccatgttgtttggtctctccctctcacactaggttgtatgtagagcaaaaag

SEQ ID NO: 852021 - DNA, 613 bp, Homo sapiens
ccccttgcccctcctaaattatttttcaaaataattgagaaataggactgtaaggctgtcttttttttcmtgatagacaacataattgtacatgtagaaaatccaaaagaatttacaagtaaactattagaacttagcaacattactgaattaaaagtcaatataagaaataaattttatttttctattacagtaacaaataataaattaaaaattaaaaaataccattcacagtagcatcagaggaatcaaatatctagcaatgaatctaagaaagatatttaagacttctacactgaaaataatgttattagagttattaaggagaaataaaataagtagatatatcttgttaatggattggaagactcaaaattatttagatgtcaatcctttacaaattgttgtatagattcatcacaatctctattaaatcctcagcaagttgtttgtggaaaatgaccatacttaaacatttatatggaaatgcaaaggcaaaagttagctaaatcagtttgaattcaaaaaactaagaggacttacactcccagctattaagacccatcgaaagctcttctagatagttgttattggctcaatgataggcaactaa

SEQ ID NO: 852022 - DNA, 636 bp, Homo sapiens
ctttataggttacctgatgcttttgcctcacagctattaagattcttttctttgwcttgactttaaataacctgatgactatatgcttaggtgatgactttttgtgatgaatttcccaggtgtcctttgagcttcttgtatttggatgactagatttctagcaaggccagggaattttcccctgattattccctcaaatatcttttccagacttttagatttctcttcttccttgggaacaccaattattcttaggtttggatgcttaacatattctcaaacttcttggagtctttgtccattttttcttattctttgttctttgtctttgacagattgggttaattcaaaagccgtgtcttcgagctctgaaattctttcttctgcttgtttgagtgcattgctgagactttccaatgcattttgcatttctgtaagtgtgtccttgattccagaagttgtaattggtttttatttatactatctgtttcactgaagatttttcctttcacatcctgtattatgtttttgatttcttcaagttggagttcatctttctctggtgcctccttaattagcttaataattgacctttggactcctttttctggcaattcaaagatttcatcttggttt

SEQ ID NO: 852023 - DNA, 621 bp, Homo sapiens
gtcttggttgggttatatgtaaatgtcacttgcctttcccaggcaggaatgagcatcaccattcaactgaggctgcccacactctgtactggtattctgaactctgagtgggttgaggcaaagagagagaractaaatagaacaaaagcagtgggggcgtgggaagcatattcatgcccctaatagagccctaaagatgctgttgcctaattcatgctaacaagctatctgaagtttttttggcttgttaatttcagagcctaattctccatccttccttttgaactgttgagtattctgaaattttcccaataaatatattttgtatacttcagccagagttatttttctgcagcttggggaaaaacaacaacaaaacactgatatactcttgtaagagaagtataggagatattactgttttcttgaagcgaaagaattcaagaaagaattgccacaccttctgttgatgagaactggattagcagcaagtcagaaggaggctgaccttcctcacaggcattagctgattgctgggggccatgggcatttacactgttatatatagctgacttagaaagacaatcagtatatatgcctcagttacacaaaaatccatgt

SEQ ID NO: 852024 - DNA, 595 bp, Homo sapiens
acttcaaactatgtattaaatattttttttggacacatctgctggaaaaccaatagtctccttgaatttgctgtgtctgaaactaaactctttatcttatctcactctcatcttcaaacggaatcctgcttctkcattaactagttaataacgttaccatatatttagtcaaccaatatagaaatctgggagtcatcctaaaatactgtttgtttttcacaattctctcccttcctatgccccacttcccattaaaaatcaacctctaaatagcattcttttgaagtattttacaaactatttcatccactgtttcaagaaccttattttatcttaataaaatggttatttattatattcctctttatgatacaaaagcagatgcatatactgtgatggtaaattttaggggtcaacttgactggatcatgggattcccagatagctggtaaagcactatttctgggtgtgtctgtaagggtatttctggaagagatcagcactgattcagtagactgagtaaggaagatctgccctcacccagtgagggtaggcaccatcccattgcctaaggcccagataggactaaaggagg

SEQ ID NO: 852025 - DNA, 602 bp, Homo sapiens; identical to SEQ ID NO: 846007

SEQ ID NO: 852026 - DNA, 608 bp, Homo sapiens
cagcataggggcgtggcaggccaaaaaggcaatcatttgggcagaaaaatggggtcagctgttttcacgcagggcygaggttccaggcttgagggtggagtttagctgggaacccagacctgcagggtcagctgctttcacttagggccaaggttccaggcttgagggtagggtttagctggaacccagccattctgtatcagcaggagaatcacttgaacctagaggtggaggttgcagtaagccaagatgaagccactgcactccagcctgggcaacagaacaagactctttctcaaaaaagagctcctcctggagggaggagctgtggtgctggaactctggaaacaactctttctgtgtgtattagcatctgtgcatcagggctggtcccagcagatccgtcctgtgactctctttcccctgtggcctcccctccctaggagggagatggggttcccagctggctcctgggccctcgtgttggcctgtcctgccacgctatcctaactggtcaggcccatggtttgagttcaagcagcaatcccagacacatgctcccagggttcttggatgtcactaacaaccctcacttcttttacatcatt

SEQ ID NO: 852027 - DNA, 603 bp, Homo sapiens
tttcagaacagagcccctgatagacaagcagtaacaataaccacaacagctgacaagtatatggcagtactaggtgccgggttcttttctaagcactttatacaaattaactcattgaatcttcacaacaacctctgggctagttgcaattattatccctattttacaagtgtgaaaatcaaagcacagagagattaagaaacttgcctcaggccacacagcttcccagtggtggagctggaactccggttccaaaactctatactcttacctgctatgtatgttcaggagaaggaggatgttatcccacctccaaaaagcccagggagggtaagtgacctggccaaggtcacacagcaagttgctgcagtgctagaacagaaccccagacccttgactcctaagatagccttgcccccgttcttccaagctgggagctgaggaaagccatctttagtcaatgcctgcrccttttctgctgtaatttcacccaggcttccagtcagtccagagggagcatacaactgaccatcaacacccctgatcctcccacggtccgccttgacggccacacggccaccatcatccagccgggcttgctag

SEQ ID NO: 852028 - DNA, 574 bp, Homo sapiens
acttagagtgacactagaggggccggcaggtaatgacaattaggccagcaagggggtatcggaccctcccctgagctctaagtgatgatgtgggcatgggttggggcaaaggctggtcagcgcaggagasggagcaggaggggcccaggccaggcccccaaggtcaaatctgggagactcagtttgccaaaaatcaattcccagccaaatggctaactcactgaaactcaaattgcaaaatgaccaattctccaagtttaccaaatttacccatttcccaaaatcttgctttaaggataatgtttcatgtattttataagcatttgtgaatatttccttctttgatatattcaatggatattttcttattaatatgaccaaatttctagtgttttaaggttaattttttagtttattccgacttgtttctaatcctttttttaaggacattttctgtttctaccaacattttagcatttttcgggggggagcatatagtgtttggggctattcccctcaattaaaaaatagcaaaattcactaacaggtttataagaatccttcaacaaagtga

SEQ ID NO: 852029 - DNA, 652 bp, Homo sapiens
ttccgggacatcatccttcagcctatgatatgcccgtgtcttctattaaaaaaaaaaaaaagagagaagatggaggtcaccaaggacttgtagaatctattcttaatgcacagagggsgaccatgttcattctacctacaagtaacagacacatgtacagaaacccaagccagaggcaagaggtttctctggctctgggagcattccaagataaaaaggtagtggagtcatatttttgcaagggttaaattctaaatttagcacatgaaaatcatagactcaaaattactcttgatatttatcctaacgttacacttgtacatataccaaatgactcacatatactaggttactcagcagtactatttatgaagacataagatgcaatgcagcctaaatatttcaataggcaagtagtcacagaaattatggtttatctatacaatggaatattgtgcggctgttaaacagaatgatagttctatatgtactaatgtggattgttctccaaaatctactgttacttgaaataagcaaagtgcagatcaacacatgtaactttagtgtagacagaatacatacaggcatgcttataaacacacgaaatatgcccagaaagttacaaaagaaattgctaagtggttgccttcag

SEQ ID NO: 852030 - DNA, 562 bp, Homo sapiens
atctacagagaataagcaggtgatacaatcacacagatatcctttggggagatagaggctcaggaggcaaactgataatttcagaagaatttagagcccacccacctaaattccccagagaacatcacatagtcttttgagatgaacttagaagactccttccctcctggagagacgccttggaagaactagactcttccaggaagctctcccagggcagggctgaaagggaaatgctgagacctaacaaacaataaagacaatgcttggaagggagcatctgtgaaaaaagcaagctcctccctctgagaataattccaaagggtgtctccgatcccagctttcagacctccacccttgattactcagacttgacactagccttttgagaccagccctaacaagggggtttcatctgggagcacttccctgaccttacaactgtttcctctgccaccccagacaagatgtctgctatctctgaatccagttgttatttaaaatgtcaagtgacaaggscgggcgtggtggctcatgcctgtaatcccagcactttgggagg

SEQ ID NO: 852031 - DNA, 562 bp, Homo sapiens
ggctcacgcctgtaatcccagcactttgtgaggccaaggcaggtggatcatgtgaggtcaggagttcaaaaccagcctggacaacatggcaaaaccccatcactactaaaaatacaaaagttatccaggcgtggtggcacacgtctgtaatcccggctacttgagaggctaagccatgagagtcgcttgaatctgggaggtcaaggccgcagtgagccgagatcatgccactgcactctagcttgggcgatagagtgagactcagtctcaaaataagtaaataaaataaaaattaaaaggcagtttacaagatggtatttataattccgtttttgtttgttttagagacaagggctcactatgttattcaggctggtcttgaactactggcctgaagagatccttctgcctcagctatccaagtagctgggattacaggtgagartcactgtgcctggttcaaaactctacttttttaaaacaaaaaaaggctggaagtttgggcatggtggcatgcaccaacaggcccagctacttggcagtctgagatgagaagattatt

SEQ ID NO: 852032 - DNA, 562 bp, Homo sapiens
ggctcacgcctgtaatcccagcactttgtgaggccaaggcaggtggatcatgtgaggtcaggagttcaaaaccagcctggacaacatggcaaaaccccatcactactaaaaatacaaaagttatccaggcgtggtggcacacgtctgtaatcccggctacttgagaggctaagccatgagagtcgcttgaatctgggaggtcaaggccgcagtgagccgagatcatgccactgcactctagcttgggcgatagagtgagactcagtctcaaaataagtaaataaaataaaaattaaaaggcagtttacaagatggtatttataattccgtttttgtttgttttagagacaagggctcactatgttattcaggctggtcttgaactactggcctgaagagatccttctgcctcagctatccaagtagctgggattacaggtgagaatcactgtgcctggttcawaactctacttttttaaaacaaaaaaaggctggaagtttgggcatggtggcatgcaccaacaggcccagctacttggcagtctgagatgagaagattatt

SEQ ID NO: 852033 - DNA, 638 bp, Homo sapiens
aaaaataaaatagtagattactaagaggaagcctttgtagcaatttttaaacccttgtagaagtatcacagactgacattaatggctgtaataaaatgtgcatctgctggtttaaagaaaggggtggccttattttatcatacaaggaaagcattacttgaacaaatttacttacagcactgccctcctttctagcctaagtgaaatgtgtactcagacttatctaacttaatattggcatgatctgcctccagttaggggatactgcttcttactggctttattatcctgaccttggacaacttcctaagtcgtcacttagtcaatagaatttactttaggcctattatgtttcagcccctgttctaggcactgggaatagagcagtgaataatacagggggaaaaagactcaccatggagcttacattcccacagggagataaacagtgagcaaataaataagtagaatgtacagttcacgaaaatgctgagtgtcttggagaaaattaaagmagaaatgggggtagagaatgctggggcagggctggagtggtgactgtaattttaaatagggtaatcaagccttcctgagaagatatttgagcaaagacttgaaggttatgtctaaggaaggtg

SEQ ID NO: 852034 - DNA, 605 bp, Homo sapiens
aggagggacaagtgtgaaaccaacaatcagcaaacagagtcaccrctcattttccggccccaaaagccagggagacccaccctttctgagaaaaggagatgttaaatgtctacatcctaggataggcccttgcacacagtgtaggtttctctcctcttagctcaatggaagggttacaacaaagaaacagtgttcactttgccagagcccccaaatcactttaactagagactacaaggtggtactgtccaaaacagatgaaatttgttgtggagcttgacagatctgagttaaatccaatctctgccacccaatacttatgtgacctggaaacagttgctgaacctcttgggacctcttagtgtattcttccaaaagtggggacaataatccctgcctcaaaattatgcagagaaacataaaaagcaccttgcatacagtgaggacacagcaattgcccaccccctcctcatgcccagacatcagcaaaaccccttggacaagtcaccaccctcggggccttggtttttcctcctggaaatggggtacaaggcaagatgacctaaatctcaagccaatccttcctttcaccgccagcctctgat

SEQ ID NO: 852035 - DNA, 605 bp, Homo sapiens
aggagggacaagtgtgaaaccaacaatcagcaaacagagtcaccgctcattttccggccccaaaagccagggagacccaccctttctgagaaaaggagatgttaaatgtctacatcctaggataggcccttgcacacagtgtaggtttctctcctcttagctcaatggaagggttacaacaaagaaacagtgttcactttgccagagcccccaaatcactttaactagagactacaaggtggtactgtccaaaacagatgaaatttgttgtggagcttgacagatctgagttaaatccaatctctgccacccaatacttatgtgacctggaaacagttgctgaacctcttgggacctcttagtgtattcttccaaaagtggggacaataatccctgcctcaaaattatgcagagaaacataaaaagcaccttgcatacagtgaggacacagcaattgcccaccccctcctcatgcccagacatcagcaaaaccccttggacaagtcaccaccctcggggccttggtttttcctcctggaaatggggtacraggcaagatgacctaaatctcaagccaatccttcctttcaccgccagcctctgat

SEQ ID NO: 852036 - DNA, 641 bp, Homo sapiens
gaaatttttgaaaacattatgkattttcagcctaatgaaagccccagggctgaaaactttggggaacaggaaagaaaacaatagtataaaaaaggattttaaacagtcacaatccagttcccttaaagttcccctccaaaattccctggtaatggattctgccaaatgacacaccacatcttggcagaagaatttcagaaaacgaacaaataaaaaacacaggttgttaaatcctccagctgtaatgtagtgtgtctctgttattacacattatttagaggcaaaccaggctaagagagcttaaggtacctcgctacgtattaggaaaattataaaatttgcatatatgaaattagatagaagaaaattatacaattttcataattatgaaaattgctagataaacatattgtcagtactaatttttctttaaatagatggactattcacagagagattaaaatgagggagattttaagaaggagttaaagaagagaggttgacagaccctacaaacatattgaaactgactttagagggaactccacaggaaagatatccaaagcgaagtcctccggacaaacctgtttttggctcaagtagtccatgccccgggccacgtcggcagcgaagtgaaggag

SEQ ID NO: 852037 - DNA, 574 bp, Homo sapiens
atttcatgtcagtggaatcatacaatacgtggctttttgtgtctggcttctttcactagcatagtattttcaaggtttatccttgttatggcacgtatcagcatttcattcctttttgtggctgaatagtatttcactgtatagatatttcacattttgttcattcattcattggtaggcatttggattgttttcacttttgactatttgagtaatgctgttatgaatgttcatgtacaagtttctgtatgaacacatctttgattctcttggatatatacctggaagtagaattaccggatcatgtggtccgtctaagttttggaggaactgccatatttttttccacagcggctgcaccgttttacattcccaccagcattgtgtgagggttctgggttctccacatcctccccaactctgagtattgtctgtcctttagattatagccatcatagtgtgtgggaagtggagccttactatggttttgacttgtatttccctaatacctaatggtwttgagcttcttttcatgtgctaattggcaacaatgataatttaaaactttttcttt

SEQ ID NO: 852038 - DNA, 618 bp, Homo sapiens
tttggataccagtcctttatcagatatgtgttttgcaaatattttctcccagtctgtggcttgtcctctcattctctttatgtgtccaaatagatttttgagacttgtattgtaatggggaatcaagggaacctgcctacccagagactgccatttagatgtcattttaaaccataagtctgacatgaaaagtctttgaagggaaaatattctgaattttgtgacagatttgatagagggaaagaaaaaaatcaaatatgaattagagtttagttgtcaaaaataattttgatacagcagaatcatgcctgtggaaatacaagattcgaaaagcctcacgtattttgtagcaataattaggcaacgcagtctggccagttttagaggaatgcaaagaaaagtgtatactgttaaaagataaataccggctgacctcactgttagacaataatatcttaagattatccgacttgataaagacctacacagaacaacctcctttagcgtcattgacttgctcactcattgtacctgtgtggtgtcttttagtcctgaccacttcgatgatccagtcattcatcaktttttttttttttttttgagacggagtctcgctct

SEQ ID NO: 852039 - DNA, 656 bp, Homo sapiens
tggcaaggagccacagaccatcacccagctcaccaagcacatccagagcctcaagcggaaaattcggaaatttgaagaaaaatttgaacaagaaaagaaataccgggtaagaaccctggggtttgacataggagcggattggtcagaggtgtctggattctcctcagcctctgtccttcctttctgggtgcccttctttgccaggggacagctctgttcccatgggccaacctggacctatcatagagtcttcatcttctatctgtcttgttctcacctgctgtcagttgatctctgctaggatattttctagtaatggattacaactattatttccaaacttatttgattattgatctcacctttttttttctgaggaacaaaatttggaaagctttgaattatggtcttcttcttcttcttcttcttctttttcttttttctttttttttcactttttctcaattgcattttgataagaacttattaaagatccaagggaggggtctccaattgtggaacagaatgagggagagatggtttctttgacattaaagtatttccttgttggtgaatgaggacctctcaagtgacatctgttcaggccactcataagaaccaaccctaagccwtcctttccccatcagagagacact

SEQ ID NO: 852040 - DNA, 573 bp, Homo sapiens
agtttcttcattcttctgcctcaaagttttttgccagacagggctcattccctcagcctgcatgtgtggcagatttaactcccctgggagcagcccgcagccggaagagaaggtggggtgtgtgtgtgtgaataaatgctgcagccctttcctcaactttcagagggataagtctgagatactgcctacacagttcctcagagagaccccagttgctcagagtggcaacctaccaagtaacacacctgttgtgggctcttcctccttccctagatcctgcttcctgggaccaccttcctgtacccagctcctcctatctatcagaatccaccttcaagaggaacctcaagtaagaaagcggtgacaaagtcgacacaatctctgtcttttggagcttacagttgggggaaagagaaaaacctcatcacacaaatgaagatttagatcagggacagatgcagtgaagggcacagagtgtcacaagtgatgggctggggggtgggggtgcggaatttaaaygacaggtgaatagctgatgaatatttgtaactacgtatcacactggcttctgtg

SEQ ID NO: 852041 - DNA, 511 bp, Homo sapiens
ttctccaaggatacaagatttaatactctggcaaggatcccaggaggaagaactcctgtgttgctagtgkggcttctgggaggccggagaaagcaatgattcgtgctaaaccaagtcagtgtgccagaactattgtggcaagcgctggaagaaaagatcacaaaggccagagaagtgggtatactagagtatactcgcactatgtgaggctggaaaattcaccagatagtctgcaggagagtctgaagtacatgccacttcctgaagtgatcaggaatgaactggggagagggacaccagcattgttgaaaagtttggcgagtctcactggttcagctgttctcaatagaccagcactgatggtcattatagaactgggatctctgatgacaacagggatgataagatccccaaagaatagggatcaggtggttacattttgctgtcagaagtgagggggcatgatggttataatgagtgcaagatcagaaggtcagctaagggaacaagt

SEQ ID NO: 852042 - DNA, 511 bp, Homo sapiens
ttctccaaggatacaagatttaatactctggcaaggatcccaggaggaagaactcctgtgttgctagtggggcttctgggaggcyggagaaagcaatgattcgtgctaaaccaagtcagtgtgccagaactattgtggcaagcgctggaagaaaagatcacaaaggccagagaagtgggtatactagagtatactcgcactatgtgaggctggaaaattcaccagatagtctgcaggagagtctgaagtacatgccacttcctgaagtgatcaggaatgaactggggagagggacaccagcattgttgaaaagtttggcgagtctcactggttcagctgttctcaatagaccagcactgatggtcattatagaactgggatctctgatgacaacagggatgataagatccccaaagaatagggatcaggtggttacattttgctgtcagaagtgagggggcatgatggttataatgagtgcaagatcagaaggtcagctaagggaacaagt

SEQ ID NO: 852043 - DNA, 560 bp, Homo sapiens
ctttcacaaatcttttcatgacttacacagaacatctatgaaaagcttggactttctcacttgtcctaagcatccctctttttaaacaatcagttatttttctttaggaygcaaatttacgacaaaagatcctttctcatataaaatttcttttctttataatcttccttaacaaaaatacctctttacctttataacctttgaattagagaaaagttattttccttctgttaggaatttatggtttgtactgcatgttgttgtgtgtgtcctgtgaaggggaagcaaatgaggaggttatctacatactgtagaagttgtttcccctcaagagattgctcggttagatttttgctagggctcatccaaataagtgtgggctatttttaaacccctgaagtaggatggtacaggttgaagttatcggttaaagatttaggtagctttttgggagaaatagggctattagagaggaaggtgaattcagaggttgggtacatattaagcagccacccattttggaaagtatatttttgtcctaaaggggtgtgaatcttttc

SEQ ID NO: 852044 - DNA, 665 bp, Homo sapiens
attggtattaggcacatattcattactttatttctacacaccattgtgtatatcacttcttgttttattttttcaaagagttgacatatctttcatatttatatttatatttatgttgcttgtattagaattcaygttgcaatactttgctcagatatctttatatttctgttaatttatggtcccttacttacctgaaaaacagtactgtctacatccagaaaaaaaaatcattatttccagtagaaaaacaatttatctcaggttccatcagagagagatgtctttacagtgcctactttcagatatttttttcttacagaaaaaaaggtcaatacatttcaactcatagttgaagtatgggaaaaataaataaattgagaagattgctaatatttggtagtatgatgaaaataaagatacaccagaaatactcaaggctattatggaaaaattatcctctaattgcctgtgctatacctgacctcagccactcttttatggttacacacagtgtagtcattatcaacaaatgcacaccccaaatatcatcctactcttgggttacctctcctcttcacagatccttttgtagtacttttccagattacttttactcaatcaagacctttgatttattgactcaaccattacttcagtatcca

SEQ ID NO: 852045 - DNA, 553 bp, Homo sapiens
ctttgcctagagcaacgtcctggaatatttccccaatgttttcttctagtgctttcatagtttcaggtattagacttaagtcttcaatccattttgattagatttttgtatatgttgagagctaggggtctagattccctcttctgcatatggttaaccagtttttccaggatcatttattgaagagacttccctttccccattgtatgttcttggcacctttgttaaaaattagttggctataaatacatagatttatatctgagttctttattctattccattcatctatatgtctatttttatgccagtaccatgctgatttaattgccataactttgtagtatattttgcagtcaggtagtgtgatgcctctagctttgttctttttgctcaggattgctttggctactggggtcctttatttctgtgaagaatgtcattggtactttgatagcaattacattgagcctataatttgctttgggtgataytgtcattttaacagtgttaattcttccaacccatgcgcatggaatatcctttcattttt

SEQ ID NO: 852046 - DNA, 430 bp, Homo sapiens
cactttacttttttgtctacaaatttgttctgatcaggaggccccccctggagtctctgaatctgctgcgattctgggggctgcccaaattgtgaatcattcattgcttgattaaattcctttaaacttaawacagctggagtttttaatagatggtgtcagaagcagggtccgaagtagagctttaacgaccccaggagtgcggagtgaacactcaaggtacccgcaggacccacctgtgtccgctgatctctcagagcagctgggaatcatgggtaagttctctcttaaattttagagttccatggatttgtgttttgagctctctgagtttctttgaacaaatttctgttccaaactgggtttggaagtcacaacagaaactggactaggtccaggatcagatttgatccagtaattaactgtcttg

SEQ ID NO: 852047 - DNA, 581 bp, Homo sapiens
ggattttcttgcctaagtttagagggttaaaggattgttttatattagataggataaagctaaaagtttgaacaagttgtggaaggtttgtgaaaaatcaatcttataaaaagaaattctgtgtggacaytgactaaagttaaaggggtattattaagtttttccataaattgaacattggaataagagcacaacagggttttcttaaagcactgatctgctctttaaccaaaatttgtaaaggcttataaaagctttatgagaataaaccttttgaccttatggtcaaactgattaagattagatagatttgtcttgtctataaggttttattaaaagttgaggttgacattaatagtacactaatgcaagggtgaaatgtggttttctctcttgaacaagattttcatgtaatattaaaagataatgaaagatttttgtttacctttcgaataaactaccgaaaaaagaagggaaagataaaagacaaattttttggaaagctaagtcttccctccatcaatgagtaaaggtttttgcctttttaaaatattttgagtcatcattttggctaaatgaat

SEQ ID NO: 852048 - DNA, 565 bp, Homo sapiens
atcttgaagctttgggagaagtccctccagccacccacgcgctggataactaggggaaaactgattaagggctgtcaaggaaaaaacagagcaaagtgtacattccattatcattgaagaagtcttgtcrtgaccaaaaggtgaaacagtgcaggaaaaaattcaacttctttttgttgtttcactttcacttatctgctcagagaactattttcatgagttggttacaattttcaggcctcttttttcttacatctgagggaagggggcttggcattaactggaacatttgtcagtctcggcaaagatggtgagggagaaagaaatagaaataaaaacaagctctcaaaatgtgagtgctccatttgacagagaagcaatttcagcattggcattttggggaagaagggagaagagaggtaacattcacatgcctgcctagtgcaggctgttgttacatacattatctcatttcagattttgagtcagtgacagagagcatggggtagtgaacaaatcacaacttgtacacattacaagaaaatgagatctctccagaataaag

SEQ ID NO: 852049 - DNA, 543 bp, Homo sapiens
cagtcacttgctacatcaattcagtccaaatgaggaggagactttggctattgagatggatctaatactaactgtgaaatttaagacataccgtgttcctttgtttgcctaatttagccaatttagaagtccacatattttaaataaattgcttagtaaatccccacagattggtttttaatcttgcattttaatctcttgtatctttcttctcacctattcatccatgcatttatgcattcatttgatatttattgagtaattgctatgtggatggcactaggctaaatacgtgaagatctaggagaagaaataagacacatgcaaacaactataatataaggtggaatatgatacatctcgccagaaaggcacagagggctgtgaacatttacagatgaggaaatcaaattatagacggggaagactaagaatgactcctggagtgcatttccttgcccacaaaatgaagaaaaagaacatttagatataccctaaagagargaaaaggagtgagaactgtgtgaataagttagagagaaa

SEQ ID NO: 852050 - DNA, 566 bp, Homo sapiens
ctagaaatagactcataaatctagtcaactgatctttgacaaaggagcaaagrcagtacaatgaagcaaatatgatctgttcaacaaatgctgctggaacaagtagacatctgcatgtcaaataaggcaaaacaaggaatctagacaccacaaaccttacactcttcacaaaaattaattcaaaacatatcgtaggcctatgtgtaaaacatgaaagtatacaactcttagaaaacaacataggagaaaaccttgggtatgataagactttttagatataacagcaaaaacataatcatgaaagaatcaataagctagactttattaaaatcaaaaatttcttctctgtgaaaaacagtgctaagagaacgaaaagacaatctacactgtggaataaaatattttcaaaagacacatctgataaaggattgttatccaaaatatatgaagaactcctaaaactcaacaataaggaaatgatctaatttaaaaataagcaaaaaccttagcaggcacctcatcaaggaagattacagattacaaataagtatatgaaaatctgttcc

SEQ ID NO: 852051 - DNA, 556 bp, Homo sapiens
agactttaataacaaaggaactgggtgtagggtataagaaagctttctgtgctaccattagaatttttctgtaactcgaaaactattctaaagtaaaaattttatttttaaaaaatttatcttgttgccttcccagcctttttactcgtcttatgttccgtatttctgcccatgtaattatgatggagcaagtggggctttgccccaagcatccacgtttataaggcatacagatgttagtgaatgaagttttattaattctgaaatttaacatctaagttaaattacacctcaataaaaaaaaaatagttaaaatagaaaacttccagagagtccctattgttaacaacaaaaatctgggtaccataccatgaaatacagagttgattagaggcaatccagagtggagaggtcaaagtggacccaytctgattctgattcagaaaatggtaaatttatttctctataactcaactggactgactcattaggaccacctcacagggccttctgcctcttttgcttgccattttacattcattagtttctccaatta

SEQ ID NO: 852052 - DNA, 641 bp, Homo sapiens
ttccaggcagggctttcctatagagatatgtggatggcatatcccccgccaaaaataatagctgtagatatgcraactattcaaaaaagaaattgttatatgtgttatacaactagaaatcatgcagtttaggaatatttgaaatatgaactcattgaaaagaaggaaaataagaccttcaatttaaccattaggtcaggcaattgctggcacatctaaattactgacaataaatctcagagcaagtacaatacttctaagtatggttataagaattagaatcataaaaccatagaattgtgaaattacttacacatcatagaatccaatcccttctttttggagaaatggaaacataccccagaaggttaaatcatttgcccaaaataacatgattggttgttgaccctttctactaagccatccccagttccactccagaaaatataaattattcatgcagaaagacaaacttaattttggcaggtcagagatttcagaaagatgtgaattggctaagggttgtgatttatgaatctaggcagctattcagattgccttatctcagctgtccctctgtgaaacataccattctgagtacctaaattgacctctattcaaccccactttaccatcattgg

SEQ ID NO: 852053 - DNA, 621 bp, Homo sapiens
catattgttgaatgtaaggggtaaattacagacattgtatgtaaacatcagtggtaacagcagttaccactagaactgttcacagttcttatcactgggaaagctactgaaattgtggtgacagctatttaggtttagccttatctcagttgtttttattaactttttaaagagaaggtatatttattcaaagagagagtatatgtaaaattactatagcaattctttctataaacctcagttcaagtctcatttcccactatcccagcccattttgaatattttgtcagtatcacttatttggcacttggcaggtgctcttgtacatatggttgtttgctgtgtgctctgtcttaccaattaaattataggtgcctttgacagcttaggacatacctagtcctctttttttttttttttaacataataccaaaagagaaggccttatttgataaaaaaatttatcatgaatgtcttgcattctttggataatatttttgtgctttttaggtttataacttccatagtaaatcagttttatttctaaattyacttgaatttttaattatttattagcaattatattttaaacactcataaacatggatgtttaaaaatgaa

SEQ ID NO: 852054 - DNA, 484 bp, Homo sapiens
aacattacagaaatgacatgagacatgaaaaaaagaaaagatggaaagagaaaagaaagagagggaaatgcagcagcagcctgtgcctttagagaggacgctccggtttgcggacacctacggtggcattggcttttgccagatcacaacttgaagctcttcagcaaccattctcttagagagaccatttccaaactgctcttctccactatttatacactcgagtctgataaagacttcatccttcattacacacatctgaagcttgattcagaacataataaagtgtcaaaacatattttgaagctggtatataaaagcaacccaaacaacagtaacaagttctgttgatatttagctctgcattccagcaacagactacgcagactaacaycattaaatactagagtcctaatattccatcacattttcttgaaataactgcataactcaaagaagtctttctgaaggtacaagtttcccc

SEQ ID NO: 852055 - DNA, 657 bp, Homo sapiens
gctaaccagtatgtctcactgtaaaacaccamcaccaccagtaacaacaaaataaataatcaaacaaaatagaagaaatccaaatagaaaaaaaaagttttaaaaataataatgcctatacttgctttaatgaaggatgtacctgaattacaaatgccatcatgacagattaaattagccaataattagtcactgctttatttttttttagtgtcaaacaatggtagataccaagacaagtaacaacaaaaggcaaaagagtttattttatttagacgtggtcattctaacataaggagaagatgcattttcctttcaaaaattgaggtctctttgggcaaactttcagtcctttggctattagggtttgtcttcatgaaggcagacataaagcaattctgttctcttccttatttgaacactttcagtcttcacctggctctctgccaccccagctaaaccacttgacctctgattacataacagtccccatctgtgagctcagccatcctcaggagataggaggggccatgagaagctcaagttcaccatgagccacagcagtaagccatgctttagcctctgacctgtgctccaattttggtacaatgatttctgccatgttctccaacaggtaagctctacctcaaggactaa

SEQ ID NO: 852056 - DNA, 513 bp, Homo sapiens
ccgtccactcagcctcatagwttcatgacatttcaaaactaaaaggaaacttggaaccttagaaagaaatttggagcctaagaaagttcttagaaaggaacctagaagcctcttgttgaatcccatcatttcatagctgagaaatctggtatttggaagacaggagttgctgatggctgagagctagtcagggcctgaacctggagccggagccaggtgttcagaggtgaacagtgtcgagattatggtttggtggattaattatgctcttgaatcagcagattggagagacagccatctcaagacactaggtttagagttttcaacttccacatcagtcatatttaaataaaccagcaagatcatatgccttaaagttggtgctcattttgatgaaatactgacagaaaaggccaaaatacaagtctggggtatacatgtcccatcaatctgtagctatgcccatgaaaagagtgctagataagaaatctttacaatgccaaactttgtttt

SEQ ID NO: 852057 - DNA, 447 bp, Homo sapiens
gtccttccaacgaagagtcatgtatggagcacctgctatgggccaggctggattagatgctaggracaagacagtgaacaaacagcctgacctcagtcttcatgatctttacaatttagtaggcagtaaaaattggtctggcaaagttttaaaaatgatcaaaataaaagttaaaaataaaagtttttctattaatttttatgttttctaaaagttgccagcagttttctgtcactggagataggtacactttgtttcaggaaaaatcacacattcgagtcacacaaatacatggtaagatcccagacactgtttgggagggagctgaagcctgattgggccacctgtggtgggagggtcttgtccctcccctgtcctctccatgcctggagcttgaaggtggctgattggtggggtgaatggatttggattggattcaccctgtgg

SEQ ID NO: 852058 - DNA, 530 bp, Homo sapiens
tccttccaacgaagagtcatgtatggagcacctgctatgggccaggctggattagatgctaggaacaagacagtgaacaaacagcctgacctcagtcttcatgatctttacaatttagtaggcagtaaaaattggtctggcaaagttttaaaaatgatcaaaataaaagttaaaaataaaagtttttctattaatttttatgttttctaaaagttgccagcagttttctgtcactggagataggtacactttgtttcaggaaaaatcacacattcgagtcacacaaatacatggtaagatcccagacactgtttgggagggagctgaagcctgattgggccacctgtggtgggagggtcttgtccctcccctgtcctctccatgcctggagcttgaaggtggctgattggtggggtgaayggatttggattggattcaccctgtgggtaagaccccctcccttaggtatccaaggcatagcaacacaatggaaagtgggctagtcctgctgagtgcagaggtgaggaagt

SEQ ID NO: 852059 - DNA, 377 bp, Homo sapiens
aggaaactgttagcgatagctcctcagaaagtgaggaagatgaagaaccacctgaccatcgtcaggaagcaagtgcagatttgccatcagaatattggcaaattcagaagctggtgaaatatttaaaggtaagaaaggcctgtggtagtatgtttgcaatgttcatttaaaatactttcccaaggatgtatatgctgattccaagtttatgtttctttcaaataagagtagtaagcattcctgttgttttatctaagtgtgtgcagggraaggtcttattaccctgaggatgcaagattcatcctcatggagcaaccaggctgcctggtaccaaccctctctcctggctggggagtgcccatggtaaacagctgaca

SEQ ID NO: 852060 - DNA, 621 bp, Homo sapiens
acaatagaatggtggttaccaagaaacggagttagggagatacaggaagttgttgttcaatgcatgtaaagttacagttatacaagatgagtaaattccagagatctgctgtgcaacttagtatctacagttggcaataaggcattgtgcacttaaacatttgttaggacagtagatctcatgataagtgttcctttttttcttatagtattggctttactggtttttggaattaaaaccatcttgtaactattaagaattaggaagaagaaacagtagtagaagttataaaatccctctgaaagggcaactaatttctcatcaaaattaaaaacctttaaagtagctgaggtagttggagtcactttatggggaggatgaagtcaagatagggtaaggagcattcagaaagaattattttcggcaaggtaagatgtttttcctttcagtaggatgtattcataaagcaaggtagtcactaatagctggcctttaagactyaactgtagtatggatagggttagatacccactgcttgagctttttagttgtactccaggaatctaaaatctgtcctggcaattaatgaattagaacatccttctcaccccgtcaattgaa

SEQ ID NO: 852061 - DNA, 307 bp, Homo sapiens
cccctacccttgtgcaatcccatacaggagaagtaccccagggaagcatcgccttggtaggcataccccaagggagccacagcatccccttcacttcctgctggactgtagtgattagccagaggttaaagctttgagtttgtgcagttattttctgagtacgtgtcctgccctgagcatgtgcatggctttaaaatttcyagtatacagatcacctgaggtcggtagttcaagaccagcctggccaacatggcaaaaccccatctctactaaaaatataaaacttagctgggcgtggtggcgcccg

SEQ ID NO: 852062 - DNA, 604 bp, Homo sapiens
taagtgatagttgccaactgaaaactatgctaccctttccatcataatatggaattgtaattgaaatatggctgtccaatcaaggattacattttcraatctcctttgttcctttgtgtggccttgtgaccagtaatcagctacagaatataagtggaagtgatgggtgtttcttccagaccaagacctttaagaattgctctatcccatcccatcatctagacataggtgacagaggaacctacttgaactgtggtacataagctggcaggaacctgggttcctgaagcatcatgggcaggatacctagtcactgaccaggaacatctgtagtgactgttacatgagtgagagatatatttgtattgtgataagccactaaaatgtcatggcttatttattaaaatgattagtttggctttactactagataatccatgaagatatagctgtccctaacactcatatctgagcacactttagtttacttagcactctacctgttgacattgaaagagaggtgttaattacatagcatttgaaaaagatctggaagaaaggtggtttatcagtgggtgtacttcagggttaaccagatgttaaa

SEQ ID NO: 852063 - DNA, 604 bp, Homo sapiens
taagtgatagttgccaactgaaaactatgctaccctttccatcataatatggaattgtaattgaaatatggctgtccaatcaaggattacattttcaaatctcctttgttcctttgtgtggccttgtgaccagtaatcagctacagaatataagtggaagtgatgggtgtttcttccagaccaagacctttaagaattgctctatcccatcccatcatctagacataggtgacagaggaacctacttgaactgtggtacataagctggcaggaacctgggttcctgaagcatcatgggcaggatacctagtcactgaccaggaacatctgtagtgactgttacatgagtgagagatatatttgtattgtgataagccactaaaatgtcatggcttatttattaaaatgattagtttggctttactactagataatccatgaagatatagctgtccctaacactcatatctgagcacactttagtttacttagcactctacctgttgacattgaaagagaggtgttaattacatarcatttgaaaaagatctggaagaaaggtggtttatcagtgggtgtacttcagggttaaccagatgttaaa

SEQ ID NO: 852064 - DNA, 597 bp, Homo sapiens
aagtctttgagattgtaccctttactctcttcctgtagtaaagctttactatctyattaataaaattggtaaggcatttaaaatggatgaggaaagaattgcgttgatggtttagtcttaggaaaggctattatcctttaaactgtaaactaaattttccccaaaattagcttggcccacacccaggaataaccaagagcaatttggaggttaaaggcaagatgcaattgttaggtcaatttctttcactgtcataattttctcatggttataatgtttgcaaaggaagtttcactattcggtagggtaactgcttaccaaaatatccaggcaagtgagtgaaatatttaacagactgaaaatcaatgcagtcgtttttattatacaaaactaatgattgtggtcatgatattcaaaataagaattatctaataatttgtttaagtacaaatacccataatgtatgaaattaataatgtttcttacatgaattatcttctaataattttcttctgcaaaaactttaactttctttaaaaattggaaacaaaataatcaaattgtggtccgacgtactcaactaacttgtaaataaca

SEQ ID NO: 852065 - DNA, 508 bp, Homo sapiens
ataattggtcacagccagtatgaggggaaggcaatttcctaatagataaaaacacttgaaattggtaactggtggctcccaataaaatctcaggaattgaaagagtgggcttgascatgcatattaaaagacaaaatggcagagtatgaccatccaggggcattccaccagaaagggaagtgagcatgtgtacaacatgattcctgaacacactgtgcatgctcccctcccaagtgcaagaagggcacaatgcatgtgggcagctcaccctaagggaagaatcataggaaaagaatcataggaaaaggaatgcaagaccttggaaatatgccaacatataaatccacaagtcaaaaggtcaaactccgcacttgacctccaaagtggccacttgtgtacttgtgtactttcctttctttcctcctctaaagctttttaacaaactttgactcctgctctgaaacttgccttagtccctttttctgccttatggccctcagttgaattc

SEQ ID NO: 852066 - DNA, 599 bp, Homo sapiens
ccccaagcctctaatcttcccagggaagggaacaagaagaaccacattttaaacgaaatttatttttctttcctcaggctcccagttcacatttctccctcaggagtctagggaagcttctgtctggtatcggcctcctcttcacctgggcccccgccctcctcaggtgtaccagaagccagcacactcccccttcccccccagagccacagcagccctgtctcctgggtggtcttgtgtgccaagcctgggcaacatcactcccagcttttcttgttttgccccttctccccagcaagatatttgtatgtaaggtcaggtgagtgagttaaagaataacgaagagataaacagtcaaatggagtcctgactgtcaggtcaagacaacagttatttactgaatgcctcatgtcattcaacagacatttattgagactctgattggatgtcagtctttaatgctgggtgtcagagagaggtgacttcaagggcttgcatctgtgcacccagcattgctaggtacaatgaggagtataataaaagcaggagcyatagcccccaactctcaagagatctcccatgtgtgtatgtctgcatat

SEQ ID NO: 852067 - DNA, 657 bp, Homo sapiens
cccataggggctcagacctgaggctggtaatgaggggtctgcaccctcactcagggcctgctcctccctttcatagaagggtctagaggacctgggggagccctgtccaaagagaggtctctggatccaygttccctggccttgggtgggtttgtaggcaaaccttctttctccttcgctctcagcctctcctcaccctgggagctgcacccatagctctgaatgggactgtccctgccctgccccattcattcctggccaagctcagtggtgaccacggacctctagcagcagctcagctgccctagctgagtccactctgctccaggcagggccatcagctggctcaggatctggagtgtgcacgaggcagaatggcagtggcatcgtcccagggcctagccaggaatcccatgggtccaaggggctcggccatttcctaaacctcatcctggacacgctctactcttcaccttccaccttaactgctgggactcaaggtgctctctctgggaatgcagccttaggaactgggtgggccaaggccctcacagccccctcgtcctgggattcccccaggtttctctcttcttagcctcctccagggacaccccttcccttgacatccttggtgaagtggccatgctactcctctcc

SEQ ID NO: 852068 - DNA, 603 bp, Homo sapiens
aatcgcgaggcgcggaaggatcgcggggctggcggccgctgccattgtagaccaggagcgcccgggacacaaggcgcagtcgatgtggagaccagcgtatgaatcacttcggccctcgcatgccagctagtgattgagtgtgctcggccccgtccggtcccgtcccgccccgggatccaggggagcctacgcctgcccacgtttggagggatgctccgccctatcccgccccgtcccgcccttccccgccccaccccaggctgggacccggggagcctatgcctgctgtggctccgcttcgtcccgccccgggctcgtggcctgacagcggccccctctggccaacccttaccctccaccccaggctccgcgcgggccaggacacgattccttcttgaccgcctcatttaattttttaacacaccatttattattaccccaatgtaagcactgatgcacaggaaagcgaagaaacttgcacagggatatccagtggcggctgtgtccccccgtcactgcctccgccagcgacacctgccctccttcagcytgcgccaaggagtccccgcccctctccgtccagggcgcagctgcttcccagtc

SEQ ID NO: 852069 - DNA, 588 bp, Homo sapiens
agggtatgaaaagacagagaatttgcatttgtgttttggggaggacttgaggaagtctagctttgctctgccttggatgctgtcaggaagtggggaattctgtgactgagtatcttggtcattcttatccagaaagaaaaaaaaggaagcagctagagccctactgggtaaagaagcagcagccactcatattggccaggacagagagacgctggtcattttgatttcaggaatgctcttatttttggccatgttcagacatgaatgaaagactttccctggggcctggaagctgggggtggtgggtgaataactcctccctcctcaaagccagtcccaaggcgcaagaccacttgggccagcagcatgtgtcagcaggacagcagaagcaggaagagagctggccggaagacacatacaccctgaagaccgagagagaggccatccaggtactgtatagcagttacatcagactgagacamgtcccgtttacaggagactataaacccctgccccgtcctcatttggtgctgacgccattttaggcctcagcccgtctgcacccaggcgctcattaaagcagcatgt

SEQ ID NO: 852070 - DNA, 571 bp, Homo sapiens
tttgtgttagagaagacttgacttgcctagttaattacatttcttctctaggcccaaatatgtttctggaccagttctgctggctaaagtccttggggaaggctkgttgacctcaggttgtccagttggcagtaatgaatctatttaaccatccagccagtcatgcaataaatatcttttatgggcctactatgtggcaggcataaagtagaactaaaataataggattatttccagagtttctatttttaattttagaacatttgttgtttctttctttacaagttaaacactcagtgcaaggagggtaattttgagaattttcctctattttgagggtagctttattgttctgttatagttatttaaaatttttgtgtgtgacagcctagataaacaggcaacaggcctaagaattagagcttttatgttgctatcagactattttaaaacaaacaaaaccctacaaagaaaaagagatgaaaataaatgtgaagtgcagtatttcacacagtgaattcagcgagaagttaagtacttttctcattttcaaaatttagtgccagaccaa

SEQ ID NO: 852071 - DNA, 604 bp, Homo sapiens
aaccttggacaaagagatggtccacacagcaagaaatggaaaatctgaaagtctaaggcaggtagtggagggagagatcacaggctcagagaagtgcccatgccagaggggtctaagtgtgaaaatccagaacaatgtccatccactgtgcttatgggaaacctggaggactcctgtttacccagcatataaagaaggccccatgagaaggcaccagaatggaatgaagcttagggatgcctattgctgaaggccagggttgggggtaggagatgctgttcctgaaatctgctcccagagtaatgggatgaacaattctgaaattccaaattccaggtggaggctgtcaactgtcaggagcaaggagggtgcaatgatggaaatgattagagaagtcacaatgccagctggggacctcagttatacaaagttatgcccatggctcatagaacaaaggggtccaaagtccaaaagagatgsaaacccaccccggatactgctggatttaaataattacaagaaacagagataaaccaaatcaggaggctgaaagtagccagtccatcaagaacgaggctgctttgcctaatttgcagaatgaagc

SEQ ID NO: 852072 - DNA, 588 bp, Homo sapiens
tggaatgaagcttagggatgcctattgctgaaggccagggttgggggtaggagatgctgttcctgaaatctgctcccagagtaatgggatgaacaattctgaaattccaaattccaggtggaggctgtcaactgtcaggagcaaggagggtgcaatgatggaaatgattagagaagtcacaatgccagctggggacctcagttatacaaagttatgcccatggctcatagaacaaaggggtccaaagtccaaaagagatggaaacccaccccggatactgctggatttaaataattacaagaaacagagataaaccaaatcaggaggctgaaagtagccagtccatcaagaacgaggctgctttgcctaatttgcagaatgaagccacttctcagaccctgaacccatgactataagaagacaccagtttctagtgaggaaggaccctttaaccctgcagccaggacagtgagtccttgtggccttctccaragatatttatggccaatagagtttgctgtgaagggcaattttgtaaacatgtaaaggtgttcagggaatatattctccattgtaactactcaactc

SEQ ID NO: 852073 - DNA, 588 bp, Homo sapiens
tggaatgaagcttagggatgcctattgctgaaggccagggttgggggtaggagatgctgttcctgaaatctgctcccagagtaatgggatgaacaattctgaaattccaaattccaggtggaggctgtcaactgtcaggagcaaggagggtgcaatgatggaaatgattagagaagtcacaatgccagctggggacctcagttatacaaagttatgcccatggctcatagaacaaaggggtccaaagtccaaaagagatggaaacccaccccggatactgctggatttaaataattacaagaaacagagataaaccaaatcaggaggctgaaagtagccagtccatcaagaacgaggctgctttgcctaatttgcagaatgaagccacttctcagaccctgaacccatgactataagaagacaccagtttctagtgaggaaggaccctttaaccctgcagccaggacagtgagtccttgtggccttctccagagatatttatggccartagagtttgctgtgaagggcaattttgtaaacatgtaaaggtgttcagggaatatattctccattgtaactactcaactc

SEQ ID NO: 852074 - DNA, 600 bp, Homo sapiens
gcttcctaaagatagaagtggtattaaaatgttgtgcattcgtcaaatcttgaagaagtttcaaatttttaggttgattctaacctctcattttggttgacacaataatccataaaaacaagtaaagcgcccactctgatctggaaggggtaaggaggtgaaagtattgataagccaaagtgacagcctcttttgtagacatgatcctgcctaaatatctcatgcccctcaaaagagggccctgaacgccctgcttctgcagagctccatgcagtccttgaagcactctctggctgtctctgcaagtggctgaacagctcctcctggtctctgtggggctgcagaggctccaggtccccatggctcaggggctgtcatgctcaccaggtcccatcaagggtgcaccccactgtgggtggtggaggagaccaggtgtagctgctcctgcctctacacctctcctgacyggccaatcttaacaggaggaaggagtagggatgagtggagccatggaggttggtgctggaaagaacagaaatgaagaccttcgtccaatcccccaaatgatggggatccctttctgagttctagcagccctgg

SEQ ID NO: 852075 - DNA, 571 bp, Homo sapiens
cttacctacaggtttagatgtcattcaactcaactccatggggttgcggctggaartggagtcagattggcaacaaagcatttactgaatgcctactcagggtaaatgattctaaaaaaaactacctcttcaccccacgctatcccccaaaaacaaggcaaggtataattgttgaacacatacagtataggtgttctaaaaagcatagagaaaggctctggggtataaatctatttttatgtcctatatacccgttcttttatgtggccttagcttagatgagagtcactcccaagactggtctgttccccaggtgattctgcagccagagttgggaatcctgctcttaagccctaagagctcttaagcagagcattttagcaacaaactccctacccatttcctgttttcagtcatctgtgcaacctgcatttccttcacattcttagtcctttcaccagggcttgaaaattagtttgtatttccctatcccatttccctctcctgtcctcagaattgcaatgcagttctaccgtagtttgaatgggtagtatcatacattttgacatcc

SEQ ID NO: 852076 - DNA, 543 bp, Homo sapiens
agcctcctgcaagtctctaccagcaaaacataagagttctctgtggctgctatgctctgacctctttgcttgttccccagtgtgagaaaaataaaaaaatcatcataggaagaaacacaggtaattcaggaaacatgcaaagatactttcgctttctttgttgggaaaggccaaaacatggtggcttcttccagcaatcattccagaccactgcttagtacatttttttttttgagatggagtctcgctctgtcacccaggctgggtgcagtggcgcaatctcggctcacagcaagctctgcctcccgggttcatgccattctcctgcctcagcctccggagtagctgggactacaggtgcccaccacgatgcccagctaattttctgtattttttttttttagtagagatggggtttcaccatgttagccaggatggtctcgctctcctgacctggtgatcygcccgcctcggcttcccaaagtgctgggattacaggcatgagccactgcacccagccactgcttagtacatttaaaatga

SEQ ID NO: 852077 - DNA, 598 bp, Homo sapiens
aattttataattggcttgtcagcgtgcacaaaaattcctgctgggattwtgattggaatcgcattaaatctggtgatcaatgtggaaagggttgacattttaaaaataatggattttctaatccgcaaacaaggaccatcttccccacttactcatgtcttctttaatttatttcagtaatgtttcatagtttttcatgaagaggtcttgcatttgaaaaaaataaatgtatccataagtattgaattttttgatgctatatgaatcagaatttatttatttttctaatttttgttgctattacatagaaacaaagtggacttgctatattaaccatgtttccagtgacccttctaaattcatctgttaattctaatttgttgattatttgaattttctatctatgcaattgtcctttgtgaatcctgacagttgtatttattcctttccaatctttatgtatttatttatttttgcttattgctctggctcaatatttccagctcagcatctaatagacatgatgatgatgtgtgatcctaacctgctgggggagtctggctattttactactagctgtaggcgtttgaaaatagac

SEQ ID NO: 852078 - DNA, 562 bp, Homo sapiens
acctaccaacaataagtgcagtatactcagacgagagaatgttctccagcagtgaaaatagattckccatatgcacaagacatggatgaatctcaaaatcaccacatcaagcaaaagaagcaaacaaacttccagactgtgcagttacctgtgtgtaacttcaaaaagagaaactaagcagtctattgtttagagacacacatagaggtggggcaaccataaggaaaggcaagggattcagttgactttgagggcagtctttggcaggtagagagttggagagagagacagagggaaaggtgatcagggtggaacactgggaggtaggatgaccaattgcccaattttgccaagaaatgagaaattccctaagatttagaaatgagaaatttcctaaggtttagaaatttcagtgctacaaccaggacagtcttgggcaaagtggaactattggctaccctacaccgaaagtgtctaagtttccagaacattctgatttggccctgtggctctttattttaccattatttgtaaactagatgtagcaggtgaaatggtgtcc

SEQ ID NO: 852079 - DNA, 598 bp, Homo sapiens
agcaaaaggtttcattttgttacatacctcaccgtgctctggccacatcctagaagatggtgacaccataagaaggggccagaacacatcctgaagcaatatactagtcactgtcaccttcacccccatgcctcagaaagtaaatttacaccccaccagggagcaaaattacactcacatacacaaaacatgaaacgccgaagcatcctattgtggaagtcagttttaacataagaagaaaagtctatgccttcaagaaatatttattagggctgggcccagtccctcatgcctgtaatcccaacactttgggaggccaaagtgggaggatcacgtaaggccaggagtttgagaccagcctgggcgacatagcaagactccatctctaaaaaaataaaataaaaattagccagacaggggctgggcgcggtggctcacacctgtaatcccagtactttgggaggctgaggcaggtggatcacgaggtcagtaggtctctactaaaaatacaaaatttagccagatgtggtggtgcrcatctgtagtcccagctactcgggaggctgaggcaggaacattacttgtacctgggaggcgg

SEQ ID NO: 852080 - DNA, 598 bp, Homo sapiens
cagcctcattttactcagctcctatttaagatgaagttgctcaggttcaattgcctctgacactctgtgtccagyatccccaagcctacagtttctttagctcattttctctatttgtttgtttgtttattttttttactagtgtaggagagattactgtcctgtctgcttgattcaggtgacagctgggggtttaactgccctttgcaaactagaaaacaacctcctgttatcagcctcttatctcggctccccacctgctcctcttgtgtttctagggctgtgctggacaagtcaaatttcttcttagtgatttttctctctctcaacactaaggttttaccttcttgtattctgacaaattatttcgtatttcctcatttgctttctgtcctcacatattgagattcaggtaaagatgcctcgtagataaaactttatccaagataagagtttacctttttcttattttcttttttgctttggactgcttttcaagaagagaaaaaggtagtttttgacttcattttcttgcttgttgattttctaaagtaaaattttgaaggttgaaacttatcagtgtcttctgtagtataaa

SEQ ID NO: 852081 - DNA, 421 bp, Homo sapiens
tctatgtatagattagaacaggagtttgtaataaggtgttttccacaactactcaactttgctgtcatagtgggaaagcagctataggcaatacataaacaagtggacataactgtgctccaataatattttatttattaatacaaagacaagcagcagccatatttggcctacaggttgtagtttgctaactcctgcattagaatgtcaagtgaaataaaagctcctcactataatattttttaaattatttgccatgttttgtttacttaaatcctattctaacttaatgctttaatttgtacatttttctttttaaatttcacctttttgattgctaccgtgcttttatatcttcagcttctttttaggstctctaatatcctcatacatctttccaaccttatcaagactcctccaa

SEQ ID NO: 852082 - DNA, 585 bp, Homo sapiens
catgctgtgtacaaaccatccctagaaatgaactgtctggagtattttatttcttaattaatccagttttgctatttggtrtaaacaggatgatgttcaggctgaatgaaagaacaggaaagtttaggggatacaattcaaggaggagtttcaactccctccacatctgctgctctattttgctttaaattagattttaaaattaatttaatttttcatttgaaactgctgcaccctccaccatctctctttcttttcttccagtaactggtcctcctctctgtggccctggtacttcccagagcaaacactgcatcatctgacagttctttttccatcattttttttttcattacttagccagactggtaatttattagtaagaagaagatggtatcagctgacaggactaggcttatgggcatatgagaaagacaaagatctctctcgccaattatagaaattccaagttgtgatccacttctttctagcaagcaccaccctcttttaacatgaaaagactcaaaacacaacagtagataatttgacacgtcaccttaacttctgcatctggaaaactgagac

SEQ ID NO: 852083 - DNA, 620 bp, Homo sapiens
acatgggcaatgcccctgtaccatgctgacctacagtaccaccgaaggcaaacagcgtatraggtggttggggaaaactagctagatctccagcatgttgggagaataagagaaggaaaagagccctccccaagagctgcctatgactgatcttctcttctggtttccaccctgtaaattggatccccactccgcacccccaactctatctctggaaggccccatgctgcaatcagagcaaggtcagagttgatcatggaggttgggggtgtgtaggcagagcccggatatgctctcggcgggtgtggccaaggggatccacccttgagcctcagagtcctgtccatctgcatttgagtcacaccactctgccactttttagctgtgtgtgtcctggggcagctcacttaaccttctccacctcattttctttacctgtgaaaggggtactaaaacttactttgtaaggttgttgttaagaactagaaacaatgtctcaatacaagggactgttactctgtctagggcagaagcatctgccaggtgtccttaaagatgctgaatacctgtgggttctcactccgaaggcaaaccaggaaaacttcatgacccctttctca

SEQ ID NO: 852084 - DNA, 371 bp, Homo sapiens
agccccaaaagtgctggaattacaggcatgagccaccaaacccaacctgaaggtatttttctaaggtcaagtatgccccccgaccttgggtcctagttggtagaaagcatttccgaagtggagacatctggatggcagatgtgaagttggctgggatgggcgaaggtctggaaggcttcagattccaggccccatgactcactcctccatcacagcaacccctcagcagctgggcctcctgagccctgggcaggacagggttrgtgggccaggcccgggtgggcagtggtcctttgccttggacactgtatggtctgaaaggatcccggcaggactgatcacttttgaaactgctttctgaaagctccaag

SEQ ID NO: 852085 - DNA, 546 bp, Homo sapiens
gtggctcctattggcctcagcacaggcttcttcccaactctgagccactcccyactttcagtactatcccttctgcttttgctctagttgcagctgcagggaggatggatgagcctggggccattggaggctcaccaggatggggatgaatcaagagcaggtgttaagactctgccttcaggccctgaggggtcagggtagtgggaccaccatcagtgcaggtgggaagaggctgaatgtagcaagccatcctgagaatagcaccagccatgagctgagagccaagaagtctggcagcaggcaagggagtggcacttttttttttttttttgagtggtagcaaggtttattgtgaagagtgaaagaacaaagcttccacagcatggaaggggacccgagcgggttgcccgggagtggtacttctttgcccattggtagatcaaaaggccattttgggcccaagcaacccctatacctgggctaagggagtgcatcatgtgggcagggccttattttggcctcacttgttcatttcatagcctcttg

SEQ ID NO: 852086 - DNA, 494 bp, Homo sapiens
gtcttctgcttctctcccatgcctttgtgttgcccctagggtgtttctctactttccaccttccctctacatcctstctgctcctttagaccttggcagccaatcctgtacctccagcatctcgttgcctagcaaccggcttcctacctgccccattgtgttagaatctccatgacaacaagtattgccaaaagagagaaaaaaaagttaggtggtagcaggaggtgatgagaccctttattttaggacatttgtgcagttttgccagcaataatttgctcactctcaggattccccagagggtgtcacaaatggactgaacccagacctcatgagataacaagtcacgagactgacagtctgtctgtgtgtggggatataaactctagcatagaggcattcatgtgaggggcaagaatgagagccacgggcattttttgtttagacagatgggactgggtcacatgatcccctttctgtgggtcagttcagga

SEQ ID NO: 852087 - DNA, 611 bp, Homo sapiens
accttgttggccaggctggttagaactcctgaccttgtgatctgcctgcttcagcctcccaaagtgctgggattacaggcatgagccattgcacctggcctatttattttattgtttctartttttttgcgattacaaaccgtgctgctatggaaattcttgtaaagatcttattgtgtacatttgtgtttctccagtagtctacccaggagtgaaactgatggccgcagagcctggacactttaactttaccatattcatcctaacactggtattgtcagaccctttttttggacaaccagatggatgtgaaattgtagattatcatgattttaatttgtatttcaccaactattaataggattgagcatcttttcataagtttgttcagattagaattgccttctattcctatttcctaatctttttccaattatattgttggttattttctcttggatatataataattctatagtgtggccaattgccctttttctgttacatgtttttctcttatcctttccaaactggtggcttctgtctcagcacctttttaatagctttattaaggtataattaacatagcctaaaattcacccatggtaaag

SEQ ID NO: 852088 - DNA, 707 bp, Homo sapiens
tgaagtaactgtctatataaaccatatttatttcaaatactttaaacaatatttcaagttgtctatgtgctggtgtttaaaactcacagttttrggacctatttctaacttagataacaaaacagctatacttttctttcacataatacaaaggcaaatttgctgtttctttgaatacggtcagtctcttttgttgattaaggactaaggtcaacggttcagaatttggatggcccaattagcatttgttgagctcattctcacagattgccattcttgctgaccgcaggcttgaaattggtgtcctgagtcatcagggccactggttggaataatatgtgaattaattaatcagactgtatcactagcatagaaaatagcataaaacacatccctctgcaaatgtgactaataaaacttgggtgttagggtctgaacccctgaccaagtgtcagcagagctgtctacaaatcctcacccctatggtattgatattgtgcctgtgccatttttgtcatctctccctaaagagagacgctgaagatcttattttttcagcaagaacctcctatgtggcccagcgtttcgatctttataatttccttcctaacctgtggatcttgttgattctggcttggtgaggagtttcttcttcctcttgtctgctatcctcatctcctaaaccttggcccttcattcatttctct

SEQ ID NO: 852089 - DNA, 689 bp, Homo sapiens
gcaagaagctcaagagccctagttgcaaattttctgggatttaagtaccctttagagatttcctattggttactccctgtttaaatgaagacttggcctgccgccagttggaggctgaagtgaaggcttggcccrtgaccaatcagaggctgaagtggagttacactctatgcaaatgaagacttggcccatgaccaattggaggctgaagtgaagttaccccctgtgcaaataaaggctgggctggtgaccaatcaaaagctgaagtgctgcctgtctccagaccctattctgcctcactgaccacataaaaagcagaagacaaaaatctcatgaagaagcttcatcatctgcttcaaaaattggtaattatttcaagaagactgtgcctaaagatgacaatttagcacctgcagttgcagaaggtgcttttacacatacttggttaatcatgatttttcatttagatcaaataactagtcttctaaactaatcttcctcatttgaaattccaaattttctcattcatttatagaaagtgaaatgatagctatttatattttcatgacattagcagaactttgtaaacaggtaaatgaagatggattcagatcaatgtccttagagccttcaaattgaagttagttaattccaataatgtttgtgtttttcatctgcttcatggaatc

SEQ ID NO: 852090 - DNA, 537 bp, Homo sapiens
ctgttgtctcagcacatagcacgctagcatggggccacatgttgcattggtcaaatctcaaggagtgtctgtaatgagccaatacaaacagatgaagcctytacatggaaactctctgctctagactcacgtttggccagggggcgtggcctggagggtgtaactcagggaactccacaggaatagtcccggctgggaacttgcgtccctaaacccaccaaaactgctataacgagctctgcgagtgtatactgttatttgctctgaaaggcagggctgttacccaaatcccctggagagagccagatttgcaaagtgtctgatgtgagcccagagatcagcaacagataccatagacctttctccccatctgcaaccagtcggaaataactctgtccctgctcacctcatctttgcttctgttgtggcttgaaaatcgtatgagagtaacatcctgggatgaaaaatgcagctcgactccctcaggctccactgcagctaagtcccccagatggctgaggatcatttatgcagaag

SEQ ID NO: 852091 - DNA, 570 bp, Homo sapiens
ttttatcagtggtatcgtgagaatggggctggatgacaagaaatccaagaattggaagccttggtaagtcacacgcattccagagagtatgagataacctccatgaacattcaggggcccgccatcttagtaaaatgtttagggattcagtggccaaggatatgttgaaatatcccatccaaagaatagggcaaagtattgcatcttacgtctcccatggtgaaaaaagggatcacaatgttagttcctatagtggaaggcatgagagacttccagcttggagtggggcccagagtaggaaagtataggatgtaagcagccctgccacttgggccatacagcctgacagatcctatgatacaggaggtgttagtggtgggaaaatgtgccaggtacagtttaaaacacatgccttgtgggagaatcataatgaggactcctatgtttctggggcttagtcatgccatctgcagtggagaactctatgccttytggaaaacaatttctattgtgctactgagccctgaagatggggcacctgactgtgagaaccaatgacaatgtggcaac

SEQ ID NO: 852092 - DNA, 629 bp, Homo sapiens
aataaattatcagggaacttgcaggttaatacatgaacactgtcaattctgaaaaagaaagagaaaatagattgaaaagagattgacttgtgggacaagatgaaaaagtctatacacatgtagctggagttccagacagagaaaaaggagaatatagggcagaaaatattatttggaatacatgacttaaactttcccaaatttaaacttacagacccacgtaactcagtaaacccaagaaaaataaagacaaagacattcacaccttggcatgtcataggcaagctgttgaaaattgaagataaagagaaaatatttgaaatgggagaaaaaaacaactaataacagtgagaaaccacattaactacagggaagcaacaacatgaataatgactcacatcagaatgattcacatcagaattaatggagggagaatactttgaaaaaaacttctttaaagttcaggggaataaaaacaaccttcaacccagaattctgtacctagcaaaaatttcattcaaaaatgatgatgaaatamagactttttcaggtgaatgaaaatagaatcagtcaccagcagattcacattataaggaatagcaaaaaaagttattcaggctgaaaaaaat

SEQ ID NO: 852093 - DNA, 410 bp, Homo sapiens
gcatgttgttgcatgtgtgaggtcactaaaacttgtacctatgttttcttctaagaatttatagtttcagctctaatatttgggtctttgacccactttgcattgatttttgtrtacggtgtaaagcagggatccacatttattcttttgcatgtagatattcagcatcattcgttgaaaggattattatttccatcttcaaatggtcttggaacccttgacaaaaatcaattgaccataggcatataaacttatttctggactttcggtgctagtccattgttctacacatttatccatatgccagtatcacattgtttcaaatactgtaaatttgtagtaagttttgaaactggaaagtgtgagtcctccaattttcttcctttttaaacattgtcttggctatttgg

SEQ ID NO: 852094 - DNA, 410 bp, Homo sapiens
gcatgttgttgcatgtgtgaggtcactaaaacttgtacctatgttttcttctaagaatttatagtttcagctctaatatttgggtctttgacccactttgcattgatttttgtatacggtgtaaagcrgggatccacatttattcttttgcatgtagatattcagcatcattcgttgaaaggattattatttccatcttcaaatggtcttggaacccttgacaaaaatcaattgaccataggcatataaacttatttctggactttcggtgctagtccattgttctacacatttatccatatgccagtatcacattgtttcaaatactgtaaatttgtagtaagttttgaaactggaaagtgtgagtcctccaattttcttcctttttaaacattgtcttggctatttgg

SEQ ID NO: 852095 - DNA, 569 bp, Homo sapiens
ttttatcagtggtatcgtgagaatggggctggatgacaagaaatccaagaattggaagccttggtaagtcacacgcattccagagagtatgagataacctccatgaacattcaggggcccgccatcttagtaaaatgtttagggattcagtggccaaggatatgttgaaatatcccatccaaagaatagggcaaagtattgcatcttacgtctcccatggtgaaaaaagggatcacaatgttagttcctatagtggaaggcatgagagacttccagcttggagtggggcccagagtaggaaagtataggatgtaagcagccctgccacttgggccatacagcctgacagatcctatgatacaggaggtgttagtggtgggaaaatgtgccaggtacagtttaaaacacatgccttgtgggagaatcataatgaggactcctatgtttctggggcttagtcatgccatctgcagtggagaactctatgccttytggaaaacaatttctattgtgctactgagccctgaagatggggcacctgactgtgagaaccaatgacaatgtggcaa

SEQ ID NO: 852096 - DNA, 260 bp, Homo sapiens
ttcaaaccaccctcccaccatcctctgatgtctacaagaaaaarggagagagattttttagcatgatatcagtttctatccatcattcactgaattctcattccagcccttggaggttgggtgtcatttttaccattttacagatggagaagctgaggctctgagaaggcaagcaacttgttcaagatcacctcattggcagaactgggcttgatacaaagctaaacctgaagcagagcctgtacttggtctgccacact

SEQ ID NO: 852097 - DNA, 260 bp, Homo sapiens
ttcaaaccaccctcccaccatcctctgatgtctacaagaaaaaaggagagagattttttagcatgatrtcagtttctatccatcattcactgaattctcattccagcccttggaggttgggtgtcatttttaccattttacagatggagaagctgaggctctgagaaggcaagcaacttgttcaagatcacctcattggcagaactgggcttgatacaaagctaaacctgaagcagagcctgtacttggtctgccacact

SEQ ID NO: 852098 - DNA, 580 bp, Homo sapiens
ccccaaacccagtgggaatttaaaaccataggaaatattcttgtgccaacccagagggtgaaatatcttcctgttttgtgccctcttaaggccaagaaaaaattattaaataataacaaatcacttaaaaataacaattttaccagcctgggcaacatggcaagatcccatctctacaaaaaaataaataaataaaataaactagctaggcatggtgtcacatgcctgtagttccagctacttgggaggttgaggcaggaggatcatgtgagcccagaagttcaaggttgcagtgagctatgactgcgccactgcactacagcctgggtaacagagtgagaccctgtttctaaaaaaaagaataaataaaaaaattaataataattttaaaatatgaactaacattatttacataataagaattcattttaaaataatggcttggttactctgggctcactgcttatagggtagccctgctccacaaggagcagtgaaaatgtataataataataataatamcaataatggctatcactagaatgtaagcaacaatataaaccctacaagggtagatatt

SEQ ID NO: 852099 - DNA, 592 bp, Homo sapiens
gatgactaaggacaatcttttccccaatgactggccacagctggaggcacaatctatggttctggaaggttagaaacatcaactggaatgcacctttgggaacttggaattaattaggacaaagtctgaatagtgcagtaggattacaccccttactgagaatcatttcctctctctcctggaacttttccgtggtcatacaagcatgcttcaagatcatcactaaaaacaacccccagcaccacaaaaacctgccgtagtaaaacttctcaaaaaagttgttcatcgtctctgtatccatgctttcatcttatttgcacctcttaacagatggcttctgttcctccctgcagtgaaatcactcttgcaaggtcaccagtgactctcagattgccaggctcaaccattgttttcctggtcctgtattggcatttcagctgcagtattcaactcacttgctgcatcttctcagttaytttttcttggccctttgcttggcctgtaaatgttagagtgccctggtgacttcttacacctttctagttagaatctctccctaggtgattctacacagccccaaagctttacatag

SEQ ID NO: 852100 - DNA, 531 bp, Homo sapiens
ccaatgtatgtaggggacaggggccagtggaaactcaggttacataaaaaacccttagttcttggtgagcagcaactggtgaaaccccttcttttttccctactagttgcctcttgagttaccatccccagtgccttcccactttcagaaaaggctagggctggaaattactcatttgcaataattctggttgaagtgagcctttctctccttttttttcccccaaaacaagagtgaattttctgtctaaaccctctgatggacacatcgatacagatcaccagtcttcctgaaaatcatttgaaggagaattgggagggaggtccccacatgacgtcaggagaatggtgaatgcaggctgcctggtgcctggcctccctcctgggacagaagtggcactccctcccacatgtttccccagcttcaccctgccctccaaacccaaggctggcaggtcacctagttaatgtttacaacaaaaacctgwtgaacagtaggaaattcccacctccccccaaatacaaaagcctt

SEQ ID NO: 852101 - DNA, 559 bp, Homo sapiens
caaaaccctacagtgagcaatgagcctttatgtattttttgagttcttctcctattttttttttaatttggctctttccttctacatacaagtgcctgtggacacagcattgtccttgtgctgttgccatttacagcagtaaaacaacagctactatttcttaagggcttatatttggctctttattaacactgtctgttttaagccttacggtaactgaggttggtatcattgtccccattttacagatgagtaaactaaggcttgtgcaatgttaattgagctgcggagaggatatatcacagctaataaattagaggggcagcattcaaccccaggtcttcctgaatgcaaagatttgtgctagtaagctctgtgttctcctctgaggtcactgtggtgggctctaggcacttatgctaccccatttgtgtcagaatacagcatgtgaacacacatgtctatagaatttwaaacccaaatatttacttattactgtctaagttccagacacacaccataaaagatacaaatcttaaaagataaactggaaggacag

SEQ ID NO: 852102 - DNA, 578 bp, Homo sapiens
ctgccctccctcacttggggatccagggaggggtaggtgccaagggccagaaggaagacactctgagaatatgggtmtcttagagaccgccaattcccaccgtaaagcacatttcaccgagttcattgaagtcagtgatcctaacatctatattccctaaatcggatagggaaactgaggccaggggagcgacctcccaggtcactcggtgggtcaggcagagctgggacaggtgctgaggtggggagaggttgagaaactcttgaggctctcttcatattggagttattttatcccaatgtaaggaaggaacagttcctaaaaaagccttcagaggctcccaaccttcaattcgacccagggcaagtcctttctctttctgagtctcagttttctccctattgaaatgatgagagcagtcctggctttttagagaggttgtaagaacccaaggcaggctccagagcccctagcacaaaccctgctgtcccaaaccccctctgcccacacgcccctcaccctgtgatcttgactgagtgggtcccatgccggcggtatctctctggcctcccaaggct

SEQ ID NO: 852103 - DNA, 489 bp, Homo sapiens; identical to SEQ ID NO: 838930

SEQ ID NO: 852104 - DNA, 489 bp, Homo sapiens; identical to SEQ ID NO: 838931

SEQ ID NO: 852105 - DNA, 585 bp, Homo sapiens
ccaagtgccttacatatatgaattcatatcatcttcacaaccacctgccaggtaggactgttattagygccctcattttacacatggagaaactgagacacggagcattaagaagcttacccctgtttccccggttgttgagtggtggagccaggcctggaacctgctttacttggctactgagtgataaacctccttgaacctggctcttaaccacaatcaataccactcactgtggtgcgtgaaccacttcaagatgacttgacgttgcgtgagccggtttggtctgcttttgccagcatgagctgcttgtgctggcgttacccgcacacaaccttgattttggtgattccaatcgacagatggagctcaggcctcgtggatcctccttgaactggaagcccactgtatttctttcccagggctgctatgatgaactgctacaaacgtggctgcttaacacaacagaagttaattttctcagttctgggggccagaagtccaaaatcaaggtgtcggccaggctattctccctctgtatccagaggatcagggagaatctgttccttgcctcctccagcttct

SEQ ID NO: 852106 - DNA, 628 bp, Homo sapiens
ttcagtcctgggtttctgcctgtgtgactctggataagtcacttcctctgtctgagcttgtgtcccckaagcagggttgatgtgaggattaagcatgctgaagcaagtggaaagctccttgtaaactgtgaagtgttgtggacatgattattgttgtacttctctcatttggccataccccacagtataatctgtccccatcctccttccagagcttggtcatcctcctaaagacccctttcctacccaattacaggccttccctggagtctgctctaaaggtcccaacaggcatttccatcttgttccatggctccctgaagcccagggctgcacttggccagctgttctgatgcctgtgtgaactaatctgggcccagcctttctccagcgggccacgagcacagccccaccctaaccaggtgccaagggcacacaccacagacccgaccttgttggctttgtggtgtgataaaacactctccatggccacttggcagagaggccagcagcccgaagcaactgtaattaaaagcctggcactgaatgttccctttccttgtcattgcacaaaatctgtgctgcttaggttaggagcagaagaaggtggggaagctggggggaggga

SEQ ID NO: 852107 - DNA, 466 bp, Homo sapiens
aaggaagctttcatcattgccttatcacatggcccatccagtcatctgaaytgccctccaaatgcaaataaagacaaaaacaaggtaataatagttctgcctgacataatgcaactaacatgatgcaacaaccctgcttacagctgaaaactcattcataccttccccagaattcaggtttcagggtttcaacatttgggatttattgtgattttcaagattttagactagagattttgatccttcggtacttcaacccaaattatgattgaaattacagattatcatgttcaaaattgcatctttcagaattatgatcagcactgcttaattattttattttatttgatcatgtagaaaatcaagccatattcttctttagaggaactcaaaagacattaattatccccaaatttacctatacacttaacataatctcaataaatatatcaataggtttttgtgg

SEQ ID NO: 852108 - DNA, 536 bp, Homo sapiens
tagtaccataatattatgggataacacgctgctcattaaaattatgttttgaaatgtacttatgacatggggaaatttgtagagcatagtcttgtgtatatttaatttgaattgtttgtgtatgtgtatgtgtgttgtctttaagctaaccaataatatatttacattcttctgcttcagtgatttttttcaattgcccacatttagtttccacgtaatatgtgtgtgtgtgtttttttcttttccccattcaggttctgtatcttttttttttacagaataacagagacttttcctttcttcctattacctttagtcccactaaatattgccaggctttggcaacatgtaaagtcaaagaacagggaagtcttctttagaaagtcctccttggaaagtcggttgtagagacaagacagtttctcagcaacaattctctctgtttctctgcctattaaatttattcattcattccttmatttattgaacaaatcttacagtatttatgctaagactggggctggctatacagatga

SEQ ID NO: 852109 - DNA, 528 bp, Homo sapiens
agccaacaacttcatacccagcaacgatgcttccatttctgcagtgattatggggaaagagaaatgagattcactacttatttattcattcactcccggcctatgctgtgtgtacatgccayggggtccataggaataaagtaaacagagcttacattctagtggataaggcaaggcaaataaaaaaacaagtatccaccaaaaatacatatatatatgatatatatatatgtataaatacatctgtatatatacagatataattatggggccccacattaaataaagctggttatggaaggcttttttgtgctgtgggtctttgaagctgaggcctgaggccagctatgcaaagaagaaaaggccagctatgcaaagaacactggtgtggaatgtcagcacaagtaaaggtcctaaggcgggaaaatgcctgtgagtttgacaagcttaaatactaggatgattgaaattcagcagcaagggagcaatagcaggagatgatattggagtggtaccaggagtcagatc

SEQ ID NO: 852110 - DNA, 633 bp, Homo sapiens
agaagttaaagggaagaagaaaggawctttgtcttgtgggacaaaacacatgctgaagtgatggggcaccatggtcccatcagatgcgttggagtttgccttctgttccaatcataaagccccatctgcacagtggcaagccctttccaagggttagtccccatgtgtttgaggtttccaggcaagagccacatcgagcctccataagcaggcactgtgaaccctcaagactgaacagaaaaggaccacatcccctgttcctactcctggcccaatgctaaacttcagtaggctattcccctaattctggagcagataggaaaggcagatggaagagaatgtacactccttcgtagttcatctggacagtaatcaggagctgacccagggtgggcgtttggaaggactcagcctccgtcctgcctggtgctgggatcagcttacacagctcctgtgtccacagggcacagagaatacattgtccataaggaggattattctgtacaagaagctcagacaaagggagaggttgtttccagctgcctgggggaggtgagaggggggtgggaaaagggaccagccttgcactggggcattcctgcagagttcagcttcttctctgtggcagcacaa

SEQ ID NO: 852111 - DNA, 496 bp, Homo sapiens
agtaaatggctatagaaattctggaaaacatctaggaataatttttctaaatgcatctaaaattttactratgtttgaaaatgcctttattgccatcttctctctcacaccataatagcaacactgtatttctgtaccaattttcagtctacaaaaagtttctacatggttacttacttgaaaatgtatgaagtcaatgaagaagctttttaagactggagttgtttcacaaatctgttgccctaggttgtttttcaagtttgatggtctgtgtcttatacttaccactatttttcccttctctctaattactgacatagaactcctacctaataaatacttaagttttgtccagtgagatgtagaacagatatcttaaaattcaaaatgtgagtaagtagctattagtcatttatctggctcaagaaacttactgaatttaaaagaatttaaagtttattagattgaaatgtaatctaagaaaattttgcacagt

SEQ ID NO: 852112 - DNA, 658 bp, Homo sapiens
agatttaggtcaacgtgggttttttttttttttggcttatggatattgaattgcttcagcatcacttgctgaaagacaaaccttcctctgttgaattgcttttgcaattttgtcaaaaatcaaagggtggttctattatggttctttctatttctcagttcttcattctgttccactggtctatgtatctgtccctccactaatcctgagttgtcttaattactggagctataaactcaaccttaatattgggtagagtgataccttcaactttattcttttttgacaagattgttttagctaatttaaacctgtgccattccatgtaaatggtaaaataagcttgtatagatctacaagtaaaccttgctggtattttgataggaattatgctaaatctgtgtatcaattacataagaattgaaatctttattatcttgagtcttttaacccaagaatagggatgatttatctctccatttgtttaggtgttatttgatttccttcgtcaactttttgtaaattttggcatactgatgcrtgttttcttaaggttatacctaagtatttcattttctttggagcgattattaatggtattgtgttttgaattttggtttctacatatttattgttagtgtataaaagtgttattaaa

SEQ ID NO: 852113 - DNA, 506 bp, Homo sapiens
tgccacctctgaagcacccacttctttctgtgtggtctccaacaaatttcatgcaggtacagtttgatagcacgtcccttcargcttacaccccatgcctctacctgaccttcttttttgacattggcatagaatgtcagggaaacttgctttgcatgtgtacacagaggggagttaagattctatggagtgaaactttggccaatgaggaaaggaggtgatggataactgattcccttattttcccccagttctgagacacagttcatttggcttctcagagggttatatgccatcaagcaatcagtcacaaattatggtgggcaattagatataatatccttgttttggctcttcttcctttcctatttcccatctcatcccttactcttgttcttgggatcacatttcccaataaaggtactcacataaaagctgatgtcttaggctctgctttccagggaaccagatagttgctagtaggaagggttttaccaatcctaagg

SEQ ID NO: 852114 - DNA, 506 bp, Homo sapiens
tgccacctctgaagcacccacttctttctgtgtggtctccaacaaatttcatgcaggtacagtttgatagcacgtcccttcaggcttacaccccatgcctctacctgaccttcttttttgacattggcatagaatgtcagggaaacttgctttgcatgtgtacacagaggggagttaagattctatggagtgaaactttggccaatgaggaaaggaggtgatggataactgattcccttattttcccccagttctgagacacagttcatttggcttctcagagggttatatgccatcaagcaatcagtcacaaattatggtgggcaattagatataatatccttgttttggctcttcttcctttcctatttcccatctcatcccttactcttgttcttgggatcacatttcccaataaaggtactcacataaaagctgatgtcttargctctgctttccagggaaccagatagttgctagtaggaagggttttaccaatcctaagg

SEQ ID NO: 852115 - DNA, 632 bp, Homo sapiens
ggcgttctctggggcagggccctgcaatctgtgttttcaccagccctccaggtgattctgtgagcaccaaagttaagaatccactgctctaaaggcctttcatgtattcacttgtttcactctcattccaaccctatgaagtaagttctcatgtgaaattctattaatactttgtagctgggggaactaaagtacagaggtttgtccactgctcaaactaggattcaaacctggacagatgtacctcaaatccctcagtgggggcaagagggcttaacctcaggaagtcaggggacctcacattgcatctctctcacccctggaaaaatatctagagacaagaatctggtgggcacaggacaggcctctgggagtctagttgggcaaggacatgcctggcttcccagaggtcatgtgagtctctgaacggtggttgacctcaaggcaggaaagaacaatttgactaagtgtctgaaggtggtgctgtggaaagaataaagcacttttcaaatcttcctctgtcagtcccaggttgtttgataatgtgcttmgctcaggatctgacacagtgatagggagcttggtaggacgctgccggggcccctgccacagaaaaggtggggtttatctca

SEQ ID NO: 852116 - DNA, 420 bp, Homo sapiens
agtcctagctactaaggaggctgaggcaggagaatctcttgaactcaggaggcagaggttgcagtgagccaagatcatgccactacactccagcctgggcaacacagygagatcccatctcaaaacaaacaaacaaacaacaaaacaaaacaaacaaacaaaaacaagaatagaaggaggtggttctaggattggataagtagctctatgaattcaggtatttgagttagcatttccatgattctctgaccttcccctcatggctacaaaatggctgtcaaaggcctacacatcatgtcttcacaccacagcatcccaagaaggaaggcaggggtcagaagtgctttacctcaggcatctctgtcttagtccatttttgttgctataacagaatacctgtgaatgggtgctttacaatga

SEQ ID NO: 852117 - DNA, 608 bp, Homo sapiens
tagatgggagctatggctatagatgtgaagtgtcagggaacatgcaaaataattgccattactgacttaagcagaccttacagctaaataagttacattgtataagtgaagtcagagtcatcacttctgattgtaagtgtgtacgtgtgtgttctaccatttttgaagtttggggaaaagttttatttttaattgtatattggttctccttgatcattggaaattatattgcctttgaatctttataagtaattcatctgtggaagcacacgtacatcttttaatggcaatagaaatgaaccacaaaagtaaccatttgtatgtccttataacctatgcacaaacaagccaaattttatgtaagtgtgattactaactataaacattttatgctttgaccaaatagctacatctagattatgatctctctgctacccctcatctccatttcatagctttaaaaaaaaaaacaataaatttggaagagctaagagaaagagaatatatggaagcatgcaattttctaggtagaatcatacaggttactagatayatatgatatgtatgtatatcatataatatatataatgtatatataatatgtatat

SEQ ID NO: 852118 - DNA, 452 bp, Homo sapiens
gctcttcatatccctttttctcaatcgcaaacagattgtaacactctagctgggccaatactgtttatttgtttgtttgttgtctgttttagtttattttgctttctgtcttgctgagtatgatagcaaggggattgagtaagctggagaagaatgggtggtgctctatgtacatcacaatatgttgctgtgggcagctggggtaacccagtgtcactctgtgcccatggagtctccataaagggaaaaacagataggaaagaagagagggaggatatgaatacacctttgcttctcaaatgttctgaaagctggcccttcatctatattataattagataacatgctttcctgctgaaattatcaagcatttgtgggaaagwataacactattcttctccttgtccctacaggcaccattgtctctttaaaataagatctgtacttctcct

SEQ ID NO: 852119 - DNA, 575 bp, Homo sapiens
agcctctccaaaggaggcaatcacatatgcatttatctcagtgagcagaggggtgactttgaatagaatggggggcaaatttgccttaagggattccaagcttgacttttctttttagtctagtgatttgggggccccaggatttattttatttcacagcaggaatgctctgaaggcctacactcctcttctgaaactgtgaaaaacccatctcactgaaacaagaacaaaagactgtggtcaatacacatacaaagttgttgtaagataaaagaaaataatgggaggagacaagatagcctgccagatgcagatgggaagcacttcgccgactgagagataccaaaatatcaagtaaactatcacacttcaaacagatcttttgagaaaaaaaatatactggaagtctactgtggtagaacagggcaaaagcctggaaccctgcacagagttgctgagtgccggcgcagctcctggccttgaagggaacctaaggaagggatgagaaaagaaactgcagggaaacatgctcctgccgtggacctctgggatcckagctacaagagatcccatga

SEQ ID NO: 852120 - DNA, 608 bp, Homo sapiens
aaagcagaatgataaaaacatattagtaagtatgaacaaatttgaaatgaatgaaaaaaatagccacatcaaagaaataaaagatgtaaagaagaaccaaatggaaattttagacctgaaaaatccaatagctaaaatacaaagctggacaggcacggtggctcacacctataattccagcattttgggaggctaagaagggcagattacctgaggtcaggagtttaagaccaccctggccaacatggtgaaaccccatctctactaaaaatacaaaaattagccaggcatggtggtgcacgcctttaattccagctgtttgggaggctgaggcaggagaattgcttgaacctgggaggcaaaggttacagtaagccaagatcacaccactgcactccagcctgggcaacagatcgagattatgtcaaaaaaaaaaaaaaaaaatacaaactcagtggatgcaatcaacaacagaatggagagaacagaggatytgtaaactaaatctgtaaactaaaagataaaacatcttttatctgtaaactaaaagataaaacaatagaaattgtgcaatttgaacaagagaaaaaatactttattttttttaa

SEQ ID NO: 852121 - DNA, 599 bp, Homo sapiens
agattaaaccacccttgcagggcccgagcccctttccacttgtttgttacctggaaactggggtctttgtactctgctatttaygacaagagcaaggaatgaagcagattccctaagagaagagccagtgatggggggaagaatggggaggtaccacaaaatatttcgaggatttctagtcaaatgtttactactcctaacaacttaacactgattgtatactatcatttgttttctatacttgtttgcctaaaatggtgttactgttttgtgtaagcaaagaattttaaaatttactccacataataccttccatagtgttaactgttaacatttattcctcaatattcattaaatatttattgagcacctacatgtcaagcactatcatgaagggtatggtaataaacataattcttgacctcagggagcttacgttctgaaatttttattttatatataatcccagttaggcatacaaaattgtagaagttttcatgattttatataatcatcaccttcagaatagagcccttctcaccactcaatttaaaaatacacccactaccactagtataccctttcaatatttatcccct

SEQ ID NO: 852122 - DNA, 688 bp, Homo sapiens
ctggactttgaaacatgagattaggaagaaactatttggcacactccaagtttagatgtgaaaatttctcttgtatttattattaaagaagaactggcaaaccaagcatttcattgcasccttatgtgcaaaaattccgtacattacattttctccactagctttttaccttacataagttgttgaaatttcttaaaccccagtttccttacctgtaaaatgagggtgtttgacttctgatgtctattgtcttttttatgtgccctccataaatatttttcttcatttctatctcttagggcatttattcattttttaaaagaaaataattcagagctattttttggttaacttagagaactgaaggatgaggaaaatataaattcaatttatgcagagatatgtaactgacatctttgtaacaaatcaaagcctaacagtttatgagatatgctatgtttcctcttctgatatatggtatacaattatggactgttctaggaagacaaaagagaagaattagaggcaaactaagggcattttatttctcaggaacactatggaaaaggaaaaactaaaagggagactaaaatagttggagaaaatttctaaagaatattgcaagatatcgtgaatttttaaattgtttactaaaaattggatcctgaacaaaaactaaattttggaa

SEQ ID NO: 852123 - DNA, 607 bp, Homo sapiens
cttatgtgcaaaaattccgtacattacattttctccactagctttttaccttacataagttgttgaaatttcttaaaccccagtttccttacctgtaaaatgagggtgtttgacttctgatgtctattgtcttttttatgtgccctccataaatatttttcttcatttctatctcttagggcatttattcattttttaaaagaaaataattcagagctattttttggttaacttagagaactgaaggatgaggaaaatataaattcaatttatgcagagatatgtaactgacatctttgtaacaaatcaaagcctaacagtttatgagatatgctatgtttcctcttctgatatatggtatacaattatggactgttctaggaagacaaaagagaagaattagaggcaaactaagggcattttatttctcaggaacactatggaaaaggaaaaactaaaagggagactaaaatagttggagaaaatttctaaagaatattgcaagrtatcgtgaatttttaaattgtttactaaaaattggatcctgaacaaaaactaaattttggaaaataaccctgaaagacagattctgcatttacacaaaagc

SEQ ID NO: 852124 - DNA, 583 bp, Homo sapiens
aaccctccaccatccctgtgccctgactgaattcctgacccacagatttcatggacgtaacaaaatgggtattttrtaccattagaactggagtggtttgttatgctgcagtagtaattggatagtaagtttcaatatctgataaaagcaggccttaatcattattcctttttttcccagaaattttctgactattcttgttatcttttcatatacatttttgaaacatactatagtctctgaagtcccttttctaccaccactaccatcatatatatgtatatatgtaatataatatatgtaattttattagggtggcttaaaaattgttttctcataataataatgttagattttctgttcaaaaacagggtacatatttctatttattaaatattctaaaatgcccccacaaaaatttaaaattttcagtgatataagtcctatatattatttgttaaaggcattcttaagtattttacctttttaaaaatagactttatttttagagcagtgttagattcacagcataattgagtggaaggaacagagatttccctttctcccctgccctaacacatgc

SEQ ID NO: 852125 - DNA, 576 bp, Homo sapiens
ggctctttaggttattcccagttattcagaatagctcaccatgctgtaatgaatgacctagttcatatggcatttcctatgggtgtgagtatatctgcaagacatattcctagaaatggtatttcagggctaaaaggcaagcacatttgtaatttggatggtgccaaattgccttccacgttgtaccaattcaacactcaccatgtggcactttaattcattatctcaactcattcaaaaatgatttgcaaggctttgtccctagaaatttcaggcattagagaaaaggagggggaggagccaaaatcccaagaaagacatggctgtcaattctgtctatattaataactcctataaatatttgactagcaacaggctgatctcagaacagctctagtgcctgcactgtggcacccgtctcagtcctgtgactcacatggctgcaatgagattggaagtgcacttccattggaagagactggactgcactgagattggaagtgcgctgtgagactggaagctttctgaaggcagggtctttctcaytgctgtatctcactcccctcccaatgtgcc

SEQ ID NO: 852126 - DNA, 578 bp, Homo sapiens
accatatttttaatagcctttcagatttatttacttagtgaaccaytgcatttttgacagtttttgtgattgatgaaaatggccaagggaataactgccttacaaaaatcaagagactcttcaatccccccttttaagaaaatctattttcttaactgatgaatatcagaatttgcttccacagcctcagatgggaacatgttcagaatcttaaaagcaactcggaagaaaacctttctggaaacctatttctgtcagaatgttgtaatttcctttagaaactccagctgttccacagcacgcagttaaattaagtgtaagcgctgttaaataggaggtaaccattagaatattttaaaaaatatgactagcatccaatgttttaatcaaataatttgctaatccctcgctgttgtgcagcctcccaatcagcagctctgttactccatcctcctggctgcctgagcccggtgctcctgctcctccccctcccctcctcctcctcctccctcctccctcctccctcaacagctcactaggcccttatttttctttggaatgttcctcggagcccatta

SEQ ID NO: 852127 - DNA, 610 bp, Homo sapiens
aatgggagatactaggagaaggctggaagacatcactggatttagggaaagggtagtagcatgcttacagtctgagaggaaagtttcagtagaaaaraataattgcacaaagaggtaagaaagggcacaactgaagaaagatgatgtaagagaagaaaggacaagttttaggtgtgctgtgataacagtatctaaagcaagaacatctttcacaaccacaatgtaaagttgtttagaaaaatcatgctttgtcaatttattcactgaggtcagaatttgtctcagttcaaaatacacctagaatacacaatcaaagggatgcttactttttctaatctagccattctctagcgcttattttatgctagtgtctctaattaatatccaaatgccttgatggatgtattggaattgttttaattcagttctttgtagtcattcagtccattttattcttataattatggggggcaggattaactagaaaatcctctccttctatcaggattaagccccagctaaatgaaaacacaaacaccacaggactaactaagaggcagctattttcagcaaatgtggtgacttttgtaatgcaagccaagctctggag

SEQ ID NO: 852128 - DNA, 583 bp, Homo sapiens
caaaaaataaataaaataaaataaacccaaactacagacaattcaacagaatgaagcaattcacttggatgtccttcacttcctgaagttaaggaaagaacttgtaaccactttgtttacctatattgtttaaagtaaaacattatagacacagagacaggtgtcaagcatattgctagtacctttagcaaccataaaatcataatgcattgtaatccttctttgagtgttgccaagctcatatagatggatgtccaagatgatgaaagctcagaggaggctagcatgatttcagttcaccttgctgtgttgccagaccactaaagctctcaagagctgtagaaacaaaattattttgatattttccattataatacagttacaaagtgggcattcattttaaaacattaaagcatttttttacaaacacttacaaacacttgccataargaattccagggttctctagattgttaatgaagccctagcatagaagagcaatcaatgggcctattttcttcagtttcctgtctgccacatctgcctgtttctataactatgctgtaatttcaagaaacatgtg

SEQ ID NO: 852129 - DNA, 579 bp, Homo sapiens
tctctgttaaagctttcttgtgcatcaagaccaaaccttttctttctctcaaatcccagtaattaagatcagtatttttatcttctattacacctgttcacctatagtgtgccccagctatcttgagctaatcaaccaaacaaactttatctttgctcaggctgtccttgtgacctgaaatgagttccttctttccctattgggaatgttacatgtctttccacacacagctcaaagatttcttcattttaagccctgtttcattcttagcttaagattcccagctcttcccttacagcttgtccactataataattgtttttttaatttcttatctagttgctatttgtttacatgatttttccccacaaaggcttacaactattaagacccaatagagcagctcctgcgtcctcaattcataattcatcaaatcatagctttctctctgaaaagaagtttcactgattatctcatcgaatcctccatttaataagagaaataataagcctgcaggcaggtggctactygcatagtcacaacattccattcctgggtcagggcccaatcctgtgaatg

SEQ ID NO: 852130 - DNA, 629 bp, Homo sapiens
gcctggctggattcaccacctgcttactaaagagccttgggccttsaataaacatcaatggtagtcaagcaatagtcaccacaggccttgaggaagacccagtactgtgctgaattcaggtctgacctagtacagtcccagtgctggtggctacaggggtgcttgcatcacccctcccctaactccaggcagctcagcacaaagagaaagaaactcttgtttgtttgggggaaagtgagggaagagactctgcctggtaattcaagtaattatcctggatcttacccaagatgattgaggcagtactctaaaagtctgtaagagttgcagcattactgggtttggggtgccccataatgcagatatggctgcaatgactaaagacttacatcgcaacactcaattctctttgaatacttggaaagccttgtcaagagggatggatgagtacaagcatccatcatattctaatctttgccaacactgcaaagattagaataaatacctaactattggaggcccagacatcaacaaccatccacaagcatcagtaccatccaggaaaacataacctcaccaaaggaactaaataaggcacctggggtcaatttcagagtcaaagagatatg

SEQ ID NO: 852131 - DNA, 481 bp, Homo sapiens
aattggtctcaaggttagcatttgtcttctacaccatttgcattcaaagctcccacatactaccaattacttaataggcatttataagcatctcttgttggtaatgctgaatttagaaaaatgatattttgatttctttaaaatataatctttaacatgttttgatcttatttgtaaaaatactttactagttttatttatttaaaagatgttggaattgttttttaagaaatttattgtccagcaccaccacaaattgacaatggaataattcaaggggaacgtgaccattatggatatagacagtctgtaacgtatgcatgtaataaaggattcaccatgattggagagcactctatttattgtactgtgaataatgatgaaggagagtggagtggcccaccacctgaatgcagaggtaatcactttggatagttatatttttrctttattcttaccctcaggtctatatgtgggttgc

SEQ ID NO: 852132 - DNA, 612 bp, Homo sapiens
atacgcactttccaatcgaaacacatgggagtctttaaatatttaccgcacataaataaagcatgctatgtagctggcgcttcttagcacctacgcatgccacgtatmaatggacgctggatgtcaatattgatgtataaataataatattaagcacagaaatacaccgcgccgggagaggtctaatcgcactgtcccctggaaataaacgtttctcagggctgtttctgaaggtgggatatttgtctccctcctcacttgaccctgaggggatggagggcaaggtggagaatgccctgagcagacaccggtgcaccgcagtgcacagccaggggtgccactcctccacctccggagagaccgggcgaggcatccgcaaccgcgtcagagcctggcagcggcctggcagcatcccctgccctgggcctcgctaaggttccatgaggggtgcgtggagctggagaagaaaggtgcgaattctgcgcttccccgaggtagccccgggcgagcagggggccagctccagagcctcgggccactgcgccattcctccccctgcgggagctgctgctccaaggctgtccctgctgctcccgggggaaagggcagggc

SEQ ID NO: 852133 - DNA, 591 bp, Homo sapiens
attgtttagtcataagattcttgttccacttcagattggaaataaaaaaccatccctcacatagatagttttagaagcaaggtgttacgtatcaagaaacctaaaattgattaaggaagttagattctttgcctttgttaatattttttagatattttcttaataatccagatgataagcttttcttcctttggggcatcagacttttataaaagttatatatatatgttattctttagttcttccacccttccggaaataattccatatgaaggaaagttagggcgctgtctctggggagccaggtgggggcgctgcgcctgctcccaggctgtgaggttgcagaatctgtgaatataccatgtgtgcctgtaccatgaatttacctagggtgaatctaggctctcagatccaccctaagtatccaccagccaagagggcgcacatgccaagtggagcctcagttcatcgacaggtcctatggcccatttrtgagaaaactgatgacgcagtcagtagttctgagctcgtggggggttacagatcttcagtataggtgatgtttaatattgactttggttcttccgcaat

SEQ ID NO: 852134 - DNA, 528 bp, Homo sapiens
agcgacgggctcaaaatccctcttcccttgcccatgtagttgtggggaagcggatagagaccaggccttgtgactgacctgctcagggaaagccactgagatacagtgcagtcrctgctacctcagagctgggagcagggacagccccagcaagaaagggcctctggtgtcctagttcccttctctcccagcctgggtctggcctcttccctgactctgagccccaagacatgttttcccctcagggtctcatcctcccctcctccaccctgtgtagactacatccctacaatgagtgactagagtcagctttctgcagctccccaaccaccccagccatgaaatcttattattatctataatattatttatatcatttacaagaatgctaaaactattaatatataaacttattaatattaatagtctgtaatacagattaaaattgaattatccttcccaggcagtagaaagaaaacgggcactataaaagcaataaacaggcacttatgctgttaaagtgggatc

SEQ ID NO: 852135 - DNA, 609 bp, Homo sapiens
gggttgttccccaattcctaggctgctgcagaagcatgtgyccttagaaatgccccagaatggcaggaaatcaggaccagaatggaaagaaaagcaggaaagcaaggtgcacttacaattacttggtagatttgctcatgtggtttggacgcaatgttccttgatgcgtattcatcttaagcccacctcagcttagaccatccacatttgctaagccctttcctcagcatcctgcagccaggttgtcgctgttctaccatcaagggcaagcagagggtgatgtgttctgagctcagaaaggctgcaaggcttgtccgagaccatgtcccatggagggagctagggttaccctacaccctgtctctccttctccaggaacagaccacacacctcacatatggagggggcccttcatcaactgtccctgctccccagtcttaatccatcctcccaattccagctccttctctgccagagacacttccctcccttccttccccacctttgctccccctattgtgttggtccctccaggagcagtggagatgtctactctctctaaccccagcttccagggcttgggggtccactatgtgtagccatagcaac

SEQ ID NO: 852136 - DNA, 513 bp, Homo sapiens
gagtagccctgtgttcacaggccctaatcacagcatttattgataccccacaatcatcgaactatcaaaggtcaatcaagccctgatcattctgtgccatctttgcccaatatgaatcccctgaaatcatgaaaagattatgaatctctaaaatgccaagataagttataaagcaaaaaaaactaaaaggaagacctcctatttttcatgccatacacacacatcacaagcaggccatcagatccgcaaaaatgctctggattaaaagataaagtgaaatttaaatatcatttagcaatccaaaattggcttcaggcatcccaaaatggagccaggtgcagcagcctctgtgacaactgttcacatgcattccgagagcaccagacttcacctggttcttaagactgagttgtaaacatgtgttccccacagcagcacaccgttgctcaggatgaacgaggaaaagatttagtgaaagttgcataggatccgwgctggcctcaaaattccatt

SEQ ID NO: 852137 - DNA, 529 bp, Homo sapiens
cttgaacagggcaaaatgaatactcaccaggaatatgtggtattttaaaaagaaggcaaagggaagaayagtggggatggggcaaaaactttaaatagattcccccaatcatatatggcaattgaagataattaaattatcattttaattgagtaagtactcatagagccctcactatttgaaaatgaactgcctcctaattgttattgtgcaaatgtgatacattaaacttaagctattttaataaaacatccattttcggaagctgtagtaggttctcccaggtcagatttgataagccataaagaacaaatgccaactcctatttttctatggtgctgggaaataagagagaaatgtgtaattcaaagcaatcatttaattttatccaatagcttgattctcctctctcttctagccttttagctaagctgttaccaagtaaccacactagttggcttgagtcttaccactgtttccctgaccccacagtggagagactgcatctgttaaagagcagttatgtaac

SEQ ID NO: 852138 - DNA, 534 bp, Homo sapiens
ctagaactttaataacaaaccttgggccaggcatagtggctcatgcctataatcacagcacttcgggaggctgaggctggtagattacttgaggccaggagtttgagaacagcctggccaacatggcaaaaccctgtctctactaaaaatacaaaaattagccgggtgtggtggcgcatgccagtaatcccagttactaggtaggctgaggtacgacaatcgctggaacctgggaggcggaggttgcagtgagctgagattgcactactgcactccagcctgggtgacagagaaagactctgtctcaaaaaaataataataataataataataataataaaccctgatgaaaggtttctaaaatgttttcatctaatggttttcttgacaattaaattttctatataatgtcagttcataaaaaaactgagaacgaccacatgtcatatcgactgcttaaaagaaaatacgtatatttacaaacatatacacratactgtcttttgtctggttagtttagaggttagaataaac

SEQ ID NO: 852139 - DNA, 405 bp, Homo sapiens
agcgcccctgccccagcctcgctgctgccttgcagctcgatctcagactgctgtgctggcaatgagcgaggctccgtgggcgtgggaccytccgagccaggcgcaggatataatctcctggtgtgctgtttgctaagaccgttggaaaagcacagtattagggtgggagtgacccaattttccaggtgtcgtctgtcacagctttgcttggctacgaaagggaattcgctgaccccttgcacttcctgggtgaggcaatgcctcgccctgcttcggctcatgctcagtgcgctgcacccactgtcctgcacccagtgtccgacgagccccagtgggatgaacccggtacctcagttggaaatacagaaatcacccgtcttctgtgtccctcatgctgggagctgt

SEQ ID NO: 852140 - DNA, 620 bp, Homo sapiens
tcaataattttttaataagtacctaaatttgatggttgtttttttaaactgtctaacgttacagaccattcatcatctatttgtgtcttaaraatactgccccagtttcgctgtgggtccctttgagtgaatgcatttctagcttttgaggccacgctatctgtagttctcattatcttggttgctttcagaagcctcatataagccaaagggtgaacaataaccagagaacagagattcttaaattaagcaactgaaaagagtctgctttggttcattagcccaaataggatcttttactttttgagtagcaatcaaaagatattggatctatcatttctcttgttctcttaaaaaatcacttaaatttcctttaaacaatctggtgatgtgatgtcagatttttgcccatcatattataacatcattgttaagtagtatgaatggaaatgaaacatacacctcaaaatatctaacggtcctgatataaggctaaagaaaacaaatagtcttttcttatctttccccttggatgaatttaaaatagataattcttaacagtttcatcctacttccgtagggtgaattttcccccagtatggctttggagtaaattttca

SEQ ID NO: 852141 - DNA, 565 bp, Homo sapiens
ggtgacaagaaacatcagtgggtggtgtttcctatcaccagtgattcagattactgtgtggcttccttcacccccttctctcctaattctacaagctccacttcatatccagtggaacttacatttatttgtaatctcactgcttacattccactgaacaataaaagtacaataaacttaataaaaagcgcaagtgattggaaattgctctgggaatggcagtccagtatgaaagctataaatttacttgtgtgctcatgacaatgtcagctaatttttatgaaaagcctatcacagaacatggcaccaaaatgctgtgatcattcgtgtgtcagccatcacacttcccatgataacaaaatagaaaatgcgtcataaaatgatgtttcaagtcacaaattcatcttgaaatgctcactctatccaggagtatttcttttctgaccctgtcttgcacctgaactttgaattaatcattccttttctgtagtgttacacaatacccgctggtaccrttgttgggggggcgtggagaatctagaaaacaaccaccagaaatatcatc

SEQ ID NO: 852142 - DNA, 647 bp, Homo sapiens
gttctgcagagacactggagtgttaagctatacaggagcactcccctctctttggccttctaacctgagtktgacccctttaggaccatgatctatttgtaccatcattccaaagacccccacccagaggaaaaaacacaaactcactaaacagtcattgggccaaatatttaacttgaccttttggctcatagagcaagcctatgccatcagattgtcttctgtcctgtctttctggaaatggtaacaaaacagttggcttgaaagcttctctgctttactccccatctttcctgccttctcacatttttctctcaggttgtgatgccctgagtcctgcctcttgagagacaattaagccatagcaaaaaggtggaacttgatgctaaggaacaaccaggtacactgcataatgtgtgcagagcaatttcagatggtaaactagccagtttcttgcttttttgtctaatttcaaatgattatcatactcatgagtttctccatatttgaagctcttattgaaatttgatcaggggtggagagtgaaaggcagtggttagaagtggctttctggctgatttgttttaaattacgcattatcgttatttttttttgtttcattgtgcatggctgactaaaacatggat

SEQ ID NO: 852143 - DNA, 578 bp, Homo sapiens
  misc_feature 18: n = A,T,C or G
cggtagagatagaggttncagacctatcaaaatgtcaagcatcaaaggctgaaggttagtctctctcactttggtaaagccctaagtggaagtctgaagtcagcagagtagggtgggattcagtgttggtcacgttccttacacatgctgtcactaatcctctaagtgaacctggccacatgagcaatggacaggctcatcactcaagtccacatttccatggatactgtgctgaaaacacagtaagataaattcctctggctggcttctcattgctaagcacctggtaatcctgaccatccacctttcagtccttaccaaagaagcagaatgacatggaagcaaaatcacataatccagagcccagaggcctgagcatcaagtcatggctccaccattggctcaatgtatctgggtttctgcacatgtagaacagaaacaatacctgaccacctayggggttgttgcaaggaccaaactagacaaaagcactacgtaaaccccgaagatgctaccaatgattctatcattctttctgctttgctcactgattcagcatcccccaacattccagtcct

SEQ ID NO: 852144 - DNA, 580 bp, Homo sapiens
agatttggaaaatggcaaatattatcaatgtaaaaacaatccttattaattatcaaggttgaatttgggaatgagccaagatgagtcaggccagaggatttttgagctaagagtaagtcgcgtctactgtaaaccctgggcttgtgggcacattacattgcatttaactatttattttgaaagagtaatagattcacaggaagttggaaagataatttagagagatgcctatatccttcacacagcttttgccaatggtgaaagcttatgtaattatagcacagaatgaaaaccggaaaattaacattggcacaattgagattttgccagttctacatgtacttgtgtgtatgtgtgtgtgtgtgtgtgtttgtatttagttctatgcaattttagcccatatgtcagttggtggaatcaccgagtcaaggaataggactgccctgtcatcacaggggtcccctttgttctatcactttgcagtcacakccatttcccttctcctcctcctccatcccaaaacttgcatcactaatcaccttctatctgtatcattgttagtttaagaatgttccagaga

SEQ ID NO: 852145 - DNA, 635 bp, Homo sapiens
agccacagcacagaagatgacagccgcctctgggctttcacagcttgggggaattggaagactttactaggacccagaaaacctacttrgtctggagcatgaagcatggttgggtgggtaaccaggaaggaatctctccttgctcccctgtggcctgccggggaggctccccatatggataaatgcacccagaaaccttctcaggagaggagctgtaagggggtcagtgaggcgcatgtttttagggtgacccctagacctgcggctggtgacatcagagacctgctggctggcagcagcagccctgggacaaaaacaaatgccacccagccacagccacagccagcaagtgggagcagcggaaggctgaagagctggaggcacaggctgctcccaagggacagggacaggctccacagccactgtgtgaccagggcccaggtgcctgccacggcccccaaacagctgagctacaaagcgtgtctctgaaaggagcccttcctggagagaggagacgcgtgcattcttctttgcttgcccggtgtgttcaaggtgccccgtacctctttttcctaggactccatgccaacgaagaatgctgacttgctgccaaggcccacaggaacattctccac

SEQ ID NO: 852146 - DNA, 557 bp, Homo sapiens
tatctggcccttcatctttgtattgtactgcaggatttcctatggtgattgtgtttgttatgctgaatgacagaatgatctttctggcagttctgggttgtctaatcatatttcaggacaggatgcagcaaggctgaccaggagctcattgattggtgtctggcaggcttgttgggtggcaggtcagatactgactggaagaatctatgccagaattttaaggttttgagggggatctctaatatctgcataattgcctagttctccctaggttcattttcattcttgagagaaacatcctcaggtgtcagtagataaatgcctgctgctagctctcctcttccaggtgagtaattgaaaactaatcctcttgttttcaggcccaagggtcattcatgccttttgttgcctgcgttgtctcagggccccctttgggtaccctggtcccctcggggctgattctctctgcaggtgccctctcagctttggtttggctcagctttcccagtsaccgtgtcttgtttcactttttgtcttccagaaactttgttgaaata

SEQ ID NO: 852147 - DNA, 521 bp, Homo sapiens
ggcttgaactgacgctagttgacaactgcagttggcttttcaggcccaggtagtgagaaggwattatgtttgagggtgttaatttcagcataagaatgaagaggagggctcaaactagctcatctgctagaggaaagaccggggtccacactgcgtgtgtgccaggatgtttcaccacatggtccctctggtactgaaagccctgttactaacagtcgtagctgcctgctctggacaggaagtgcctcagtgatgagagtccccttgctcaaggtcacagccccttcctggggcagcctgcatccaatgactgggcagagtttgttataaaggctcagccctcttcccctgagctcaggaaaactctaaggcggcatccctccttcagagactgcatcacagttccacggcttcctctgcctctttcacagagaagaactctacctaatacgtccccacgtgctaatctccatctcagagtaagcttcccagggaaccaacctgagacaatgatcagaaga

SEQ ID NO: 852148 - DNA, 587 bp, Homo sapiens
agcaatacaagaccagtggatcttttataactccaaatccagctttctctagcrccccaggaagaatcctctgaaggctttctcttctaaaattgagactaccctcttttccctagggattaaatgtgactcatgcagcaggtgggggcctctctgcctgtgagaaaacaacacaagagactcaatggggtccagaaattggcctccttgcaactcaccaatagcacccttcccataggccatggtggtggtggacccaatcactagagtcctggggtcagaatacacagcaaaaaaagaaagtaggatgatgagaccctcctaaccaaggaggactgtggtgggaagtaggtgtagagatggagactgagcattaaatgcttttttgtcctgatctgtggattagaaagattgcccagtcctgaccagctcatgtcagtctcttgccacaggataagagtcattaatatctgtaccacttgttacaatgaatgaagtgttcttacctgtgttaggtggtttgatcctcactccaacctagagaaactgatattcctaccatctacatttgcaagtgagaaaataaa

SEQ ID NO: 852149 - DNA, 633 bp, Homo sapiens
caggtgtagaaaataataatactatagtaaatgctattgagcattaacctggctttgcccatatcatcacctccaatttttatagcaatccagttaagtaggtagcatcatccccagttaacattaggraactatggttcaggggttgggtaagaatggaatgagttatggcattagccagctacttcctggtacagggcttcagtggtcatgacggtgtgtactaggctctgggggcatacatgtacttgaagcttctttgtggtctctggaaactcttggtcatattgagaagacatacgcagtgagaaaggctcaaactggagccttgagggcacaggaaggtggaatcaccgagacttgggagttcataaaaagaagcaagcactgaattggctgaaaagggggaagtgttgaagggcctaaattctgggggacagaaggtaaacagtagatttagacggaaaatattatttattagcaggaaaaaagtgaagtgcaattacaaacaagatttcctaatgtgggtatgtgggtaaaaggtcatcaggctgggaaagccaatgtagggattgcaattggaagcacattcaagtccaggtaataatagctaatacttattgagcccggctt

SEQ ID NO: 852150 - DNA, 488 bp, Homo sapiens
tatacatatgaaatatagcagtattatagagtgtattttttccaaaagctttaaagtaaaaagtgcttttaattaaacatttatcttaatatattaccaaaagtcactttatttcagaacaattcggcaatattttaagtagatcttgacaaaaatgcactaaatctattttttaaaatgttttattacttgcaagtttcagcctgatgtgattttaaaatagccaagttataagtccctgaaaattggagtttataatggaaatactgacagacccttaacttttaggagagcgagtgtgctgtcataataacatttgctgttgctgcctcagtcagtgtagaaatatgactagggtgctagatatggtatttcaaatatgaagctggttgaaaacttgctgaaatacttttctatgtttctraatttttagaaaacttgaatcttgttttggaaactccttttctctccagttattgcaatgaaca

SEQ ID NO: 852151 - DNA, 614 bp, Homo sapiens
tgtcagaaaaatggtggaatagaaagctccaagctcccaaactccccacaaaaacataaaacacaagcaaaaactatgagaaccaactttgtcagaagtctgtgtccggaatttattccttccagtggatccttggtctcgctgacttcaagaatgaagcgacagaccctcgcagtgagtgttacagctcttaaagatggtgtgtccagaatttgttccttcagatgttcagatgtgtccggagtttcttctttctggtgggttcgtggtcttgctaacttcaggagtgaagccgcagaccttcgcagtgagtgttaacagctcttaaaggtggcgcatctggagttgtttgttccttccagtgggtttgtggtctcgctgacttcaggaatgaagccgcaaaccctcgcagtgagtgttacagcttacaaaggtagtgcggacccaaagagtgagcagcagcaagatttattgtgaagagcaaaaaaacaaagcttccacagtgtggaaggggacccgatcaggttgccgcygctggctcgggtggccagcttttattcccttatttggccccgcccacatcctgttgattgatccatttcacagagtgctga

SEQ ID NO: 852152 - DNA, 588 bp, Homo sapiens
cattattttgatatttcttggcatcaaatatttatattagcctctacttgttcttrattatttataatttagattaatatatattcataggcaaagcaatgaaaattcatatgtgcaagtttattcattacagcatacttttaattacaaaatactcaaaatcacttaaatgtacaagcatatgaaattggttaataaaaaggtatatattataatttgtggtattatcaactacaatatttaatatgatacaaagagttgtacaggaagctctaaaagtaataaaaagattgttacaacctgatttagagggatttatagaaggtaatgttaagtgagaaaaaattgaaatagaagaaagatatcaagtatgctatccattaggaaataaatgtaaagagatacttacttttagaaattgaaacacaggaaagataaaccagaaaacaaagtagttggtgaccaaaatttgcatagaccctacatgcaaaattgcatccaatgaccattgttaaatctaagcatgttcctagcactgagtgtctacaatgcatgttttcatgttttattcatttttccatgtgtgat

SEQ ID NO: 852153 - DNA, 600 bp, Homo sapiens
atcaactaaaaacattaaatgactttcaaaaatttctaggggacattaattggatacgacttgctctaggcattcctacctatgccasaagtaatctgttttctatccttagaggaaatcctagtcttactagcccttggcaattaacaaagcaggctaaggaagggttacaactaattaaaatgcaagtccataaagctcaagtaaatagaatagatccagagaagactctagatttgctaattttttcaactcagcattcacctactggtgttattatccaaaaacaggacttagtagagtggctttttcttccacatactaattcatggactctaactccttatttagatcaaattgcaactatgataggaattgggagaactcggattgttaaattacatggatatgatcctggaaaagttattgtctctctcatgaatgcacaaatacagcaagcttttataaatagtcttacttggcaaactcatttagctgacttcatgggtattctcaataatcattttcctaaaatggagctgtttcagtttttgaaattaactaattggattctccctgaaataactaaatttaaaccaa

SEQ ID NO: 852154 - DNA, 633 bp, Homo sapiens
gctcaccctgtaatcccacagtttgggaggctgagctgggagaatcacctgagcccaggagaccagcctgggcgatatagtgagactccatctctaaaaaaaattcgttttttaattagcctatgtggtgggggtacctgtactcccatctaatcaagaggttgaggtgagaggatcgactgagctgaggaggtcgagactgcagtgagctgtgatcaggccactgcactccagcttgggtgacagagcaggactctgtctttaaaaaaaaaaaaagaacatgcgtgaccaggtgcagtggctcatacctgtaatcccagcacgttgggagaccggggcgggcagatcacttgaggtcaggagtttgagaccagcctggccaacatggaaaccctgtctttactgaaaatataaaaattagccgggtgtgggggcgtgcacctgtaatcccagctgcttgggaggctgaggcaggagaattgcttgaacctgggaggcagaggttgcagtgagccaagattacaccactgcatttcagtctgggcaacagaataagactctatcaaawaaaaaaaaatgaacaaaataaaactagaatattatacccttcaaaaataatttattagtcttttt

SEQ ID NO: 852155 - DNA, 627 bp, Homo sapiens
ccatatggggagtgggggaggaagggggagcggtgaggtcatggccatcgttatgaactcatagagcacctttcaggagcacaaagagcttgctgggagrcagggcatagggacacatgggcttggagatgacctcctctggctgtgatttggcatttcctccgtatctaacttgcctgggagactcctgccaagccagaggagcagggcacaaatggaggcagatcctgctggagatgggcatggggagggggactgacagagcacccttggctgctgttagacagttgttcagtcatcacacctgttaacccaagttggtcaggtctgtccaggtgctgtgactcaccttgccggctcagaagagacactgaatgatacggtggggagcacaggcctaggggaatcctgcagctgagtatctggcttttgctctgccaatggtccagtagattagggggtctgtggcctgtttcctcatgctctgagattctgtgcccagcccaggtctctctgttctggaaacaaaggcccagatccccatatttccttcttgctgttttgttttggtttttgaagagtctcgttctctctcctggagtgcaatggtgtgattttggctccctg

SEQ ID NO: 852156 - DNA, 624 bp, Homo sapiens
agatccttgctgagaacctcttacaaaaaacttaaatgttaatattaccctgatactctgggtgcagaatttctgtctggcaattttatatactgccagaggaacrggcacattcaacaaaatgtgaaattaacataagctaggaaaatgtgcttaacaaggaaagatttcacaatagccacttaggagttattaataattccaattccaaagaaagcatagactaagaaacaaataaactctatttgcaaagttttatataggcaagttcaccaaagtatgaagccatatgctataccaattacacatttctacatcggagagagaatttataaatcctggaaaatctccattgagttattgttagtgtttaacctgaatgtaacgtccaatgtagcaaatctatggatcttgatcacattttcctgctttgattttaaggtttatgcttttggtactttgatacacacaagcccatgggtaaggctgcctttttgcacactcaatgtcttcttcttcctatttctgcagtgcacaatctcaccagattaagcaggactggctgctctctcctcccactgccatcgctactgggactgacagcccagctccccacatttccta

SEQ ID NO: 852157 - DNA, 564 bp, Homo sapiens
  misc_feature 558, 564: n = A,T,C or G
ctatgacacttgaacatactgcatttttattcagtaaaaaatgtttttcatgttttgaagatgaaaaagtgaagaaaactgccctaaatgttttatgatctccagaagcaaagttcatataatgttctaataaattatctctaatttttatgctacatgcccaaaaagttgtagtttcttatgaagtggcagaatttgtattgccttcttggtagacagattccatttcctggggtttattgccccaattaaatgattggggacaatcaaaagtctcagacatcaactttcgataatgtttcataaaaaacaatgaactcgaacccttatttttgacacaagaagtaaagaattatgaatagttcggtgaaattttttcattcccatatattatttctatagagcaaattcacagcataactaactggatgggtataaatrtgttgtttttttcttaccatttagaaatgatattgggaagccgaggcgggcggattacgaggtcaggagatcgagaccatcctggctaacacggtgaaaccccgtctctactattanatcaan

SEQ ID NO: 852158 - DNA, 485 bp, Homo sapiens
aggcccaaccccctcatggctttagcccccgagctgtctttgattattcctgggctagctttgggagacatttcattcacagtttaaaggatagtagcccctcccgcaaactcagccacctttgtagagctaacaagaggttgccaggctagaaggagcagaagagcctgaatccggctaaggtgcagacataaacgattgtcagccatcattctggagataataggatatgaaacttctctaattgctcctgcaaatatcatcactattgtagaaactaagattggccttttgagatcctttctgatgtttttgcattgtctaacacccatggctccaccaggacctgatggcttcccatggacctgccaaccctccttctgtggcctcamccagaagagattcaacctgcaggaggacagctttaacctactatgatttcatctctggcccaaccaattagcaggaagcacttgttacctggc

SEQ ID NO: 852159 - DNA, 586 bp, Homo sapiens
ttacataaggcagcaatttgacttctgggtgtacrtccaaaataagtaaaagcagggaatcaaagagatatttatatacccacattcactgaagcattattcgcagtggccaaaaggtggaagcaacccaaatgcctatcagtagatgacagttgataaacaaaatctggtacaaacatgcaatagaatattattcagccttaaacaagaaatacaattctgacacatgctacaaagtcaataaaattgaggttatagtgcgaagtgaaataagccggttacaaaagaacaaatgctatatgaggtccctagagacgtcaaattcatagagacaaaaactagaatgaaggttgccaggggcgagggaggggcaatggggagtgagtgttcaatggcaacagagtttcagttagggaagataaagaagttctggaaatggatcgtggtaatacaatgtgaatgtacttaatgtcgtaggactgtatgtttaaaatgagtaaaacggtacatgttgttatatatgttttcagacattacaaaaaatatgttgtataacactattttgtataacacccatagattgaat

SEQ ID NO: 852160 - DNA, 586 bp, Homo sapiens
ttacataaggcagcaatttgacttctgggtgtacgtccaaaataagtaaaagcagggaatcaaagagatatttatatacccacattcactgaagcattattcgcagtggccaaaaggtggaagcaacccaaatgcctatcagtagatgacagttgataaacaaaatctggtacaaacatgcaatagaatattattcagccttaaacaagaaatacaattctgacacatgctacaaagtcaataaaattgaggttatagtgcgaagtgaaataagccggttacaaaagaacaaatgctatatgaggtccctagagacgtcaaattcatagagacaaaaactagaatgaaggttgccaggggcgagggaggggcaatggggagtgagtgttcaatggcaacagagtttcagttagggaagataaagaagttctggaaatggatcgtggtaatacaatgtgaatgtacttaatgtcgtaggactgtatgtttaaaatgagtaaaacggtacatgttgttatatatgttttcagrcattacaaaaaatatgttgtataacactattttgtataacacccatagattgaat

SEQ ID NO: 852161 - DNA, 619 bp, Homo sapiens
atctttgacagttcatagttgtcaatcacaccagattttcacaagctgcttacatggcctgagaaatgcacagaaatgaagaggtgatcccagactgacagatcatttcaggtggcttgagtagactttaattgactcttggtttgctgtctatactgctctccaaggaatgcacgaattaatgaagctacttaataaaaatcttggctagatcttatctgtttctgccactaaccaatagagcatatttacactacacatattttacatccaggcattcagtttttggattgcttgtgtagagaacatgatttactccccctttacaaaattttagttctgttaactataaacaggacagtgggtagccaggacaatgaataacctctgcaaacaacgaaaatataaagacaatgtccacatgtataggaaatagcacatacaaagtgaaatttaaagtaggaaatatgtagacaatttcccagtaagttyaagtaatctctattctgatttagaggtaaaaactcattctaacttttagggggaaaatgcttctctccaaccttcttttgggatatttaaaactattttattggcaataaaaactgcctcttttgta

SEQ ID NO: 852162 - DNA, 359 bp, Homo sapiens
tatcatttgtaagttctacctttcaccacatagcagaacacaatttagccaagatctttgccactttgtaacaagagttgccttttctcctgtttcctataacctcatttctgtctaggacctcaccagaatgacctttcacatgccattttttaaaattttattttatgttctgggatacatgtgcagaatgtgcagatttcttacataggtaatgtgtgccatgctggtttgctgcgcctaccamcccattgcctaggtattaagccctgcatgcatcagccatttgtcctgatactcttcctctcctcacctcccccacctcccaaaaggccccagtgtgtgttgttgccttctct

SEQ ID NO: 852163 - DNA, 568 bp, Homo sapiens
caaaatcagtttgttgtatgtgtgtggctttatatctgggttctgtgcctatttttatagcagtaccatgctgttttggtcattatagctctgtggtataatttgaagtaatttgaagtcaggtaatgtgatgcctgtagcttgtttttttttttttttttcctttgcttagggttgctttggctcttcaggctcttttttggtaccacatgaattttaggattttttcccaattctgtagaaaaatgacattggtaatttgataagggttgcattaaatctgtaaattgcttttggacagtatggtcatgtcaacaatgttgactcttccagctcatgagcaaggggtgtttgtgtcatctctgatttctttcatcagtattttatagttctccttatggagatcttttacctctctggttaaatatattcctagatttttattttttgatagctattataaacaggattgccttctcratttgatacttagctagatcattactggtgtatggaaatactactggtttccatataataattttggatcctgaaactttattgaatc

SEQ ID NO: 852164 - DNA, 499 bp, Homo sapiens
cttcccttggaggaatcctgctctgttacaattctgaaagccargaagatctccattacctccaacctaaattgcctctgacttaattcaatgctattttattgcattcagttcaccatggaaagggaaaatatagtaagtttcaattccatagaaatccttcatacacttgaagatgatccttaagccactccaggttttctttctgtagcctaagcagccctgacaaaaatctttcagaaatgatttttaggttgtgttggaggagtgatatttctctcaataaaatgtgatctcgatgcttccagaattctttcatctctgttgcttttctggccatgtgatttttttttttctaactaggcatgtatttcaatcctactttataaacctcatttacaatgtttagcacttacatactcaaaacatatgggccttaaaaaatatacaactttactctaaattaaagcagacaccacagcaattcaaaagtgatcac

SEQ ID NO: 852165 - DNA, 646 bp, Homo sapiens
aatattgaaaactttacctgctgagtaagcgtgctacattaaatccattaacagagtgatttggctggaaattttgcctgagtaaamcctatgtcatcaagatatacaattaacttacattattcccaagttttgctgatatgctctaaccctatttccaccactttaaattatgtttaaattctcattatatagtattcttgccactttatatctgacctccctgtctgctgtttacttgatctcaattcattccacataatgacagactgatcttgctgaaacattccctaaacatacaaagcctttcttcaaaatccctaagtgtggctccagataaagttcaacatttcatcctgccatccaagaaattccaggattgaatcccaacatacttaatagtcacagccaccaacccctactttcacatctgtcctaagcagccttgctggttgagcctttacaaatcttttctatctctgtccaaatgtcaggactatataaattttttacttgtcaactaaaagtgttacttgctctccaaataattaaattcatttaaaaaggacagctttgaaaatggaagagaataaaaatggccctgtaaacataatgataaatgtgtaaatactgatttaaaaaaaaa

SEQ ID NO: 852166 - DNA, 648 bp, Homo sapiens
catatgtagaaagctgaaactggatcccttcttacacattattaaaaaattaattcaagatcaattaaagatttaaatgttagaactaaaascataaaaaccctagaagaaaacctaggccatagccataccattcaggacatatgcatgggcaaagactttatgactaaaacaccaaaagcaatggcaacaaaagccaaaatagataaatgcattctaattaaactaaagagcttctgcacagcaaaagaaactaccatcagagtgaacaggcaacctatagaatgggagaaaatttttgcaatctacccatctgacaaagggctaatatccagaatctacaaagaacttacacaaatttacaagaaaaaacaaacaaccccatcaaaaagtgggcaaaggatatgaacagacacttctcaaaaaaagacatttatgcagccaacagacacatgaaaaaatgctcatcatcactggtcatcagagaaatgcaaatcaaaatcacagtgagataccatctcacaccagttagaatggcgatcattaaaaagtcaggaaacaacaggtgctggagaggatgtggagaaataggaatgcttttacactgttggtgggagtgtaaactagttcaatcattgtggaagacag

SEQ ID NO: 852167 - DNA, 631 bp, Homo sapiens
gcataataaatccactgatagcttgcactgtgcacctgaaaaactgcaagcattcaacaccagctcatgaaagcagctgtgagcactttaccctacagagccacaggggcattgtgctatgtggggctgttccttgcagagccacagaggcaaaaccatatcaggtgctgaagaaaaagccatcctgccctgcctgaaaactgaggcaactgggacagtttagatttgacttcttccattgtagtacaatgtctatatacttgcttatgcctttctttatactcattggctgttccattttagtcttattttctgttcctcctcttccggatctcttaatgttggacctccccaacactcagtctttaaacctaccctatctacactaactcccttcgtgaacataaccagtatttttgctttcaatgccattcacaaaccaatgattcccaaatatatacctttaactcaggcttttctccttaactttagtatcttcttkcctatttgacatctccacttggatttctagtaaacatcacaaactcaatatgttcctcaccaaggtgcatctcacactatttcacatgcagtttttttcatcttatttgaaggcaactccatcatttct

SEQ ID NO: 852168 - DNA, 612 bp, Homo sapiens
cggtaaggtaaccttataaatcattagacactactaaaagtaaacattctttacatatattgtatttaaaattacactatgagcttctaaatgtaaaaggaraaaacagcatttgggaaaatgccattttttttccttaataatcaaaatgcttctgaaggcattttgataaactcctttattgcatataggtgcatactatgaaaataaaaagaaattattcactggccaggtgtggtggctcattcctgtaatcccagcacttcaggaggtcaaggagggaggactgtttgggcccaggagttcgagaccagcctgggcaacacagtgagactccctctctactaaaaattaaaaaaaataaaaaaattaattagccaagcatagtagcacgtgcctgtgatcccagctactcaggaggctgaggcaggaggatcacttggagcctgggaggtcaaggctgcagtaagccatgatcgtgccactgtactccagcctgggggacaaagtgagaccctgtctcaaaaaaaaaaaaaaaatttaaaggcactcaaagtaccgacatgtgctgcattttcagatataaattcatcaccctctactctcggcctg

SEQ ID NO: 852169 - DNA, 606 bp, Homo sapiens
gcagccagggaagggaacggaaagatatttgggggcacagctggctgccaccacctgctaaggtgggtctacggccggggcaggaaaragaatgttccagcaagaagcagaaccccactgatggccgcagcctgccccctcacccacctgtcccccatctcggtgaggatagcaggcatgttctgccaccttgttcctgcctccgtcccggctgaccctgccccctgctgtaggctggcccaacgtcacacctggtagcctcttgctgctccgtggcctctgaggccccaggcacacgctgggtcctgtccagccctcccctctcctgcactccaagggacccctccaggggacccctccttgcccagcagccgagggggctgcgtttcccagcttgtgcccaagagtggcgcccgcgtagtaattcctaattaaatagagcacaaaacaggggattgtctagcgattagccaaaccgactggattttgaagaacaaatatcccgttagcactacttctgccgagtccacatggccatgaagcagagacatacgggagctcggtaatgaatatggaaaccttcttttctggtgttgctcactcata

SEQ ID NO: 852170 - DNA, 606 bp, Homo sapiens
gcagccagggaagggaacggaaagatatttgggggcacagctggctgccaccacctgctaaggtgggtctacggccggggcaggaaagaraatgttccagcaagaagcagaaccccactgatggccgcagcctgccccctcacccacctgtcccccatctcggtgaggatagcaggcatgttctgccaccttgttcctgcctccgtcccggctgaccctgccccctgctgtaggctggcccaacgtcacacctggtagcctcttgctgctccgtggcctctgaggccccaggcacacgctgggtcctgtccagccctcccctctcctgcactccaagggacccctccaggggacccctccttgcccagcagccgagggggctgcgtttcccagcttgtgcccaagagtggcgcccgcgtagtaattcctaattaaatagagcacaaaacaggggattgtctagcgattagccaaaccgactggattttgaagaacaaatatcccgttagcactacttctgccgagtccacatggccatgaagcagagacatacgggagctcggtaatgaatatggaaaccttcttttctggtgttgctcactcata

SEQ ID NO: 852171 - DNA, 606 bp, Homo sapiens
gcagccagggaagggaacggaaagatatttgggggcacagctggctgccaccacctgctaaggtgggtctacggccggggcaggaaagagaatgttccagcaagaagcaraaccccactgatggccgcagcctgccccctcacccacctgtcccccatctcggtgaggatagcaggcatgttctgccaccttgttcctgcctccgtcccggctgaccctgccccctgctgtaggctggcccaacgtcacacctggtagcctcttgctgctccgtggcctctgaggccccaggcacacgctgggtcctgtccagccctcccctctcctgcactccaagggacccctccaggggacccctccttgcccagcagccgagggggctgcgtttcccagcttgtgcccaagagtggcgcccgcgtagtaattcctaattaaatagagcacaaaacaggggattgtctagcgattagccaaaccgactggattttgaagaacaaatatcccgttagcactacttctgccgagtccacatggccatgaagcagagacatacgggagctcggtaatgaatatggaaaccttcttttctggtgttgctcactcata

SEQ ID NO: 852172 - DNA, 590 bp, Homo sapiens
aaattggaagcaggaagaaataatgatataagctactgtataaatgacaaaaatacccattctggttatgtgctttgcgctacaatcccgcgccgccctataaacataatctattcgcgtgcctctttcagctgattccagagcctgctctgcactgtggagtttaatatcaccctgttctcaactgcacagggaagtgattaaataagaaataaattcggctgtcattgcatttaaaatcaaatcaaggatcatttgttactccaaatgaagcagttctccttccctgcccgtaagtaggctgctgttcgctgaaccatttaggaatgtatatatagtaaactcgccgcataatgccttgtactctgatatgatctttatggggccgctccgagcgcggggagcgcccataagcagcacatggcttttttaatttgaagttacaggtatgagacttcgcagtccatccaagtcttattggaggggacccatgtgagatgtggggrccactgcccaggacccctccccctgcacccctgctcagctacaaccagccctcctgtcctcagaggaggacaggggaggggaag

SEQ ID NO: 852173 - DNA, 464 bp, Homo sapiens
caggcgcccgtcaccacaactggctactttttgtatttttagtagaaatggggtttcaccatgttggtcaggctggtctcagactcctgacctcaggtgatccacccayctcagcctcccaaagtgctgggattacattcatgagccaccacgcctggcaaaaagatgatatctaggttttattaatccaatattatatgcattattaaggcaatcatatggtaaaatcaatataccacataatatgtatgtatataatatgtgtatagtagcagacaaatactaaatatgcattatttacattttctcctgaacaaacgagaaattttcattcccctgtttcttgcctttattctggggctgtatgactgggttctctttaatataatctaagcagaagtcatatatgcaatttccagctctggatagaaacatctcttttgtttacaccaagttcttgcttg

SEQ ID NO: 852174 - DNA, 616 bp, Homo sapiens
aatttaaatttccatgttatgcaataaatttgaatttaaatataattgtgaattactattaatttattatattaatttccaccctagtcagctactaatcaacatctacataggcaggtrgaaacatatgattaacacaatgttaaacaaaaataatatactttcttttgtattaacacttatcaatcctataacctgtaaatatttgtcaaaattaagattgaatagtaataccaaggtaaaaaaatagtgattgaatttttctttttccccaaatgtacttattcttaatatgtagattttgtgtcttcaggaggcattcataatttatcttccacaaatcactgtggctgcaaactttgctagctaaaaatttcatttaaacactaaattttcattcctgttttaatatctacttacaaaattgaaaataaaactactgggagagtggtgctttttactatttcatctagggaagaactaacttaatggcatattaaaactaaaataaaatgttttattagattcacatgtgtgagctaaattacacaaaaatattttccacaatctatatcttctaccatataaactttatgtaaattatcttacacatata

SEQ ID NO: 852175 - DNA, 518 bp, Homo sapiens
cagttctgcaagctatgtaagaagtgtggcacgggcatctgcttcttgtgaggacctcaagaagttcacaatsactggggaaggcaaaagggagcaggaagtgtcacatggcaagagaaggagtgaggagggagaggtgccacattcttttaaacaaccagatcctgcatgtatagaacaagaactcactcattatttcgaggatggcaccaagtcattcatgagggatctgtccccttgagacaaacacttcccaccaggccccacctctaacactgaggatcatatttcaacatgagatttggatgggacaaacatacaaaccatatcagaacctattttgaaatgaggtcttattttgaggtactgggagttaggattttaacccatcttttttgggtagggacacaattcttaatactttctttatattctataactataataagaaaaattttaaaaagtagtaggggtgctaaatattgaattgatataatatttaacctaactttttaata

SEQ ID NO: 852176 - DNA, 621 bp, Homo sapiens
catgaaatgtatagagagatatacaatacacactcttaacaagaattgatggrtaatttaaagagctggttgaataaaaagaagaaaattttaaaccaaatactttcaaaaatctaataagaataaaaatggtaaacatttgtaaaacacttcgctgtatcctaaagtctccctctaaacaaatgcacataatcttatattgcaaggctaaaacactgaccttattaacaagaccatctttctaagacaacagccacaatgaaacttcacaaagttttgctaaaggtcatctggaagaagcatgtggaaatacacaaaatattttttcaaaaatagatgacatgaggtaagattacttgctcttgtgagttatttaaatacatgtactataacaatgttcttaatatattaaatgatacttttccatcccaggtatgagtatgataaagaagtgtaaaaactaaagtatttacaagtctctgtctttgaatcttcaaaatccaaaattatcagtagccaggggtaaaggctagtatacaaaatcaatgactgtacatcaggtaataatgtgttgttcaatttcaccatatcatcctttgtgatattttttaaactatatac

SEQ ID NO: 852177 - DNA, 648 bp, Homo sapiens
acacatgccatctctgtggcatatttttctttgtgtttgtcccggtgcatttataacgttttaaaagtgtaaaatgtattcttagttcctggtacacagaagtggactgaaggctggatttggcccataggccaaaggaccccagctgtagaggaaaccttggaaaacataagctgtaagggcatgcctctgcttcaactcctcttcccccacatttgtttttttacttcatttagtaaaagcttgagtcctgtattagttctctgcagaaacagaaccatggaatgaaaagcatgtgcgtgtgtgtgtgtgtgtgtgtctgtgtgtacagagagagagagacaaagaaagagtgagagagatctactttgaggaattggctcacttgattatggaggctggcaagtctaaaatctgtaaggtgggctattaggctggaaacccagggaagaactgatgttgcagttgaagtcaaaggttgtctgctggctgaatttcctcttgctctggtgasatcaatattttgttcttttcagactttcaatggattcaatgaagtccatccacaatatggaggctaatctgcttttctccaagtccaccatttaaatgtcaagctcactcagaaataccctcacagaaacattg

SEQ ID NO: 852178 - DNA, 605 bp, Homo sapiens
agaagtaatacagggaggtaatacaggaaagaaaacatttaatagtgttccctgtgctttcatgtttcttacatcatctgaattagtttcctagggctgatgtaataaagtaccacaaactatgtggcttaagcagcagcaacacattgtctcatagttctggaggtcaggattttaaccttacctctaaataagttaacattctcaggtactggaagttaatacttcaacatattttttgaacaacacaatccatgatgttattgctattctgtcagcaaagcaaattctggcttgaacacgatgattcaggggcatcaacacctgtgcttactgagtagcagacataacatgctttccttgtcctcactgctttgggcctccttaagctcccacacattaccaatccacaaaattttgttttcgtgactcatcatgaacactacatataaatgcactattgagaattgtggtggactcagatactgtgcatatctcctatgcttacttgtaygttgtactgtctcatcggacttcagttacaaaacacaagttccaagagaaaattattaagaattttgtggcatcatggtttcagataatca

SEQ ID NO: 852179 - DNA, 480 bp, Homo sapiens
attattggtgtataggaatgcttgtggtttttgcacattgattttgtatcctgagaatttgctgaagttgyttatcagcttaaggagtttttgggcgagatgatggtgttttctaaatatacaatcatgtcgtctgcaaacagagacaatttgacttcctctcatcctatttgaatactctttatttctttctcttgcctgactgctcaggccagaacttccaatactatcttgaataagagtggtgagagagggcatccttgtcttgtgctggttttcaaagggaatgcttccagcttttgcccattcagtgtgatgttggctatgggtttgtcataactagctcttattttgagatatgttccatcaatacctaggttattgagagtttttagcatcaagcgatgttgaattttatcaaaggccttttctgcatctattgagataggcatgtggtttttgtcattggttctgtttatg

SEQ ID NO: 852180 - DNA, 622 bp, Homo sapiens
cctttttctgttcctatcagacagttaataaggagagatgggagaggctagaaagaagaaattggcaatttaaaaatgtcctagccgttgattgctataatacstcccaccaggttcagcacatttagaaacccttcagagctacaggaaacatatggaaaaaaaatgtactatacttgctttagttcatatttcatggctaagaaaaatacaagccattctttttgtctgttctgtggtaaaacagcaatggtaaagtccaggctcacaagcaagcctatgggaggtgataaggcacctctgactcatgcatacctgggagcttaatcagtgctgaagccatactccaaccctcaaccactgcctttcttactagggctgttgaaggactttacaaacagcactttagtttacaaatatcttctatgagtagctactcactctcccaaaaggctagtgcagttgataggacagatcttattgttccgttttatagttgaagaaactaaaattaagaggggttacttggctgatatgtattcacactagtacttggacctgcagtcttcccaacttaggctatggtgctttcagggattactctcattgggacttacaaacc

SEQ ID NO: 852181 - DNA, 349 bp, Homo sapiens
tgctatcaaagggaaagcagatgtatgaatcttaatatcagcaaggttgaaagctagccaaaaataaatgccacaataaagggcagtttacaatactatggggtgcacatcacactaaatatattaggaatacttatgaaccaaatgatataacaacaatcataaaagaaacagaagacgcaagcagaaacagaaacacactagaggtagacaactgtaatgcacctacttaggctatgatggatgcaacagttaaaacttaagtaaagacacagaaatgttaaataacckaataataacattcatctaatagtaatccaaatcttccattccttttctacgtagcagt

SEQ ID NO: 852182 - DNA, 606 bp, Homo sapiens
gttttctactcctatgttacttcactcagaataatggcctccagctccatcctagcttctgcaaaagactttatttyattccttttaatggctgagtagtaatccatggtgtgtatacactatattttctttatccactcattagtcgatggacacttaggttggttccacatctttgtaattccaaattgtgcaagtttctttttcatataatgacttcttttcctttggatggataatcaatagcgggattgctggatcaacttgtagatctacttttagcagttcaaaaaatctctgtacttttttccatagaggttgtactaatttacgttcccaccagaagtgtataagtgttccttttgccctacattcatgtcagcatctattagtttttgactttttaatagtggccatttttgtaggagtaaggtggtatctcattgtggttttaatttgcatttccctgatgattagtggtgttgagcatttttttggatgtttattggccgtttgtatatcttcttttgagaaatgtctattcgtgtcctttgcccactttttattgggattatttgtgctttttcttttttttttttttttaga

SEQ ID NO: 852183 - DNA, 633 bp, Homo sapiens
tgtaggatcctccacttacacaatattttggcattcatccatgaagtaaccatgtaccagtatttcatttgtttttaatgcccaatagtattccattgtatacayacatacaaaacattgtttttattctcatctcgagttgagagagtgtattcaatttgtgggtataatgaaaaaaatgctgctatgaaaattcacatatacatctgtgttcttaggtatatacctcatttctcccttttaaaaaaaaatttgagttcttggatacatgtgcagaatgtgtaggtttgttacataggtaaacatgtgccatagtggttggctgcacctatcaagccatcacctaggtattcagccctacgtgcattagctatttgtcctgatgctcttcctcccctaactcccctagacaggtcccaatgtgtgtttttcttctccctgtgtccatgtgttctcattgttcacctcccacttatgagtgagaacatgcggtgcttggttttctgttcctgtgttagtttgctgaggatgatagcttccaggctcatctacgtccctgcaaaggacatgatctcattcctttttatagctgcatagtattccatcgtgtatgtgtaccacattttcttcatc

SEQ ID NO: 852184 - DNA, 481 bp, Homo sapiens
tataaatatccatgttcaggatttttgtgaacataaatttttaactcatttgggtaaatgmcaaggtgtgaaattgccagcttgtatggtagaatatgtttacttttggaagaaaatgccaaactgtcttccaaagtggctatatgattttgcgtttctaccaaaaatgaatgagaatgtctgttgctcaaaattctcatcagcatttgatgttttcagtgttttaggttttggccattctaataggtgttattggtgtctcattgctattttaattaattcacatacatttttaattcagtgtgccaatctaaataacaaccagaacaacaagcaaaacctgctttggtttttaataaataatgtgctgaatatagtaatcaattaggaagaactgttaacaatattgaattttcccatctgtgaatatagaatgtccctccattaatttaaatcatctttaatttttctcagcaatatt

SEQ ID NO: 852185 - DNA, 634 bp, Homo sapiens
gaactagatcatgttctttgcarcgacatggatgtagccggaggccattattcttagcacagtaacacaggatcagaaaaccaatttaatttttttaaaagagcataatagtactgagtagttttagaaatgtgaaagagagacatctgcttcaaagaaattgagtagatatgcttttctctattcttcccactaacaatatctaaaactcccttgatattatatataaaactgaaataagaagaagaacactagctagggacctcagaacccaaggaacaacacaatggtgagtctcctgggaattcttggttcgaatatctcagacatgttgctgaagaagacagtaacctggaaacaacaaagagaacagacagaaaagtcacaacaaaagaccaaggaaaaagcagtgtagaaagacagaaatgttttagacaatagcctatctagtctagccaaacattacaaataaaattgtggcccccaacccaaccatgccagcaaaagcagaaagggaatcctacaattctgcaaatgccagattttattcaggcatcacaacctaaaccttctccagtgaggtgatatcatagaagggtaagcagggagtcagaacatacatttggtaggttag

SEQ ID NO: 852186 - DNA, 508 bp, Homo sapiens
tatagaaattttaagtttcaggctgggcgctgtggctcacacctataaatcccagcactttgggaggccaaggtgrgggtggatcacctgagctcaggagttcgagaccagcctgaccaacatggtgaaacctcgtctctgctaaaaatacaaaaatagctgggcgtggtggtgggcatctgtaatctcagctacttgggaggctgaggcaggagaatcgcttgaacccgggaggttgcagtgagcggagatcgcatcattgcattccagcctggatgacagagcatgactctgtctcaaaaaaaaaagaaatttgaagtttcaaataggtatttctaagtcagtggaagacatattaacatgctaaagacactaagttaaattataagaatgtgcatgattatacaagtctttatacagttttaagagctatgcaggcactcaaatattatccatatatcattttctatcatttgaggcgatttttttcctttgtatgcacagctaa

SEQ ID NO: 852187 - DNA, 564 bp, Homo sapiens
tgcaatgggtatctattaactttgatcgtcaatattaaagaaatcttcccccagtaaacagcatagaaattcttctctggtcaccacataatcctctaattttaaatcataaatttcatgtacagttaattctgcttccaaactccaggaaaagacaagagctatgggcttaatgaaacaaacaaacaaaaattattttctccagcactagggattggattcagatatgagcattatgacctattcaatgacaagaagaactacctcgattttagctggatcttttaaaagagaagcttattatcttttgggggaaagtgaactcgttggaatattcactatagtctatagttgcaaaaaaatcatcacatagaatcctagactaaagccatgagctaaaatgactgaaatagaataaaacaaagtcctaattttataaattagaataacccaaatctgaagcttagatacacataaaaatctgtcatttcagyaaatatttgtgtgtgtgtgtgtgtgtgtagggcagtttgagttggatttttccagttacttaccaaggag

SEQ ID NO: 852188 - DNA, 560 bp, Homo sapiens
ttctgattatgcggtaaatcacatttattgacttgcatatgttaaaccatccctgcgtccctggtatgaaacccacttaatcatggtgaattatctttttgatatgttgttggattcagttagttagtattttgttaaggattttagtatctacgtttatcaaggatattggtctgtagttttctttttttggttgtgtcctttcctgatttgggtattagggtgatgctggcttcatagaatgaattcgggagggttctttttttctctattttgtggaaatgtttcaaaaggattcttctttgaatgtttggtagaattctgctgtgaatccgtctggtcctggactttttttttggttggtaattttttaattaatatttcaatctcactgcttgttattggtctgttcagggtatctaattcttcctgatttaagctaggagggttgtatatttccaggaatttatccatctctcataggtgttctagtttatgtrtgtaaaggtggttcatagtagccttgcatgatcttttgtattttgtggtgtcagttgtaa

SEQ ID NO: 852189 - DNA, 612 bp, Homo sapiens
taccaatgttggttcaacagctgttgcaaacataccaccctaatatgttaataacagcagaaactgggttaatggcaattctctctactacctccccaatttttctgtaagtcatgaaataaagtgaatgttttaaatagacaaaggagatacataaatagccaacaggtgcataaaaagatgttcaacatcagtccgggagcagtggctcacacctgtaatcccagcactttaggaggccaaggcgggtggatcatgaggtcaggagttcaagaccagcctggccaacatggtgaaaccccatctccacaaaaaatacaaaaattagccaggcgtggtggtgggcacctgtaatcccagctactcaggaggctgaggcagagaattgcttgaacccaggagacagaggctgcagtgagctgagatcgtgccactgtaccccagcctgggcaacagagcgagattccatctcaaaaagaaaaaaaaaaagacattcaacatcattagccattaggaaatgcaaaaaaccacaatgagatacctctttacaactactggattggtataataaataayaacaataatattaataaaaagtgttggcaaactgga

SEQ ID NO: 852190 - DNA, 537 bp, Homo sapiens
tgggtggatcacgagatcaagggatccagactatcttggcgaacgtggcaaaaccctgtctctactaaaaatacaaaaattagccgggtgtggtggcmggcacctgtagtcccagctactcaggaggctgaggcaggagaatcacctgaacatgggaggcagaagttgcagtgaggctgagattgcaccactgcactccagcctggtgacagtgagactgtgtctcaaaaaaaaaaaaaaaaaaaaaaaacaagcccatgtgagctttaggagaacttcaggacttcaggtagtctcttaacacacatggaattggagtctctaaaaggaaagtgggaaaagaacagaaaacagtattttgagaataatgaaaaaatttccaaatgtgttgggaacctaccgatctaagaagctcgtcaaaccctgagcacaagaggcatgaagaaaactacaccaagccacatgaatcataaccagaatgctctaaatcagtgttaaaatgaagtcctcaaagcagccagagataaaggacatgtt

SEQ ID NO: 852191 - DNA, 562 bp, Homo sapiens
ctaaaacctcagataagtctaatgcttatacttgttctttttgaccttttctttaatttttttcttttttcttttttctttttctttyttttttttttttttttttgagacagtctctcactttgttgcccaggctgcagtgtgcagtagcaggatcatagctcactacagtctcatactacctggctcaagtgagactcccacctcagcttcctgagtagttgggatcaaaggcttgtgtcactatgctcagctgattttttgctggggtcaggggcagggtttgactttgttgtccaagcttgtcttgacctcctgggctcaagtcatcctctcacgtcagcctcccgactagctgggattagaggcacatgtcatcacgcacagctaattttttaaaaattgtgtgtagagatggggtctctctatgctacccaggctggtctcaaacttctggcctcatgtgatactcctccctcagcctcccaaagtactgggatttcagacatgagccactgtgcctggccatttttttacttttgttaaaccctatatgacctaa

SEQ ID NO: 852192 - DNA, 595 bp, Homo sapiens
atagcatagagaattcaaaatgagattataaacataatggacaataaagtgaagcaaatatcataaatgaaatttaaagtatatattgatatattcagataaattataccagttacataagggatgttgaacacctaacatttatcatatactttggacataccagaataaagaaaatattattccttttaatacatttttaaagagttttgactttttattaatatatcaagattctgaattagtatgaaaacaaatttggctttctaagcttactgtcaccagagcaataggataaatctgttcaagaatatcttgaatataatttatttagagttctttggaaatttttttgcttagattctccatagagatataataatgaatatattatttcaatggatgtgcttttatttcaaaatgttctattacaaatggtatttagataaaaaatatttatacatagaaactaaaactgaagatatagcaacaggtagtgagacagaaactattcttcatttckacttaagttttcaaggccagaaaccttattttttgagagaactaacctttctggaacactgtaagtcaaaac

SEQ ID NO: 852193 - DNA, 513 bp, Homo sapiens
aaatgcatttccatttatacatgcctgctttttaccctcagtgcacaatgaaatcctactgaataatgtgctttattttctgtttcctttctctgggatgtatgttgaaagacagaaagtagattggtgttataaatgcaaagagaggaaagcaattaagtcataaaaaatgagacaggctttgcctaatgtagatgcattgttataaataagatatgggtagaagtctgtagacttagggatttcattctccataccaatggtttcagttttctatcaatggtgagacaacaaggattctattttctttcctcccagcgtctgctagacctcagaaacaacacgtttaatcttgtagcatcagtgttttagagatcttgttctgtatatttcatctttctggcccaatgccatcaagggcagtaaagttcaggcataaaggaaaaatgtcaaacatgataaaaatatgtaatgataaatataygtaaaataaataaaaagaagaaaaatcac

SEQ ID NO: 852194 - DNA, 587 bp, Homo sapiens
ccaaaaaattcctcaattccatctgagacctcatcagccttgccctcactatccgtgcctctatcagcaatttggtcacagccatttaaccagtaattaagaagttccagtctttkatttatcttcctatcctcttttgagctctctaaaatcttcaacctctacctgttacccagttccaaaaccacatccatatcttcatgtatcttcatagtaacaccccacttctagtaccaactttctgtgttagtctatttttgcatcactatcaggaaatatctgagaaagagtaatttgtaaagaaacaagttgtaattgtctcacagttctgcaggctgtgcaaacaaggcttcagcatctgcttctggtgaagacctcaggaatcatggtggaaagtgaagggaaagcaggcaatgccacatgggaagatatgaagcaagagagaaaagagggaggtcccagactcttttgaacaagatgatttcatgtgaagtaactcaatgagaactcaaatattaccaaggggaaggtactaaaacattcacaagggatccttccacatgatacaatcacctctgaccaggccc

SEQ ID NO: 852195 - DNA, 622 bp, Homo sapiens
ttacattatcaaacctgtaagagtgaggaacaatcactttattatagagagaaaaactcttcttaaatttcaatgttagaaggaaaagagtaatacaaagataatatactctatatttagtgtatttttwaaaaaaataaaaatgctagctcagaggaatatttcttaggaaatatcaattatcagcatcacccaaaaatagcattataaaacaactatcagtatgccagtttctcctagtcacccctagttaacaggcacagctctcagaggattcagactttatagcctaacatggaatatgtcataaaatacataaaacaaccaagcatgaatattgaagccagctttattgtaacaattctcaggataaaataatgaattggcattcttatctataaacaactctcttatgagttttactttatcaaattgggccccagggaactgacttgctcaacatttttcctaatcctaaaaagctaaaaaccaggtcttagaccccagtatggcatagattccctgagaaatcagcttaatacctctagttcatctaattctgatggtcatgaactgcaagcagttcttaagagcctggactttgtaatttaaaaaacctggg

SEQ ID NO: 852196 - DNA, 622 bp, Homo sapiens
ttacattatcaaacctgtaagagtgaggaacaatcactttattatagagagaaaaactcttcttaaatttcaatgttagaaggaaaagagtaatacaaagataatatactctatatttagtgtattttttaaaaaaataaaaatgctagctcagaggaatatttcttaggaaatatcaattatcagcatcacccaaaaatagcattataaaacaactatcagtatgccagtttctcctagtcacccctagttaacaggcacagctctcagaggattcagactttatagcctaacatggaatatgtcataaaatacataaaacaaccaagcatgaatattgaagccagctttattgtaacaattctcaggataaaataatgaattggcattcttatctataaacaactctcttatgagttttactttatcaaattgggccccagggaactgacttgctcaacatttttcctaatcctaaaaagctaaaaaccaggtcttagaccccagtatggcatagattccctgagaaatcagcttaatacctctasttcatctaattctgatggtcatgaactgcaagcagttcttaagagcctggactttgtaatttaaaaaacctggg

SEQ ID NO: 852197 - DNA, 578 bp, Homo sapiens
gtagagatagaggtttccagaacctataaaaatgtcaagcatcaaaggctgaagtttagtctctctcactttggtaaagccctaagtggaagtctgaagtcagcagagtagggtgggattcagtgttggtcacgttccttacacatgctgtcactaatcctctaagtgaacctggccacatgagcaatggacaggctcatcactcaagtccacatttccatggatactgtctgaaaacacagtaagataaattcctctggctggcttctcattgctaagcacctggtaatcctgaccatccacctttcagtccttaccaaagaagcagaatgacatggaagcaaaatcacataatccagagcccagaggcctgagatcaagtcatggctccaccattggctcaatgtatctgggtttctgcacatgtagaacagaaacaatacctgaccacctayggggttgttgcaaggaccaaactagacaaaagcactacgtaaaccccgaagatgctaccaatgattctatcattctttctgctttgctcactgattcagcatcccccaacattccagtcctct

SEQ ID NO: 852198 - DNA, 656 bp, Homo sapiens
cacaccctagttctgcagagacactggagtgttaagctatacaggagcactcccctctctttggccttctaacctgagtktgacccctttaggaccatgatctatttgtaccatcattccaaagacccccacccagaggaaaaaacacaaactcactaaacagtcattgggccaaatatttaacttgaccttttggctcatagagcaagcctatgccatcagattgtcttctgtcctgtctttctggaaatggtaacaaaacagttggcttgaaagcttctctgctttactccccatctttcctgccttctcacatttttctctcaggttgtgatgccctgagtcctgcctcttgagagacaattaagccatagcaaaaaggtggaacttgatgctaaggaacaaccaggtacactgcataatgtgtgcagagcaatttcagatggtaaactagccagtttcttgcttttttgtctaatttcaaatgattatcatactcatgagtttctccatatttgaagctcttattgaaatttgatcaggggtggagagtgaaaggcagtggttagaagtggctttctggctgatttgttttaaattacgcattatcgttatttttttttgtttcattgtcatggctgactaaaacatggatc

SEQ ID NO: 852199 - DNA, 270 bp, Homo sapiens
tttttttttttttttgctatggttgkgaagcaactacgacacagatttaatgctgctactcatccagatgacagtgaggtgaggggactagggacaattttttcttctcacacatttgtttttagccatctatatttgcctcagtgtcttgataccatggcgataacttagcaacagctagatacaaattaaggtaatctgtcataccagcctctgatcatcaaaagttgggaggtaggacactgggaagaaaaatatagatgtttaatg

SEQ ID NO: 852200 - DNA, 454 bp, Homo sapiens
acagctatctgcataaaatggggggtctggataaggactgtgcagctgggatctaaagagaaaaagctaatgctgaatttctgtcataccaaataagattatgcaacaccaaaaataagttgcggctgggagcagtggctcacacctgtaatcccagcactttgggaggccgagatgggcagattacttgaggccagaagtttgagaccagcctggccaatatggcaaaacctcgtctctactaaaaatacaaaaatttgccaggtgtggtggtgtgcgcctgtaataccagctccttgggaggctgaggcatgagacttgcttgaacccagsaggcagacattgcagtgagccaagattgtaccactgcacgccagcctgggtgatagaatgagattctatctaaaaaaagtctatatcttttatataaaagataaaagttgcatgcatggct

SEQ ID NO: 852201 - DNA, 637 bp, Homo sapiens
tatagatataatacattgtgtttatccattcatcagttaatgaacatgcgaattgcttccacttttgagctattatgaattatgtagctacgaagattcatgtrtaagtgtttttgtggacatatgctttcatttcccttggttatatacttaggaatggcattgctgagtcatatggtaactctgcttaacattttgagaaaattttcaactgttttagagagtgactgcaccattttacattcctaccagcaatggatgatgtttccaatttctctacctcctcgccaacactcattgcctatcttttttatctatcttttttattacagccatccttgtgggtgtgaagtgttatcacattgtggttttgatttgcatttccctaatgagaaatgatgctgatcatcttttcatatgcttattggctatctgtatatattctccagagaactgtctattcagatcctttgtctatttagttgggtgaattgtctttttattattgagttgtaatattctggatataagtcccttatcagacatatgacatacaaatattgtctcttattctgtgtgctttcttttaactttcttggtagtataacttgcaacatagtttttgactttgataaag

SEQ ID NO: 852202 - DNA, 637 bp, Homo sapiens
tatagatataatacattgtgtttatccattcatcagttaatgaacatgcgaattgcttccacttttgagctattatgaattatgtagctacgaagattcatgtgyaagtgtttttgtggacatatgctttcatttcccttggttatatacttaggaatggcattgctgagtcatatggtaactctgcttaacattttgagaaaattttcaactgttttagagagtgactgcaccattttacattcctaccagcaatggatgatgtttccaatttctctacctcctcgccaacactcattgcctatcttttttatctatcttttttattacagccatccttgtgggtgtgaagtgttatcacattgtggttttgatttgcatttccctaatgagaaatgatgctgatcatcttttcatatgcttattggctatctgtatatattctccagagaactgtctattcagatcctttgtctatttagttgggtgaattgtctttttattattgagttgtaatattctggatataagtcccttatcagacatatgacatacaaatattgtctcttattctgtgtgctttcttttaactttcttggtagtataacttgcaacatagtttttgactttgataaag

SEQ ID NO: 852203 - DNA, 611 bp, Homo sapiens
acaattcaaataagggtctctccagggaggaataagtgcaaactgtttatgcaacaaatatgcttctatagtttkggggttttacatttaagtctttttttttttttgagacggagtcttgctctgttgcccaggctggagtgcagtggcgcgatctcggcttactgcaagctctgcctcccgggttcatgccattctcctgccttagcctcccgagtagctgggactgtgggtgcccgccaccacgcctggctaattttttgtatttctagtagagacggggtttcaccatgttagccaggatggtctggatctcctgaccttgtgatcttcccacctcagcctcccaaagtgctgggatcacaggcttgagccaccatgcccggcctacatttaagtctttaatccatcttgagttgatttttgtatatggtatgagggaaggggtcctgttttaagtttctgtatatggttagccagttatcccattaattgaacggagagtcttttccacattgcttgcttttgatgattttattgactatcagatgattgtaggtatgcagctttatttctgagcttagagaatcacgttattaatcacatttttc

SEQ ID NO: 852204 - DNA, 628 bp, Homo sapiens
ctgataatgaagctcactaagcgtaggccttggagtcagacagactcagcaccrggaccttgggcaagtggcttcgtgtctctgagcctcaagttctctgtccttaaaataaggataaaaatacctccttcagaaggtagttgtgagaatttaaaagtttctcctttaggaaccagcttagaataaggactcagtaaatattggccaccctttctgcctgactccccccctatttataaagtttggaaaagaaagtgccttatatgttgcgaaaaatgatgccacaaagcaagtcaatggtggggagagaacaatagctcccggaaggaatggtgctagtaatggaccaccgcacccataatattctgcaagtgctcccctaccccattcttgcattacaaaaaaaatttaattccatttattggtcaacttttcccatgaggacacatccttaatttaatcatgtaaatcaatgagaaaatctaattcactttagagaaatttgcttcaaggctagccttatgggaatgaatctgttccttaaagtgtatccatagcaagtgacgtgtgtctttatcacagttacaaagggatataaattaatctctagcccattttagaaaataga

SEQ ID NO: 852205 - DNA, 628 bp, Homo sapiens
ctgataatgaagctcactaagcgtaggccttggagtcagacagactcagcaccgggaccttgggcaagtggcttcstgtctctgagcctcaagttctctgtccttaaaataaggataaaaatacctccttcagaaggtagttgtgagaatttaaaagtttctcctttaggaaccagcttagaataaggactcagtaaatattggccaccctttctgcctgactccccccctatttataaagtttggaaaagaaagtgccttatatgttgcgaaaaatgatgccacaaagcaagtcaatggtggggagagaacaatagctcccggaaggaatggtgctagtaatggaccaccgcacccataatattctgcaagtgctcccctaccccattcttgcattacaaaaaaaatttaattccatttattggtcaacttttcccatgaggacacatccttaatttaatcatgtaaatcaatgagaaaatctaattcactttagagaaatttgcttcaaggctagccttatgggaatgaatctgttccttaaagtgtatccatagcaagtgacgtgtgtctttatcacagttacaaagggatataaattaatctctagcccattttagaaaataga

SEQ ID NO: 852206 - DNA, 417 bp, Homo sapiens
tcccgaattcagaggcttgaatagtcctgcagctgtggtgttggttggcaacgaaagtgcacataacatatcctcacgaacatcctcctgaaaaatatatcccacataaacaagcattgttgccttgtcaacatcagtagattcatcaacctagattgtgtaccacagtgattcgttaatcctctctaacaatcgtgccttaatatcctctgctatttcatctagttatggtgctagccaaaggaggaacacgtgccaccttttgaacagcagcctctcctaaaagttcatgacaaatatccttagyggtaggcaggatcagctcttcaccaatagggaagggcttcttagctttagcaatgtggttagtcacgagaatcatgcttttggtgcagacacatttgatgaagtggtggc

SEQ ID NO: 852207 - DNA, 634 bp, Homo sapiens
ccattttatcatattcccgcaactcacacacagggatgcaagtaacctctagattatcaataatagtaacctgtagtaaagtaatttgcaggtaatgaggtttgaatrgctattgcatttgtgtttagtatcatttattaattctaaacttatagaatttaattttaataatggctgtatttaataaataaatcgcagaatttctaaaactttctcaattggccttaaaagctagtataagccagctttagcatgccactatctacttgaatggctataaaggagaacacaatttctccccatgtaacctacatgactctagacaaattacataacctcacttatcttcaattagtccatctgtaaaatggagttaaaggagtaacacctagctcacatagaggtggaagaattaagtaagatagacataaagtgcctggctcctggtagggatttatacattatggcctttctttatcctcttatataacttcagtgccctccccccattatttctataattttcttcactttattttgatgtaggaatgattctattctgtatctccaaatctatataatgacctctgacaaaattaggattttattttgtctctatgataaactcatgcct

SEQ ID NO: 852208 - DNA, 606 bp, Homo sapiens
catactatataccttctgtgagagaccttggagcagaggttatgtgaaagttatgacccagtcatgggcaaaactaaaatgaaatgcatgttaactgttaaagctaggatttagctgaactttcacttgtgggaaaagcttttcaaattgtctgatgacaggaatagggaacacaaccccctcttcttttaatagatacagcatggatgaagctaggttgcgtgttctcgaagtgttagtagattcgtcaagggatgaacttctgactttgtgtcatttaagacaaaaaaattatttaaatagatttctgttcaataaatatatttctttgttcataaaatgtacatcatacatattttactcacatttaattttatcttagggaaatatatatgtaccaataatttcccccagattaccaaacattttaatgcatgtaataatgaacaactaataaaaaaaagtcaatagaaartcaatggttagttataagggatatagttttagactgtaaaacatcagattgttttcaatgtgtaaagccaagagcttaaatctagaatacatgtagacagatcacttcccaattatttgggagggagaagg

SEQ ID NO: 852209 - DNA, 644 bp, Homo sapiens
caggatgaacagttggaacaaaggatgtttaggatcgtaaaactagtctgtaagacactataatggtagatacatatcatgatacatttggtcaaattcatggcatctacaccagcaatactgagtcctaatgtaaactatagactctaggtgaaaatgatgtgccaatgcaggtttatcagttgtgcaaatgcgacactctggtgaaggatgttgacagtgggacaggctgtgcatacatagggaaagaagcataagggaaatctctgtagcttctgccccatttttctgtgaacttctctagaaataaagtttattaaaagacgaatacaaacagtcctccatttttatggtttatacatctgtcaattcaacgaaccatgatcgaaaatattccagaaacaaagaattaacaggtacggacttttttttcttgtcattattccctaaaaatacagtattactatttacatagcatttaccttgtactataagtaatctagagatgatttccaatatatgcaaggatgtgcataggwtctatgcaatactacaatattttatataagagatttgagtgtctgtggattttggtatctgtagtcctggaacaaatcccctatggacaccaagggatggctgta

SEQ ID NO: 852210 - DNA, 644 bp, Homo sapiens
caggatgaacagttggaacaaaggatgtttaggatcgtaaaactagtctgtaagacactataatggtagatacatatcatgatacatttggtcaaattcatggcatctacaccagcaatactgagtcctaatgtaaactatagactctaggtgaaaatgatgtgccaatgcaggtttatcagttgtgcaaatgcgacactctggtgaaggatgttgacagtgggacaggctgtgcatacatagggaaagaagcataagggaaatctctgtagcttctgccccatttttctgtgaacttctctagaaataaagtttattaaaagacgaatacaaacagtcctccatttttatggtttatacatctgtcaattcaacgaaccatgatcgaaaatattccagaaacaaagaattaacaggtacggacttttttttcttgtcattattccctaaaaatacagtattactatttacatagcatttaccttgtactataagtaatctagagatgatttccaatatatgcaaggatgtgcataggatctatgcaatastacaatattttatataagagatttgagtgtctgtggattttggtatctgtagtcctggaacaaatcccctatggacaccaagggatggctgta

SEQ ID NO: 852211 - DNA, 501 bp, Homo sapiens
taatcagttggatatactcaaaggagaaactgatctgtctttatagaattctctactgatcatttctttagcatttgatgtcaatggtagatgtcattcttcatttgccctattgakaatactttctcaaatgaataaaaaataattttctcacgattgccctgggaagaatggcttggttcaagatatattttagctgataaatattatgaaattattttgaactctgcagtatattcatgggctcttttatatatccccatttggaaaatgcaaatatctttaaccttttttttgttgttgttggatctagcttagtattgaatgttcttgttcttagtcactaatataaaaatgcaatatattaagtccctagggtgctgcagttagcaatgtacaaggtattatcaattagacaataaataagtaaataattgctgcaggcctatgtactctctctctatatatataaaatatgcaaatatgtataggaaatatagt

SEQ ID NO: 852212 - DNA, 501 bp, Homo sapiens
taatcagttggatatactcaaaggagaaactgatctgtctttatagaattctctactgatcatttctttagcatttgatgtcaatggtagatgtcattcttcatttgccctattgagaatactttctcaaatgaataaaaaataattttctcacgattgccctgggaagaatggcttggttcaagatatattttagctgataaatattatgaaattattttgaactctgcagtatattcatgggctcttttatatatccccatttggaaaatgcaaatatctttaaccttttttttgttgttgttggatctagcttagtattgaatgttcttgttcttagtcactaatataaaaatgcaatatattaagtccctagggtgctgcagttagcaatgtacaaggtattatcaattagacaataaataagtaaataattgctgcaggcctatgtactctctctmtatatatataaaatatgcaaatatgtataggaaatatagt

SEQ ID NO: 852213 - DNA, 427 bp, Homo sapiens
gtttagaatactcctattccaggtcactcagtcttcagtgggtgaggcggggggcggggggcggtaggaggagaggagactatactgagattgtcrgtggagagtgagccaaggtggccccaagcaaggcatggggcctactacttagaacagaggttggggtgcagtccccacacatgcccacaaggggtcacagtgattcaaaataaggctattcctcaccgccttcatgagaaaaaacaagaaactgccttagagctagcagtcttcaaagatacaagaatctccttggtacatcagaaaacaagctatgagagggggtgcagaggccatgtgagcagagcctccaagtctacttgagatgtgcgtactattcagtaggagccacaatttaagatggaatgccatagatgtgttacaagtttac

SEQ ID NO: 852214 - DNA, 520 bp, Homo sapiens
gtttacacaaaggaacagcctgtgcaaaggctctttggagaggttatccccactgtagatgaagtaagagccactgtagctgactcagagaaagccagggggaagtcggtgcaggatgaggactggcagaatagacctgacagtgctttgtagatcccatgaggaagttttttctttattctaagagccactgaaagtatgtttctgagtgtgtgtgtttaattaaagtacaatttatatacaataaaacaaccagtttttaaatgttcatttagatgagttttaataattttaaatacccacaagatcaccatccaaaacaagatacagaacatctccatcaccccaaaagtttcccgtaggctccttcctagctatcccaccccacctgctccaaggcaatcactttctgacttcaatttccayagagaagaacttttgtctactgtagaactttctacaaatggactcatacagtatgtacactcctgtctttattttgctgaactgtgttttaaag

SEQ ID NO: 852215 - DNA, 582 bp, Homo sapiens
ggttcaagcaattctcctgcctcagcctcctggtagctgggattacaggtgcacaccaccgtgcccagctaatttttgtatttttggtagagacagggtttcaccacgttggtcaggctggtctagaactcctgacctcatgatctgccctcctcggcctcccaaagtgctgggattacaggcgtgagccacagctcctggccttaatgtattcattcttaacaatttggaaaattccatgagacgttagacaattctagccatcatctcaagttaaattttctattaaccatttctacattacttgtctgttaggcacatatcatgaaagcaagaatcttaacattaaatacatgcatattttgctgataactcagaagatcttgttacttttattaaacaaacagtattaaactagtgttagttgccaaaagttgactaaagtcacatgaacttgaaaagcatttgggcttatttacttaatttatgaatactcacatttatttaaaagtcaatgtggggccagrcccggtagctcaacaaaaacacacgaacgaacaaacgaagtcaacttggtattat

SEQ ID NO: 852216 - DNA, 623 bp, Homo sapiens
tttttttttttttgagatggagttttgctctgttgcccaggctatgggcaatgtcrgctcactgcaacctccacctcccgggttcaagcagttctctgtctcagcctccagagtagctgggattacaggcacccaccaccacgcccagctaatttttgtatttttagtagagacagggtttcactatcttggtcaggctggtcttgaactcctgacctcgtgatccacccacctcagcttcccaaagtgctgggattacaggtgtgagccaccacgcgcagccaccttttacttttcatttggtacctttggataatggttgaagttttaattgtgtatttttttaatttttagaaaaattaatttgaattcaccaaccatccacttaaaacccaaacacagtatattccaaaatatctgaacctctaatttatgtatgttacatcaatcctttcctttacatctttcaaagtgtgatccaagaaccacctgcattaaaatcacctggaatatttgtttataatgtgtgtccatgggtcccaattccaaagattgtgtttcagagggcctgcaatagaagctaggactctatttgtttccttgattcttaggggcagtaaagt

SEQ ID NO: 852217 - DNA, 611 bp, Homo sapiens
agttttcctattgatgattaggactttaactttaccctggaaataatgagcttggttctttcttttatcctcaggaagacttaagagataccttaagtttgttttgcccctttcttctttcagagatcctgcacttcactatactaatgccaacgtggggagaactggtttctttacaacccagagagcccaatggaaagtggtattctttgtctccgcaaaactaaaataacaagtgtttcttgcaggtaataaggcacaagtgtaggccacacagaaacggtgacccaatctgggcacaaatgggactctttgccattttaggatgtcgtgttggaatttcaaagagctgaaaccaaggtcagagctggtcatatttaggaaacaatcctctaacaaccttcgctttgcctgacctgtttcacgtagtatagtccagattcatttgtttccacttccttgcctggaatgccttcctttcctttaatgagtttgagtctggtcctttcttscaatatgctgctccagttttacctacttgcaaaagcctttcaaagtttccaattcctagtctcgagggattgcctttttctctggattcctatgcccct

SEQ ID NO: 852218 - DNA, 612 bp, Homo sapiens
gttttctggtatcaaagagttaaaattttatatagcaatattacagagtgagtgggaccacgtttcttttagaattaagaatatttggtctggcacagtgactcatgcctgtattctcagcactttgggagtttgaggcggccagctcacttgagctcaggagttggagatcagcctgggcaacatggtgaaaccctgactattcaaaaaatacaaacattgttcaggtgtggtggtttgcacctgaagtcccagctactcaggaggctgaggtgggaggatgaggtggaaggatcacttgagctctggaggtgggtgttgcagtgagtcagttgcaccactgcactccagccagggcaagagaaccagaccctgtcttaaaaacaaaacaagcaaacaaaaagaataattaacaataaatgttgattttttttcacaaagaactttgaatcatgtaggcaaatagaagtccagaactaccttaatattttaaaatcataagtgatataaatatcctgatactaaaatgaaaggtacattaaagaatgagaaaataaaatctaaattygaaatttaattccagaaaactaagctaataagactttaatagta

SEQ ID NO: 852219 - DNA, 656 bp, Homo sapiens
acaaaagtcttaggacaaacacaattgacaaggaaatttggttatttctgtggcatacaaaaatttaacataataatcataataattacaacatgtattaatacatatgagaatttcaggaatcacatacaatactgagacaaacattaaaaatacatttatttaagtataatccaaagaaaagtaaacaccacctcacattttaaagtaatttgaccataaagtaagatctccttaacctttcatatttttgtaattttctattgcagagaaaatcaatgctctaagaaaatgttcttattctgccacatgggtctaggtgctggccttaaatcagtgcacttggtatattattctgaactaattttgtccctcaaaattggcccttacattctcatgcacccacctcttctacaatagttcctgagcctagaaggattgaatagttttcatttctggctttgtgtctcatgaaagcagttcatttttattatcatcttctcccacgtctaaagacaaggctttgattggcatcaytgttcaagatttatcaggagttgatgcctttttcaaacctaggagtcaaagccttgcaacttaacagcataaggattagtaaataggacatttttactgcagaaattcctatcattctc

SEQ ID NO: 852220 - DNA, 656 bp, Homo sapiens
acaaaagtcttaggacaaacacaattgacaaggaaatttggttatttctgtggcatacaaaaatttaacataataatcataataattacaacatgtattaatacatatgagaatttcaggaatcacatacaatactgagacaaacattaaaaatacatttatttaagtataatccaaagaaaagtaaacaccacctcacattttaaagtaatttgaccataaagtaagatctccttaacctttcatatttttgtaattttctattgcagagaaaatcaatgctctaagaaaatgttcttattctgccacatgggtctaggtgctggccttaaatcagtgcacttggtatattattctgaactaattttgtccctcaaaattggcccttacattctcatgcacccacctcttctacaatagttcctgagcctagaaggattgaatagttttcatttctggctttgtgtctcatgaaagcagttcatttttattatcatcttctcccacgtctaaagacaaggctttgattggcatcactgttcaagatttatcaggagttgatgmctttttcaaacctaggagtcaaagccttgcaacttaacagcataaggattagtaaataggacatttttactgcagaaattcctatcattctc

SEQ ID NO: 852221 - DNA, 512 bp, Homo sapiens
ctttcattttgcctcttagtgcacatgcttgagtctgctagcccagctycagagatcttatcaagaagctgctgatcaccagctccaggtgttttcaatctcttgggaaactaggttcccttggtgctagctgtgaccaattatcattttagagagagagtttaacaaccatctgactatcacttgacattcctggagggggctctcctgctctgctcatgtctacttaactacccactctaacataaccactgtggttatctctttcacaggacagaaattacttgcttctctactgggtaaaaatctgcaagctaacctctgttcctacagatgagtaaaatagccaagactttcaataaagttctcataatttttttgatatccttctgtattttccttctcactatagttcattactgatcattaatctctatgctatatgagaattttctctctgtgtctatccttcttaatgctggaacaggaattcttagtatatttcccaaatg

SEQ ID NO: 852222 - DNA, 629 bp, Homo sapiens
atttttttcttttttttgtagagacacggtctcacttcgttgccagctgctttcacactcctggatctaagtgattctcctgctccagcctcccaaagtgctgggattacaggcatgagccaccytgcctggacagacaccagagatatatttttcatatgtttacttcgcaatatttattacttaaatttttaacaaataaataatctacgaaattgttactagagctttctggtttcaataatgccatacaaggcccaacacactgcaaaggtttaaagccatacaaagggtacgctcttcatcctgcaaatctcaaacaatacttctatagcatccatataaatttggaaattgaggacaggacatctcacttgcccatatgataaagaataatctgtgataaaagatattagaaaaaattcagaactaaaaatttacctactataaattttgatatggaattttaaaaataatttattgttctttttagacttaatgagacggatgcttacataatttactttttagaagaaagtacaaaggatcaaatattagcaataatagtagaaatcaaaggaacagcaagcaacatataaatatgctctagacaggtcaacaaaacctag

SEQ ID NO: 852223 - DNA, 520 bp, Homo sapiens
tagtctcctaacggcaaatgtctgcttgctcaccgtgggygccatgaaaggcaggaacgctggcaggaagagaagagaggaggtgtcagtgatcacagttgcccaggcagagggggccagaaggggactacccacctgaacacctcttccccagcttccagaaggcacagacctcaaaggactttttccactcattctttgtttttctaataaagtggggggtcaaggtctcagcactttggtaggctgaggctggaggatgggttgaggccaggagttcgagaccagcctctattttgtagaggtagcgagacccccacctccataaaaaatttaaagccaggtgtggcggcatgaccctgtagtcccagctactcaggaggctgaggtagaaggatcagctgagcctgggagttggaggctgctttgagctattatggtgctactgtactccagcctgggtaacagagcgagaccctgtctctaaaaatgacaataataataaagtatgtacataaaa

SEQ ID NO: 852224 - DNA, 635 bp, Homo sapiens
tcttaaagaatattattaggcctcaataattaaagcagtatgatattgcttatgaataaayacatcaatagaatcaaattaaaattccagaaataggcccaaatgcatatggaaatttacaaaatgaaaaagacagcattttagacagtaatgaaaagattgtttattaaaacgaaatcacgttatgacattttggttgtaatctggactaaagttttcttccacgtctcatttcatatcagggtatatttcaatgaataaaaaaatagaaataaagctatagaagtagtatagaaatcattgttaaaaatgttgtaatctcagaatagggaaggcctttctaataataatgaaaatcccagaagccataagggaaatgatataaactttctactacttaaacataataatgccaatgaaaaagaaagacaaaattcatcaaaactcagttctaacctcaagtttggtaaaagctatttgtaactgagacaaagtctaatttccttaatatatagaacacttctacgaattggaaaaatagggaccaacaaataaatagaaaaaaattcaaagtattataaaaagatagcaaagaaaagacaatttgaatttttgatatggggagagattctaaa

SEQ ID NO: 852225 - DNA, 512 bp, Homo sapiens
gtgggtgctaataaaagcagctcttgagccatttcaaacagatgatgaggcagattcagatgaggaagrggaagacgagtgtaaaaatcgaacttcagattctgaatgtgaggaacaggaaacggaggaaatttaaagaaaggatatgttttactagcccatcagctccacctgctgaattaagtgaaaggccacttcctctctcctcttaatgggcgagaagatgaattggctacaaaacttactgctcctgtagttgaaacattaaaacctggagcaattggtggtgctacacaaaattctattcaaaaggctagagccgagagagaccttgaagcatggtaattccccgtaactataagatgctcttttaagatgctctgctccccagtttctacccagcttaccccccctgcaatacaatcttcaagccttggctccttgcccagggccttagaactgataacctagtactttaacagctggaactgggtctacaacaacataataga

SEQ ID NO: 852226 - DNA, 623 bp, Homo sapiens
aaatgttttttaaatttatgtgtgatttcttcyttgacccatgaattatttagaggtatattgtttaatttccagatatttgaattttctagatatcttattacaccttattcctaatttaattatgttgtgagaaaaaaactgtgtagtttctgttttttgaattcattgaaacttgtttaatggcaacatgtggtatatttttaaatctgttttcatgtgtacttcaaaggaatgcacattacactgttgttaggcaaaatgttctatgtatttttcagatcaagttgattaagaatattgttctggtcttctatatctttaataaattattgtctacctgttctgctaattactgacagaaacatgttgaaattaccaaatacaattgtggatttaacaatttattcagttctgtcaatattactttcatgcacttttaagctctgttattaattgcatcatatttatatttactaagtctaattaatgaattgaatatcatttatctctgttccttgtgaggccaactttttaggattattgcttacatggcatatcttgtttcattcatctaatttgaatctatctgtatctttgtataaggaaatttattgaagaca

SEQ ID NO: 852227 - DNA, 473 bp, Homo sapiens
aagcttacaatattcataatcctcgtatgacttctaaaatttttcatatcaactcacttagttctattaaactcatctcaagaagaaggataattcctygagagcagagggaagaagacacttcctccatcctcccactggactcctgtttgtatctgtgcaggtcactaaagatgcagtgcttctgatgcaaagttcactgatgtgaggcaagtttcctgccagttgcttgggctctaacagggtccctatcacaggcggtctattttgtggctgcaattctgcaacagatgcctcaaggtgccctggtagctggtgtcctacagaaacatcgctgtagcagcagcttggcccctttattctcagtggaacacaccgtttctaatctgttcaggatagaaaacctggatgaaaaaagactgaatacaactgttctgcctgtcaaagggaaagaaaaacattgttgaatctct

SEQ ID NO: 852228 - DNA, 647 bp, Homo sapiens
aagattcccttcaatggtggatgtgactctatcttggctggaaatttgagtatttttcaaaagaattctcagattctcttatacgttgtcaaattctccagccatcagtctgtttcctttacctcttatataactcagttttaaaaagacaaaagtcattctaatcaatcatcagttcagccatcaatttcctctctatgcttagacataatcttgcaattgttatctgtatttaaatttgtagcctgttaaaaataaagcccatgtgagtttactggtattttccagattttgacaatgaatgtgtcacttcagtaaatagaaaaaaaaggtattaacatatacagggaattggataagatttcagaaagtatttttccaaaaaaactattttctcctatttctgctaggctgaagaactcatctagctagagaaactcactcccaagaggttctagttggttttgctaaattttttattatctttactgcttattaagtcattgatatctgttcactacggttggataagttctatctgtcaacatgggatgatttacttatgctgcttcctgcaaatagsgccctaataaatgaatgtcctctacactgtatttttagaaattagcattttattataaaagatg

SEQ ID NO: 852229 - DNA, 572 bp, Homo sapiens
ctcagggcaagaagaaatgagtccggcaacaatattccatcagcaaaccctaggaggtaaagctaagtttcctccaagctccacatgccatggtwtagatgaatgaggtttagtatgtcgaatgtgaaacacaacaggtcatccgagtggacatgccagcacacacctggattgcctatatctggaggaggcattcaggccagaggcaaacctcgtgagagcagaaaagtcacgtcttgtttttctgtgatcctccccaaagaatccaacagagtggtcacaactgtgctgagagaagctgatgtaagttgtggaggggacataaaatttcttctcatattcaatcaactctcaaatacagaaaactgaccacctcatctaggaccacttggttctagtgttttcccttgttcctgctgtttcttggccttagtgtgactttcagatacctaaacttcatttaagtatggtattattttctctaagttccaggaaattaatttataactttgtcataaaagatgaaaaggtagggttttcttatccaagactcaatggcattaacaccaaaa

SEQ ID NO: 852230 - DNA, 624 bp, Homo sapiens
ccccaaatggcagtgtttttcatgcatttctctctgcccagaawgttcaatcccaactcatcatccatcaaggcctagatctaggtctccctttttatacaaattgcccttcaataactccctaaaagtagagatccttctaggttattttgtttttggttttggggtttttttgttttgttttgcaaaataatacatactgatgcattctcttcacaaattatttcatctgtcagtgaaactataaccttcctgagagcagagaatgcagaaaagtacttaattatgagttaagctccagttttctcggtggctttccatgtgattttaaatatatcactattcccctttgctatacaatgtattctaatttgcacagagattatttagtccccgaggtcccatacaactttaacagttttatgactaactatgtcattctggtcatttatcttcaactctccttacccaatgtataaaacatagattcactgactgtacccaccatgaaagcagtgacaccatgtccaacttgcttactttctttattttcaatgcctaacactgtgtgacattcaaagagctcaggagacatttcatcaaatgaatgaatatatagctcat

SEQ ID NO: 852231 - DNA, 557 bp, Homo sapiens
aataaagcaagtcacacaattttttttgctctcccagtaaatataaaagttacttttacactatactgtggactattaagtgcatagcattgtgtcttaaaaatgtacatatctttttttaatgtttaatttttgtgggtatgtagtaggtatatatatttatggggtacataaaatgttttaatacagtcatgaaatgtgaaataaacacatcatggagaatggtgtatctgtcccctcaagcatttatcctttgagttacaaacaatccaattacactctttatgttatttgaaaatatacaattaggttattattgactataatcatccattgtactatcaaatagtaggtcttattcactctttccagtatttttttatacattaccgatccccacctccctttccaccttcccactacctttcccagcctctggtaaccatccttctcctctctatgagcatgagttcaattgttttgwtgtttggatcccacaaataagggagaacatgcgatgtttgtctttctgtgcctggtttatttcacttaacata

SEQ ID NO: 852232 - DNA, 646 bp, Homo sapiens
ttgatttgagtttattgtcacttgcaacaaaatattactggatttccacaaattcacaatcagttggggaaaagtcgatatgtgaacaggtaaacactgaaaatagatggtttgtatgatacaggtgaacacgagggcctttaaccagtgtgggtgttgaggtgggggaaagtgtccacttccctccaggagacaatatctggtctgaatcttgaaatatacttagcagttgtcatgatgtatctatcaaacagaggatggcagagagacattccagggagaagagaaggcatgagtcaaggcatggcgtgaaatgggatgatagtttctgggaactacaagtcactcatactagctttaatgcagcctggatggtgaaggcaaagggagagatgctacagagaaaggcacaggccatactgtgaagtgtccaatagtttgtcctaacaagataatgttatcctgggaattttgagagagcattgagaaattaatttttccactttaaaaatgaacattctaatccttccccagcctatgtaccataaaagatgatggtgaaggtctcttagtaaaatgtctgtgaaaatgctytgaaccaggtataaattggctaattatactatggaaaacagaaactggaata

SEQ ID NO: 852233 - DNA, 598 bp, Homo sapiens
tttcatatcatgtattgttttcataatttaaaataactaccaatacatcataagcaatctttagtaagtttatcatttgattgctcaatttattccaaagcctgtatgactgtctatttaatattagatgtttgagacacagaaaacacaaaaaaactcattgtcctagaggagcctaaagtttatagaatttatgaggacttatgtttcatttctaaaagattttgggaagtttttctgttgaggttgggctgcctctgtgtctgataactaggaagaacaccaacagctccttttctacaagaggtgtattgttcccattctcttcagtgccacatccttgctttagtgcttccactgaccttgtgcttcctgaactcctacgtaaccttagtttgtgtcagtaatgtagtacttaacaatacagcatcttctctccttagcccacctcctcaccatcagctcacctcctcaccatcctttctttccctagcccaccccaatcagkttctgtctgctctgttccactgaaaattttcttgttaaggttacaatgttgaagatgttttgctaaaaaaaaccaaaaggccaaaatcca

SEQ ID NO: 852234 - DNA, 536 bp, Homo sapiens
tagatgattgaatataaattaatgggctgggtgcaatggctcaygcctgtaatcccagcactttgggaggcctaggcgggcagatcacctgaggtcaggagttcgagatcagcctggccaacatggtgaaaccctatctctactaaaaatacaaaaattagctggtcgtggtgtcgtgtgcctgtaatcccagctacccaggaggctgaggcagaagaatctctggaacccgggaggcagaggctgaagtgagctgagattgtaccaccacactccagcttgggtgacagagcaagactctgtctcaaaaaaaaaaaaaaaaaagaaagaaagaaattaaggttaacaatgttcttttgtttctgttcttctatatcatgttctcaggagtctaaaaaagcagaatgtaattggtcatcttctttcatggttcaagatggtttgcttgttcaacaagtatttattgggcatcagctgccaggcactaaagctaggtgtggaggagacaggtgaacaaaacagaaatgatttctgcc

SEQ ID NO: 852235 - DNA, 670 bp, Homo sapiens
cagtctctttgctaaaatataacaagagttacctttgctccagttcccaacaagttcctcatttccatctgagaccacctcagcctggactttatgtccatataattatcagcattttgggcaaagccattcaacaattctctaggaagttccaaactttcccacattttcctatcttcttctgagccctccaaactattccagcctttcctgttacccaattccaaagttgcttccacatttttgggtatcttttcagcagtgtcccactctactggtaccaatttactgcattagtctgttttcacactgctggtaaagacatacccaagaccgggaagaaaaagaagtttaatggacttaaagttccacgtggctgggggaggtttcacaatcctggtagaaggcaaggaggagcaagtcacatcttacatggatggcggcaggcaaagagagagcttgtgcatgaaaactccttctcataaaattaccagttctcttgagacttattcactatcacaagaacagcacaggaaagacctgctcccatgattcaattatctcccaccaattctctcccagaacaggtgggaattatggaagctacaagataagatttgtatggggacasagagccaaaccatataataaattaaaaccttaattaaac

SEQ ID NO: 852236 - DNA, 687 bp, Homo sapiens
aggtcatttacattcagcattagtattgagaattgaagtactattctattcattgtgctagttgttgccrgaataccttgtgtttttttcattgtgttattgttttataagttctgtgaaatttatgccttaaggaggttgtattttgatgtatttttaggatctgtttcaatatttagagcttcttttagcagttttggtagtgctgtgttgctagtagcaaattttctcagcatttgtttatttgaaaaagactatttttctttcattatgaagcttagtttgattggatacaaaactcttgactgataattctttttttaaggaggctaaagataggaccccaatcccttctagcttgcagagtttcttctgagaaatctactgttaatatgataggttttcttttaaaggttacttgatgcttttgcctcacagctcttacgatttttttccttcatcttgcctttagataacctgatgattatgtgcctaggtgataatcattttgcaatgaatttcctgggtgttctttgagctttttgtatttggatgtctacatctctagcaaagccaaggaagttttcctcaattattccctcaaggatgttttccaaactttcagatttctctttttcctcaggatcaccaatattcttaggtttggtcatttaacataatcccaaa

SEQ ID NO: 852237 - DNA, 442 bp, Homo sapiens
aagagagagaggtggcagagtttcagaagagaggaagaccagacagtttcgcaatycatacacactcaccttccaggatcccggtcgatgtctccagttgaaaaggcaaaggctccctcctccccctcgcggggctcgcgatgggggcatagcgggcttcttcagtgccccgctgctcagacctccaggggagcatacagacgggcaggctgtgggactcctaccccagggcagggtctaggggtgaatgtttacagctcctgaagccccagtgggcatgttacaggatactctcttagtctgccatctataggcggctcgtgttaaccagctcaattaggccctctacgttgtggcaagaacagagggctttctgtatctgggttcttgccttgttgtacctgaagaatcggatcacccataggcttggagaatgagtgca

SEQ ID NO: 852238 - DNA, 619 bp, Homo sapiens
taggccaaggacaaaataggtatgaacaaaacactacacaacaaaacaccacacatttagagaacatattcttcaaaagaactatgtggaatctacaattgttatgatgaaaactgcaacaatttatcaagatatataaaagcatctcagtaaatgggggcttttattttttgccattttttttacaattgtcacattgtttatgatgaacatgttattgatttcataataaaaaatatggtcaatctagtagctagtttcacatctaatagtaaaacagaagacacttttttatgtataaaatatgactttttttactattattaatagaatattgtgtaagttctgtccaaataatacagaaaacaggaataatctaacagtcaaaaaggcgaggcaacaattttttttcagcaccataagaatgtgcaagaagaatcattttttaaataatattttgactttttcacccagtaatttcaccrctggaaattatcattttcagaaaataatcagacaattacataaacaaatccatttattgccctttgttttatctgtttattgctcttagtaataaattgcaacaaaatctaatttttgatgatagtttaatgtt

SEQ ID NO: 852239 - DNA, 564 bp, Homo sapiens
aaaaaatgaaaaggagcgaacaaagcctccaagaaatatgggactatgtgaaaagactaaatctatgattgactggtgtayctaaaagtgatggggagaatggaaccaagttggaaaacactcttcaggatattatccagaagaacttccccaacttagcaagacaggccaacattcaaattcagaaagtgcagagagcaccactaagatactcctcaagaagagcaaccctaagacacataagcgtcagattcaccaaggttgaaacaaaggaaaaaatgttaaaggcagacagagaaaaaggtcaggttaccaacaaaagaagcccatcagactaacagtggatctctctgcagaaaccctagaagcaagaagagagtgggggtcaatattcaacattcttaaagaaaaaaaattttgagattgagaccatcctggctaacatggtgaaaccccgtctctactaaaaaaatacaaaacaattagccaggcatggtggcaggcacctgtagtcccagctactcgggaggctgaggcaggagaatggcatgaacctgagaggca

SEQ ID NO: 852240 - DNA, 607 bp, Homo sapiens
aatttattgtcattctccaagaatcgcctgtcctctgcatgaagaggacacgagagtcgcctcccctgcatcttgcaaktttctgatggtgcaccatctttgaaattcaccagatatgcttgttgattttggttttatagggaaaggtagttccaggggtttccatgtgaccatttctaccagagggaccctagccccaccctccacattgataaggacatcagtgtagagatttgagcagttgtcgagtatttctatctcaactttacattcaggagctagaaaaataaccacaagatgggctcccagagccactggcctactgtgaaatagacttcggccaaaattctatttctcccctgaccatctcacctcccacatcaatctccaatctggtttggattcgtatcagcccagagcctgtgcctatgtatccctgaaaatctgagtttctccctttcccctgtgcatggccaccctagttaatggcttcaggtaatttcttggatggtaggaggaagatagagtatgctcttgtggcagtttctctagggtctgggctcaaggggaacaaaccacctcttctctcagggactttccatagtgt

SEQ ID NO: 852241 - DNA, 506 bp, Homo sapiens
agataattgtagattcacatgcagttgtaagaaataatacacagggatcctgttgtacccttttccctagtttcctccaatgggtaggatttttcaacgctaaaataaagtatctcaaccagtgtatgcacaytgatagtcaggatcagaacatttccaataccacagggtccctccagtcaccctttaatagccacacatggtcccccactccactgtccttaacctctggcaacaaccaatctattctctatttctatgattgtgtcgtttcaagaatgctatatagaaatcacgtagtgtgtaaccttttgcagtttgctggtgaaggcccagcaccatttcctggagattcatccaagttcagtagtttattcctttagattgctgattgatacaccttgtgtaaatcaaaaataaaattctaagctctcctaccaactgaatggacccctcgtctcggccaagggcagttgaaagtaaacctgcaacattagttcggccat

SEQ ID NO: 852242 - DNA, 581 bp, Homo sapiens
ggtcccaaagcacaaattctggactttgcctaagtttgaatcctgactcttctagttcctagctgtgtgacctagggtacattacctgacctcactgggcctccaattactcttctataaagtagaaacaataatacagttggccctccatatctacaggttccgcatccatgaattcaaccaacctcagatagaagatatttgggggaaaaaaataaatgattgagtctgcactgaacatgtacagacttttttttttttttgccactgtatgtaatgtatgtaaacaatacagtacaacaaacattgcatttacactgtattagatgtcataagtaatctagagatgatttaacatatacaggaggctatgcataggtcatatgcaaatatcacaccactttatatgagatttgagcgtccgtggattttggtatctgcagtgggtaccagaaccagtctccyatggatactgagagatgactgtacttaccttctaagggaattggattaaatgagattatctatagacagcacttagagagcacctgagggtacagtaagcattctataagtgtttc

SEQ ID NO: 852243 - DNA, 487 bp, Homo sapiens
gcaaatccccaaatctgtaggatgatgggcaagggacaatagtttaagaagtccatgaagtagcagcaaggatggaaaggaagaacagtgtgcaagctcaagccctctgggagtgtgcagcctaggggatggcccacccagacacccaaggccagggaagggtgcgtcctgagaaagtgcccatgttcacggggtccgtgtgaaaggagagaaagcagcccctttaaacaaacacatgacctgctttgtattgtgctgtgtcagcgacgacaacccagacgacctggcttccagccagctgtctacgtggggcagctcccagctctcctgctgggaccatcatgcccagaacctgcaaagcgggtgcttggggccgcatggtcatgctgtcggcagaaacrctccagggccaagtgtgctcttgtttcaaaatttggctcttagaaaaactatgtgactcagcaggatccagacagagaaagtcatc

SEQ ID NO: 852244 - DNA, 403 bp, Homo sapiens
ttcatgtgtgctagtgcgtatgagtgtgcatgtgtggtgtgtgtgcatggtgtgtgagtgggtgtgagtatgcttgtgtgcctgtgagtgagtgcatgcgcagtgtttgtgtgcatggtgtgtgagtggctgtgtatgtacgtgtgagcctgtgagtggtgggtgtgtgtgcatgggtggtgtgtttggggtatgtgcacacacacacatgtctttgtgcacatacacttaggacaacagacccgcacccaggggctcctgagggttagggtcacaaaaagtcatctttaactgaagaaagtatcatttgaagtggatttatttatgaggggaatgtckaaagcacataaggaaaggatgtgtgtacgtgcacataaggatgcacacagagacagacacgcat

SEQ ID NO: 852245 - DNA, 605 bp, Homo sapiens
aaggataccaacactaaaagaacctctttctttatcctgcaagtttgcatatgtagatcacaaacttagctggcaaatagttaggggcccataatagcttgttctgataaacaatgtaaagtgcaccccaggattcaagccatggttttcctctgactttgcacctgtagtcaaatcactcagcctgctttggatttcttttctcctatctataaaatgctggcatgagcaactcctctccctaactgacaagtttccaatttctatcaaatgttttgtgcacctggagtgaatactctataaaataacagacatgataaccctcactatagctaacattttaataacggctactgctttttgagcacttacagaatgtcaggcactgtgccatgcagaactgtgcccaagcacacagactctcagtttggacagaccagagttagaatctcaacttcagcacttattggtgatgtggatgggcaagatgcaaaaatcccactaactcctaagccctcatctgtaaatgaagggcaacaacattacttatcatatagaggcattggaacaattrgatgaaataatagaggtgctgcacttagtgc

SEQ ID NO: 852246 - DNA, 621 bp, Homo sapiens
tttcctttaagaatcacaattagaggcactgcctgcgcactcagctgagttgttagaacagtgaaggtgcactgctttgccagccctctcccagccgccaaccatgtgagtttaaagccagcctggatcatgatcaaggtaatccaactaggcttcttaccagacctgagaacttggacaaatcactggcactgtcccaggctgtttcctcatttatgaaatgggagtaagaacaccttctcagccagggctgctgtgatgtatgcatattctgacatacagcagttctcagtaaatgctcatctcctttttctttcttcaaaatgttgtgcaattggttttactttggacccatgagcagaacttttcattatgttgagtttcagttccttaaattcagcccatcatagaatgggtcagctctccctgattctcgttgagattcatgtttgcctgaaggtctttttaatttaaagtgggagcaatccacaataagaagtgaaaaagaaatccaatattaagtatttggacattgaagaacttcagagagtaaaacctccaggcacataagtataggctcccctgactacacaaaaytgtgggcagatggtagtcataata

SEQ ID NO: 852247 - DNA, 634 bp, Homo sapiens
cagatggaggactgccagacagatgtaggtgtattttggtcacctgcccttagagaggcatttatgatggatttattcgtcctttctttcaacaagtaattgaagatctactactctgtgctgtgtaccattcaaattcaaccagaaataaataaaaccctgcccttcctttcattgcctctcagtgtagaaatacaataaatacataatgagggctactcagtgtcagaccctgagctggatcctgggaaaacagagatgattaagaacaccctcaatgggcactagggtgatgggagggggtcaaactatgatgcaatctgcggcatgctctggcagacaaaagcatgagtcactgcaagacctaacaggtggtacttaacccagtcagaaaaagcaggtttcagagaactcatgacccacaagctgaggcttaaaggactcgacaaagaagtgagggaagggtatttcagatagagggagcatgagcaaaagcacagaaacgtgaaatggtgtgaaggatacagygtggttaactgttttaatgtatgcatttacacctgtaataccaggcaagatgtcataagaatgtatgtatttcatctcttccaaaacgctttccagtttgcctttg

SEQ ID NO: 852248 - DNA, 475 bp, Homo sapiens
attttcaaaaaaaaaatctagagawgatcttattatgctaatgggattgctccttaaagagtgaacataattatggaccacagtaaaggagttggagacgctggaagggccatagcagaaaattaaagaaggaggtgggaagcttaagagttaggcatcttggaaagaattgattatatgagaccagaaaatctactctctacctatgttccccaggaggatcctaaagacacttccttcattaatgcaataaagaatgtcattatatttttaaaatatcacctttgagaaactcagtagtgcccatcatgctatgtaagtcatacttgataatacgagagaccaccattgagttaaactaaaataggcattttctaaaaagaaattaaaaagatatttaccatatgatctagaaattttatgtctgggtatatagtctaaaaattgaaagcagggattaacagatatttttaaa

SEQ ID NO: 852249 - DNA, 475 bp, Homo sapiens
attttcaaaaaaaaaatctagagaagatcttattatgctaatgggattgctccttaaagagtgaacataattatggaccacagtaaaggagttggagaygctggaagggccatagcagaaaattaaagaaggaggtgggaagcttaagagttaggcatcttggaaagaattgattatatgagaccagaaaatctactctctacctatgttccccaggaggatcctaaagacacttccttcattaatgcaataaagaatgtcattatatttttaaaatatcacctttgagaaactcagtagtgcccatcatgctatgtaagtcatacttgataatacgagagaccaccattgagttaaactaaaataggcattttctaaaaagaaattaaaaagatatttaccatatgatctagaaattttatgtctgggtatatagtctaaaaattgaaagcagggattaacagatatttttaaa

SEQ ID NO: 852250 - DNA, 616 bp, Homo sapiens
caatgccaaatatatggatgcccaggatttacatgcctttgctcttccgaatgaaaaaattcttaaatttccaawgtcaaggcaaattctattatttatcagtattattcaggttatagaccatatttactggggctagatggaaagacaaatgagccacaatttggaagttaagtaaaaaatggaaaatgagagaatactgcattagtaacataaaatttttcaagttcctagtacagttagaaaatagttgtagctcaataatactgttgatgtatactatattttcttctaccattataattgaagatgcagaattatgaaatagtgatatttcttgggcatatttcaaatacgtgggatatgtttgatatatatttacatagtttataatttattatgaaggaattatattttatatttcttataatttagtaaaaagtatagttgagataggtttcccataattatattaatgattctaaatattaaaaatgttaaaataaatcaagaattaaactagaaatattaaatttcttttcagatatttttacatagtagcctattgcatatcacttaaatgattccaggtatattttaattatttctaaattgc

SEQ ID NO: 852251 - DNA, 637 bp, Homo sapiens
gccttgtgtgaccaaataacccaaatatgtcattttggactttagggaacctaatatcctgctaaatcttaaacactgacagcaattaaggtctcgtcctcaggcacagtagaagatgccaatcaaaagaaactgcattcctgagacagggggccagcaatgaaagctattcaactcaaggctcaggcactatggcagaagaggtgggcatgtgagattgtaagagccgatattgagagataaaataagttcagtttctctataaattaatcattaatgtcaaaggcatgcttatatcagaccagcgtatgggcccctttgtcagattaacaagactttcttgaagaattagctaaatccttaatagaggttataaaggttataaaaggcttatggaagttttatcttatggtagaaattaaaatttatagattctttacaatttcattggcttcaggctgtttttgttaaggcttattgtttggaaaattaagtctcctctcaaagaataaaggtttttgccttttttwaaaaaaaaatccttgagttatcactttggttaaatgaatgacttattttacaatgacctgggatcctattttgtgatatcaagtgttttaaacctttgatatttgat

SEQ ID NO: 852252 - DNA, 619 bp, Homo sapiens
ttttttttaaactcacttttaaaagatagttttttgagatgcaaagttctcattctttgggtttttttttttttcttcagcactttaaatatatcaacccactgcattctggcttccagggcttctcatcaaaaatgtcctgatcatattattatggatcccttctatgtaatgagtcaattctttcttgctgttttcaaggttctctctttgtctttggctatgactgattataatgtgtcttggtgtggagttctttgagtttatcctacttggaatttgttgaacttattggatatttatattttgtcttctattatatttgggaacttttcaaccattatttcttcaaataatctttgcccctttctcttttcttctcacaatgtgtatgctgcttctcttgacagtgtcccacagacccctaagctttgttcacttttcttttttaaaaaaattgttcctaaaacttggtgattttaatagtcctgtcttcaaattcactgatactttctcctgcctgctgtgtttctgggactcctmagtgaattattaataacaattgttataattttcaactggagaatttggaatggtaggtcctttttacattttcttt

SEQ ID NO: 852253 - DNA, 577 bp, Homo sapiens
aggcagttgttgctaccttttagagatggaaattcaagaactccatgtggtctccactgacaccaaagtgaggagggttttcatccttgtgaggataaatccaggccctctattcaggcttctctgaccccaccccaatattgtcgttggacaaccttattttaatctgatgctggtggaaatgtggctatccacttagcctttgctaatgtgttcgataatgaggctacagtttttcctgtgatgtttggctggaatagagtggctgtttttacaagttttggtcctcagctagagagcaaaatattgttcaggctttttttgtctgtatccattgacctatgtaggttgctggcttttccagcacccagtcttggatatatggggcaaacataaaactgagaaaattcaccatcatgtcgttctttgaatccaaagatccctagctgatcagccttctctccaaatttcagaggattcttaacatttsttttatatataacgtccatagtttttagttgtgtttggctagaagaataggaaacatacatgtacttcatcttcacagaaatagaaa

SEQ ID NO: 852254 - DNA, 589 bp, Homo sapiens
actttagtccccaataagaagacctgtgtgcacatgcacgcacacacacacacactcaatccattatattcccagagccacatgtcatgataataattttcacctgagtctccctcacaattggctgcrtgtgactctcatcccattacatggttatttccccaggtcctgaccataatgtttgaatacatttcagcagctagaaaaatactcacattagattcccaactcacagagtaagagctatagaaaaatatggacatgcagaggctatctctctttccatacagaatagtaagtcaagaacaatactacacccctaggagaagtgcagagattattgctaccatggaaggctggaaaatgcagagtggtaattataaaatgctcagtgtaattctctagtttagttaatgcaaaacatgattgattttgagagagcaatagtgaattttcataacctgagttagttggtgactccaataaaagctactgttccagatgtaatatttttaatggactaaattaatacaaccatggatacctaataaccagttatagatccggtgactttttttcaatcccaaca

SEQ ID NO: 852255 - DNA, 621 bp, Homo sapiens
agggcatctttagaaagaggaattttcaaaaacactttaatctcataaaaatgaacaaaatgaaattaaaatcagtaaagaaattttgcaaaaaataggaaatcttcagtaagagaaagcccttaatttgttccttaattgtcaaaaaagcttagcaaaaattacagtttttcaaaacacaattaagtgaccctttccccacaaaagtcttagttccatggtaaaaccgagaattttattataggtcagtgttgatctccatcagatgtgattagggcccacagttatgtaagacaaacatggctgttgaagagccactcctatgaataagaaagtccttattctttcttattggactggatgtggactggatggatatcttatgtttacccgaagaaagatttattatttttatgattttgatgatgttgtttctacatccttggatttagatcatacaatcaagcaagaatcatagtagccatagttttattttggtcgctatgtggttcttttggaattatgtttgaaataattatgtttgaaattataatgcagaataatygattaaggtgtttgttgtcacttctgtataatgttgggactaggttttgttatgca

SEQ ID NO: 852256 - DNA, 633 bp, Homo sapiens
agtttaccacttcatttgtctttttttctttttttttgaaacagtctcactctgttgccaggctggagtgcaatggcatgatctctgctcactgcaacctctgcctccctggttcaagtgattctcccacctcagcctccccagtagctgggattacaggcacacgccaccacacccagctaatttttgtatttttagtagagacggggtttcaccatgttggccaggatggtctcgatgctctgacctcatgatccgcctgcctcggcctcccaaagtgctgggattacaggcatgagccaccatgcccagccatttgtctttcaatccattggaaatctaaaggttttcttaacctattctgctaagaatcactgatctgggaccaggacaaccctgatagcatctgtattaacttggtcatttgtgttgtgacttttttttaaaggccaagaatttaggtttattttgtgtcaggaattaggctataatcagatatttgrggactgggggagtcagcagtgtggtgatcagattttcttaattccactaaggactaggtaagaagaaatatttggacctgcatgagatgtagtttgagcacactgaaattataagggaaagctagattgt

SEQ ID NO: 852257 - DNA, 535 bp, Homo sapiens
ctctgtatgagactgtgatggtagatacatgtcattatacattcatccaaagccatggaatctacagctccaagactgaaccctaatgtraactatggactttgggtaataatgatgtgtcaatatatgtttattgattgcaacaaacagaccattctgttgaaagatcttggtagtcgggaggctgtgcgtgtggggcaggaggtatatgggaaatctctgtgctttctgcgtaattttgctgtgaaccttaaactgctctataaaatggtattatgaaacagcaacaacattcaaaccaaagtgaggagacacagcactgcattctactcatgacatctagtaaagtgtcttttgacctatagtacttcttgaagttctttgcagcctgtcggcttgggcagcagtcactgggcagcaggggagaatccctcatcaagcaggaggctctgatactctaagaatgggattttccctggcggcttcatagctgtgaaagcactgacttcatgttcctgttttcttccttctggcc

SEQ ID NO: 852258 - DNA, 571 bp, Homo sapiens
atcagtggtaggccaggcgcagtggctcatgcctgtaatcccagccactttgggaggccaacgtgggcraatcacttcagccctggagttcaagaccaacctggcaccatctctataaaaaatttaaaaattaggctgggtgtgatggctcatgcctgtaaccccagcactttgggaggccgaggcgggtggatcacctgaggtcaggagtttgagaccagcctggccaacatgacaaaaccccgtctctactaaaaataaaaaaattagctgggtatggtggtgcaggcctgtaatcccagctacttgggaggctaaggcaggagaatcgctagagcccgggaggcagaggttgcagtgagccgggatcgcgccattgcactccagtctgggtgacagagtgggactctgtctccaaaaagaaacacacaaaaatttaaaaattagctgggtgtggtggtgtgtgcttgtagtcccagctactcaggtggctgaggtgggaggatcactggaacccaggagttcaaggctacagtgagctatgatcacaccacttcattccagcctgggc

SEQ ID NO: 852259 - DNA, 504 bp, Homo sapiens
gtgtgttatttttgtatcatttagcgtcattcccaggttcatcccgakcttgagaaattaacaacaaaagtcagctgtgctccctctactggttgcatttctttggagcagaaatactgtacatttgtgtataagttcattgctgctgatggggctcggacctgcgttcacattttcttttccgaaattcgcatgacttaaaaagcaaaacgagtggctttcagaactgcaggttaagaaactggtacctttagagggataggcgtcttccttactgcccacttgtctactagtgttgtgggggaatcttcctgggcaggaggacacagcccttctgctatagcagtaaattcttggatgctaagtcctgcttccctccgaggcccaaggccaatgcctggggcctctccagttctgatattgctgtattttcatcactatcaggtaagccgttctgttcagatctgtgaaaacctgcccgccactgtatggagccagcagggt

SEQ ID NO: 852260 - DNA, 574 bp, Homo sapiens
agagcaaagaacagtccctttggcacattcatcaaaactgtgatcaggctgattaaaatgcagatatactggagcttgtcktttatctgtattccaacagtgatatctgatttatttgaatctcattaacactctatttccatgccttctttactattgtttgctgctgttaccagcatctaattaaacaagcacaactgggaattttgcacacacatttactctatatgtttctctgatattatttgaaacctgtcttcctcccagtaatgtactcctcaggcgtaggatgagggcagaatggtaatttggtgttgttctgcaccgtattacatttgtgtgaggaatcacaggatcttataaatttttaaattgaacaataccctcaatttggaatttgctttcatttcttttaaagaacttgccactttggtataaaggcttttgatatcttaatggcaaagcctgcatttcacagaatatttatttattattggtctgatttctgaggtgataaaatggtgtatttcatttttattgcacacgttttcactattctgttttctgtatagtt

SEQ ID NO: 852261 - DNA, 565 bp, Homo sapiens
attctttccaggataaacagatgttttggcgtatttgtttgctttaaaaatggcacaaatatatttcaaagaagagctttgtgacattacgattcacaaaacagccccatagctatgatctgggtatttaaataatacaagaattttcatcagaagtatctgcctttatcaaagctagatatattggtgggttttcctaattttttatttctttactgtctacattccaaatggaatggttattttgtcctcaaattctgatgttttttatttcttttaattaaggtcaaaataacaattgcattctttactcatcaaattctttacttttctccttttgaaagcattcacatgcaattttattcatttaatgaatgcattgcatttagcacaatgagccttcaaaaccatgccaagataattgtagtacccactttctgaaacttggtccttagtcactttctaaatctgtattatgataacagttaccatattaactttttaattatataatctgtgaaatatttasataaatatataatttatctccttttattgtatacat

SEQ ID NO: 852262 - DNA, 606 bp, Homo sapiens
tgtgtctttctgtccctggcttatttcatttaacataatgcctttcaattccatccatgtttgttgcaagtgacaggatttcattctttttatggcttaatactactccatttcgtatatataccacaattactttatctgtttttctgttgatggacacttatgttgcttccaaatcttggctattgtgaatagtactacaaaaaatacgagagtgcagatatctcttcaatatactgatttcccaactttggggaacatactttggagtggaatcactggattgtacagtacctctatttttattattttgaagaacctccatagtgttttccatagtggtgtactaaatcacattcctaccaagagtgtagtagttttcccttttctccacatcctcaccaccatttgttatgaccacacttttggatataagccatctttactggagtaggataatgactcattgtagttttgattttcatttatctgatgatcaatgatattgagcaccttttcatatayctgtttgtcatttttatgctaaaatagtggcagggttggagagaattgaatccaattttgaaataatgctaccgtgggtaa

SEQ ID NO: 852263 - DNA, 618 bp, Homo sapiens
taaattttctccatgtcttttcatgacttgatagttcatttctttttattgctatgtaatattccatcacgtggatttgctacaatgtgttaatacatttacatatgtataaaccttctggttgtttgggaaattgtgactttagcagctataaacacttacatgcaggtttttgtggagacatagctttttaactaacttggttacacaacaaggaactattactgtgtagtattacttttatttgcaattctcccattataaatgatattgagcattttttcacatttgtcttttttgctgagctatctttatttttacttgagttttttttttgctttcttattgagttggaaaagttctttgtatattttcgatataatttcttaattagatatattttacaaatattctctcccagtctgtggcttgttttgtaactctcttgacagtgtctttcagaaagtatattttaattttagtgacatgaaacttgtcaatgtttttatttcatgggttgtacttttcttattgtattaaaraactcatatgtaagctttcaactttccaaatagaaattgacattcttatgtttattccttaatgtcttgattcata

SEQ ID NO: 852264 - DNA, 514 bp, Homo sapiens
tcctgagttacttcatttagaataatagtctccaatctcatccaggtcactgtaaatgccattaattaattcctttttatrgctgagtagtattccattgtatgtatataccacagtttctttatccactcattgattgatgggcatttgggttggttccatgattttgcaattacgaactgtgttgctataaacatatgtgtacaagtatctttttcgtataatgacttccttgcctctgggtagatacccagtagtgggattgctggattgaatggtagttctacttttagttctttaaggaatctccacactgttttccatagtggctgtactagtttatattcccaccagcagtgtagaagtgttccctgatcaccgcatccacaccaacgtctaccgtttttatttattttttgattatggccattcttgcaggagtaaggtggtatcacattgtggttttgatttgtatttccctgatcattagtgatgttgagcattttttcatatg

SEQ ID NO: 852265 - DNA, 587 bp, Homo sapiens; identical to SEQ ID NO: 844950

SEQ ID NO: 852266 - DNA, 580 bp, Homo sapiens
tctttttgaaattgttgtagttactactctgtgtaggcttatcttttagtctttatactaaagatataagtggtttacccactgcaattatgatgctagggtattgtctttgtccatatacttacttttaccrgtgagttttattcattcatataatttcttattactctttaacatccttgtctttcatactgaagaactccttttagcatttctttgtaagatagttctggtggcgataaattctctcaccttttgtttgtctggtatagtctttatttctcattcatgtttgaaggataattttgctggacataatattttaggttgaaagggtgtgtgtgtgtgtgtgcgtgtgcaccttaaatatgtcatcccactccctccttgtaagtaaagtttctgctaagtctgctgccagacgtattagagcttctgtatatgctgtttgcctcttttcttttgctgcttttgagaatcttcttttatctttgacctttgagaatttattatatacgccgagatagtcttatttgggttgaatcattctgaggttctctaaccttcttgtacctgtcta

SEQ ID NO: 852267 - DNA, 437 bp, Homo sapiens
atatatataaaatgaaggagtcaggtttatctcagcaatgcagagttgacttaacctgcaaaaattacatcacataatataatctgttcgtagaaaaagaggaaactaaatcacattagcatctccaaaggtgtgaaaaaagatttaagaagattcaacacatattcataactctcacagaaaaaggaatagaattgaatttttttcatctaacaaagggattttagaaaattatactctccctctctctctttttctcaacacacacacatacactgcaaactacagaacactgacgtgcattaaaaaagactgaaataattgaaaagatatataatatcaayaatttggaaaataaaatttcaatttacaaaaatttgccaacatacagaggtcaactccatgcaaatctagcaggcattttggttgaaattggc

SEQ ID NO: 852268 - DNA, 568 bp, Homo sapiens
agctacgcatgcacctgattcagcagtcacagaggctaaagaaggctctagcaagttggaggagctgaaaactctgctggtgcctctcatcaacaaagtgattcagcagataaaataacacatgagttaactacaacagtgtttgctgcacttttcttagtcatctgggtataaaaataacatggtcattgatttacttttacctttcaaatctcttagaaatgtctcacgtggtttaggataactgagaactgtgctaggaaaggaattataagaaacagtgctagtttagctaagttgaaataatacaaatttgccagactggaaagtgaagagcaatagggtaatatcataagacatattgcatgagggagacatgttgacacgagtggcccaattcagatctgtatatttggatacaagtgagtgatgtgtactygcatggcctgaaaaggaacttctatttgcaaataaattaaaataattcctaaaagaaaaaataccccaccttaattatcactgaggaaaacataagaaactttcttttagacttccaattttagaataa

SEQ ID NO: 852269 - DNA, 637 bp, Homo sapiens
atcttgtccaagcatcagcatgacaagcagacccccgacaatctggatcctgctattccaccctcacagtctgtcatcctccttcatccttccctctggtcacactgattttcccaccactctctggactcwccttggccttctgtgtctttattcccgcatcagctgtgtcccctggaagagactttctcctctgtgtggtttggtaaattacattttcccacatggtcccagttcatatgcactaagaccaagattgacatttgttatgttcttttggttgcaagggatagaaattccttcaaaccacttaagtaatggagtttgttattaacataactatgggggtaagagacaggtgaagaatctcatagaaaccaagggcagcctgccccctccccttcaagatccaagacaggtctcagatctgagtagttttgtcaccctcctcagttacaagatgtcaagatctccattctcgtgctctcttgctagggtgcctcctactctggccctgtgtatctttgtgtgcgacatcactttcttctccctactgacagctggctcttcctctggctcctcattcaaacttgcttgaagtagtctcccgggcagagctcctcagataggaccatct

SEQ ID NO: 852270 - DNA, 485 bp, Homo sapiens
ccggctttccctggcccctttctaccttgtccaggagcctcttaccccctgaggcagcgttgaggctgctcccccaygtccacagtacatgtgcatttgtagcctggagctgacaaggcccaatatgatctggtcctgttctaacgtcatcttgtctgcccgtctcagccttcatctccactgtgcatgttgggagaacctccagtctctcataaaagcccactctctcactatttcaatattcttctgttttagcccattcagctgccatgtggtacctggcagtttcctccagtccagttcccagtggagtgtctgtgctaaagtttctgaggcccgccaagcccatgaaggcccgccacagctgccatctccctcagagttcacctacatcgtgtgatgtcaccttcactgagccacagtgggcaccaagggctcaatgacatcggtgggcccctcttccctgttccgtgtggccagaatgt

SEQ ID NO: 852271 - DNA, 540 bp, Homo sapiens
atggttatgcagtatatatttatatcaagtaacaggttagaatggattgtatatattatttctacacacacacatgatttcatagtttagtgaattatttggcaacacttgagctactacttcagttcaaattctgaagagtgttttatggtgattcctttaaataattgccaaacatttgctttttttctaaagaaactacaataaagataaataagtctaagtgcaattatatcaatttatgagaattaaaaagttaaagtcctattgtttaacagtcaaactgtggagtgatgagagcttcatggtaatattatcattcattttataaattcaaacatattctggttagattataatgacctcctctttaacctctagatactgcatgcatataaagtagaaaactcagctgttacacagtaagcctctaagagcagtttattagaattcaaatattaaggctgaggactgacaattatgtggaagaacagcctaaagatgaygtgtaagagcataataaacataaatttaaagttg

SEQ ID NO: 852272 - DNA, 546 bp, Homo sapiens
cccgccaccccttccccaaatcgaagttcccgcgttccgccccttttgcagacctttccggttctccaggtttttgtcgtttttttttttttttyatccccagttataactaacggataatgataataatggagaccatttatagagcgctgtattgttccagactgtgtgttttgcactttaattggcttacttaactttcgctaaaaccttataaggaagagcagcactccctgcttggcccaatattagtggcgtcggaggcctcagctgcaaaatctggcccggcggcattccagaagttctcgcgggagggagaatcctcaccaaggcgggtactggccggccacggagattctcttaggcagctaacgcggggcggccgccgcggcgggggcaagatttgtccttcctgcggctgcgaacccaccgcgggtttgcgtatttcccttgattcctggaggacagagctgggatggacttgacccaagactcagggatgacgaaagggaaataaacagagtaacgtagtactggataatcttt

SEQ ID NO: 852273 - DNA, 630 bp, Homo sapiens
tctactcactaaatacagcagtttgattttgcatcataacctaggctttattttataagttctaatttataagtagcatattacttgggattttaattgagtaataaacacattattttaaatgtgctcagatgcagccagcatttcacactcatctgagtttgcaggtgttttactaaactcaaatggcctttcttaaattcaatagaaacatgctcagaattataatacaacaataatttaatagttaaatataaattcatcagtaacagcacaaataaataggtttcctccttagaagaaaattaatttttatgaaagtcagaagcttggttttacttttctttttaatgtggaataaactgaaatgtgtcaaaatctcaccttcatttttttctcaataaattaaacaccgatcaaaatcagagtttacagcatatttgtttacattgctttaataatttttaaatgccagtactatcttccaatgtttaggccagtcagtcaatatgaagtaatmatatagctgtgattactggtaggtacattccaacagaaaaaaacctatgtttttgttttataggtttatatgaaagaaatatttgcaatgctgtcaccttgcagttagga

SEQ ID NO: 852274 - DNA, 630 bp, Homo sapiens
tctactcactaaatacagcagtttgattttgcatcataacctaggctttattttataagttctaatttataagtagcatattacttgggattttaattgagtaataaacacattattttaaatgtgctcagatgcagccagcatttcacactcatctgagtttgcaggtgttttactaaactcaaatggcctttcttaaattcaatagaaacatgctcagaattataatacaacaataatttaatagttaaatataaattcatcagtaacagcacaaataaataggtttcctccttagaagaaaattaatttttatgaaagtcagaagcttggttttacttttctttttaatgtggaataaactgaaatgtgtcaaaatctcaccttcatttttttctcaataaattaaacaccgatcaaaatcagagtttacagcatatttgtttacattgctttaataatttttaaatgccagtactatcttccaatgtttaggccagtcagtcaatatgaagtaataatatagctgtgattactggtaggtacattccaacagaaaamaacctatgtttttgttttataggtttatatgaaagaaatatttgcaatgctgtcaccttgcagttagga

SEQ ID NO: 852275 - DNA, 427 bp, Homo sapiens
ctccatgcttctggtgtacatgtttgccgaggctgtgggatgggccattctaacgctcctcttcttcaaggacagttgcactgggcagttccagccttcagcttctggctctgctttctcaccttaagaaatccattccacctcaccttagatggttgagctgcttcatccttactgtggttaccgagatacctctaataaatatagatcaactttactcctgtaaaatgcttcattgaaaaataataatgtgataagatatgtttggaaacggttgcatattagagcctcatttatggatattcacaytctaaggtagagtattaaaggcttcaagaggtcttatttaacccaatttcctgaatattatttgatcacttaaattttttcatgtaattttatttgatatcctgcataattattgttc

SEQ ID NO: 852276 - DNA, 634 bp, Homo sapiens
cattttaagccttctctggccatgttccaccaccatccctggcaccccaacccaaaattcaagaatctytttcttttttataaggaatgtatgtttatgttatcattcctattaggatttaggttcttcaggaacattttgtcttattcaccattgtttaccctccaataaacatctgttgaataacgaatcaatggatggatggatagatggccagatagatggggaggccattaggacaatcctccaggtaagtataaattttgctctgacttggcacttgcttaactataaatcaaggctcaacatgccattttctctccattcctgcatttttctggttttaatcacacagttgctgaatcatcaaatgctacagcagaaacatatccaaactggtaaaattctcagtaactatttttgatcttgaagccagttagaaacatactattaagggaaaagtgataacttgttaatattatggtttgatgaaggggaaatattgaacagagttttctaatatatttaactggtttataatttgcagagtaaaacttcaacaagtgcatgcccttgaaatccattaatctctctgtattgttttatgtctgaatcagtacagagagaataaaca

SEQ ID NO: 852277 - DNA, 617 bp, Homo sapiens
tttgaatacattattggtatctaataagaacctatggttggcccttttgtatagtaaatatacactgatgactattcatttgtattaaaattttcccgartagcttctgcttgactaaagtatttcctcctttctattttaggatttagccttcatataattaatatctattaatatatgtgtttgctttagggaagtgttgggattggcttccctggaaagcagaccctgtgatgtatcaagaaatgtgaaaggtttatttactgggaggtgaaatgaaagaaaagaaggcaggattgggcagagatagccatcaaacctgttgcaggctgacaaggtctaggccgaagcggggctgtagagcaagatttgcttggtaatgttatcaagagcttggtggaaaaggctaagtccttgctaccactgccttgctcaatttttggccagagctatcctgagaagtataaaaccttggccgccaacaccttgcttattccagagttcccccagatgggttttccttttacttgagaactaagatggactgtgaaggtgatcatagctgatggccttcagctaatggagttcatcatagcagcaagtcccttcttgaaggg

SEQ ID NO: 852278 - DNA, 290 bp, Homo sapiens
ccaggactcctttgaaaaaaaacgccttcttttcttctttctcctcckcagttctctctttgcaaataggtaattgtgtctctatactatgatacactcacctcagatgcatcctccaagctggaaagagttaatttcccaaaccttaaacgggttggcttaggactgggctcaggggaagggaacccagaagcccaacatgccagcaaaagtgtgaagttttcctgaccagtcgggcttttggcctccttctccctgtgcaaactggtaaaaggcctaattttttagct

SEQ ID NO: 852279 - DNA, 398 bp, Homo sapiens
gaactggcaggtattgaaaaaacctgacaacagcagagggtgaagtcaccccgcatactaaacaaacaacctttctgttctggaaaattgcaaacatatatagaaacagaaagaatggtttaataaacctctatatatccatcacccaagttcaaaacttatccactcaaagccaatcctgttttatccatatccccactgattcacccacctgctccaagactattaagaagcaagtcccagtcgtccttttgtttcatccataaattcaatgaatactttttcttaagtttascctaactcttatgacatcctcaagcttttggcaacaaaccactcaaataaattaattcaatattcattaatgattgttatctcctttttattccacacattta

SEQ ID NO: 852280 - DNA, 610 bp, Homo sapiens
ctcactgcagccttgaattcctggattcaagtgatcyccctgcctctgactcctgagtagctgggactacagatgtgccaccctacgcggctaatttttaaattttttgtagagatagggtctttgttgtccaggctggtcacaaactcctggcctcaagcagtcctcctccctcagcctcccaaagggctgggattacaggtgtgagctaaattcctccctaatgttaccatagccttagctacttatctttgggtccttctcatctttctgttttccttcccagccaggaaaatctgtgtaagtctcaaatactttcctcttcccggaacaccaaagctgtcatttcctatgcaggtgaacctttctggcaagtgatacctcttttctttttcaaaagcactctagtttgtctctttgtgaaacatgatcaagggattaatttcccatgttttatttagcctgatctctttcaaggagctttttacatttttgcctacctaattgatctttctaagcatcctagcatattgccttcagttgcttttcactttcatctaaacaaaagcaacgccacattttttcaatgatttcttaggtatattgatgt

SEQ ID NO: 852281 - DNA, 627 bp, Homo sapiens
gtcatataaaaagctgtgaaagccatcaarcccaaaatttgtgctggagaaaactttgtctggatgttgtgcatgacttcacaggatttatgaaagaggcaaccaaggaaatcatgaaagagattgtggatttgacataaaaggtggagtgggggttgaagggttttaaggtacggatcttagaggaatccaagagcggatagacaccacacccgaggaattaacagaggatgacttgatgtagataaatgcttctgaattggtgccagaggatgaagaagaagacatagaagaagcagtgccagaaaacaggatcacatcagacaatgcggcagaaggattctgattattcaagactgctattgacttattttacgacatggacccttctgtgatactggcagtaaaactaaaacagtggaagaaggattgaaatcatatagaaacatttttagagaaatgaaaaagcaaaaaaggcagacaaaaattacaaagtatattcataaagttatacagagtgtgccgcctctcctgcctccccttccacctcctccacctctcctgcctctgcaacccctgagacagcaagaccagcccctcctcttcctccttctcctcagtctactc

SEQ ID NO: 852282 - DNA, 601 bp, Homo sapiens
gattcctggaccctccctctgatctactgaatcctaactcaggatgctggagcctagaataactctgctaacaatccatytcagtaaacctcatacaagctacatggagaaccccttccccagatgatggcccaagccctgggccaaacattcattgaataaacattgactatacactcccatgtgctagaaccagtgctgggaaatgaataagacaaaccacccccattaccatgggcaataagagaatcatgaatacatctatttctggaatatcttatatttccaaggtcaccaaagtatctaagaacaactattctgctaattatagcttaattgagaaaaggaggaactgggagcttcacaggctcatgtttgaacattgaagaggtctgggtaaatggttctggagggctattctgagcttccttaaaaagatgcccctactgcaaagagttctgtctctttttgtcttctgtaaaagaaacaaaacaaagaaatatcaaagaaatacaattgggaaaataagactgttttaaaaagtcatttgcagaaattgacaaaaacaaaagaaattctgtgactgagtctgcccttgtat

SEQ ID NO: 852283 - DNA, 601 bp, Homo sapiens
gattcctggaccctccctctgatctactgaatcctaactcaggatgctggagcctagaataactctgctaacaatccatctcrgtaaacctcatacaagctacatggagaaccccttccccagatgatggcccaagccctgggccaaacattcattgaataaacattgactatacactcccatgtgctagaaccagtgctgggaaatgaataagacaaaccacccccattaccatgggcaataagagaatcatgaatacatctatttctggaatatcttatatttccaaggtcaccaaagtatctaagaacaactattctgctaattatagcttaattgagaaaaggaggaactgggagcttcacaggctcatgtttgaacattgaagaggtctgggtaaatggttctggagggctattctgagcttccttaaaaagatgcccctactgcaaagagttctgtctctttttgtcttctgtaaaagaaacaaaacaaagaaatatcaaagaaatacaattgggaaaataagactgttttaaaaagtcatttgcagaaattgacaaaaacaaaagaaattctgtgactgagtctgcccttgtat

SEQ ID NO: 852284 - DNA, 556 bp, Homo sapiens
agcctcatgagctgtttcttcttccagtagtggatcttggctttctccttcctcttctcctccagggtggctgtcactgcctggtacttccacctaacctcttgagcctgtcgccccagaagggcaaactttcttgtaggcttcagacgcacgaccttgagggcagcaggaaccaccatccgctttttcttatcgtagggcggtgggatgccgtcaaacaccttgaggcagtccagggaggcatggcctcgcttggtcttgtggcgcacatgtatgcctcgcactgtcggccagaagatgcggctgggggcccggaagtggtaggcgcttcgaaaagggttggtgttcatccgcttgccgaggaaagccagattcttcaacttgtttctgtagaaattgccagagatgttgatgccctcgcagcgtacgactaccaccttccggcccagcagtaactrcttagccacgatggccgccagcggcccaggagatggccttgaccatcgagcaccaggacctgcacctctgccatcttccgcagccgcctgggagaggc

SEQ ID NO: 852285 - DNA, 529 bp, Homo sapiens
aatatggcagaagtaatggaatgtcagttctaagcatatgttctccaaagactgtagcttccatctcatgtgctttctcaccctctctgaacgcttgccctgtgggaagccatgctataagacagacatatgtagaggctcatgccatgagaaactgaggcccaacaacaaccacatgcatgaacttggaagtggatctcctccccaaactgagtcaagccttcagatgagatctccacccctgccgatagcttgacagcaacctcatgagacatcttgagcctgaggctcccagctaagccatgcccagattcctgagccacagaaactgtgagagaagaaatgtttgttgtttaagtcactaagttttagagtaacttgttaagcaagaatacgtaacacacaccagttgatgctgaggctgctggtccaaggaccacactttgaaaaccttggctgtaawggaacagctgcttcttcagtcttctgacttgatggggcagggaaatactgagttttaatacttctg

SEQ ID NO: 852286 - DNA, 633 bp, Homo sapiens
aaaagagctagcttaacatttatatggtgaattaccatggaaataatcctgttaaaatcaagaaggaaagttgtccaccatctctactttcgtccagcaatattctggtggttaaygcaattagacaaaagaataaatacagtttttagcagctactaagctctctgccagcaccagtgatttctctgatagatccctctgtggaaccagcacaatgccaactaaactcttaaatgaccagggcttcctccagacccctaccctctgtccagccttgtcatagtcttacaatcagtatgaccatgaaatgaagaatgttcatactcactccctttccacactgcatcccatgcaaagttatttgataaaaattccgcaacagagaaaaaaggaccctgcccataaattcaagcccttttgtcgggtgacaccttttgtttgtggaagagagtactggcacagtgcaaagacaaaagcaggaggtagatttcaaaaaataaataaactagcgaagtttggtcacaaatgtgaatggagacttaattgatttgtacgtgaaaaacgccacagtgcctgaatcaaggctccatacaaagtcatcattattattattcaccactgtaaaagcatggc

SEQ ID NO: 852287 - DNA, 633 bp, Homo sapiens
aaaagagctagcttaacatttatatggtgaattaccatggaaataatcctgttaaaatcaagaaggaaagttgtccaccatctctactttcgtccagcaatattctggtggttaatgcaattagacaaaagaataaatacagtttttagcagctactaagctctctgccagcaccagtgatttctctgatagatccctctgtggaaccagcacaatgccaactaaactcttaaatgaccagggcttcctccagacccctaccctctgtccagccttgtcatagtcttacaatcagtatgaccatgaaatgaagaatgttcatactcactccctttccacactgcatcccatgcaaagttatttgataaaaattccgcaacagagaaaaaaggaccctgcccataaattcaagcccttttgtcgggtgacaccttttgtttgtggaagagagtactggcacagtgcaaagacaaaagcaggaggtagatttcaaaaaataaataaactagcgaagtttggtcacaaaygtgaatggagacttaattgatttgtacgtgaaaaacgccacagtgcctgaatcaaggctccatacaaagtcatcattattattattcaccactgtaaaagcatggc

SEQ ID NO: 852288 - DNA, 552 bp, Homo sapiens
acccctatcacacctcgcaccatttttaaaaatacatataaggactgaagtcaagagcactctaacacttactcacactttagcatacccaaggcaggggccagggccctgaggagtgccagcccttgggccaaccactaagtactttgaggcaagagcaggcccaggggggttgagacacatcctccattcaacactccagccccaggggtgtcatcctgctccaggccgccagcccttccaacggaactgtctaaactgtctttgactaaggcctgggacagccttcgtcgtaggtaatctaataaagctattaagcaataatgatagagaccatgcttattagaagatgactgcacactcaggaggatgatattagcagcaaggcccacccagaggaccttcaatctcctaggaaggagattaattcatgataaatacactcaytggggccttcattgctttcgaaatttaaaaaataatattctttattttggagaaagatgataagagagggagagggaagagggcttttgaacaataatatcagat

SEQ ID NO: 852289 - DNA, 533 bp, Homo sapiens
ttctactgagaaaatataatctctccccccaggtgcccttccaccacccatctagacacgcctactttcaaaagccctgggcagaacaggcttactttgaacaacagaaccatatcagggaaaattwcctggaattcagacatggaaaaactcacccaactaccatgtgataccttgatccatgaagctcccactccccgcaggcactgttaacccctatagggcctttcaataatatcctcattcaactaaatgtcacattggtctttgccaacaaagaggaattttccacatgctttgctgcctctgttacattcttgaaaacggcaggtgattctgcatggaaggttccaagaaggaagaaacgtctccttattcccaggctacagcccacattgaaggtccaccattgaacaaaaagatgggagtaggtcaagaagttttctgcaactacagctttagaataaaaattgctgataaacagttcacccaggtgatggtgagagggtcacaaggtagacaacaaggaagtc

SEQ ID NO: 852290 - DNA, 556 bp, Homo sapiens
gcaagtcataatgtctgatgctttctgaatgacctgaatgtgctgtctccaayaccagtgcacacatggtgaaaatacatacggctccaaaacaggcttactgtgggatcttaaccacctcttcacctcctccctaaatccctgtgcagattttcaaccctagcttcaagctcataattttgtgtgttacatgctgagctctcagaaatcagaagccccagcagaggtgccatgctgtgaaaattcatgtgaggaaacccctttctttctaagcagttgtgtctagtagctgcctacaagctctgctaagcagtgatggtttaattatcccacaaaggcagcggtatgctggggcacatttgcacatcttgagagagagctggctgtgcccatctcctccctactctgtgttcggtaatatcacattggtagcttgaaattagccatggtgggagtatttacaccatgaaaattggcacatgctacaaatcaggaatatatatatcccccagagaactggcggtgaagcatctgccagtgcactgctgtgtgtgag

SEQ ID NO: 852291 - DNA, 590 bp, Homo sapiens; identical to SEQ ID NO: 818459

SEQ ID NO: 852292 - DNA, 498 bp, Homo sapiens
gtaaaattaatcagtgaagccattggatccaggcttttctttgctaggagttgttttattatgggttcaatctcatttatccatttcttctaggtttgttttttggttgtttttgkttttttgtgggtttttttgtttttgtttttgttttgttttgtttttttttttttgagatggagtctttctctgtcacccaggatggagcttgatacaatctcagctcactgcaacttctgcctcccatgttcaagtgattctcctgcctcagcctcaggagtagctgggagtagaggtgcacaccaccatgcctggctaatttttgtatttttagtagagatggggtttcaccatgttggccaggctggtcttgaactcctgacctcagatgatcacctgccttgtcctctcaaagtgttgggattacaggcatgggccacggtgcctggccattacttgcaggtttttcaatttactggaatatagttggtcatagtagtt

SEQ ID NO: 852293 - DNA, 623 bp, Homo sapiens
tacaatttttaacagaaaccccattatagatacaaagctaacattatttagcactttctgtgttgagcaccattctaatacatatgttaattaattcaatcttcacatcaatcctcatacaacctataagttgtgtactagtacttatccctgtttcctggtgagaaaccaacagagagagagtttaagttgtttgctcaaggtaacagctagtaagtggcagaacctggctttgagtagaggctatctggctctagagcccatggttttaactattcacaatgctgctttataatattgttataatatcattatgttctgaaaggttacatatctactacaggaacatgcatttgatatgtttccttaggcctaacactaagttaatatcatgacaatctgtcttggctatgattttctaatgttgttttagtattatttacatttgtaatttttattatctgttttttacattatatccccagtttaacaaacaaaaaggtcagtgacttgaaagtggtttattaaaatataaaagagaygaaaatagtaaatactattattcagaataatataattgtaaatagtgaacaggattccagggcaaatagagaatatgagtc

SEQ ID NO: 852294 - DNA, 588 bp, Homo sapiens
agggactcacatggaatctgggacaattgaagcatcaaggtaagtcatgaaacatcatgaaagttacagactataacccttttaagtaaagtattcatatgtacatgmtgatataaatgaatatataaatatggaataagaaatacttctagctcatgttagaaatcttattaatgaattagtcaaatacctattaactgacattgcagtgaagaaatctagaacatcttaactaaggtaaaatatcattaacgtgaaaatcaacatcgtatgtctcctgatgtaatgcagtaagattacagcatcatttctgaagcattcttgaaaactacacacatcatttacaaacatcagacaaacccaatttgaggcacaaagtaagtgtcctatactcctcaacaaatgccaagattatgaaaaagataagactgtgaaattatttctattgaaagagactaaagattcgcagcaattcaatgcagcacatgaccctgaattcaattctataagcataaaggacattatttagctgaaatttgaatgggacttgtggattaaatggtaattttagatcaatgttaactttga

SEQ ID NO: 852295 - DNA, 655 bp, Homo sapiens
atactagctagcatatatttcattttaagtgccagtggtggtgctgtgccagtactaagagagttgaggtataaatattgctcctgtaatgtggctgaagagattaaaaamtgtctataaagagataaacaagtcataaagcaggtcatgaactgtcaaagtcgtgattctgatgctgccagaatggagctgtaggtcttgagttggctttgtgtagtgggtaggacttatctgagtggagaaatggcacagaggtaatggcaatggtgtgtttacaggaggagaaaaactcctttcactgtaaggcaaggtttaatgagaagaagatggagatgaaattggagtggtgtgctgggcatggactgtggatgagcccatcctatgagatatttgctctgagctgggagacatgaggacagcctgcatacacagtgacagtgagggtgggacagggctttcctgccaggtccctgctcctcgactagaagcactggccttcctcctccatccactcattcatctcctgcttgcctttctctgatgacgtggacttgccagatttggtgtttgtcccctctggacctagaattctcagatatcctactgacctggccatggagaccactagtgttcctctgggctatagcacagactc

SEQ ID NO: 852296 - DNA, 598 bp, Homo sapiens
agcaatttggaaataagcacatttaacaattgtatcttttattttttgttttgttatttttgtttttattttttaattttagagacagggtcacactttgtcactcaggctagagggcagtagtgctgtcatagctcactgtagccatgagctcttgcgctcaaaggattctcccacctcagcctcctgagtagctgagaccacaggtgcgcaccactatgcccagctaatttttttggcagaggggatagagatggggtcttgctatattgcccaggctggttttgaactcctggcctcaagtgatcctcccacctctgcctcccaaagtgctgaatttcaggtgtaacccaccgcacctggcctaaatcatattttttaaaatgtggtagcccatctcattacttgtgtgtgtgtgtgtgtgtgtgtgtgtgtgtgtgtgtgtgtgtctttactgctaaattctgagacttttcaaagcactctcttagtatttttttaaatcactgamataaatcatttcatttaatgattagttttttatttaaaatgttatttacaggtaacttttgccatgacaatattgcttacaaaagga

SEQ ID NO: 852297 - DNA, 658 bp, Homo sapiens
tactggtacaaaaacagacacatagaccaatggaacagagtaggaaactgagaaataagscttcacacctataatcatcagatctttgacaaagctgacagaaacaagcaaaggggaaagaactccctattcaataaatggtgctgggatatctggctagtcatatgcagaagaacgaaattagacccttacttttcagcatatataaaaattaaccaagatatatgaaagatttaaatgtaagaccttaaactatacaaatcctagaagacaacctaggaaatagcctttttgacatcagccttggcaaatgatttttggctgagtcccaaaagcaattgcaatgaaaacaaaaattgataagtggaacctaattaaactaaagagctcctgcacagcaagagaaactattaataaagtaaacagacaacccacagaatgaaagaaaatactcacaaactatgaatctgacaaaggtctaatatccagaatctgtaagaaacttaatcaaagaataactttacctgtactattacatcatgagtgggagatcagcaggtatcagaataaagatgcagctcctgctgattttcattttacccagctgaaaagattgggtcctgttgctcatatgaaccagggcagctggagctttctt

SEQ ID NO: 852298 - DNA, 626 bp, Homo sapiens
taccattatgcccggttaagttttaaaatattctgtagagacagggtcttcctatgtcccccacgttggagtttgcattttcaataatctcttcagatcattctgatgcaaagccagkgtgagaattgatgtctgaaggagtaataacaaatatattatttttgcttccttgcaaaattgttttatttgtgtctctttggattttagtctcctttctgaaatatatttgttaatttattgagtgattgattcatttattaattaatctaaaatttatttagcctactatgccccaggaattgtactaagtgagggtaaggaggaggaacgataagggagataaataagaaacaaatttcagcataaagtgaaaatgataatacagttagtctcagcaatgaggaagggcacttaatctaagacataatcacacagcatgactaaaatatacatgaggtggagaaggcaggaaagtaagcgggcccgtgtgcccctgtccttggtgctgaaccatcccttcaccttctgtggtaaggaagtctttcccaatacctggctgctggtgatttctatattaccaccactaattctgaaccagacgaggaaagggccagaggaaatggagg

SEQ ID NO: 852299 - DNA, 585 bp, Homo sapiens
aaactaaatggagtctaaaattttggctgttcagcagtaaatgtgggtagaggaggagaacgagtttctgttatgcatgttgatttctgcctaaaagtatctacacatatatgcacatatatatgagatacataygaatacacagatatagacagatttaagagccaaatggttgctagccacagctactcccagtcacacatagaaggtgagctagcattgtgagtgagaaacaatgttgcttagtcctcactttaataatattgggtttgattatgagtgtttcttctcacagagttaatgtttagcaaacccaaacatcttctagggatcctctaggtgttgaaatatcaaactaattctgtactgattcattaagagctgttacacagagcttccaagtgactcctgctggcattttggcacttccttgcccaacccagggcttcttccttgtcagtgaataaatgggtcctgcccagccaatgaggaacctccagaaccaggtctggcacatgtccttctagttggttgattattgagccattgctgatgtgtttgaacatcacccctgcctactcatgc

SEQ ID NO: 852300 - DNA, 599 bp, Homo sapiens
gagctctgttatgtgtaaaagtttcttttaaaaggatgggggctggaagatcttctggggatataagacctatctttaggatgatggaaaatggaaacatgagagagrttttcaagtagttggtgaacacatctgagttgagagctttgagaaagtgtcttgtgcccttcagcaaggtggttttaggggaaggtcttgtgatgaggaatttctcctgtctttctatctctacttttctgattcacagaatccctctcccagacatccacctgtctttaggtgggagtgcatgagcttgaaagcaatgagcatcaatcctctctttctggaagaccttagctaataacaagtctctaatatatagaagataaaactatttggtatgatgaagcagaaaatacctctacatatggacaaaaaaaaatggccaatctctccataaccaatgttgaaaattggagaaataataaacatttcttaccattctgcatttttatgagctctctctgagacagacctatccaggagaaatattcctcagagaatttatgagatgaaaggtcataaaaaatcctctatggtttctctttatcttgcta

SEQ ID NO: 852301 - DNA, 599 bp, Homo sapiens
gagctctgttatgtgtaaaagtttcttttaaaaggatgggggctggaagatcttctggggatataagacctatctttaggatgatggaaaatggaaacatgagagagattttcaagtagttggtgaacacatctgagttgagagctttgagaaagtgtcttgtgcccttcagcaaggtggttttaggggaaggtcttgtgatgaggaatttctcctgtctttctatctctacttttctgattcacagaatccctctcccagacatccacctgtctttaggtgggagtgcatgagcttgaaagcaatgagcatcaatcctctctttctggaagaccttagctaataacaagtctctaatatatagaagataaaactatttggtatgatgaagcagaaaatacctctacatatggacaaaaaaaaatggccaatctctccataaccaatgttgaaaattggagaaataataaacatttcttaccattctgcatttttatgagctctctstgagacagacctatccaggagaaatattcctcagagaatttatgagatgaaaggtcataaaaaatcctctatggtttctctttatcttgcta

SEQ ID NO: 852302 - DNA, 532 bp, Homo sapiens
gaaacacttgtaaacatttatgtggggttttcaggagacttaaacctctggttcaatttgaattcaaggtctttgaagatagtyatcagtttctgcttcctttaaaacttctaattacacaagcacagcctttcctgacatatggctattggtctgatttaaaacttgctcatttcagcttgtaccttcagtctcatcgcagcctgaattctaaatataacccacttttctttaagacatgaacccagtggagtgtgaattctacatagaatttcacacaacttgtaaatattcatactacatttactgccttggtcctaaatctcttaaaatatgaattttgaaatatacaattaagtcaataaagcagtttactcttaatgactgctacacttacgtggtcagagacatctatttttaaatctcttcttagtgacaaaaagtttccaatggattcatttcaacgaggatcaatacccaacttccagaagaagtaatactccatgtaagactgtctaaatatgctctgatt

SEQ ID NO: 852303 - DNA, 626 bp, Homo sapiens
acccactttggcctccagccccaacatgctattacaattggtttctgaggtcactaacattgctaaagccaattgccactttgcagtcttgtctgacttgtccttgcaacatctctggatatcactgaccacatcctcccacactgtggcttccacagaactttcccctggttttccatccacccctttaaagctcttcctctgtgttctttgtgggctctgtgtcttttgctttggatggtggagttccttaaggcttagcctgaggcctctgtttcatcccacaccatagtctctctacgcaatctcataaatcaccacctatatgatgattactcaaaatgtatatctctaactctgaaccacgcttctctgggcaaaggattcttatatacaattctctacttgaagtctccccttggatgtcctaaagatttgtcaaattcaacttgcaaacaataaaactcactatcttcccctgcccaaatactcctcttccagagttccccatcttgatgatgggayggtcagccatcatcatacaaacctgattctttggagtcatccttgcctcccccgctcttctccctctgcctatatctagtcctctgaatctctggcaaact

SEQ ID NO: 852304 - DNA, 529 bp, Homo sapiens
tgagaacaaataacaattgctttttcctaaatcaagttgcatatgcattcaatttgtcaggtctgaatttagacatatcgtttcacatactgtcttctattactctaattaccatgctgcacatatttttccaaactggcatttcaatatgctttacttttttaaaagctgatattcctaaaattaccattttccttctcactctttcctttcaccttaacacttttcagtaatgttttctcaaaaaggaactttcaagctcaaataactataaaggtaggaaagatgtttttaattaatcataaagtggtacttaaaagtttgcatctctaaatgtgaacatatatagagagagaaaaaatgaatttagcagctaaaaaaagttaagaagtaaattgttyttatcaaaacatcttttaaattattttacactgtagtttattacaatttaatttaaaaatgtatggtacttctgcaatattagtatgccttttcttgcctctaagttattttttaattatctctggat

SEQ ID NO: 852305 - DNA, 613 bp, Homo sapiens
atgctactcctccaaggatttcagagttcccagacgcctagttttctgtctagttcttctggaagatgttattcttggggagcaataggtcctcgagtttggggctctttcaggttctctctccatttccccattctactacaataaacaaacaaacaaacaaacaaaacaattctcacttccagaagatcctgcctgtgccccttcatgagcctttcaagaggtctggatgtctggtccaccgctccccggcttctttcccagcttttgctttttcctttcccagctcttgacctaccaccccacggccgcaccaccgcccagctgagcccccgtggctccaccgcgcagaaggtgcgccagaggccctgccagttgccctccctgccgggtgccgagaaatcaacgctttgtaaaaagaacttccccgtggaaaaaatctcttgatttccactctcagggctcttcaaaggactaaaagctaaaggcgacgatgaattcattccacaagtcctagtcgtgcgccctggtgagtaccagaccctgctccccscgaggggacccacgagcgaccctcaccaccatccctgccctggtggagcccccgtgcgga

SEQ ID NO: 852306 - DNA, 443 bp, Homo sapiens
caggagttggagactagcttgggcaacatctcatctctacaacaagtaaaaaattagccaggcatggtggcatgcacctgtggtcccagctactcaggaggctgaggtggcctcccaraggccccccctcctgggcctcccttaagcccaggaggtcaaggctgcagtgagccatgattttgccactgcactccagcctggacaacagagcaagaccctgtctcaaagaaaaaaaaaaggaggagacagacaacatacatgttggagaaaacggaacagccactggagggacctctttagctgagagtcaggggtaggtccctcagaaggtgatacttttgagcaaaaatctggccgacaagcgggggagtcagctgtgcaaaggaagagggaagagcgtcccaggcagagaaagtggcagtgcaaaggcccagaggtgggtg

SEQ ID NO: 852307 - DNA, 645 bp, Homo sapiens
agtggtacagttcattcaggaaaggaaaggatttaacctgtattatggacttaaaatactttttctttcttttttttttgagacagtctctctctgttgcccaggctggagtgcagtggcacaatcacaactcacttaggcttgaactcccaggctcaagtgatcctcccacctcagccacccaagtagctgggactacaggagtgcgccactacgcctggctaattttttgtatttttagtagagacggggtttcaccatgttgcccaggctggtctcaaatgcctgacctcaggtgatctgcccgcctcggcctcccaaaatgctgggattataggtgtgagccaccacgcctggcctcagcgtagttttaatttgtagttgggagcgagccccatcccatccccatcctgtgctctctcccaaaggacctgctgcagctgggaggggagctggcccggacatcacgagctgtccaggaggcgggcctgggactgagcacgggcctgtggctggcaragagccgggccaaggcagccctggagaagcaggccctgctgcaggcccagctggaggagcagctgcgggacaaggtgctccactagaaggacctggcccagcagcagatgcaaagtgacctggaca

SEQ ID NO: 852308 - DNA, 407 bp, Homo sapiens
ataggaccttccccgccggctcctcctctaagaatggatcctacagatataccccagcacagaggagatggcttgtggacaaggaggttcactgcagcattgctcatgtaagatatcctggtgacaacctaaatgtctatcaaaaggggactgctactaagtacatgatggtacatcctttaagtggagaactgtggccaagaaaaaccagtggagaagttcttcctggcctgatccagagccacctcccagttataactagtaggtgaagaaagcatcttcaagaactgtgaagatgaaattttaccaggsgtatatacaaaaaagtgtgtgtgtgtgtgtgtgtgtgtgtgtgtgcgtgtgtgatctgatttgctcatataaaataaccctggaaggtcacttaa

SEQ ID NO: 852309 - DNA, 583 bp, Homo sapiens
aaagtacaggtttgtattttagaaggagatttgggaataaatatagctctggtggatatagatcatatgttaaggtttgttggccagagctggtgtgtgtcttgggtgttgggcaaagaacagagaacagccaaaactctgcgaggtcaatgtgaagggtgatttccttggtgggctcaagtttatgacgcagcctggacctagcttggcttctcagctagagaagaagcatgattccatgtcacagctcctgtctttgaaaaagtcataatgactcccagacccaacatatggagaaaactctggatttgtctcttcagttgaatgtttccagagaaaattgaggaaagaaatctctctactatttgaacttcatcaaaagactaatatgctaatatttgaccgtcaatatttccttaaactagtctactccttacatagctaatacatcaaagcatattaacttaggaaatgggattctcccaaacaaggaaacattgacrgcgagcgttcttcatcttttcatatcacatttccttcaaatgctttatacatcttcaagcagacaaataatagtattata

SEQ ID NO: 852310 - DNA, 590 bp, Homo sapiens
catgtgcacacctctagcccggctgatctttttatttttatttttagtagagagtgggtctcattatgttgcccaggctggtcttgaactccgggacataagcaatcatccctcctcrgcctcccaaagtactgggaatacagtcatgagacactgtgcctggctagttttctttataacagtttctactatctgaaattatattacacatacatatgtttatttccactcctccaaaaaacaccagtgccatagagataggaaacgtatggatcaccactgtatccccagtccctagattagtgctttacaaatggtagattttcaataaatgtttgaatgaatgagagaatcaaccaataagtcaataaacctgagatatgctacttgctgtctgtaagacattgggcaaagaattgaccctctcggtgcctcagtttccttgtttgtaaagtagagataataaaatagctacctcattaatgttggtgtaagcattaagtatgataattatgtaaagggtttaggccaataactggtaggtaaaagtactcaaaaagttactttttgaatcatttcatggcaatgca

SEQ ID NO: 852311 - DNA, 382 bp, Homo sapiens
agtgtccagtacagaacacgttcatgagaactgaacaagttagcacrgtctcaacgattaaaataacagcgtcaaacgtgtttctctgccccttacgacctaagtcagattttttgttccattcgaagattaaggcccagtctcaatgaaaataatgttaaccatagtaagtcgtcccaatttcaaatctctgtttttccctaaacaaaactttggtaagggcagggtgagcacaatcccacatgctgacgagcgactgacaaccaagtattcagtcagcagtaactgggaggctgctctgaaccatccccgggctccctgggacggcagttatcctgggaaactcagagccaagagggaacttgtcccccagctctaagtc

SEQ ID NO: 852312 - DNA, 382 bp, Homo sapiens
agtgtccagtacagaacacgttcatgagaactgaacaagttagcacggtctcaacgattaaaataacagcgtcaaacgtgtttctctsccccttacgacctaagtcagattttttgttccattcgaagattaaggcccagtctcaatgaaaataatgttaaccatagtaagtcgtcccaatttcaaatctctgtttttccctaaacaaaactttggtaagggcagggtgagcacaatcccacatgctgacgagcgactgacaaccaagtattcagtcagcagtaactgggaggctgctctgaaccatccccgggctccctgggacggcagttatcctgggaaactcagagccaagagggaacttgtcccccagctctaagtc

SEQ ID NO: 852313 - DNA, 679 bp, Homo sapiens
tcacatgtggggaagcctgcgtgcgggtttcaattaaatatcttctccccttagtgtgcgaactcctaagccagctaaaggcgacgtctcatttacttaatgactgctctcattagcagcggtggcacgggctggcggaggaggctcctttgtaaatacgctacccatgaacccttggggctccaatatatctgtttactctctgaggtgaaataaatttacagtatagcatcagaaagatggatctgctgaattgggggtgagaggtgtcccagtccggtggagtcctgtgtcctgctctgagcctcggccaacagaaggtgcctatgtttgtccacactgattcatactcaatgtgcagcatgattgagtttttttaaaaagcaaaacacacaaaagggcagagagcattacaaccaccacattcacccccctctgctttctctgccagtggttcagtccaataattcctaatagcagcaaccggaatgacagatgccccgggttagcatggctacagcgaaagtactttacaatatttattggtggtgaggaatatgayctaccatcataaagagcgggctgcagaatttattactcaaatgaaccaggaatattacatatcggctcatctgcatattcaagtacccctgacttaaatggatatgtattttttaac

SEQ ID NO: 852314 - DNA, 492 bp, Homo sapiens
caggcctggttcttgatgtgttaattgaggctaacaggttttagatgattcgtttcatttctaacagaaccagttgttcaaaactattgtcttgtttccagtgccaaagctgtggatattcaatgatgtttatcactctccccctgccgctgcagtcctaccctgcactgctaatcctccctcagcaaacagatgcccctggaacaatgtaggggtgagcacaaagaaattcaggagaagaaagtacattcatgtaattcaaaattgttatctctatcataagattagtaaaaagcctttgttcagattttttattgtgagcagtgttgtattttttgttattgtttcaagggataggttgatattttgatatcacttagaaccgagtcggtaaactacatatttatctttgatyaactaagattctgtttttaaagaaaagaggacatctttggctagtaatgattaggtaacagtgaatggcaggtgcca

SEQ ID NO: 852315 - DNA, 594 bp, Homo sapiens
atattatttcatcacccaagtattaagcccagtacccaatagttatcttttctgctcctctccattctcscatgctcccccatcaagtagatctcagtgtctattgttttattctttgtgtccataagttcttatttagcacccacttataagtgtgaacaagtggtatttcattttctgtgcctcaactagtttgctaagggtaatagctccatccatgttcctataaaagacatgatctcgggattttttagggatgcacagtattccaaggtgtatatgtatcacattttctttttttttctttttttttttttagtatctaaatgaatattatttctttttttcctccttcaacttttaagttctggggtacatgtgtagggtgtgcagatttgttacatatgtaaatgtgtgccatgatggtttgctgcctaggtattaagctcagcatgcattagccatttttcctgatgttctccctccctccagcccccaacaacaggcccgagtgtgtgttgctctcccagtgtccatgtgttctcatcgttcagctcccacttataagcgcaagcatgcggtgtgtggttttct

SEQ ID NO: 852316 - DNA, 483 bp, Homo sapiens
ctcaatcttggataatgatgcaaaatggarttttgttttgtttgttggtagattcacatactaaaactttgcaggtaaagttgcttgcctcatgttagaatttaattagaaaactgaggctgccttttttttttttttttttttttttttaagacagagtcttgttctgtcgcccaggccagttttttttttcttgtacagatggggttttaccatgttgctcaggctggtctcaaactcctggagtcaagggatctatttgcctcagcctctcaaagtgctgggattacaggtgtgagccacggctcctggctccttgctccagaatcagttttttaatggaagatagctcatactttgtttttgtttttaaagagacagggtctcactctgttgcccaggctggtagtagcgtgatcatagctcactgcagtctcaaactcctggactcaaatagtgctctggagtacctagaactacaag

SEQ ID NO: 852317 - DNA, 554 bp, Homo sapiens
cactgctctaatctagatcatcagctccttgagcaaagggactgttatttgccattgtgttctakcatacaatgcctgcactcaggaaatctttaatgggtaaatgaatgacttttttcttttgaagattactgtttagggaagattatctatacactttagtagccttcaagtgaaagcaagcctagaaagacttgctgagtggtagagcatcaaggctcattggccagaaggccaggccatacccaagctgataaggcttcccacagtcagacacatgggaccagtacaggagttgggagatgggcattaggacttaaagaaaataggggcaatttcctgatagaaggttaaacacttcagttcttgctggaaggagtgattagcctggtccttttcttatcagaattcagctgtttccaccacagtaaataatggacaaattgggcatctggcttacttgatttcccatggctaaggccgatttctgaagtgcaatatgctatttgatgtaccacagtgaatttgtcttgggcttgagagcctctcaatgg

SEQ ID NO: 852318 - DNA, 554 bp, Homo sapiens
cactgctctaatctagatcatcagctccttgagcaaagggactgttatttgccattgtgttctagcatacaatgcctgcactcargaaatctttaatgggtaaatgaatgacttttttcttttgaagattactgtttagggaagattatctatacactttagtagccttcaagtgaaagcaagcctagaaagacttgctgagtggtagagcatcaaggctcattggccagaaggccaggccatacccaagctgataaggcttcccacagtcagacacatgggaccagtacaggagttgggagatgggcattaggacttaaagaaaataggggcaatttcctgatagaaggttaaacacttcagttcttgctggaaggagtgattagcctggtccttttcttatcagaattcagctgtttccaccacagtaaataatggacaaattgggcatctggcttacttgatttcccatggctaaggccgatttctgaagtgcaatatgctatttgatgtaccacagtgaatttgtcttgggcttgagagcctctcaatgg

SEQ ID NO: 852319 - DNA, 572 bp, Homo sapiens
acctcatattccccagtgcatggtacaaagtatgcgcttggggatgggttggtgacttgggagggcaggagagggaaaaaagaagagagggaagaaacagttaaaaggcttctcaagtggaagcagagtgccagcaaaagcacagatgtgagcaagagcaggctggtttaagacaatggaaagagcccaggaaggcaagaggaacagatgggagtggatgcaggaaggggcaaggtggacagttggagaggaagctgaaaagaaagtttgaggccattgtgcaggcgctgaataccaggctaaagagctttcgttctttctgagggtcaatggggagccgccgaaggatttttacacaaagaactggcactattcaagcagtggtttaggaactaggaccagaaatggtgaagttcttgattctatcacattgttttgctcctccagactccctagctgctaattctgggtyactgtctcctcagaggcctgtcttcactgtagaatcaattattaagatcaacttgctatcaactctaactttgaaatgctattcagctgcttgcagggac

SEQ ID NO: 852320 - DNA, 623 bp, Homo sapiens
aattaaaaaaaaaataaaataaacagccaaagcctgttttgttgagttttcttcgttgcgcaggatcgggagcttgctgggatctgaactcaggaagccctcacctcaccctgacttggtcattgaggagaygtaattgcaggggtgcttatttgctataggctttgaaagtcacaaaagcccagtagatacatgaattcgaagcagttctccaagggcatctccaacttggcagtcaccgcccgcaccgcgcacacaggtagtggacgcccgcccacctgcccgtctgctgggcgcagggcgctcctggggtggggagggcgctcctgtggggggaaaaggggcgctcctgcctcggagggggaaaggacgcccctgtggaaggaagggggggctcttgaagcggtgtggtgagaggacgcttccgaggaaggaagggggtgctcctgcagcggtggggggagaggacgcccctgcggaaggaaggcggcgctcctgcgggggctggagagacgcccgcgcggtctcccggctcagggaccgctggctcgcgggtccgccctctccccggcgctatggaaaccgcactttctccgcctgccgtccccgatctctttctccta

SEQ ID NO: 852321 - DNA, 625 bp, Homo sapiens
taactcacacacagtcacaccgctggtaagacatggagccacgatgtgtaccagggcaggctagctccagtgccagtgctcttcaggtagaaataattatgacatatttaaaataaaatctagtattgttggaaaacaggcaatacctaatgattcctttgctcttttaaaaaatgcaattatcatcatcgtccattcattaaataaaatactttattcaagtctagcaatgtggttaaagaaacaaaatttctagctgtaagtttatttaaaataaatgaatgctgttggcttgacatcatgtatcacattacttagggagattgaaaaaaatgcaatttagcaggattttatactaagggataggattggggaaattggacaaagtagaatgtggctaattggaaattaggaagatcaaataggtcaataattaattgtgaaaaacaagattgacaggagtgggcagaggcaacctggggtagagcaacatcttctatagtgacatcragtagcgcagcaaacagtgttgaggggcggcccatctataagatgctgcttcccttcctgtgtcctgaccctctgttggccagcattcagggccatgaatattacagtgaaggaa

SEQ ID NO: 852322 - DNA, 670 bp, Homo sapiens
acaggatccatatatttctttctccactctgaaaagaagaatttgtacttacttgtgaaatgtactacttgtatattttaggtgcacaatcaaataaatcagtagattgcagttagtgtatactacgaactacatacactgggcacattaaggagaatatattatctgactggaaagtttaatttgaatatgttaagcatagatttatccttgagaattattttacattagtatgtaaaaccgggaaaggatttgcctgccattggaagctgttggaataaagttattcatgactgaccccaaacagaattagtcagaatgttttctgtagccacgctttctgtcaaagagaagggagttcagtagaaaagaataaacagacgctgaagagcagctgctgaagtccagaatgatggataagagctcacaggagtaaaaatgagttcccaggtaccaggttgcttggattatatcccatatctggagagaactttggcctgagatctgatccaccatctgctttcttagaggagttacaggaagatggaaaacaaayggtacgttttcagtttagaaaaaaaaaaggtgtctacagagcgagttctgagactgtaaatcaggaagatgctaggtgcaactgcaaggtgcaagaacacttgtatgaaatatt

SEQ ID NO: 852323 - DNA, 588 bp, Homo sapiens
cactgcgggctctgcttcccgggttcaagcgattctcctgcctcagcctcccgagtagctgggaatacaggtgcctgccaccacacctggttaattttgtatttttagtagagatggggtttctccatgttgatcaggctggtctcgaactcctgacctcaggtgatctgctcacctcagcctcccaaagtgctgggattacaggcgtgagccactgcacctggccgatgccagagtctttttaacaaacagatctcatggtaactaatagagtgagaactcattcatcaccacaaggacagtgccaagccattcatgagggatctatccccatgaccctaacaccacccaccaggcttcacctccagcattgagagtcacatttcaacctgggacttggaggggacaaatactcaaactgtatcatcttctttccgcagatcagggcattctgctacaatcatatgccatgaggaagctttctatgacccgtcaggccagattaagtcytcatattttgtatacatagccacagttgacactaaagtttatctcataccacttgtcacaacaataaatagctgcatt

SEQ ID NO: 852324 - DNA, 629 bp, Homo sapiens
ccccattgatgggcacttagattgattccatgtctttgctattgtgaatagcactgcaatgaacatgtgaatgaatgtgtctttttggtagaaagatttgctttcttttggatatataccmaataatgggataataggattgctgttctttgagaaatctccaaactgctttccacaggggctgaattcatttgtactcccaccaacagtgtataagcattcccttttgtttgcagcctctacagcatctgttgttttttttcactttttagtagtagctattctgactggtgtgagatggtatctcattgtggttttgatttttatttctttgatggccagtgatgtggagcattttgtcatatgtttgctagttgcttgtatatcttcttttgaaaagtgcaggacatctcaatatttactttaactcaactctgtgtgtgtgtgtgtgtgtgtgtgtgtgcaggtagggaggaaaacaaggacagaaaccaggaggcccagcccaggattaaaaacacaccacagcctttccaaaaagtcagagtcatacatggatcacttggaaataactgaacttgcaaatccagtttcccatggacctgctgagtttatgaggtaagagaagg

SEQ ID NO: 852325 - DNA, 692 bp, Homo sapiens
attccagaacatcaaggcaattttaccgaggaaatgtaagaactaagctcttctacctctgcaagaacttaaaggtattgaatggctgcagttacaaattgatttgatatacatcatacttggagatataacccttctgtctaaaataaatcaataattttgctcagtctttgctttgtgcctagtgtgctctctatagaaagacaaactcctgtttgattatcaaagttggtctggcaatggaatgttctggttactcaaatattttacttaattgagaattcctatccataccacacagcgctgaccaatttcagagaactacaagtaagtgaaataccgtataatttccattgaaaatgacttttctcttacctaatgattcagaaggcccttgcatttccagtgcccaagggcaccgttagaaacctggaactgtagacgcaggaagcccccaaaactgggacatttgcgttaagtctgtttcaattccagagttgtcgtgtagaagtcatccctcatagcaagttgttcatttatcatttttctttgattttcatacaagtagatcttggaaagaaatccatctgcaatattttgtgttctaatttggtgtaaatggagtatgtcctatccataaataagtacctattscctggaaataatattttctgctgagctcctggaagtgg

SEQ ID NO: 852326 - DNA, 507 bp, Homo sapiens
tgcactttggagacactatttaggtaatgccaccatccaaagtcaaagggtagggagctctgaggtcaggaggggcagggtatcggagctgtgaggtcaggakggggcaggtgtcccctgggtgtgtggagctgtgaggtcaggaagggcagtttcccctgggtaggagaggggctgtgaggtcaggagggggcaggtgtcccttgggtgggaggagctgtgaggtcagaatggccaggttccccttggatatgtaagctgtgaggtcaggatggagcagccacaggaggccttcccaggagctgaccacgttttcttccttgacccaagttgtgattaccctggagttgctttattatcattctttatataatccattatattttatgcactcttctttatttagcttaattaagaaaataaaaagaacttagagagtgaaaaagacaaggccaggtgtggtggctcacgcctgtaatcccagcactttaggaggccgaggcgggc

SEQ ID NO: 852327 - DNA, 614 bp, Homo sapiens
gaacaagaagcaggtgagaggaaaacagaagaagttcagagtgagagattctattttctgagttgtgcttctgaggcctaaagtgcttcaatattataacaaaagactgtaacaaaggctatgggagttaagagccaggaactgcaggcttttcctgcagtagaaggaaacacacgcacgcacccacgtgtgtgcaatgcaggtgtgtgcaagggacttcaaaaggctcacagaaaaatagaattaaaagattaaaaataaaatatataaactttatttctcaacataatcactacaagctcaagacacttttgtaagtgatgatggtgtatatcctaatatcacatgcattgtggaaaaattgctctggtggcaatgaggaagatgagttaaaggagagtgaggagagttagtaaggagagtttggtattaaccaggtgagagatgattcagatgtagatcaagacaaggacagtggatacaragaggagaggcagtaggatcaacagcacttaagttttaaagaggaaaggttggattgggaaggggcactgaataggcagtagcaagaatgaattatctcctgtcatgactatgctgtgtaacaaaccacc

SEQ ID NO: 852328 - DNA, 581 bp, Homo sapiens
aaatgtggcttttctgaacttagagttatatgaattagatagacacgttgtcttctgcatacatgtcctgtgaaaacagggwcaagataaacacaacaaacacactcatcagaaaagggaagaagggaaggcacatagcactgacttgtagcagttttgaaatctcacttagaaagtgttgccagggcttcctgctctcagtcaggaatgttccctgatgagactgagctctgcttccttcctcttcctttggtagtcatggctcttggttccccattctaggatgccttttcatttccatcatctttcttgaccattttggaagagagcattagaaacgtcctgttttggtggctgagctgttttttaagactaccatcttttccagagaaggtgagagactttaatttggataagtcttggtccctttttaatcctttagctctttcctttagatctttattcatatatagctaaatgtaaccatttcataattttaacacttcaaaaaattaccttgcccaagtccataaattcattaagtaccctgtgtatcttccaagttatcataggttttacca

SEQ ID NO: 852329 - DNA, 344 bp, Homo sapiens
aatggtgccatgacaacttgatatccacatgctaaagaatgaatttggatgactgtcttacactatatataaaaattaatccagcatggaagaaaacaggtgtatattttctctaccttcaattaggcaacagtttcttagatatgacaccaaaagcataagcaatcaaagaaaaaaatatatcaattgaactttatcaacattaaaaagctttgcacatcaaagggcactgccaagaaagcaaaaagacagtttgcagaatgggagacaatatttgcaartcatgtatttaataagggtctagtttataaagcatataaaaaacccataacggtaataaaaag

SEQ ID NO: 852330 - DNA, 409 bp, Homo sapiens
gttagatataaggtaaaataatttactggaaaaagtcaattaaaatgcatcatttacattcgattctgaggggtttttttctacttaactactaatatagtagttaaccatgaaaatccacgtggaaacaacttggcatgcccatatgcatcagtgtaaatgcgttcatgccatccatggggtttgaccctcattgggatatcatcagtgatggtggagcaccacttcgccaggtaaaatgatacaagtcaaggtggtcagattttctcaaagataaatggcaaatcattggcagaaaataaaaattcaagtcagaagaattacaaggaatgagtagaaaagtagcacagtamaggtagaaagaaaaccagcctgacaggggaactaaatccaaaagtagctccaaaag

SEQ ID NO: 852331 - DNA, 562 bp, Homo sapiens
atacctctactcataagctctgctggcacttcatatttaaaatggccaaagctgattattttcccctcaaaacaaatctactgtttgttcctatattcccaatctcacttaacagtacctagtatgaaacacaagctaaaaatctgggagtcatcttaagaatctttccttttcctcacattctatattttgccaagattcctgttaactctacctctataactatatctaatatctgtttcggaccctactccatcaggcagccattttctcttgcctagattacgagactgtttataatcaattcttccctttctgacccatctgtcacatggctcaacgtgaagtctgatcatgctgcatccatgaataaggcctcgaagttaaaaacgagttgatgtcctggactcaatcatattatacatatttttcaaattcctaaatkataatggtatagctttttcgtttttatacttgtttctcctaaaagcctatgaaatccttaaggcaagagatatcttcctatgatgttctggcacataacaaaaatgtaagattaaat

SEQ ID NO: 852332 - DNA, 581 bp, Homo sapiens
tgagagtgcatgctgtggaggaactgtggagcatctcagtaagcaagtattagaaaggatttacaggatttggtctcatgtcaggtaacaaggaagaggttctaggaggtggagatttgctctgggattttctgttgccagaaaacatagatcatcctatgtctggatatctttagaattcttttttttttttttttttttgagatggagtctcgctctgtcgcccaggctggagtgcagaggcacgatctcggctcactacaacctctgcttcccaggttcaagtgattttcctgcctcagcctcctgagtagctgggattacaggcacgtgccaccatgctcggctaatttttgcattttaatagagatgggggttgcaccatgttggtcaggctggtctcgaactcctgacatcatgatctgcccacctcatcctcccaaagtgctgggattacaggcttgagccactgctcccggcccagaattcttagcttgaaggagagaagaacaaragcaagctacagctataattggtaaagaagtaattctcacttatattagcccagatagagagacgtt

SEQ ID NO: 852333 - DNA, 581 bp, Homo sapiens
tgagagtgcatgctgtggaggaactgtggagcatctcagtaagcaagtattagaaaggatttacaggatttggtctcatgtcaggtaacaaggaagaggttctaggaggtggagatttgctctgggattttctgttgccagaaaacatagatcatcctatgtctggatatctttagaattcttttttttttttttttttttgagatggagtctcgctctgtcgcccaggctggagtgcagaggcacgatctcggctcactacaacctctgcttcccaggttcaagtgattttcctgcctcagcctcctgagtagctgggattacaggcacgtgccaccatgctcggctaatttttgcattttaatagagatgggggttgcaccatgttggtcaggctggtctcgaactcctgacatcatgatctgcccacctcatcctcccaaagtgctgggattacaggcttgagccactgctcccggcccagaattcttagcttgaaggagagaagaacaagagcaagctacagctrtaattggtaaagaagtaattctcacttatattagcccagatagagagacgtt

SEQ ID NO: 852334 - DNA, 529 bp, Homo sapiens
taagattaattagtagaatacaaatagaatatttgtatgttgggtctgttaactatttttttggcaaggcaattttgcaaagtggccaagaacccagacccctagacagagatttttaaatcagctgtgtgaacttgggatatttgggttatttacttaacctctctgtgctccagtttccgcatcaataaaatgaagatagtaattacaatacctgcctcatagagttgtcaaagtgacctaagttaatgtacgtaaagtattcagagcagcgctggtacagggaaaatgctgtatgtctgaggcacctacttgctagtgtttgctgggtttgattctcctaagtaacttaggccgaagtgttatcttcagaaagaaattattgatttaaattttattgtyatttctacatgctttttggattatgtgtggacctttataaaaagtgccatatattgagatgcaacctcaagagatgaaatgaaatttacagtttcaaagatagttatctgaccattagtaaaaaaca

SEQ ID NO: 852335 - DNA, 593 bp, Homo sapiens
cgctatcacgagaacagcatgggggaaattrcccccatgattcaattaccaccacctggtctctctcttcacatgtagggattatggggcttatggggattacaattcaagataagatttgggtggggacacaaagcttagccatatcacctggctaattaaacaaatatttgtagagatggtattttgccataatggccaggctggtctcaaactcctggcctcaagtaatccttccatcttggcctcccaaagtggtgggattacaggcatgagccaccacgcctggcccacaggattctttatatattctctatataagattttttcaataatgtgtcacaaatatcttcttttagcttggagtttatgtttttactctatggtaacttttaatgaccggacatctttctttttaatgtagctgaatttatcaatattttctttatagattcatgttgtgtcttgcttaagaaatactttctaccttaggtcataaggatgctttcttatattatcttttaaagactttatgtttttgcctttcatattgattgtcaatcaaccagtaactatttgtttctttttgatat

SEQ ID NO: 852336 - DNA, 593 bp, Homo sapiens
cgctatcacgagaacagcatgggggaaattgcccccatgattcarttaccaccacctggtctctctcttcacatgtagggattatggggcttatggggattacaattcaagataagatttgggtggggacacaaagcttagccatatcacctggctaattaaacaaatatttgtagagatggtattttgccataatggccaggctggtctcaaactcctggcctcaagtaatccttccatcttggcctcccaaagtggtgggattacaggcatgagccaccacgcctggcccacaggattctttatatattctctatataagattttttcaataatgtgtcacaaatatcttcttttagcttggagtttatgtttttactctatggtaacttttaatgaccggacatctttctttttaatgtagctgaatttatcaatattttctttatagattcatgttgtgtcttgcttaagaaatactttctaccttaggtcataaggatgctttcttatattatcttttaaagactttatgtttttgcctttcatattgattgtcaatcaaccagtaactatttgtttctttttgatat

SEQ ID NO: 852337 - DNA, 542 bp, Homo sapiens
catatttttctgtgattttaatcattttacagtatttgtgacytgttttatgacctagaatatggtgtatcttgatgaattttttatttatgcttagaaagaatgtgtattcagctttagggtggaatatcctattaatattaattaagtcaaatttattgacagtattgattaactttttaatatctttactgattttctttctgcttgtttatcaattattaagaaaagagtgtcaaaatctccaactgtagttgtgggtttttctatttctcttttcaggtctatcaattttgcttcatgtattatgaagctgtttttttaggtgcatacaaatttaagattgttctggtctctttactaattgacctctttactattaaaaaaacaaacaaacaaccctatttttccctggaattaatctttgttccaaaattttctttgtctgttattgatatcaagtattatttatataatgttttatggtatgtaatatttcccctccttttgttttatttattttatgttttatttatttgtat

SEQ ID NO: 852338 - DNA, 540 bp, Homo sapiens
ggaagcatttcccttgagatacagaacaagataagtatgaccactctcaccactcctattcaacatagtactggaagtgctagccaagacaaccagtaaagagaagaaaataaaaggcaaccaaacatgaagagaggatgtgaaactatatctcttcacaaatttaattctatacctaaaatccccatcgtctctgcccaaagtctccagatactggtaatcaacttcagtaaggtttcaggatacaaatcaatgcataaaaattattagcattcctatacaccaataacttccaagctgagatccaaatcaagaatgcaatcctattcacattattattttcctagccacaaaataagtaaaatacttaggaatacagccaaccaggaaagtgaaagatctctgcaataagaattacaaaacactgctgaaagcagttggagatgacacaatagaaaaacattccatrctcatgaacaggaagaatctgtattgctaaaatggccatactgcccaaagcaatttatagattcattgtta

SEQ ID NO: 852339 - DNA, 577 bp, Homo sapiens
atatagaatatagaatatagctagagaaggggtagagtggtcattgttgagtggctggtgaagcarggaggggactgcatttgttgttcagtcagtgccacctcagatgtcattaaagggggactccagagtgactgtgctaatgcctcctcagtcagggaattgtggtggggggtgggggacggggagtggggtggcatatgaccaaggctggttccactcaggaaagccctttctgaatcctgtcatggggagaacccctgctccaggggccaggaggatgtggggcaggggcttaattctggagcccagaggagtgggcagggcttgtgctcccacctcttagtccagaactctctcggagtcactgacaggagcaggaatacagtgttcctccaggagctcctcccttcccctaaccacaattggccacataacccacaaccgccaattggtccattcactagaaagcctgtttgttggagcccaggcagagcgctctgcccctcctgctccctgccagctcccagtgctgggctgcgagtccccagagcagctggtcacttggcctggagca

SEQ ID NO: 852340 - DNA, 517 bp, Homo sapiens
aggccaagcctcaaaaacaatagccctgggtcatcagggctctgctggacgtccagctctccttcctgctgtgctgctcccatgatgacgttggccagcctatccctccsaccccacccaccacctcctgatcattcttagaaagggaatgaagcaggtaacattcttagaaagggaatgattagtaacatgggctggagcaagactgcctggattcaactccagcctctgtacttactagctatgcaaccttggacaagccttctgtgcctctgtgcttcagttgccttatctgtaaaatggagatagtaacagcactgaccttaattgtactgatgaggattaactgagttactacaggggtctacagatcttttctgtaaagggccagatagtaaatatttttagaatctgccattattcatcccatgtctgacaaaaatcggatagccatccacgggataaatcttttttttttttaagacaaagtcttgatctcttgctctgtcacccaggc

SEQ ID NO: 852341 - DNA, 555 bp, Homo sapiens
tcacgaggtcaggagatggagaccagcctggccaagacggtgaagccccgtctctactaaaaatacaaaaattagytgggcttggtggcgggtgcctgtagtcccagctacttgggagcctgaggcagggaattgcttgaacccgggaggtggtggttgcagtgagccgagatcgtgccactgcactccagcctgggtgacagagtgagactctgtctcaaaaaaaaaaaaaaaaacccaaaaaaaaaacttccttaaatgaaataagccagaactagataattctttgaagaataaaactggctctaatcaatagcaaatagcttgcaattgatattatttatagatttataaagtgtgtaacacttttattacatggtttaaaccttcctcccgaactcctgtttaaactctgataaaccctttcttcaaaataaaataaacttcacccctgaaataagcaggatggtttgagtatgtgaactgagattctgttcacgatctgactaaatctgaaaaggttcccttggagaatccattaagctaagtctttag

SEQ ID NO: 852342 - DNA, 554 bp, Homo sapiens
cctgctttggcctcccaaagtgctagcattacaggcaagrgccaccacacctggcccaagaataagaatttttaattataatttttaagaataatttttccgaaaacttagtagcaatttttaactatataacttcataagctgaatacaactgcaaaacagtcccagtcccaggaagtgaggtgtgaaattcttttggttattttaaagggcttctttaaaaataaaaaataaagataattggtatgtgattatattctctagcttaggcagcctcagctttaatgcatcactgagcaaacaatgaaatgtctttatgtgagtagctggttggaaggtttcatagcagaacagtttttccatatgctggagagcagttataactggaaccatctagagcctcctcactcctctggggaggactgtgggctctgttctctaatgagatgagtttatacaagtttagcctgaacacagcccttattcagctatcttccagtgtgcatatggaaagtttcccttagatatccctgtaaagatcaacctaaagtaaa

SEQ ID NO: 852343 - DNA, 604 bp, Homo sapiens
ggtttccttgaggtcttctctggctgcataggtttgtaytactatttggcttgcagtcatgttcaagctcctcggcttcctctgggaggaaggtgactggatttagggagggacagattcttaattgaactgaagattcttctaataacagagcttgatacctgaggagtcagttgtatgttagccagagacttcccttagaaggcagtagtcctcccacattatgtgggatatgaatggttaagttattcctcatggttaacttagttgcctccggtaccagcagggctactgctgtgattaccaggagtgaggctggccatcctttggctaccaaatttagttcctcactcagggagcctacagactgctgggctgagccctgggcctgtggtagaactcccagtgccattccctttctttctgacacataaagattacatgttttccccatggggagactaaaggctggtgccttaagcaagcttattttagttggtcaaaggcctttctagcctacagttcacaaataagacagtgagttttagctgcctgagtctcctttattaggtgatataaggaacaagctatttcaccataccca

SEQ ID NO: 852344 - DNA, 471 bp, Homo sapiens
aatcagctctctgtaaaatgggcccattggctctctgtaaaatgggccaatctgctctctgcaaaatggaccaatcagcaagatgtgggtgggttcagatargggaataaaagcaggcagcccgaaccagcactggcaacctgctggagtccccttccacgtggtggaagctttgttcttccgctcttcctaataaatcttgctgctgcttactctttgggtctgcaccacctttatgagctgtaacactcaccacgaaggtctgcagtttcactcctgagccagtaagaccacgaacctaccagaaggaagaaactccagacacatatgaacatctgaaggaacaaactctggacacaccgtctttaagaacgtaacactcaccgcgagggtccgcagctttgttcttgaagtcggcaagaccaagaacccaccaattccacacactctacctcaccccagttagaatgg

SEQ ID NO: 852345 - DNA, 572 bp, Homo sapiens
aatttccctgcctacctcttagggtctttgtgagaaccaaattagattctgtatattagtgttttataaagtaatacaaagtggaagaaaattgttatcaagagtgcatggcttggtggctcatgcctgtaatcccagcactttgggaggccaaggcgggcagatcacctgagatcagttcgagaccagcctagctaacatgatgaaaccctgtccttactaaaaatacaaaaattagcccggtgtggtggtacacgcctgtaatcacagctactcaggaggctgaggcaggagaatcacttgaacctaggaggtggaggttgcagtgagctgaggtcgtgccactgcactccagcctgggtgacaaagccagactctgtctcaaataagtaagatagatagatagatagatagatagatagatagatagatagatagatagayagacagacagacagacagacagacagatagatagtgcatggctttcagaaatccctcatgtagcagaaacacttggaaaagcaatgaaacttatggtcacactacctgcctttcctcttctcaacatt

SEQ ID NO: 852346 - DNA, 629 bp, Homo sapiens
gggtatttttcattttcattttattcttatgagaggaaatacaaataatgatgccatttaaaaatattattaaagcagtggtacaatcagattattaaatyagcttccgcaatcagacagaaatatattgaaagctgccttcatttattttctctgctagtttgagcttcagtttccttatatctaaaatttataataataataacaataatagtatctaattcataaggatgttttgaggatttgatgaagtaataaaagtaatctcagtaactgtttcacaggactaaataattttgaatgaataggtttttcatttacattattgataaggattgcgtaaatgtatctctctaattattcatttatttatcatattggagaccaactgggctagttgaatatatagatactaatggaagggtagtagttcttttctatataatagcctaataaagaattttttaaatgtcatctggaatggaggctaataaccatgaaaggtgtctggtaattctattgatgaggtctttccattaggctcttgcaaagaggaaaatgtgaggctctttatgcaggatagagaaacttgtgctttcactcccccccttacaatatggaatgagatg

SEQ ID NO: 852347 - DNA, 544 bp, Homo sapiens
gcattgtattagatgttatatgtaatctagatatgatttaaaatatagaggaggatgtgcctatattacatgccagtagtatgycactttacataagggacttgagcacgtggtcattgtggtatctgcagaggtcctggaaacaatccctcatggatacagaggaaagactttatagtcttttttcacggttaccaggttttttcactcatgcccttttgtttttcttctggaatccaaagcaggcttctgtgttacatttagctttaatttctccttagtctcttctaatcagcgtcggtccttagttattctttgtatttaatgactgacacttctgaaaaataattgttagtttctgttattgttgtcattttggtggactgcccttcctattgggatattctcccgtaattagactgagattgtgccctttaggcaagatcatcatagaagtgatggtcttagtatatcacatcaggtgatacaaggtgttggtatttattattattgttatcttgttcaattggttgagggaataata

SEQ ID NO: 852348 - DNA, 607 bp, Homo sapiens
ttcgtgtctttttatgcttttgcttaatgaaataaaaaggaacctctgctttatttattacagctaatacattttaaaagttacaatcttcaaatttgaatgggatgttaaatggttatggcgcaaacatgaagtcaagagttttgcaatgaagtgctatattgcagcaacatcctgcaatatttttgcaggattaaataaaaattgcattcagtggtacaaaaggcacaagaacaaatcaaaagaaatcagaaaacactttgaaattattattgcaatattgcaaacactttgaaattatacatttatataaatgtataccgtatacatttttaaaatgttggcatcattggaaactagctataatgttgttcttagtatgctattttaagttaggtatgaggaactcaagcaattgactaatgatttaacttattctttttataagcagcaagcacagtattaggtagtgtgagcataaaaatgattgtcagcttttttttccctgacagaatgtttaaaattattaagaagaagacagaagaatgactagaaaaatataatatgctgtgcatattatcacaygtatgaggtgtaggtaagcata

SEQ ID NO: 852349 - DNA, 585 bp, Homo sapiens
taaatcatactccttgtatgcctaatttggctttttcacagttttgctataccaaaaaattacataaaaaattacccagctttatattatctcagatactggaaaaaacataagtgaaacaaaggaggttgctgctcagttggaaataaataaacatgagtactcttatatttggaagggacttctggctggaggtcttgagatcacgcaaatgcagcaggctttgcaccttggagtcctgagattgtcagatacaaaggaactccagagatgctgaaaccccttgaacctccccagctgttcttttaccaaaggtgaaagctcttacctgcaagctgggtttagagtctccgcttcagttgcagctgcgtttcctccacttttccctttcagtcatcatattgctgacccttgaaaacttttaaattactattaaagtgctcagttgtgctccttttcggctatatgctgctccagttttgaaggtgtaatttgaagtaaaatcttggaacctaagatcttaccgtstccacggacagcagaatacggctgtaataggtagctgttaaggtagatgttaaggcc

SEQ ID NO: 852350 - DNA, 531 bp, Homo sapiens
atttacttcttttcccacttattctccacagttgtttgtttgccagccctacttgctctcacctctcacccatcctctttcctctggtctcactgctcctgccctcatcagctctctgcctcttggcctgattctcagcctagtttccagcctccttaatgtcctccctcactcaagctgatccacttccaaccctcagagcagaccactttcagacttcttctatagcatcctcttgctggaaaacatcacctgttctccagagcgaatataactaaatcaaggctgtaaatttagaatccttcatctgccccaaactaccacactaacagtacttcctcctgcctccttttaacctttctcatctctggcagttctggatcattcagtgtttcttatgtccrtcttgtgcttttcttctttattacgtgtacttacacaatcactctgacttctgtctttaaccgctatagatgtttcaatttcttatggcactcgattctcctttgtactacacaagtttgactagac

SEQ ID NO: 852351 - DNA, 592 bp, Homo sapiens
tctgccacatgagggggttcaatatatatttattaaattgaataaatgttaccgatggggtaagtgaaagtgctatgtacataaacacaaagccatatttttgtttggctagattcttaccttgcatctttgtggtactatagagaagactttctgagaaaaactttctttttcttccaaatgtagaaagagcaatccataattcggcataattttttagctttcttctgtgggtttacaacagcaaggcttccaagctgcagatcagatattaggactgattactacaagataaatggcactcatgggtaggggttgtatcgatattaaaatatagttttagaagacttctaaaactgatgttctcttgaggccttacatttgcaggacacctgagctgaactttagcctactgaggttagcccaaaaggatcaggaaagataattgagaggcattcttcagtagaccataagtaactaagttcactcacagatcatcaatccacttttataactttcactggaatcaagttttgctctattcccaatctaggatragagactatgaaggtccatggaacccaagtttgga

SEQ ID NO: 852352 - DNA, 524 bp, Homo sapiens
ccttaaatttggtgagagctgaagacatagacatggatgaaattgcttaggaagaacacatagatccatcgactccattatgtattgaacatctattatattaagagtaaataggcactagaaatataattaacaaaataaagacaattcttaccataaagaaacttaacttctagggagggagaaaaaaaatcaaacaactgagtaaagaaacaaagagattataccatcaaaagtatggtaagtacagaatagaaaaaatgtcctatccataagaagatataacaagagaatctgacttaatctggagtaatttggaagacttccttgggtgagtgacatttacacaaagacctgaagtttgcatagactaagcaaaaaaaggatggcattagagagactaaaatacagatttatgtctgcaacattgcaatgaagagaagaaatgtcaagacccaagattatagaggtasttacggtcagctcattcagggtcttctaggtaattcgaaggtttagcagaa

SEQ ID NO: 852353 - DNA, 566 bp, Homo sapiens
aatggatccattttatattatatgaaatatatctcaataaaactttttttttaaagaagatggatgtagatgtgtggcattatttctgaggcctctgttctgttccattggtctatatatccattttggtaccagtaccatgctgttttggttactgtagccttattgtatagtttgaagtcaggtagcgtgatgcctccagctttgttctttttgcttaggattgtcttggctatatgggctctgttttggttccatatgaaatttaaagtagtttttttctaattatgtgaagaaagccaatggtagtttgatggggatagcattgaatctataaattactttgggcagtatggccgttttcaccatattgattttttctatccatgagcatagaatgttcttccattggtgtcctctcatttcattgagcagtattttgtrgttctctttgaagaggtccttcacatcacttgtaagtggtattcctaggtattttattctctttgtagcaattgtgaatggtagttcacttatgatttggttctctattattggtgtatagg

SEQ ID NO: 852354 - DNA, 534 bp, Homo sapiens
gagccatgggtccctgggcagacggcggggagatggcaggatgggtccagggatggggcctggtagggcgctgtggtttcactggccacgactttagagaggtttccttgggaaccagcgactgggccggaggcaggaggagggtgggcagaggggacgcgcagcagggtcacacttgcctgacccacccctcaggccatgccaccccctagacgggaacctcctcccacgccagggcatatgagtcccttacccgtggtccactgaggtccaaaaatattaaacagaaatcccagaaagaaacaatccctaagttttcaattgcatgtcgttctgcacggctggatgaaatctctcaccttcccaccctggacacgcgtccccctttgtccagcgtctccacactgtaggcgcccttcctacctcttagtcacctaggagccctctcgatgaccaggtckaccgtcatgatgtcatagtgctggtggtcaagtcacccttattttatctcatcatggccacaaagtgtggaga

SEQ ID NO: 852355 - DNA, 639 bp, Homo sapiens
tatgacatagatgcaagcattctctacaaaatactagcaaagcaattctagaaacaawatatatatatatatatatatatatatatatatatatatatatatatatattatgaaaaagtaagattaatcccaggactgcaaggttgctttaacatccaagagtttatcaatgtaatacaccatattcgtagaataaagaataaaaaatacatgttcatcttgatagatacaaaaaagaatggcaaaattctaacaccatttcataactcctttacatgttgtttcacttaataaacttggaatacaagagagctttctcaagctaataaatggcatctagaaaaatcccacaacaactgtcatgtttaatagtgaaacaccgaaagctttctctctagggtcaggaagaagacaaggatgcccactatcttcacttctactcaacattacactgaaggttttagccgagaaattaagcaagaaatagaaataaaggcattcagattgtcaaggaatacaatctctatttacaactgatatactcttgtatatggaaaatcctacagaacacacacacacacatacacacacacacaattagacctaataaatgcatttggcaaggttgcaggctacaaa

SEQ ID NO: 852356 - DNA, 639 bp, Homo sapiens
tatgacatagatgcaagcattctctacaaaatactagcaaagcaattctagaaacaaaatatatatatatatatatatatatatatatatatatatatatatatatattatgaaaaagtaagattaatcccaggactgcaaggttgctttaacatccaagagtttatcaatgtaatacaccatattcgtagaataaagaataaaaaatacatgttcatcttgatagatacaaaaaagaatggcaaaattctaacaccatttcataactcctttacatgttgtttcacttaataaacttggaatacaagagagctttctcaagctaataaatggcatctagaaaaatcccacaacaactgtcatgtttaatagtgaaacaccgaaagctttctctctagggtcaggaagaagacaaggatgcccactatcttcacttctactcaacattacactgaaggttttagccgagaaattaagcaagaaatagaaataaaggcattcagattgtcaaggaatacaatctctatttacaactgatatactcttgtatatggaaaatcctacagaacacacacacacacatrcacacacacacaattagacctaataaatgcatttggcaaggttgcaggctacaaa

SEQ ID NO: 852357 - DNA, 593 bp, Homo sapiens
ggtgtgtggttttttggtgcggggggagaaggctggacgaagccacaagtctcatctctattgcctctaaaccaacaagcctaaggaactctgtactcrctgtgcacaggcaggtggagcggaagttaccaagtccattgacctggatattcttcctccttcatcttgtgcgggatgagattctctgttttgaacaatcttaaatcacaaaattttaaaccaccttctcccaaatgaccaccacgggaaaagcagtttgccatgccttcttggtttcctttgcacttctccagaggggaactttcaccaactgattctggacagtgaggagtcaaatccccctaggagttctcttcttcactactttgaacttttgcatcttgctcagcataccgtgctcctggaagatccctctgctcctcttacaagctttctctttgaatccttcccacatgcttttctctgaggaagccacatttaagcctctttaaggatctttaaaaacaacaggaatgcattcaagcctgctgcaaagtccaaagaaggatggatgcctggccctgaaggtctaggactggcctttgatgttagcc

SEQ ID NO: 852358 - DNA, 558 bp, Homo sapiens
gcatgtgggtaatgtcctttagggctagtccatttgtacttgcagccyttcacttgaaaaaccaagtgaaatcacccaccacaaaaggacaagctgcaaggcaaccgattctgaactctgggcttgctgctttctccctcaacccttcctgagtcctctcaactgtcccatcttagaaggacagagaaaaatgtgaaaatttcccactgtgacttctgcaaacgtgggcagagccactgaaagtcaggcctgtttaagggccaccctgctactcagccctaacaaagtgataactcagagtggtatgagcagtttatataccagcagtttgaaacaggatcagggacctagaggctttcaagaaaagtgggaaagaaagtgctggtctttaaggagagtaacttgaggtgaaagttgaagactcaaggctccaagctaggtgtttctccttagctcctcttctgccataatggccccacatctcctggcaggggaagtcaaggctaacagtggagcctcggcctgacctgccccctggcctggcaacatgctgagctg

SEQ ID NO: 852359 - DNA, 516 bp, Homo sapiens
gactccatgaaaatattttcatgctttaccttctaaagcttcatagttttacctttcacatgtaagtctttaatccactgggaattgattttttgtgaaagtccttgcttttgttccaagccaggttttcaagcccccaatcaattttgaaagtcccctgtcatcttataataaattcttgttttgcttcagatagccagcataagtttctgttgctttcaatcaagagccctggctgataaaatggactactgccttggctcccattcctggagccctgccttttaaccccagtccagtgctgtgccctgtgaccagatacagactggtttttgtccatggtttggactatgcccaaagtttgccatactctatgatcttgtaccttacccagcagactacttcatatttctgaacctgcagctggattcgttccactggcttctgtctyattgccagttccactggtaaaaagctatgctccaccgattctcaagatacgacatgaaattgtga

SEQ ID NO: 852360 - DNA, 488 bp, Homo sapiens
tgggattacaggggtaagccattgcaccagccaagaatgttcttttgaaaatgtgttatgccatatttattttaaaagtcccactgaatttttaatacatataaaatactgaaatatgagttgtgtaattggaaaaatgtcaatgtaaatgaaaagagacactttttctgttctgaagcttcaaaatattaaagatcatcgttcatattttcctggggaatttttatttttagtcataatagtaaatgagcagccgtcagaagatatagccatttctaggtttagaattccttttctttatatagttctcttgaatacttgtctttaagaaaatagacattaaggatttcttgwgtaatcaaatactactttgatatttgtacagagcatgagagcaagactagaaccacattaaagcaggaagaataattaaaagttttgtaacatagcaaagaatagatggggtaatttacaatggaaaagtagac

SEQ ID NO: 852361 - DNA, 597 bp, Homo sapiens
ttttaggtgattttacacagctatttatatgaatgaatttatgaattaaggatgacagraatcacttaaattgttttagtgatttttggcatattagtctggtttgagaaggagggagaaaacaagggaattgattttgtaatgtcaaacagaacttacaaatttaggacagatttacctagaccattatgaataaataaatagatccttttaattggtaagaaactagaccaaatttaatatagttgatttagtactagtttatgttgatgatgtagacaacttcaccaaaggaaggggagtagtgaataaattagttataacttattttactgtaaagtaatgttaattgttagaataattataggaaatatttgcttaccaataaatatgactttgacagtcttacaatgatgaattcgtttttgttgaaatagcagacaaaacagactttttcgttttgttcacttattcctagaatccattttagtctctagtttttgttagtatgtatcacctaccttaactatttttctttttgccaaaacagaaagaatgcggcttccgttgatatactggagtcacttagaatatcaa

SEQ ID NO: 852362 - DNA, 515 bp, Homo sapiens
tatggtgtatagtcttcactttccatgttgtgttttgttggactcaaagatgcttgagmagttagagagattctccctggctcccccagccacccctgcagccccactggggaaaaaaggaaacaaaggaggaaaaccgtgttgaacacatattttttcttaagcacctatactggattaatgtattactgtgaaagttgtttaattggagtttttttaaaatagatttttatttcttagggcagttttaggtttacagagaaattgtaatttcttacagagagttcccaaatatctcccccttttatcttacaatctgtagtaattgcttattatttccaggagtttgttggtcagtactttgggttttttttttttttttttttacatagatgatcatgtcatctgcaaatagagagttttatttctttcttctcaatttgtgtaccttttatgtccttttcttgttttactgcattagctaggatgtccagtatgatgttgaataggagtgg

SEQ ID NO: 852363 - DNA, 616 bp, Homo sapiens
tctgtgcttggcacctattggtcaacattatgtttggaaaatttattcatgctgtttatgtagtagtaatttgtttatgttcattgttatgcattattctattacgtaattttatcacaaaggattgcttcattatacttttgatagatatttggattctttccagatttgagttattatgaacaatgctcttacaaacactggtaaaagactttttatgtgtattattttgtgtttaattgaatgtatagctagaaatagaatttctggaaataaggtaaatagtatttttagttagtacagtcattttattttttaatctatgggaatatgaataataacataatagataaggataaatataaaataaatgtgatattaaaaatggctgaatacaaatcggaacaatccttaaaatagtatttttttctattttttaagaattggaaatagagagagtggtaggattttgcatagtattacctaggcaatatattcacaaaggacagtatgcaytatttaattaatgacttcttatttaccaattataataatgcatattttgcaacaaacttctcatcaaatatacaacttgacaagttagatcaaagctttg

SEQ ID NO: 852364 - DNA, 550 bp, Homo sapiens
tttgttttcacagctgttacccttgacagaatttaaatgctttgaagttagagttcatattctgtgtactttcaaacctgtatctacctttctcttcagggtttaatgaaacacatgaaactaacacatttagttaaatgctaaaataatgaccatgttgatcagagtggttgctgcgtagtaatcaaaaaccagtttctaaaaaatctaaccagtttccagtttttattgaatacctgttatactctatatcatattagtaacacagtaaatatttcaactaatgaagaaaatgtgaaaaggtttgcccaaatactttgaggattcaaaatataattgtcagatgaattggaacaattagggaaagagagtgtcttagttcattttgggctgctgtaacaggatacctgagactaggtaacttacaaagaacagaaattatttttytcatagttctagaggctcagtagtccaaaatcaaggtgcaggcatctggtgaggaccttcttgttgtattatatcatggcaaatgtatcacatgggagaaagg

SEQ ID NO: 852365 - DNA, 645 bp, Homo sapiens
cttgaccttttctgtaagagggaaggcaaattgagtgaaataccttatgtccaagctttcttttcactgaaggagaatacatgcaaagcttgcaatttatatcccacaggagracctctcagcttacctccatatcctagcctccctatagctccccttcctgttagtgataagcctcctgtaatctccccttcccagaaggaaataagcaaagaaatctccaaaggaccacaaaaccccctgggctatcggttatgtccccttcaagctgtagggggaggggaatttggcccaacccgggtacatgtctccttctccctctttgatttaaagcagaccaaggcagacctggggaagttttcagatgatcctgataggtatatagatgtcctacagggtctagggcaaactttctatctcacttggagaaatgtcatgctattgttagatcaaaccctggccttcaatgaaaagaatgcggctttagctgcagcccgagcatttggagatacctggtatcttagtcaagtaaatgatagaatgacagctgaagaaagggacaaattccctactggtcagcaagctgtccccaatatggatccgcactgggatctagactcagatcatggggactggagtcataaa

SEQ ID NO: 852366 - DNA, 603 bp, Homo sapiens
aaaatatgggtagccagaggaacaaaaagtaaaacaaacaaatactaaataatatttttaaataaagtttctagaataaagatataatgaagaaaacattagccaggcatggcggcatacaccagttgtcctagctgcttgggaggctgaggtggaaggatcacttgagcccaggaattcaagaccagcctggggaacagagcaagatctcatctctttttaaaaaaaaaaaaaaaaaaaaaaagtgattttagtatgacaggaaagaaagagaaaaatattgttatatagctgtacaatgtgttttaagctaagtattacaaacgagtcagaatgttaaaaaatgtaaaagtttataaagtaaaaaaattacagtaagctaaggttaatttattatcgaagaaaaataattttttgatttagtgcaacctaagctgtacagtgtttctgtagtgtacagtaatgccctaggccttcgcatttactcaccgctcactcactgatgcacccagagcaacttccagtcataataagtgycctggtcaggtgaaccattttttattttttgtaccgtatttttcctgtactttgcttgtttagata

SEQ ID NO: 852367 - DNA, 642 bp, Homo sapiens
tccttgggtgagtctttctatagacttgagtcatcttctcccaagcatgtgccagtcacttctcagctgaatactcaagggggccacctgcaaatctccagagccctctctgtctctatgtagctctcttccgtggtccccagtcttgcaaactcttgctgccttggtctcccaagactcagctaagcctccttagctgaggccatcctctgtgctccgtctgtgccacagtaggcaatgggaggtggtcagatggggcgatcttggggcttgcttcttttgtttcccatctctcaggggggtcactgatcttcattgcctgatgtccaaacatgtcttggccacttttatttggtccctttaaaaaatttgaaccaacacattggctcccctgggtccttgttgacacattctgctgatcttaggacttggcctccataatcccgtgagccaattccttataataaatctctttctacataagtatatattgatatatgcatcatattggttctgtgtctctggaaatctctgaagaatagagatacttgtttgcttccrgctggaggatcaatctggtccctgtccttccattttgctcagaagagggagtgccaaatatatcaatctgtatggatacaa

SEQ ID NO: 852368 - DNA, 572 bp, Homo sapiens
ttctgttgggactcagaaaatgataccccaaagtgaaagccgctgaggcagtttttctctgacctctgccctcctgtctctcatccctcattctccctcgaggcaagtcatggaaattagaatccctcctccccaaagtgggtcatagaaaccagaaccccttttttgcaaagccagctataaaacctaaacatactactctaactgttatagtaggtagtcagacataaacagggcaggagagccctgccaatcccaccaggaatgtcaggcgaccatcagatgaaggtcaggcagttgttaaactgtcttgctaaaacaattggttgcagctggtgccagggaatggcagtcttcctgttcctcatagaaaacacctgaaactggtgaccagcagcttctttatacgatctcaggaggtgggctactgggctcaagcatgtgcactaagatgcaaatggttggastttaactggtaaataaccttcctctgggaacactaaactgacgcctcaagtgagcatgcgcacagctccaggaaacaaaatgtgtgtgtggcccctcccaagtgc

SEQ ID NO: 852369 - DNA, 561 bp, Homo sapiens
atgccactaatgatccagccagtgtttttcctagtctggatagttccctaaaacgyttgcagttacacttattttcctggcatttcactttaaaaagtatgctggcaccagcatagagtgattctttgacgaaacaaattgttctcttcgtgagtcatacaggctgaaacataaaacagtaaaactcagtgaaaaaagatatggctactgtaacactgaagcttggtcactatcattaaatctgtgtgcaaacaacatgcttgagaaatgcaataaagtattttgttgactgggatactattcataggtggagtttattataggatctgaggctatacttgatacaaatttgggcaaaaagtgagaataaaagacttgccctttaaaataattccttactaggtgacttagttgctttatatatatatatatttttttttcttatggtagagatttttgagtgtcattatccagtaatagttaagtgtggagtgattaatcaaaatggcaaatcatacatatagcactcgtatgtgtggtgagtattagttaagtcctgct

SEQ ID NO: 852370 - DNA, 629 bp, Homo sapiens
tcggctcaaggtaactgattggcattccaggaagrtctgaactgatcacaatcttatacgccataggatgacaactttgctgtttgctggagagaagctcatagtgctctgtcagcaccatcatggcatatgttatatcattttagcattcttatattttcttcaactcagtctgatgcggcaacctgtccccatattgctcagagtccagtcagatagtctcatgactctcattgcacacctcatttatgccatccattccatgcttacttactactaaggttcaagacatcatacgaccttctcagaacccatgatatagcccaccttatcagattaatgacattttcagcttccagccagcaaataaatagtaccactgaccagattttcctcgctgactcactgtgcagtttacagcatgtgtgatgaatgctgctgctactcttgcactgatccacttttccaggagctgccttcagagccagggaataaaacctggaaagtggggagatttaatattcaacggggtaaatgttgacttatgagagataggagatggaaaggagctggtgaataaattctcttccacttctagtaattattctgaggtcctaggttttcataaa

SEQ ID NO: 852371 - DNA, 628 bp, Homo sapiens
ggcattttaatgaggcttgtaggttatataatattattatattttattatatatattatataatattattatattattatatatataatacaatattaatattgttaaacttattaattttaatttattaaaaawtattaaaattattaaaattaataagtcacttaattttctgaaattttataattttgctgagattatgtactacaatgttctgggattttttttaggaaattacaccaaagtatgtagtgttaaatgtctttgcaacttactcctgaaattaaaaaaaatattgatgtccgcagagttagagaatgagtgattaaaccagtgtggtgcccttagcaaatctaggtgaacagaatttgtgcatgatttctgttacttttataagttgaaattagtttctaaaataaattccagtcttggaagagtggactggattgggtcatattctcttggcagggtgagggagtggcaggaaaggcctggattgacaggctctccagtgccacagaaacggggaaggagtaatctctgatggaacacacgagggcatttatcaaggagtcaggcaagtgatatctgtccggtcaaagagcagatgtcccccacagagagagtt

SEQ ID NO: 852372 - DNA, 632 bp, Homo sapiens
agggactttttaaagcaccatgaaacatgctcagagatgatagatcatcaatatytcccccccgttttaggatcttcagcaaagcataatgtgtttttttctatcagaacttaaaagaacactttgttcttccacaatctttttttcactgtatgaacttaagactgttttttaaaagtaagctcctaggatttccctttacaatccaaatagttccctgacctagtctaaaagtcctaataaagagttattttgagattgacttttcttttgtagttttatatttattgcgttttaagaaagcatctcccagaaacattgcattaacaaaataaaatctaggccgggtgtggtggctcacacctgtaatcccagcactttgagaggccgagccaggcggatcgcttgagcccaggagtttgagaccagcctgggcaacatagggagacaatgtctctgcaaaaagatataaaaattagccgggcatggtgacacgcaactttactcccagctacttgagaggctgaggcaggagtatcgcttgagcccggaaggcagaggttgcagtgagttgagatcgcaccactgcactccagccttggtgatagagggagaccttgtctcaaaaataa

SEQ ID NO: 852373 - DNA, 587 bp, Homo sapiens
acattatgcagttaaaggggactttttgtttccataatgctttgcagctatgaactgttcttctcatattgtgatcctgggtagtagctccacttggagtttcactgcttaaacagaagataataaaattggagaacaaaatgacaccccaaggacatacatatggtgagttctatgttaacacaaaccagagctaaaaaaggggtctgggactgggaggtaccaaagaagtttgattaatgtagaaagcccacctgcataattaaagcaaacaaactgaagaagcaaacaaaccccccaccacttcacatctataggattgaactttgccagattttcatttcactttgtggttggtaggaactcagatggaggctcatctttttaaagcaaaaatcaaacacccaggagagttatgtgacgtgcgaggcttagcagacaagcagtagaggtatacttaaacacttgcaggcctggaaagtctaagatggaaaaaaaggaaagcaacactgcggggcttcttgtcctgcagctctcattgaacaggctgrgcaaaaacaaaacaaaacaagcaaaacagaacaaaa

SEQ ID NO: 852374 - DNA, 564 bp, Homo sapiens
atcggagcacgccactgaaaaatcaaactctttgtgaatgaatacagtttaaaaaataatatttgggaagttgtgcatgaatatttttgaaaattgaggcaaacttgtggatagagtactcagtactttttccagtggtctaattttgaaagtttttatagggataacatgtcaagtacgtttctacctttaccacgtgtcctagtactattcctttttttttttttctttagagacagggtcttcctctgttgcctaagctggcgcagctggagtgcagtgtcatgatctcggctcactgcaaccaccagcttccgagttcaagcaattctcctgcctcagcctccgtcatggctgggaccaccacgctcagcttttttttttttgtatttttagtagagacagggttttcaccatgttgcccaggctggtctcaaactcmtggcctcaattgatccacccacctcggcctccaaaagtgctgggattacaggcatgagccactgagcccagccacactattcctttttatttgtaaattgtgatattcacattagttattgg

SEQ ID NO: 852375 - DNA, 544 bp, Homo sapiens
atgccgccaacctattagatcaaagcctgtcacagtgggatcctgcttccacattttttaaagctccagataattccaatgtgcaaccggtattcaggaacacctctagaccggatatttaagctcaaattggatacagattctgattcaggtggtgggggctggggtggggcctgaggttctgcatttgtgatgaactccagggagacgctagtgctgtttgtttgcttgtgcagccatagtctaagtgaaatgatactcaaagtgaggtgtagacccctgagtcagaatcacgggggggacagaggggagtgcttaataaaatgcagctatctgggctctaccccagacccaatcatagtctctagtggagggtgaagactaatcagctgtggagcttaaaacaatgttcatgtccaataaataaccccattctccctccacccagattggaattargctttaggtttaggctgtgtcccaggcactttcgtttcattaaactgttcaggtggctccaatgtacagtcagtcagagctaggg

SEQ ID NO: 852376 - DNA, 532 bp, Homo sapiens
gtttgtatttttagtagagatggggttttgccatgttgcccaggctgatctggaactcctgggctcaagagatcctcctgccttagcctcccacagtgttgggattacaggttatttatttatagtaatatrgtgaagccccgtgaactgcctgctcatactcaagcccggagtaatatctgtaacttttgtttgcctgtatgcccctcctctctcccctcctcttgcctcccccatcaagagtagccaggattcaagtcatgcattttatcattctcttacttatttttgttttaaatacatgtatgcatacaatctacttaatcaaggtaaaaaaaaaataaaataaacttttttactatttgcccagttgtgcctgccctggaagtctaagaaaaggataatataaaagattcagtagaagcctataaataattgcattatctagagaaacaccaattgtttttgagggagtaagaggaaaccagtgtttcacagagaaattagaaatagctaacttagtttccttttg

SEQ ID NO: 852377 - DNA, 457 bp, Homo sapiens
taagtaagacagatggatgcgaaaggagatgcaacatagcatggggaaggccaggagaggtgaaygagaagtgaagaaaaacagatgataacagcaagagatgggatttgggctgggctcagaaggatgggtgtcttttaggaaaccatccatgcccatctctcccatattatttagtatctacctttgcttatgtcgtcataaggcttctctcgttgtttctagtagtctgtttacctggctagggtgaggacaatggcttatcatgttttagtccgagattcccagcatgtagcatggcgcctggcatgcagtagaagctcaataaatatgggctgagttgaatgaattagtggagaggagagagaaggaaattttgggcagagagctagctcaagaaaatgcttggaggcggggcaatttttctcatgtcagtatagtatgagtcaccatgagg

SEQ ID NO: 852378 - DNA, 457 bp, Homo sapiens
taagtaagacagatggatgcgaaaggagatgcaacatagcatggggaaggccaggagaggtgaacgagaagtgaagaaaaacagatgataacagcaagagatgggatttgggctgggctcagaaggatgggtgtcttttaggaaaccatccatgcccatctctcccatattatttagtatctacctttgcttatgtcgtcataaggcttctctcgttgtttctagtagtctgtttacctggctagggtgaggacaatggcttatcatgttttagtccgagattcccagcatgtagcatggcgcctggcatgcagtagaagctcaataaatatgggctgagttgaatgaattagtggagaggagagagaaggaaattttgggcagagagctagcycaagaaaatgcttggaggcggggcaatttttctcatgtcagtatagtatgagtcaccatgagg

SEQ ID NO: 852379 - DNA, 619 bp, Homo sapiens
caggctggagtgcagtggcattatctcagctcactgcgggctctgcttcccgggttcaagcgattctcctgcctcagcctcccgagtagctgggaatacaggtgcctgccaccacacctggttaattttgtatttttagtagagatggggtttctccatgttgatcaggctggtctcgaactcctgacctcaggtgatctgctcacctcagcctcccaaagtgctgggattacaggcgtgagccactgcacctggccgatgccagagtctttttaacaaacagatctcatggtaactaatagagtgagaactcattcatcaccacaaggacagtgccaagccattcatgagggatctatccccatgaccctaacaccacccaccaggcttcacctccagcattgagagtcacatttcaacctgggacttggaggggacaaatactcaaactgtatcatcttctttccgcagatcagggcattctgctacaatcatatgccatgaggaagctttctatgacccgtcaggccagattaagtcytcatattttgtatacatagccacagttgacactaaagtttatctcataccacttgtcacaacaataaatagctgcatt

SEQ ID NO: 852380 - DNA, 573 bp, Homo sapiens
atccatcacagtcaagtaggctttatccctgggatgcaaggttggttcaacacacacaaatcaataaatgtgattgatcacagaaacagaactaaagacaaaaaccacatattatctcaaatagatgcagaaaaggcctttgataaaaattaaaccccccagtcccattactggttatataccaagatgaatataaatcattgtaccataaagacacatgcacacaaatgttcactgcagtaccattcacaatagcaaagacatggaatcaacctatatgcccatcaatgacagattgggtaaagaaaatgtggtaatgtggtacatacacactgtggaatactatgcacccattaaaaatgagataatgtcttttgcaggaacgtggatggagctggaggctgttatccttaccgaactaatgcaggaacagaaaaccaaatactgcatgttctcacttataagtaggagcaaaattataagaacttatgaacacaaaaaaaagaaaaaaaaccagacattgcgggctacttcaggggggawgatggaaagagggagaggaacagaaaagat

SEQ ID NO: 852381 - DNA, 594 bp, Homo sapiens
tgtggtccacacagcatttgcccacacatcatctcatttccaawcttagtccttttaattaaggtaggaatggcaatcactaatttcctcatattatatataagcaaactaaggtttacagttgctgggtggtgttgtttgggtcattctacaattaacagatagcacagagaatcgatgtcaccccttctaattccattctctaaaccaccttaactctcacctgggggataggaggtgagtgaaggcatggaggtgcaatcgtttcataatccctgctgtcccagaattctgaaagtacagtgggatgagataagtagtttctgcttttttaaaaattttcttggcaataatactaatactactagtaataatgctttaaatatatttaaaactctgcattttataaaggtcattgcacatccagttatcatcatgactgaaactaagaaagaggcaccgaagaaatgttactgatgtggaagatgatacttacctggattaactgactaataacagtcgctacatcatttcaaacaaataactgaaaaccaaaaatatcagaactgccattggtcctcaggacattattat

SEQ ID NO: 852382 - DNA, 594 bp, Homo sapiens
tgtggtccacacagcatttgcccacacatcatctcatttccaaacttagtccttttrattaaggtaggaatggcaatcactaatttcctcatattatatataagcaaactaaggtttacagttgctgggtggtgttgtttgggtcattctacaattaacagatagcacagagaatcgatgtcaccccttctaattccattctctaaaccaccttaactctcacctgggggataggaggtgagtgaaggcatggaggtgcaatcgtttcataatccctgctgtcccagaattctgaaagtacagtgggatgagataagtagtttctgcttttttaaaaattttcttggcaataatactaatactactagtaataatgctttaaatatatttaaaactctgcattttataaaggtcattgcacatccagttatcatcatgactgaaactaagaaagaggcaccgaagaaatgttactgatgtggaagatgatacttacctggattaactgactaataacagtcgctacatcatttcaaacaaataactgaaaaccaaaaatatcagaactgccattggtcctcaggacattattat

SEQ ID NO: 852383 - DNA, 599 bp, Homo sapiens
agcagttgaatttcacgaagatgaaataacttaccccaggccatcttgctggayagaaacaggattgggattaggatcagggtgctcagtccagtgtatgctcccccatccccccaacttacaatcatacaaatgcttaaataagattgaggagaagacatcaccaaaaagaaaagcatcaccgtagaccgagagtatcaaacgtccaagctagtcattaaatacttaatactgaatccatttgtatagtagacactggggagacaaggattaatgagatacagcctctgttctcgaggagtttgcagtctggtgaggaagactaaaacacctaaacagacacacatgataaaatattatacacactgacggaagactggagcggtaaagtgaatgcaggagggagtggtcagtgccaacaggcaaaagggaaatttaaaaaaaacctcaaggagcaaatagtgttttgagatggtctttataaataaattggtgctccttggtcagaaaaaattgctataaaggacagtatacagataattgaagatatgaacatgaactctctattagataataaattgttttcaacgttaaatatc

SEQ ID NO: 852384 - DNA, 620 bp, Homo sapiens
tctttgttacttccatgtttcccctttgtgaacaagaatcgctagaatcrtttttctatgtctgtcccaccattgcacacagagggcagataagccgtttgttcagtttcacaggttgatagagggaagggaattatgtcaaggatctggacttaatggacaccctcagaagcctcattcacacttggtatagttgactaagataagattttaaacttttgatctggtgtggtctacataacatttttcactttgagctaatgctttaatgacatgaaatttggaaaccttagagtagagggtgaatgtattttgcaaatgggggaatgtgagtgtccgactgtggtagatggaatttctgaaatggcccccaaacatgccacacccttgtctctaaagcctgttaaggtgatgaaacatcattcctgtgattatgttgttatatgccagttatatgactttaagatggtgaggttacctgtgtaaactggatttaatcacatcactgcacacatgccagtggtttctctagctgtcaggagagggtgatgtcagaaagaaagggagcttgagaaggactccatgagctgttattggttggaaaatggaaaaggccaggt

SEQ ID NO: 852385 - DNA, 572 bp, Homo sapiens
ctttgcatgcttggaatgatgttttcttcccctttttgcctacaaggaatgttgtaagcaggcataaacaaatgccttcattatttatcctagtctcactgcactaaatctttgtacatgggaaatttgctgttttgtttggctggcaattgcttaagctaaggggccatgagagtctttctcagggttgcatcttgggattgttctagtgcaagtgaatacccattagactgaaagttgttataaaaattgaaaccatgagattgagtaaaaacttcttcatcactcttacctctggcaccttgtagcccaggttctactgtgattgtaagagtaatcggccaggcacggtggctcacgcctgtaatcccagcactttgggaggccgagttgggtggatcacaaggtcaacagatcgagatcagcctggccaacatagtgaagctctgtctctactaaaatacaaaaaatagccaggtgtggtggcgcktgcctgtaatcccagctactcaggagactgaggcaggagaatcacttgaaccagggagtcagaggttgcagtgaactgagat

SEQ ID NO: 852386 - DNA, 633 bp, Homo sapiens
aaaaattaatttttaattgatgctatccacagttatttgaagtgaactgtttcgtgktactaataatattaccaaaaaattaacaaaaaatttcaaatagatctaagtttggctatttcatttttaaaagggctaaaaagtattttaaaaaattttagcaaagtgtttttttctaagtcaaaatttattgcaaaatatgcaacaaaagtattgttccaataaaatgtaaggacatttgagcaagaaaatgaaaatgtttacctattaaggagattattcatgtataaataattaccaataatttataatttcaataggaaccatgtttctggccattgtagatcagagtacacaaggtacaatcttcggctttttttttttttttgagacatggccttgctctgacactcaggctagaggcaatggtgccaccatagtgcactgtaacatcaaactcccaggctcaagtgatcctctcatctcagtctcctgagtagctgggacaataggtagtgagtcaccatgcccaactaatggcttatttttatttttattttttttaagagacagggtctcactatgttgcccaggctcagagtacagtcctaattgaagagaaatttgaacaagtta

SEQ ID NO: 852387 - DNA, 633 bp, Homo sapiens
aaaaattaatttttaattgatgctatccacagttatttgaagtgaactgtttcgtgttactaataatattaccaaaaaattaacaaaaaatttcaaatagatctaagtttggctatttcrtttttaaaagggctaaaaagtattttaaaaaattttagcaaagtgtttttttctaagtcaaaatttattgcaaaatatgcaacaaaagtattgttccaataaaatgtaaggacatttgagcaagaaaatgaaaatgtttacctattaaggagattattcatgtataaataattaccaataatttataatttcaataggaaccatgtttctggccattgtagatcagagtacacaaggtacaatcttcggctttttttttttttttgagacatggccttgctctgacactcaggctagaggcaatggtgccaccatagtgcactgtaacatcaaactcccaggctcaagtgatcctctcatctcagtctcctgagtagctgggacaataggtagtgagtcaccatgcccaactaatggcttatttttatttttattttttttaagagacagggtctcactatgttgcccaggctcagagtacagtcctaattgaagagaaatttgaacaagtta

SEQ ID NO: 852388 - DNA, 505 bp, Homo sapiens
ttgtccattcaacctagaagttttccrctcctataaattaagtaggaatgcagtaggcttcgtatcaatttcacttctaggaactatgattaattagccaatgccacagccctatacaattcagactattctgattgctgctttgcctctgctgtctattatggtagctacgcccacctttgatggttgagtgctgccacttggcccctgccccctcagaatccaattattcccattgtatttaaattttgtagttgagtgactgtagttcccactgttagatctgacatacagagaagagcaatgacagggtccttcaaagatgcaggtgttgccctcacaaatctatttcacaagacattggtcaagtgtatatcttctagaccctcccagctgggatgagtaggtctaaattgactaatccactccaccatcccaatttccctaagcctttggatcccttcctctacattaatccaagggagatcaggcatttccagctcat

SEQ ID NO: 852389 - DNA, 505 bp, Homo sapiens
ttgtccattcaacctagaagttttccactcctataaattaagtaggaatgcartaggcttcgtatcaatttcacttctaggaactatgattaattagccaatgccacagccctatacaattcagactattctgattgctgctttgcctctgctgtctattatggtagctacgcccacctttgatggttgagtgctgccacttggcccctgccccctcagaatccaattattcccattgtatttaaattttgtagttgagtgactgtagttcccactgttagatctgacatacagagaagagcaatgacagggtccttcaaagatgcaggtgttgccctcacaaatctatttcacaagacattggtcaagtgtatatcttctagaccctcccagctgggatgagtaggtctaaattgactaatccactccaccatcccaatttccctaagcctttggatcccttcctctacattaatccaagggagatcaggcatttccagctcat

SEQ ID NO: 852390 - DNA, 536 bp, Homo sapiens
tttaatccccaatgtggcagtgctgtgaaattttaagaggtgattggctsatgagggctttgcactcataaatagatgattaatggatgaatggattaaagggttaataggctaatggattaatgggttatcatgggagtggaactggtggctttataagaagaggaagcgagacctaatgtaatacacttagccctcccaccatgtgaagccctgcactgccttgggactctgcagaaaatcctcagcaggaagaagaccctcaccagatggcgcctctccatcttggacttttcagactctataactgtaataaatacatttttttctttataaattacccagtttcaggcattttgttataataagcaggaaatggactaggataaacacaaaagaaagggagagctatagaaaggatttcagtcttctcagaagttatctaaatggttgtgatcagaatgctggcagaaatataaagagtaaaggctattctgataacgtcttagatggaaatgaggactatatcattgaaa

SEQ ID NO: 852391 - DNA, 579 bp, Homo sapiens
gcgacaagagcgagacttcgtctcaaaaaagaaaaaaaaaaagagtgtgtggacagcctggaggctggcacctagraaacactcagtacataaactgcctgccctggccccagcctcctttgggcggagctcaggaggacgccaccgcggagaaggggactgacatttacgaggagctccccgagcaccaggccccgcttagtgctcacacctgcgctgcccaggagggcacgtgaaggccctgtccatggtttgttcgtttcatgggtgacactagagggaggagcaccttgccaacattgctgggtaggtaaggccaggcggctgcctcctccaccaggcctgtgtgatcctgaagcccaggctcttccgcatagccggccttcttggagacatcgcttggtttctgcagcagctggatgaagagcctgcggttggcaaaagcaggaagactggggcatccctgtggcccctcggccctcgcagcagctcctgcttcccagggccaccctctgctctgagcctcttcctgggcagtagtcgtgttttcccaacccctgtccttcgggtgacctcaga

SEQ ID NO: 852392 - DNA, 576 bp, Homo sapiens
cattggaatcctgggaggcctgagctggggagaggctcaggggctgggaggtgccctggggcctgcagggctgctggctcacagtgaggctgtttgtgccccaccacagggtcgctggacacccatcaagccccagcccaggccctgaacgagactcagtgggcactagaacgcctgaggctgcagctgggctccccggggtccttgcagaggaaactcagtctgctggagcaggaatcccagcagcaggagctgcagatccagggcttcgagagtgacctcgccgagatccgcgccgacaaacagaacctggaggccattctgcacagcctgcccgagaactgtgccagctggcagtgagggctgcccagatccccggcacacactcccccacctgctgtttacatgacccagggggtgcacactaccccacaggtgtgcccatacagacattccccggagccggctgctgtgaactcgmccccgtgtggatagtcacactccctgccgattctgtctgtggcttcttccctgccagcaggactgagtgtgcgtacccagttcacctggacatga

SEQ ID NO: 852393 - DNA, 505 bp, Homo sapiens
ccattcttctcttgtcttcatgctccatcacttcctagggtgttgtctacacctgcatagccatagctaattttccattctcagcaccaaccaggggaagaggaggaaaggtagcctccttttcatgataggtgtgaagttatgcaggacactctcagggtgaatggaccacagtgtggctcctgactgggcagggaggaagaatctgctgctagagaaagaagggaagacagtcatctttgacatcatgagttgcataagatgggaataaaaactggaaaagaccttaatcaccatattagaaaactctagccattctaaagacattgaagaatcctgtttggacctttttagcagtgaggagcgtccagctgtggttatctggagaatgcaataggcagaacttgctggtagaggccccgcttccytgtcttgaatgcctggcttttttttttcttttaaattttgcatctgcttctggatcacattgctgtgagccacattg

SEQ ID NO: 852394 - DNA, 505 bp, Homo sapiens
ccattcttctcttgtcttcatgctccatcacttcctagggtgttgtctacacctgcatagccatagctaattttccattctcagcaccaaccaggggaagaggaggaaaggtagcctccttttcatgataggtgtgaagttatgcaggacactctcagggtgaatggaccacagtgtggctcctgactgggcagggaggaagaatctgctgctagagaaagaagggaagacagtcatctttgacatcatgagttgcataagatgggaataaaaactggaaaagaccttaatcaccatattagaaaactctagccattctaaagacattgaagaatcctgtttggacctttttagcagtgaggagcgtccagctgtggttatctggagaatgcaataggcagaacttgctggtagaggccccgcttccctgtcttgaatgcctggcttttttttttcttttaaattttkcatctgcttctggatcacattgctgtgagccacattg

SEQ ID NO: 852395 - DNA, 561 bp, Homo sapiens
tttacactgctagtgggagtgtaaattagttaaactattgtgaaagacagtgtggcaattcctcaaggacctaraaccagaaataccatttggcccagcaattccattacttggtctatacaaaaaggattataaaccattctactataaagacacatgcacacgtatgtttattgcaccactatgcacatatagcaaagacttggaaccaacccaaatgcccatcaatgatagactggataaagaaaatgtggcacatatacaccatctaatactatgcagtcataaagacatgagttcatgtcctttgcagggacatggatgaagctggaagccatcattctcagcaaactaacacgagaacagaaaaccaaacactgcatagtctcactcataagtgagagttgaacaatgagaatacatcacacaccagggtctgttgggggttgggggataagggagggatagcattacgagaaatacctaatgtagatgacaggttgatgggtgcagcaaaccaccatggcacgtgtatatctatgtaacaaacctgcacattct

SEQ ID NO: 852396 - DNA, 561 bp, Homo sapiens
tttacactgctagtgggagtgtaaattagttaaactattgtgaaagacagtgtggcaattcctcaaggacctagaaccaraaataccatttggcccagcaattccattacttggtctatacaaaaaggattataaaccattctactataaagacacatgcacacgtatgtttattgcaccactatgcacatatagcaaagacttggaaccaacccaaatgcccatcaatgatagactggataaagaaaatgtggcacatatacaccatctaatactatgcagtcataaagacatgagttcatgtcctttgcagggacatggatgaagctggaagccatcattctcagcaaactaacacgagaacagaaaaccaaacactgcatagtctcactcataagtgagagttgaacaatgagaatacatcacacaccagggtctgttgggggttgggggataagggagggatagcattacgagaaatacctaatgtagatgacaggttgatgggtgcagcaaaccaccatggcacgtgtatatctatgtaacaaacctgcacattct

SEQ ID NO: 852397 - DNA, 649 bp, Homo sapiens
tgctctgctcctgctaaggattacagacagagagttagctaaacagtttttctgcttacgaaagtttatttttaacctagctagtttcttaaagaatgacttcttggaaaatgttatatactaaagcttatttgaacctacactccaaaacaaagcaataatgtttaaatagataaaatgtgcaatttccctataatagcatttaactagactgttttgcaatctattcctctatcactgatgaatttcttatctgtagaaagtcccccactgtgaaaaatttgctagagaacacccaataatcatgtaaaggattgccatctaagcagaacagctggttttctcacagctttggaaatgattgggtaaagttcactgagttgggtgctttacctataaaacgtaaacttcacatttcagttctgtgcagaaatctcagtgtgtatatttctacatgctaatacaagtagaaattatcaggcgttcagatgaaacactctagaataaaatacaactgtgtatgacttttcatgaacagtgaggtaaatcttatcataagcaacactatatcattaatagtctggttgaytggacttcttacataatactaataacaaaatgtttatttacaatctttgcctattttatg

SEQ ID NO: 852398 - DNA, 592 bp, Homo sapiens
tggtatgtagccattaatttggcaaatgcctttttttccatttctgtccataaggcccaccagaagcaatttgccttcagctggcaaggccagcagtacacctttactgtcctacctcagggttatatcaactctgtagcttggtgtcataatcttatttggagagaccttgatcgcttttcacttccacaagatatcacattggcccattacgttgatgacattatgctgattggatccagtgagcaagaagtagcaaacacactggtcttattggtgagtcatttgcatgccagaggatgggaaataaatttgactaaaattcaaaaaccttctacctcagtaaaatttctagggatccagtggtgtggggcctgttgagatattccttccaaggtgaaggataacttgcttcatgtggcccctcctacaaccaagaaaaaggtacaatgtctatttggattttggaggcaacatattctttattttggtgtgttactccggtccatttatcgagtgacccaaaargctgccagttttgagtggggtccagagcaggagaaggctctgcaacaggtccagactgctgtaa

SEQ ID NO: 852399 - DNA, 649 bp, Homo sapiens
ctacgtaccaggttctctgccaggaaaattataaatgctacgctatcaaaattgatattgtgttagatttataggtaagagaataacaaatataatttcctcttttckatctgtgaaatatttttagagcccattgtgtactctatttcctaaaagcagccccaaaactccattaaataaaaatggctgatgtatacagacagaaggcaaagtattagcgaaaaaaatcaaaaagaagtgaaaaatggaaaagtggtaagtttatggaaaatatgattaagagacagaatatatcttttttttctcctatctttagtgtgatcatctcagaaaagcagataaaaagatttataaatggcaaatgtatacggactgactatttgagattttgatgtagtcttacagctgactgaactctaatgagttatatttcataaaaacctatgtggttcttaaggtacaacaatatgatgaggcccggtgataagaaaactgtggcaatggcctactttaaggaaataaattgtacccctgagggactcttttgtatttaataagttacagaatttctacagattatggataattatttaactggaccctaaaccagacttgtcaaatgcaatgtttttatgggaaaattgctctc

SEQ ID NO: 852400 - DNA, 575 bp, Homo sapiens
tatataatagttatcttttctgttcctctccctctttccatcwtcccccctgaagtagcccgcaatgtctggttttttttcttttttttgtgttcataagttcttataattttgctcctacttataagtgagaacatgcagtatttggttttctgttcctgcattagttcggtaaggataacagcctccagctccatccacgttcctgcaaaagacattatctcatttttaatgggtgcatagtattccacagtgtgtatgtaccacattaccacattttctttacccaatctgtcattgatgggcatataggttgattccatgtctttgctattgtgaatggtactgcagtgaacatttgtgtgcatgtgtctttatggtacaatgatttatattcatcttggtatataaccagtaatgggactggggggtttaatttttatcaaaggccttttctgcatctatttgagataatatgtggtttttgtctttagttctgtttctgtgatcaatcacatttattgatttgtgtgtgttgaaccaaccttgcatcccagggataaagcctacttgac

SEQ ID NO: 852401 - DNA, 611 bp, Homo sapiens
ccaaactatgtctcccaatttcccagcgccccccccacccaaacacacacatacaatatgtattagggttcagaacttcaagtgggtagactatgctaaagctrgaaatggaaactcaaagttgttcacaggaagaggaaaagtaacctataaatttattgaaaacgtgtgtacttccctatcctatttaaatatcttcatccctagttattggagaattgacagattaaggataattgctggactccaagttccttgacctcctcatctccaaagggcttttctttcattccagctcagtcgtacaccaccatgaccatatctgtggccttgtcaccacaaaaactattttaagaatttagtttttggaaaactgtttctattttctcagcttacctaaataagtactcctatatgagcaattcttcaccttcaataaagatctcaagttcattgaccttgcttccacatgtccttacctttccctttacagtttacatctcatcattatactcactcccttcaaaaaatctttaactcctttgctcccttctcactccatttcactcatctagtgaaccctaagcctggtgaatctactagctccctac

SEQ ID NO: 852402 - DNA, 611 bp, Homo sapiens
ccaaactatgtctcccaatttcccagcgccccccccacccaaacacacacatacaatatgtattagggttcagaacttcaagtgggtagactatgctaaagctggaaatggaaactcaaagttgttcacaggaagaggaaaagtaacctataaatttattgaaaacgtgtgtacttccctatcctatttaaatatcttcatccctagttattggagaattgacagattaaggataattgctggactccaagttccttgacctcctcatctccaaagggcttttctttcattccagctcagtcgtacaccaccatgaccatatctgtggccttgtcaccacaaaaactattttaagaatttagtttttggaaaactgtttctattttctcagcttacctaaataagtactcctatatgagcaattcttcaccttcaataaagatctcaagttcattgaccttgcttccacatgtccttacctttccctttacagtttacatctcatcattatactcactcycttcaaaaaatctttaactcctttgctcccttctcactccatttcactcatctagtgaaccctaagcctggtgaatctactagctccctac

SEQ ID NO: 852403 - DNA, 579 bp, Homo sapiens
gatgggttgataggtgcagcaaatcatcacgacagacatttacttatgtaacaaacstgcacatcctgcatgtgtatcctggaacttaatataaaataaaatatttttttaaaaagaaacacttatacactgttggtgggagtgtagataatttgacaaaattcagcctgttttttactttgtaaaatataaatagatgttaaaaaataaaatgtttaataatatattcttcaatgtaattatttaaggtctatataaaaacagctggtagaaaatattctaaaaaatctaaagaaaaaatattttagttaaacttaggagataaacaagtatgctaacaaacaatattgttgtcaacattgtcttggagattccagtgagtacactaaggtaaaacatggaattactatcacaaacattgactgcaaatagttaaccatctttggaatgaccttagatggtatatgcagaaaacacaatagaatctgtcaaacacatcctttttaaaatctacctacttacctacatctttatgaataagcattttataatggaaatttgaaaaaattttaatcagaa

SEQ ID NO: 852404 - DNA, 572 bp, Homo sapiens
tcactttgcaaaaagtttacaagttgatagtctaggctgaggcagatgctctagaatgttgtaagcaatgggtttccttctggctttccamctccaggtttgctgaggaaatttacgtgactaccacaatggttgcaaaatggctcctgaaactctagtcatccagggaagatataaaggaaaggtacaaaaagaaaaaggactttccgctagctatgttttgccatattttattaaaaaactgtgactctctaattctttgattagaactttattttttgggctgtgaggaaaattgctgaaagataatatattgagctttccagccattattgtaaaaactggcctgaaaaaaagtggttgagcaaggaagttgaataagaaggttttcagattcctaaattaccattaacgtatctcatgcacaaaaaatacatattctagatacattaaatacttaactatatactatagaaacctacaagcactctctaaagagactatatgagccatcttggtaagaaggaaacattctaaaccaaattctaaaactagaggctaagaaagaaaat

SEQ ID NO: 852405 - DNA, 558 bp, Homo sapiens
agagaggaagagaaaagagacttttagaaaagtgagagaactaaatatgaatacaaccatggagatggggaagaaagaccctcaatatgaagaaataccccttagaacaattcaggagcagccttctgggtggtgaactagggaaaccaggctctggggcagtttctccacacttctgatttcctcaccatgcaatgaggacaactacactgtccccattgtagtggtaacaattaaatcacacagtgccaaagcctgtgcagcatatagacattagactataaactttgttatgaaaggagttatttattgctaagcactgaaacagtatccaacatagtgtggatactttagctgaagtagtcacatgagtctttcagtctacagcaagcagccacttactgaaaatgtgccattgatgctgttactctcttggaagggacccaacatgatgcctgaaataggatacaggttagccccacttcaggagtttcytgacacgctgggtgtgttctctttaaaacatggctaaggcacttagcctaatgacatacatat

SEQ ID NO: 852406 - DNA, 595 bp, Homo sapiens
tagaaaagtgagagaactaaatatgaatacaaccatggagatggggaagaaagaccctcaatatgaagaaataccccttagaacaattcaggagcagccttctgggtggtgaactagggaaaccaggctctggggcagtttctccacacttctgatttcctcaccatgcaatgaggacaactacactgtccccattgtagtggtaacaattaaatcacacagtgccaaagcctgtgcagcatatagacattagactataaactttgttatgaaaggagttatttattgctaagcactgaaacagtatccaacatagtgtggatactttagctgaagtagtcacatgagtctttcagtctacagcaagcagccacttactgaaaatgtgccattgatgctgttactctcttggaagggacccaacatgatgcctgaaataggatacaggttagccccacttcaggagtttcctgacacgctgggtgtgttctctttaaaacatggctaaggcacttagcctaatgacatacatatttgccccaactttatatgaaaracagtggagggtggtagaaaattctggagtttggatgaa

SEQ ID NO: 852407 - DNA, 597 bp, Homo sapiens
catcctcatagtttagctctcacttataagtgagaacatacgatatttggttttctattcctgagttacttcacttagaataatggcctccagctttatccaagttgctgttgttgcttttaatcacaaagcratgctgggttttaccaaatggttttactgcatctattaacatgatcaaataacttttgtttttaattctctttatgtgatgtttcacatttattgacttgcatatgtgaaaccatctctgcatctgtggtatgaaacccacttgatcatgatgtattatctttttgatatgctattggatttgatcagctagcattttgttgaggatttttgtatctatgtttatcagggacattggtctctagtgtctgttgttgttatgtcctttcccggttttggtattagggtgatcctaacttcatagaatgatttagggaggattccttctttctctatcttttaaaatagttttattggaattggtagcaattcttctttgaatgtctgatataatttagctgtgactccatctggtcctggattttttccattggaaattgttatattccttatttaatcttgctg

SEQ ID NO: 852408 - DNA, 626 bp, Homo sapiens
acttccacaatatacattaatcaaaactcccctctaaaaggccaacagtccctgagctccttggttcttgcttctctaatccctgtgttttattagactcctgctttgtccagagaggggctacaaataagcatacctctttcccacttcagtatgcaatgcattcactctttattttctgtattgctactgcattattttctctcctctttcagtaagaagattgataatttattaagaacacttaagatttctgcactttgtagggatgtatatttcaataaatgtttgtaagataaaaactgccttctaaaattctgtgagcttgccaggaaaagctaaggaactcactgtaaagaacaactcagctcagtccaaaactacaggaagcttttgataatgaagggtgaagttgcatacaacattagtttcatatattctgccaacatattttctgttaactaaagccagtttctcccagggaaggtttgttgagarctggagatagtaaacaaagttttttttaaaaaaacaaaacaaaacaaaacaacagcactgtttaaaacatgctattgaagttagccttccttattaagggtccattcttatttgtctcatggtttgtg

SEQ ID NO: 852409 - DNA, 654 bp, Homo sapiens
ttgtctatattttagaaatgctgatctttaaactttattgtttatttyacattattaattgacattaaattataaaaagttctttcttaaaatattcaagctgactgttgttttgaaaagctaggtcatattttcgctgtggctttacattttctttgacacattgctttatagtttggcttatatgtttgttaatttaaaaataaataaataagaaaataatctaaaacattttatgtatgatttagttatatattgtgtgcatgaatatgtgccaaatgttgcacaaattctgttctattaaatgtggcttctgatcaagagaactggccactgaaattcaaactacagcactgaggttccgtcagcgaactcatagatttcaattaattgatcaataaaaagatcccagttaaagaagcacaaacctattatataattggtctgtcaaataaaattggctcaagagatatagtttgattaagtgaattaattaaccaattggttaatccaactatatgtcagccccacatatctgggcatcatgaatcatcaaattcagattaaacaactaatttatgaataaataaaaatatgacacaaacataattatcaactctgccaattttctttaaggattgctagtttctttta

SEQ ID NO: 852410 - DNA, 589 bp, Homo sapiens; identical to SEQ ID NO: 851331

SEQ ID NO: 852411 - DNA, 220 bp, Homo sapiens
ttgtttgctaaggataatggcctccagctccawccatgttcctacaacggatatgatattgttctttatggctgcatagtattccatggtgtatatgtagcatattttctttgttcagcctaccactgatggcaattatattgctctcatgtctttgctattgtgaatagcattgaaatgaacatatgcatgcatgtgtctttatgatagaatgatttat

SEQ ID NO: 852412 - DNA, 652 bp, Homo sapiens
atcaattggaatgtctgcaatgcggcggtgtcgacccagtaggtacgcactctgtcgatgtatgtacatgactggaagcacctcatcatttttaaatgggtagagacgccaccgttttttggggatacgtgcttctgggggctcactatatttaatgactacaccccggaaagtgttggtgtcctcaagaagtgccccagaaagttcaaagcttggtttttctttagcgggcacctctttttctttgttgttgccaccaggccgaggaaccaactcctgagactcactgccgccaccaccaacgtcattcctctggcgatgctcccgtcgcctggcattataaaactcccgctcttcttcctgagcctgcaggttctgagtgtctcgatcccgtccctgaccctgcccactcccaggcctctcgttagacgttctcctttggtgggaatggccccggtgtctgtcccggtcactgttcctagctctcctgtgttcctgttctgatggttccctgtgctgccgatcctcccgtcctctccggggatgatcctcacgctcctraaattcaaacagattctgtaatttaaacgcagtgcacaatctaaaggcagcccaaatcttgttctttttgaacgaagtgcatgcaaaaagt

SEQ ID NO: 852413 - DNA, 610 bp, Homo sapiens
ggggtgaaggaggtcggggtgcatacctgctggcctttcctcacccagaggccagcccaaagccctgagcataacaaagacaatcacctcttgaaagggctcacaatgattgtactttattgatgtgttacaggaggtaaggactttctgcttaaaatatttaaaatttacatgtgcacacaaacaaacacaggttcccccacccatggggaagggcgagatgactctgaataaaggatggaggagaagaagagggtgtagacggagggcccttgacccctacaggggcagcaggataaggaatagagtggggcagaaggtgggttattaagaagcatcttgcttactgacatgaagccacgtgcccagcgagagcacagatgaggcctcattggcgtagaggaggcccttggagggcaggcacacggtgcccaactagccagccaaggccaacgtcccaggggtagggcggaagtggggtggcgtgcacagggcacccagcccaggcctctgctgcccccacctccctccccaccctctgagagaaaaracggtttgggcctcagccacggaccgacgccgttaccggcagcgtctccttaaactacag

SEQ ID NO: 852414 - DNA, 557 bp, Homo sapiens
tcctcatctggaagagacacgatgctatgtacctcatgktgtagctgtgagaatgatgtgagagaatgcatgtaaaggaactagcattggatttgtatatagtaagtcctcaaaaaatgttagtggtggtaattatcatttcattctgtcttaaatcataatttgctgtctacttgtctatgcccccaccatttatccatccattcagaaattcaataaatctttactgagaaattagactgcgtgccaggccctgtgtcagatacaatttggaatgagaggcacataccttaaaacacattaaaaagaaaggagattggtgctgggaaggaaggacgtacaggttaccctgaatgcacaaagaaagaagtggctgaacctgcctctctagtctaagccagttttgaataatgccttctactgatagagcacttagcacatcacagaagtgatgttctttgattcttttgattctcgaaataatccagtaatgaccacattttctaaatcaaaaattagaatccagtgtgactacatggtatggcaataggtcaaaa

SEQ ID NO: 852415 - DNA, 483 bp, Homo sapiens
ccaattccctcatccataacgaaggcaacagtcccagtgatgccagcctatcagcaatcaaaagaggataaagtgacacaaattctttgaaagcttcggtcctggaatgcagggggttggtcctgatctctgatgtgactccctcagttgtctcatgtgtaaacaggagagtgtatacaccttgcaaagggcaacactgttcaagggggagaggttgtcattgtgtaagtaggcatcagagtagttgatggtctccaccaagggccatgagagttccagctcaggactggcacagcctgcaaggccagtggtgtggtgggagagcagtagagtgggagccaggaggccttccacctggagtactctgcctgtcttggaatgaactttccttctgggccacagtcttcccccttgtaaaawacaaggttttgactagatgactgtgaagagcttcatcatttctcatactcttggaattaactt

SEQ ID NO: 852416 - DNA, 614 bp, Homo sapiens
  misc_feature 217: n = A,T,C or G
ccgagctactcaggaggctgaggcaggagaatcgcttgaactgggaggcagaggttgcagtkagccgagattgtgccatttcattccagcttgggcaacaagagcgagactccgtcttcaaaataataataacaatatgatcaaataaaaaacaaacgaagcaacgacaagagtgctcagtgacaaaatttcagccaggtgtggtggctcacacctntgatcccagcaccttgggaggctgaggcaggcagatcatgatgtcattagtgtagtttgcgactagcctggccaacatggtgaaacctcgtctctactgaaatacaaaaattagccggccttggtggcctgcgcctgtagccccagttacttaggaggctgaggcaggagaactgcttgaacccagaaggcagaggttgcagtgagccgaggtcgcaccactgtactccagcctgggcaacagagcaagagtctgtatcaaaaaaaaaaaaaaagaaagaaaatttattgaaataaagacaaggaaaaacaagtgagttttaatgaattagcagcagtttaagaacaagaaaattatgttaatactttttgaataggtctcaacttagcaactaacc

SEQ ID NO: 852417 - DNA, 614 bp, Homo sapiens
  misc_feature 217: n = A,T,C or G
ccgagctactcaggaggctgaggcaggagaatcgcttgaactgggaggcagaggttgcagttagccgagattgtgccattkcattccagcttgggcaacaagagcgagactccgtcttcaaaataataataacaatatgatcaaataaaaaacaaacgaagcaacgacaagagtgctcagtgacaaaatttcagccaggtgtggtggctcacacctntgatcccagcaccttgggaggctgaggcaggcagatcatgatgtcattagtgtagtttgcgactagcctggccaacatggtgaaacctcgtctctactgaaatacaaaaattagccggccttggtggcctgcgcctgtagccccagttacttaggaggctgaggcaggagaactgcttgaacccagaaggcagaggttgcagtgagccgaggtcgcaccactgtactccagcctgggcaacagagcaagagtctgtatcaaaaaaaaaaaaaaagaaagaaaatttattgaaataaagacaaggaaaaacaagtgagttttaatgaattagcagcagtttaagaacaagaaaattatgttaatactttttgaataggtctcaacttagcaactaacc

SEQ ID NO: 852418 - DNA, 490 bp, Homo sapiens
tactgaaaaaagttgaccatctgaccagtggataatactttcaaggcattcaattagcttatcctttgcagtattctaagctattcacattgacgatcacayacattgtagtgcttgctgcaagggaggcatataaccagttgttttggctaaaatatgacaggaaggcattccttgggttctatataaaagtaacagtattcaacagtctaatggcaatcactgataggctgcttaaataaatgatatttccttcattcattgtgttggaagggcccagtggaaagggggaaatacaacaaaaaaccaaaacctaatactattccaatggactgagctggagaaatggaagctccttaagatccagatggcacttgactgtcattttataatggttttccttcaagtgaaactactacattgcctcccaatttctctccaagtgtcgaacggtccttaatatcatccaagccatttacttgccactcat

SEQ ID NO: 852419 - DNA, 616 bp, Homo sapiens
cagtatgattaatctctagaataaaagggacatattagagaggtagaacgtaagtwgaatttttatttcgtacattcttcctcaagaaacttaaatgacttctgaagctaaattgggaaaatgcctactatgattaatttgctatcctgaaatattatcaggtgaatggagaatttcgatatatattccatctcaaatattcataaagtaaaacctgcttttctcttcccaatcactgatattcttgattgctttatttcagatagcctatctccatctcctgctgtcctgtgcaaaacagacctttcaaaggcttaagttattctaataactttttatggagcagcaacagtagacacccatattataaatgaccaacatttgacttcaaccaatatttaactttgacactaccaaagtaacaaacttttcttatttcacttatttcttaagatcttgaattataactttctatcttttggaatgaaattaatgtttgaaaaccactgtatacaaaccagcataaggaacagtgtctctcatataacctactagacaagttgtaacaactctcaatgttaacctttttctttgtctaaatatttaataagttgtg

SEQ ID NO: 852420 - DNA, 616 bp, Homo sapiens
cagtatgattaatctctagaataaaagggacatattagagaggtagaacgtaagttgaatttttatttcgtacatkcttcctcaagaaacttaaatgacttctgaagctaaattgggaaaatgcctactatgattaatttgctatcctgaaatattatcaggtgaatggagaatttcgatatatattccatctcaaatattcataaagtaaaacctgcttttctcttcccaatcactgatattcttgattgctttatttcagatagcctatctccatctcctgctgtcctgtgcaaaacagacctttcaaaggcttaagttattctaataactttttatggagcagcaacagtagacacccatattataaatgaccaacatttgacttcaaccaatatttaactttgacactaccaaagtaacaaacttttcttatttcacttatttcttaagatcttgaattataactttctatcttttggaatgaaattaatgtttgaaaaccactgtatacaaaccagcataaggaacagtgtctctcatataacctactagacaagttgtaacaactctcaatgttaacctttttctttgtctaaatatttaataagttgtg

SEQ ID NO: 852421 - DNA, 592 bp, Homo sapiens
gtctcaaaaaaacaaaacaaaacaaaacaaaaacacaataggaagatttccctgaattttctaaataaactgctttagctttaaaacagtgcttagcttacaaatagaactaaacagcaaatctactggtacaaatgtatgtaaagcattatcatatccaattattcctaattataatacatagattgatcaaaatgtcaagctatgaaaaacccttctgttatatcatagtacagtgtacacagattcagactaagagtcagataatgtatattctagtattagctatgctagtgcctagtaatgtgccattgagacaagtcacttaatctggggttcatttttgttttttttttttgaagatggagtctcactctgtcacccaggctggagtgcagtggcgcagtcttggctcactgcaacctccgcctcccaggtttaagcaattctctgcctcagcctcccaggtagctgggattacaggcacccgccaccacrcctggctaatttttgtatttttagtagagacagggtttcaccatcttggccaggctgaccttgtgatccacccacctcggcctcccatattgct

SEQ ID NO: 852422 - DNA, 586 bp, Homo sapiens
ttttatagcagcttctattagtcaacagaaacgcttagaaaactgcctcctgtatgcttcgtattaggccattgagctggcaaaagagggagaacttaaaatygtaatttaacttctttaaaatatttgtttagggagatagtcatataatgaattttcataaataatgttaaaatttaggaaatcttcagtaaactgtattttctgagtccataagaatatgtagtttaagttctaacattttaagatttggtttcatattttgttcattggtaggattggagattggattatattaaaaaattaaactgtttttagatcattctcaattctatgtgtctgtttttataacaattagaattggcctttaaaattcttacccactgatatcataatacaatttttgtaaataatatgtatttttgcattttccatcattatttatcaccaggcttgaagtagtattaagaaaaaaacccatcttgtatttctatcttgacctttccctcagccctctcacaaaacctgaaaacacgggtctttattttttatgctcaaatttataataaacaaaggttgataagga

SEQ ID NO: 852423 - DNA, 519 bp, Homo sapiens
ggtcgtggaattgcttagcgtgttgcatgggaaattctgtstaaggaagtaaagagctttttgctgaaaagccacctagagcccttgggcaggggcattttattttcccatagataccatgttaccaattacataaagaagagtatagacttcttgttagttgataaatagagattgcaatcatttattaggttattttatggtatttgttaacgatatttaccttcctaaattgattcagcataatccttagaacagctttccttcatttctggaagacatatagataatgtggtacttatatgaaagcttacatgtcactgaaaaactgtgatttttgccttagctcaacggagcagcaagattatattaacatagactttgggccatttgagttcccatagggtatagagtgtagctgatatgacatgacttgcctccaacagttgttttaacaagatatccttcatatacagtatattgagctgaaaggcataactgagtaatgttagcaagaaa

SEQ ID NO: 852424 - DNA, 519 bp, Homo sapiens
ggtcgtggaattgcttagcgtgttgcatgggaaattctgtgtaaggaagtaaagagctttttgctgaaaagccacctagagcccttgggcaggggcattttattttcccrtagataccatgttaccaattacataaagaagagtatagacttcttgttagttgataaatagagattgcaatcatttattaggttattttatggtatttgttaacgatatttaccttcctaaattgattcagcataatccttagaacagctttccttcatttctggaagacatatagataatgtggtacttatatgaaagcttacatgtcactgaaaaactgtgatttttgccttagctcaacggagcagcaagattatattaacatagactttgggccatttgagttcccatagggtatagagtgtagctgatatgacatgacttgcctccaacagttgttttaacaagatatccttcatatacagtatattgagctgaaaggcataactgagtaatgttagcaagaaa

SEQ ID NO: 852425 - DNA, 637 bp, Homo sapiens
caacatggaaatgtcacaataaaataagctgaaaaaagaaataaaactatttccacttttctatatatgtccaagtgaacaacraaaataatttagtctaaaacatcttcagtgcaggatcagtagagttgaccttactccttacttcccataaggtattactcaaatcagaaaagcatatttaaaaaattattctcataatctctttagaataggcaaagaaaaaaatgttaatttttagctaatattaaaatgttatgctgtcacattatttggggaggatgctaagatgcatttttatggcagagacacagataaggaagggaattgtttatttatcgagaatatttgttcaaagattctatttcataatatgcttttagtatgaaaaacatataaataattgtggagaaatataaatttgttttttgttcctgctaaagttgtagagatacatttctaattagtatcctcaatataaaataagctactcaaatgtcacaattgtaataaaatattataccattcatttgaactaattcttcagacaatgatcacatccttttatgaaaatcattattaatatagtctttgaaatgtgatgtatgacatatcttaaatgactaaatgacacata

SEQ ID NO: 852426 - DNA, 535 bp, Homo sapiens
caaagttttcatgaggaaatactgcccatattgtgacataaatattgcattttatataaaaaggtctggaccaaatcctctttctgcattgcacatggataggattggtgattttgttagattgagtttgtaggtttagatggcatttagtatatcagactgaaaaacagttcttaggatagaagaactagaagtactagattagaatgtccactgtgccacttctgaatctcagctttcttatctgtaaaataagactaacgtcagccttgtagactttgtaaaaatcctggcctgctaatggaaagtaaatgataggtcgtggaattagttcatgaatagtagacaaataaatgtttacttctcagaaacacttttttaaaaaggtacactaaaaatamtttttagtactctgctataattcagaaaagaatgtcacataggattgccttttctaacttaataagtgaaaagaaaaccacattactaattactgaaaacaatatgaagctaatgagaagagcaaagactcgct

SEQ ID NO: 852427 - DNA, 616 bp, Homo sapiens
aggtccgacatttttatgttcaactctattctkttgtacccactgcctccaatttgttgataagtggcttgaagggttatcgtgagaagtagaggatgttgcttatggaaagtgccttgcagagggcctggtactggatcatcatcataatcatcatcagcagcagcagcgtgaaaatcaaagccagtgcttcaatgcgtacaaagattaggcaatgttctaggtgttttccctgaattaagaactattatccccattttacagaagaggaaattgagacacagagggcagttggtacatagaagttgttcagtaagtgggagttatttttactattaccttcacctgagtccctgagtagtttccttgttttctccaaatgtgtatatttcttgcacattaggagtcacaaattatggcccaagggtcaaaaccagcctacagacacatttggtttgggctgtacatggttttagtaaccagagattttcacataaaaatgcccttcacatgtgtgcacccacccccttgcccctctaaacttcctaaatcccacctatttttcaaagcaaagatcaagtgccttcccactgaagtcatccctaattatttgcac

SEQ ID NO: 852428 - DNA, 646 bp, Homo sapiens
aattgcttcttacttgaagcttgccactcgtagcttctgcctgttcactctgctctggaatgcaagcccttttggccctgcatggtgtatagcattcttctcccccaggctgtgagtttatgtgactaataaactgctgtcaaagtgatccgtccagggtcaagtgtcatgtgtttggccatctctaaaacccttggatgggactcaaggcctcacaatgggtgaagagaaggcaaataaaaccaaaagatattttatgctactttcattatttcatcaactaacttaatgttgttattatcatgtagtgaaaaatagaaatcacctcttactccctaacttccttcacccattcatcagcaggttttttcagacttttattattgccaagtaataaagacataagcattcttatacattgcatcagttttctcttgtggcataataaataatcacaaacttcgtggcttaaaatagccttagtacatagttctgtaggttagaatctactgcatgattggattctctgctcagggtctcaccaggctgaaatcaatgctgtgytggccaggctgtgttcccatctgaagcttaggatcctctttcaaggttactgattgttggcagagttcattcccttcaggtc

SEQ ID NO: 852429 - DNA, 338 bp, Homo sapiens
ttgtgagcttatacacactgagtaacttactgagcttcattctcctaatgagcaaaatgaggatattgatatccaccttgactttattcaaagttttcttaaagttcaaatgagctaaagtttttgaaaacattttgtaatgtgttaaacatgctataaatatagtactactaatgatgcattttacttatgtaatggctaccgtaaattatataatattgtgrgcccttcaaaataattattgcattttgtctttacattatctctattatacccactttttaagttcggaaattgaggcacagatggagccaaagtttaaaactaaccatggtggc

SEQ ID NO: 852430 - DNA, 520 bp, Homo sapiens
gcccatattttaatcaaaaggcaagctaaactcatttagaattctactacaacagaaaacttcagtcggctaaattctagataatcagctttggacagattatttagctttattgcgcctacgttttctggtatatgaaatgggaagataaaaatagtaatatattaattccttcaaaggaaagatgagaaatgatacatgtgtcagcattttgtacactataaaatactgtgcattttagaaaactttattttaaaagtatttcatacaaagaatggtaagtaaaatgaataagtgatatgcttctgaaattttacaagattttgaatatcactactcatttctttcctacctagaaaaatgagaacatgctgacctagttttcttcaatttacaatattcttaaatgttaagtcaattcttttatatctttacctcattttttatactgtggagtgaccacaaacaaacagtaatttggaagycaaaaattcttagaagatgtattagtttatgaaat

SEQ ID NO: 852431 - DNA, 612 bp, Homo sapiens
attctgaaaggtataagacagtagttttaatctgcatttctctgataattagcggtggtgagcattttttcatatgcttgttggtagtttgcatgtcttcttttaaaaaawgtctgttcattttctttgcccactttttaatggttatttgttccttgctgttgctgagttgtttgagttcctcattaattctggatattagtcccttgtggaaaacagtatgaagatttctcaaagaattaaaaaatagaattgccattcaatccagctatgacactactgggtatctaccccctgaaaaaaattatgtgcaaaagataacctgcactcacatgtttatcgcaacactattcacaatagcaaagacgtggactcaacctaagtgtccaacaatagataatcacagaaagaaaatataaaatgtatatacaatagaatactactcagccataaaaatgaatgaaatcacatattttgcagcaacctggatggaccttgaggcttttatcttaagtgaaacaactgagacacaggaagtcaaatattgcatattttcacttagaagtgggaactaaataaggtatacacacggacatagagtgtggaataata

SEQ ID NO: 852432 - DNA, 469 bp, Homo sapiens
atcctcctttcaaataaatacttctggaatttttctaaatctgtttttactctgtaaatgatcacacagttttgatataaaattccaatgaatattcagaatttggtatttatttgcatgaaaattctaaatgcagaagataatgccacttgtctgtaggccaacaatagcttaaatttcctttatgaaagaaacacctggtaagtgaccgggattaaataccggtataagaaaagggaaaggattctcaaacctctaagaatggtctccagacagacactatcctggtaagcagttaactaatctccttactacatatggccccccaatccctgactgtatctggccaattccactggcctgcttctgttacctaccatgtaacrggggtcccacaataaagtgctaaaacatcagtggtgtctaagactcatttttgacacaaattggaccaaaggggaaaagttat

SEQ ID NO: 852433 - DNA, 585 bp, Homo sapiens
aaaaagcatccctatttctccacatcctctccagtatctgttgtttcctgactttttaatgatcaccattctaactggtgtgagatggtatctcattgtggttttgatttgcatytctctaatgaccagtaatgatgagctttttttgatatgttttttggccacatatatgtcttcttttgagaagtgtctgttcatatccttcgcccactttttgatggggttgtttgttttcttcttgtagatttgtttaagttccttatagattccggatattagccctttgtaagatggatagattgcaaaaattttcttccattctgtagtctgcctgttcactctgatgatagtttcttgtttcttttgctgtgcagaagttctttagcttaattagatcccatttgtcaattttggctttcattgccattgcttttggtgttttagtcatgaattctttgcccatgcctatgtcctgaatggtattgtctaggttttcttctagtattatttacatttaagtcattagtctaggtcttacatttaagtcattaatccatgttgagttaatttttgtataaggtgtaa

SEQ ID NO: 852434 - DNA, 568 bp, Homo sapiens
gtctcttagcatcattgtgccttatgttatctaagctctcttttccttgatgattaattgttgccagtttgtctctgatactccagaattccaccattcccgttttatttgggaatcycagtgtaatagcagatcccactgtaattctgggcctacaaaaaaagtcaccgcagagctgttctagattgctccggatgccttcataaatttctcacagccttggtgaaatgaatgctctctagaccttcccaagggacatagtgagggggtatgtttaggtcttccatgataaatccactccagcgttccaatctccctatttctttggatgacttcctgaataccttctgaaattttaatttcaactgttgcaggtcaatcttgagtggagaattccatcaaccagacaagcaaactgctagaaccattaccagcatggccactctatccagaatctatgctcatgatccaataaatgtattctgattcatcttatgttctttatactttgttcgcatatcccctggtttttgtcactataaattggcaaaattatgcaactctcttg

SEQ ID NO: 852435 - DNA, 526 bp, Homo sapiens
cccattctgtaagttgtctgccttgttgattgtttcttttactgcgcagaatctctttagtttatttaggtcytgcttgtcaattttttttttttttttttttgctgcaattgcttttggagacagtcaaaaattctttgccaaggccaatgtcaagaatagcatttcctaggttgtcttcaaggatttttatagtttgagttcttacactgaaatatttaatcaattttgagataatttttgtatacagtgaaaggtagggattcttttatcatatatgaaaattaatcctagcttcaattgattgatcctagcttcaatcttctacatatggccagttatcctagcactattcattgaataggaagccttttccccattgcttgtttttgtcagctttgtcaaagatcaaatagttatagttgtgtgtctttgtttctcagttttctattctgttccattggtttatgggtctgtttttgtatcagtgccaaactgttttggttactgtggctttatagtatag

SEQ ID NO: 852436 - DNA, 526 bp, Homo sapiens
cccattctgtaagttgtctgccttgttgattgtttcttttactgcgcagaatctctttagtttatttaggtcttgcttgtcaattttttttttttttttttttgctgcaattgcttttggagacagtcaaaaattctttgccaaggccaatgtcaagaatagcatttcctaggttgtcttcaaggatttttatagtttgagttcttacactgaaatatttaatcaattttgagataatttttgtatacagtgaaaggtagggattcttttatcatatatgaaaattaatcctagcttcaattgattgatcctagcttcaatcttctacatatggccagttatcctagcactattcattgaataggaagccttttccccattgcttgtttttgtcagctttgtcaaagatcaaatagttatwgttgtgtgtctttgtttctcagttttctattctgttccattggtttatgggtctgtttttgtatcagtgccaaactgttttggttactgtggctttatagtatag

SEQ ID NO: 852437 - DNA, 646 bp, Homo sapiens
gctgtgcgagactttctggcaggtcttgcttaactagctgggttttccatcacaggcagcacagtcagtatgaatcatgccttawaggcgcgattgcctgtgtggatttatggcttttcccacttccatttcagacatggccactaaaagaaagcaggagggtccagttttcttttctgtaaacaccatgtatttttctttcctctttaaagaaaagaagctctttataacagtgtgcctttccccaacactgcagttgtgggcagcagacatcttatgaatggggctactttcagaaacagctgtgccatttttctgagtgacctgaccagctggccaggattcctgctctctgacgagaccacagagaggagagagagtcgttatttttgaagatctgtgtgaagaagcagcaaaggtgacatactgaaaaggtctgtgtcctggctctagaaaaaacaaagttggccacttttctttatgcagcgaagatatcatagctctagatgaaaggcttttcttcaagatgttccccccaccactgctgtttcgaagtaggttcaatgactgagattccattgctccatagaccaaaaactaaaacgagcgctgccacacagctaagcgatgtgtgcatagagattct

SEQ ID NO: 852438 - DNA, 536 bp, Homo sapiens
ttgctaatccagtgtttatattagagaatataaaaatttattgaggcatagactgacttttatttcctacccttcatggtaccaagcctagtgacctttatacaccaatgctgataacaggcattttttttatggcttgaaccagtattttaatttgaattatgaactgtggggtccttcatctaaatattaaaactactaaatcagctacagtaattggactaaatatgtggagcatggaaaaccattagtatgatgaaggtggctgttgcaggccacagaaggctggcatgcttttttacaaaaagccaggtgctgggccatggaagtaggaaagtgatcatgcaaagtacgcctccgtctgcagcacgatgaggctgtgttatcatggtttatgttatcaaaattggctgcagccaacctaggtgagtacatttcccttcaggaagttaagaaacttcatggcacaaatccacgaagacargcccttctctgtgactttttttttccataaaattataaaagccatatttatg

SEQ ID NO: 852439 - DNA, 370 bp, Homo sapiens
atcatgtaccactttttgacatttcttatgtcatatttttctttaagatgatttaatttgaaacttaaatacatttgttttaaaaaagactttatcactcctgtaaacaggaaaccagcataacttgctataaacagagaggaattgtgtgctgggtgcggtggctcatgtctgtaataccagcactttgggaagccaaggtgggaggattgcttgagcccggaagtatgagaccagcctgggcaacatagcaagaccccatctctacaaaaagtaaaaaattagctggaggtggtgctgcatgcctacagtcccagctacttgaggggctgcggggggaggatccsacctcctgagtccaggagttaga

SEQ ID NO: 852440 - DNA, 506 bp, Homo sapiens
ttaatgtttccttctattgcatggtcccacgatatgctgtttttacatagctataatcataactattagagataggattttgtactgtacttttttcacttgaagcattttttcaggttgatccagttttcataattataagttttaaaggctgcataatttcacctcatgtgcatataccataattcccataactatttctccattgctaaacattttgtttatttccatttttcctgctgttataaataaattgctaggggaaaaaaaaaaaccctggaaggcacaaattaaaacacagcaaattgtcttaagtgatagaattataggtatttttaaaattctgtctactttcctataattgcttttaaaacaggaaaaataacagttttatgcactaatttggytagcctaaatagcacccagttgttcaatcaaacactaatctagatgttgctgtgaaggtattttatagttgtgattaatgcctacaatcagttaacttt

SEQ ID NO: 852441 - DNA, 656 bp, Homo sapiens
aaactccttatggtcaaataggatggaaataattcacattttgtttcttcgtctagaagaagcaacagtccagctgttaaagcgtaggccatagcattgctatgttattattgcttatttcgaaactgtttacatgcaggaatgtgtagcatcccacaggctggaaataaaaaatgtgctgaagggagcttggatgaatcccacctgtctcaaacttactttgcaaaggaatgtctgtgacggggtccacctatgtcagcggcaacagcaactttagtaattgtttagagcttgcaaggaagagtgttttatcagtgacactgtttaaaaattgtcagcatttgatgataataagcagcagactgacttggagtcagttttattattgtctttaaattctcaccccattactgcctgcacttgctctctctcacctccctgcccattatacaccactgtgggtggaccattacaggggaagctggtgatacacattaactccaggaacactgtactggagacacagcagagggaaggacacgtggtattatctatccaaaagatcaacaaagatgaaaamagacagcttcctactagggaagtcttagtgtggctcattgttatgccaatgccctgtgttcaggatccagcaggaa

SEQ ID NO: 852442 - DNA, 597 bp, Homo sapiens
aaggccctattgtattctgcaagaaccctcccccagccagtagtaaaccctaatcttagtcttacaagaatgctgaaaaactgcactctgctttttagaggcaggttttccatttgcattttaraatccctgctctgaagaaattcagtgtgcagcaaaagtcctcaggtgaaaacaggctgtcttgtttgaggccctttcaaatcttccactaaaactcttattttctctatcccgagcagtcttttgccagcctttgcactgcattttgcaatgggttctcagcctcctgcaaaatgccccgctggtaaaagcggctgcagaagccagctcactctcctcacgtttctctctccagtgcattagcccttccagtgttccttgcctcagcagctatcactttccctcaaataggtaatttctgcattgtatttggcttttctaattattctagttgagggtgctggtctgctgacagcaacttcatttacccagaagaggaagtaattataaccggaagggtagagggataggaatacgtcaagtgacctgctctaagaagcaccagtgatctccccgtcaccaaatccagtggtg

SEQ ID NO: 852443 - DNA, 392 bp, Homo sapiens
aggtactttccacattactgagaaggctttaacttggtacaatctctaagaggggaaatgtagcaatttctgacaaaattgcaaatgttcatatccttgtacccagcacctcccattctaggactttattcttgatgcaaatttgctgatatataaaataatacattaattgtagcataatttgtagtagtaaaatttggaacaacatgaatgtccatctataggggaactggataaataaggtatgctttattcatgcaatcgagtgtagtgtagtcataacaaagaataaggtagttcttaatgtrcggatacaggacattcttcagatgctaagtaaaaatatcaaggtgcagaacagtgtgtgtagtatgctaccccttctgtaaaaa

SEQ ID NO: 852444 - DNA, 618 bp, Homo sapiens
gatagaatcctgacattaagtgttgcgggaatcaggaggaccagagacgccacagggtaaagcagaagtattttattcagtgcactcagacccagtggattatcattcagagactgggcccagaacaaagacagcacttgacctttatacacacttcaaaaagggggttggctagcctgaaacaagcttacagtggtgcgaagcaaaagcaaggatacagaggcaaaacaaaggcagttaatcaaattgtgacaggtgcattactcaggattacacgtgacatcttgctatgtggcccagatggctattatctaggcttgctctagtgccttgcctgggcttatctcataaccttcactatgtcgcccaggtggctgtagtccaggcctgctcagatagctcatgaccttcactgtaccgcttagataaaacagaatgcttgaagttaccagttacagagaacaggaatctataaactcataccataagagaaacgaaaattgcttttctcctccctrtgttgagggagtgctgggagagtctccagagcacattcctttgtgtcctaacttctcagatagtgtttatggaggctcttcctgggtctgggctgtgcct

SEQ ID NO: 852445 - DNA, 589 bp, Homo sapiens
gcatatgttcattgcagcactattcacaatagcaaagacatgaaatcaacctaaatgcctatcagtgccagactggatagagaaaatgtggyacatatataccatggaatagtatgcagtcataaaaggaaacaacatcatgtcctttgcagggacatgaatacagttggaagccattatcctcagcaaactaatgcaggatcagaaaaccaaatatcacatgttatcacttgtaaatgggagctcaatgacgagaacacatggacacatgcaggggaacacacactggggcctgttgggggtggttttgggggagggagagcatcaggaagaatagctaatggatgctgggattaatacctgggtgatgggatgatctgtgcagcaaaccatcatggtgcacacttcctatgtaacaagactgcccatcctgcacatgtacccctgaaatttaaagttgaagaaaaaaatttccctctatatttagtaagatttgatagtctagataaagaaaatctactacatgtaccccatggaatactatgcagccctaaagaagaataaaatcattttctttgcagcaacatgg

SEQ ID NO: 852446 - DNA, 555 bp, Homo sapiens
ctggaggaggaccaggtttatgagggaataaacataaatttgagctaaaaaatgtgagatatctaatggaaatgttaagtaggyagttggagaattgaattctggaagcaaatatgggcagaacaaaaggctagatgagagatgcatattttggagtcttaagtgtatagatagtgtagtgtataaataatggtcagaatccaggaacaatgctctgggatctttatcatcttttcaggtagactcagagatctctaccagcacctgaccaaaccactggcttacaattaggtaaaagcaagaaacacatgaaaaggagatgccaggagataagaagaatggaggagcacccagaattcattctctttcctcattacatcttctttgaccttcttgttttccctctccctgagatctaatgatttcaagagaaggtcccttactgagaactggaaggtgaaggggggcatgcggggaacaggatataaggatagcagggaaagtttgaggtctcagcaaaaaataagtagagacacatgatataagccttaaagg

SEQ ID NO: 852447 - DNA, 588 bp, Homo sapiens
aatgccattagcctgttgccctataagtataaagtctggcctggtgagcaggaacagtcatctcccgctccatycaggtttacagaaaatattcagaaggagctattgacaagcaatttttccttgtaatgaaagggagacaaagagtacattactagtttcagattaaaataatggagcataaaatgcttcaccttaaaaaattatttcatcttatgaaataatttcatgctatgtgatttttctgccgatgcaagtgtttggctggtacaacagcgtactaacaggtatattctaacttgaacaatctgaccatttttaaaaaacatgagtgagaaagaaattcattcagctgacataactggaattctaatttcagatcttcatggcctcactaaatatttctcataacatttatggtttagtttttacatcatcagcaataatgtgaaaggtatcaatctcttctacaaggttgccacaagaaattaactgataattgtaataaagcaagaatttaaatatagaagtttaaattattgataaataatactgcatttatttgtgttttagaacccaatgtgtcct

SEQ ID NO: 852448 - DNA, 537 bp, Homo sapiens
ggcattccattctgtttttctcatctggttaaaaaataattcagaggatttttttcaaacttaaagaaattatggataatcccttttttctatttttacttgtaatgmatttgtacttcaataagtcttagagtatcaatttattctttccttttaaaatatgtgcagatatatgtacaaggattttgcccttgttggtaacagcagaatattgctcataagtagggaactggttaaacaaattgttatatgtccaaatatgaaataagttgatgtagaactacctccaagatatattgttaaattaaaaaaaagtggaatagcaagtatattatgctaccctttgtattttgtttttaaaagaatagatatataaatgcttatatatgcaaaaaattctaaaagcatagacacaccggattggttagagtatgttcttggaaggaagtgagatgggtgacgtgagtgtttgccctgctagagagactaacttttcattatatattcttcaatattgttggagtgtttaccatttat

SEQ ID NO: 852449 - DNA, 583 bp, Homo sapiens
ctgcttgctaatgtcacggcctgaatagctttgcaaggcgtgggaggcacgtttgcsctgtcttttcacatctctgctctaattgttatggttacttcttggtacatattgttatttggaaataaagtcaaaacaaattctttgttgtttttcttttttaaacaacaaaatactaagtgttcacctagaagtcagatgatgttattaattgtaattgtgtggcctggctgagtaattccccatgaatcattaaccacagagcatctgctgctcctgtgtgcggagagtgatgtatttagactctcgaatcctgtacattgctctaaagttcagaaaaatatgtccagaaagaatttcaaaagtttaaggaaaattgtgacgttgcagagccccttattgaactttcaatggctagaatatgaagattatacatttatttttcaggcttgtttgttctgtcaattaatgttcaataatggaaaaatttggtctaccctctccttctcttgtcaatcaccagtttgaatgacagaaaaaaaatactcctaagaaggaataaaaccataacaatgcagtagaaaat

SEQ ID NO: 852450 - DNA, 512 bp, Homo sapiens
acacataaaggaatcattcaccgtgataaacggagatttaccccctggatgcaaggacgattcaatatatgcaagaaatgtaatataccacgttgacaaaataaagaaataaagaataaacaaaacacaattatctcaatagaagcagaagaaatatttgacaaaattcaacactgttttaggataaaaactctcaacagattagatatagagggaatgtacttcaaaacaataaagggcataaatcacaatcccagagctaacatcatactcaaacataaaaatagaaaagtttttcttctaagatccgggacagtacaaagccagtgctgttaggtaagggcaataaaaaaaggaatcctaacagggaaaaaataaaattatctgtttcttgataacataatcttayatatagaaaaccctgaacgatccaccttaaaactgttagaactgataaacaaattcagaaaagttgtggttcacaaaatcaaagtgcaaaaatcagcagtttc

SEQ ID NO: 852451 - DNA, 482 bp, Homo sapiens
tccttttcagacaagtaaatgctgagggaattcattacaaacagacccaccatacaagagctcctgaagaaaaccctaaacatggaaagaaaagaccattaccagccactacaaaaacacacctaaggacacagatcagtgacactataaagaaaccatacaaacaagctaacatcatggtgacaggatcaaatccacacatatcatactaaccttgaatggaaatgggctaaatgccccaattaaaaagtatagagtggcaatctggataaagaaccaagacgcattggtatgctgtcttcaaagacacatctagcatacaatgacacacgtaggttcaaaatatagggatggagaacactctaccaagcaagtggagagcagaaaaaagcaggagatgtaatcctaatttcagacaaaatagaytttaaaccaaaaaaagatcagaaaagagaaagaagggcatgacatattggaaaaag

SEQ ID NO: 852452 - DNA, 478 bp, Homo sapiens
aaatatgtgttatttatgttatcagtaagccttccgatcaagtaggctattagcagttaaatttttggggagtcaaaagatgtacacagattttctactgtgcaagggtmagtgtccctaaccccagtattgtgcaaggattgactgtattattccaaagagatctatttaatttctagctgaatcaatttgtagtcattacaaaacattttactacaccccaggtgacgcctcccttgagatcattcaccctcttttctatttgcaaagttactatgtatttactcaacacacgttttctacctgtgtctgatttatactcagcactagaacaaaattggaagagcagaaataaaaaataagaagcaattcgagccctcatgaggaatataatgtatattcattatatatatcttatacacacaataatgaatgttcacaaaagtcacaaaattaactaccacaacaaatagaaatt

SEQ ID NO: 852453 - DNA, 469 bp, Homo sapiens
tccaaaatatactttattttcttctaagttctccaatagagcacaacagtggaaatatgataagtaggaactgaccaaagtgctttgatatcgagaacacaataakaaatcagaaagatttggatataataccatgtagcaataaaagctaagtcttgataatctgtctaatgttttaagggaagtcagatatcactatttttttaaataaatgccactgacttttagatgttggtaactaattatttttagttcttttttaaattctatgtttttaaagcacagattgtgccatactttgccaaatctacaaatgaggtctccttggtggacaggaggcctctttgttaataacaaaagtaaattttgacagccagatgaaatttgctatccttctggtgtctatgtgacatgtgagtcccatttctcataccaaaaaggaaaaacattgccaaaccttctttgattt

SEQ ID NO: 852454 - DNA, 621 bp, Homo sapiens
catgcacctgcagtcctatccacttgggaggctgaggtggaacaatcttttgaactcaggtatttgaggttacagagaactatgaatgtgtcactgcacttcagcctgggtgacagagcgagaccctgtctttactattaaaaatatatatgtacttgatctgcaataagtatgtgaaaagacactcaacatgattagttattaaggaaatgtaaattaacaccataatcagatactatcacatatcagaataaatattaaatgactggcagtaccaactgtagatgaggatgtgcagtaactggaattcacacactttcatatactgtttgtaataatgatgagagtttgaattggtacaactatttagaaaaatgacagtatttattgaagttggagatacaaataccccataatgctgcaattctactcataaatatatactaatagaaatgtgtacaaatatcctgaaaaggcatatacaaggatgccattggcatcattaattacatcagccctcaaatggaaacaattcaaatgcygataaacattagaatgatttttcttgatggtggtatatccacacaattgaatatataaaacagaataaaagaatatact

SEQ ID NO: 852455 - DNA, 543 bp, Homo sapiens
tatctgaaatatctaagatgacaacttttgagactagtacctgctcttgtccgcccaaatacagcaggcatcaatggggttaaaaagtaaagctcttttactataatttgtatgcaattaaaagcatttaaaattaacattgggaataacagttttattacatttagaaatacttcctaaacatattcgggcaaaaaaatgtccctcacttccctaaaggcctgaaacgaagcaaaaggcattttcacaaggtgttcacatgcagaaggcacgtggttttcggcatcagctggtgtgtgcacattcatcaagagtcacacttccaacagcacctgctatgctcagatttctacaacagcaattaacggcagaaatggtagaatggtaaggacaagcttattgttaccctaaaattattacatattgccatatgttatttktatttgttaactatttaatcaacatcttatagtttgcctttttaaagtataggttaagttgtttgttgaagtaaggcactgattttcagtctacactgtgtta

SEQ ID NO: 852456 - DNA, 646 bp, Homo sapiens
atgcatggtagaagagaacaagcccatctgctgactgtgcattgcacaaaatgtcagcaaaagggtcagcggcagctgaaacccactaccyaagctttgatcttggcctatagaccacatctacctggtggaaaatatgacttcttcttcacacaaaggcatccttcattttcctagccatgttccctggaactacaattgtctaaaagtttgtttctactttgtcctttttctagagaaatctctcttcttctcactctccattttaaacaacaacacatgttaagtatagccctggatttggatgaatagctgccatctctagacccagctatagcccaatttatgctacggagtgcttacgtactataaatggggggaaaaatctgagctcagaaacctgcatccttgtgcttagttttccagtaaccctccaaagaactttatacttgactcttaaacttcttcatgataatgatgatgccagaggtctaacacagtttaaattagatagaatgacagatttaaaaaagtactttgaaaatgttgcaaaaaaaaaaaaatcattattgctaggtgaaggagattttggttttggtttggtttggttggttggttttctttgacatattttttgattctcaac

SEQ ID NO: 852457 - DNA, 644 bp, Homo sapiens
ttattttaagttcaggggcatatatcaggctcgttatataggtgaacttgtgtcatgggkgtttgttgtacagattatttcatcacccaggtattaagtctatacctggtagttattttcctgattctctccctcctcccacccgccaccctttccttccataagccccagtatgtgtttttcccctctaaagaaaatatcacaatttatttgtttcttgttgataaacatttgagtttaaaaaaaatcgttattattttaaataatgctgttatgaatattgctataggtgtctgtgtctacaaaagtacacatctaaggatttctctaaaacatgttcctgggaatagaattactagggtaattatagagtattcagagcttcaatttaaaagtataaagctgtattattttatttatttatttatttattttgagatggagtctagctctctctccggggctggagtacagtggtgcgatctcagctcactgcaacctccacctcccgagttcaagccattctctgcctcagcctcctgagtagctgggattacagagtggcataccactttaattttctccagcagtgtataagaatttctttggatctgcatccttgcctatactttatatagttagac

SEQ ID NO: 852458 - DNA, 598 bp, Homo sapiens
tttattaccagattttatgtatggaaggcaaatagtgtgttttaaattctaccagacttacattaacatatttttttttgagacggagtctcgctctgtcatcaggctggagcacagtgcatgatctcagctcactgccacctctgcctcccaggttcaagcgattcttctgcctcagcctcctgagtagctgggactacaggtgcgcaccaccatgcctagctaatttttttttagtagagacggggtttcaccatattggccaggatggtctgtatctcttgacctagtgatctgcccacctcagcctcccaaagtgctgggattacaggtgtgagtcacccgcacccggccacattaacgttttaatagaagtttagtcctttgcttttctaaattttctcccattgcccctctcctcattgcccccaaagattaccacttttctatcagtttaatatggaattttacacaaaaaattattttcattytaaaacagaataaaaaatagtacacatattaaaaaagatgaaattttgctttctgtttttcattctgttactgtatcataataaaattatttacatttgtgagaata

SEQ ID NO: 852459 - DNA, 527 bp, Homo sapiens
ttaaaattatcagaccaggaatttaaaataattatgattaaggccaggcacggtggctcacacctgtaatcccagcactttgggaggccaaggtgggaggatcacctgaggtcaggagttcgagaccagcctgaccaacatagtgaaaccccatctctactaaaaatgcaaaaaaaactagccgggggtggtggtgcatgcctgttatcccagccactcgggaggctgaggcaggagaatcacttgaacccaggaggcagaggttgcagtgagccaagatcacgccactgcacttgagcctgggcaacagagtgagactccgtctcaaaataaataaataaataaaataattatgattactatgttaaggtctctaatagaaaaaatagactrtatgcaagaacagcggggtaatataagcagagagatgaaaactctatgaaaagaaaatgctcaaaataaaaaactattaacagacatgaagagtgcctttgaaaggctcatcagtagactggatatagctgagg

SEQ ID NO: 852460 - DNA, 610 bp, Homo sapiens
agctcttctctaaatgaaatatatcactattcttttttttttttccaggrcagttcactgtgttgccccagctagagtgcaatggcacagtcttggctcactgcatccttgacctcctgggcccaagcgatcttcctatctcagcctcccttgtagctgggaccacaggtgcacgtcaccacacctggcaatttatttattttttttatttttttgtagagacagggtgtcactttgttgcctaggttggtcctgaattcctcggctcaagtgatcgtcccacctcggcctcccagtgttcagtgttctttaggctggctgtgcctagcgattccctcccttaagagaattcttgtatttcaccttctcagaaataatcaaactacagaacaattccattgaactgttacatacctcatggcattctggtaaagataaacctaatcactttaaacatccatagcctaagaattacagtatatgaaagaacagtcttgccaatacaatgaatatttaaaaattttagacaaaagatagacccgattgtttatataatttactactttgtatgaaagtcataatgatgctgtcttttttaagatggagtctc

SEQ ID NO: 852461 - DNA, 619 bp, Homo sapiens
gcatttttttttctcaaagcatgtagaattaagtgtatgttcttcatgtttgccctgaaaacyctcacatttagcattatccacctttccagattgatgctccatcattacattttcccttgctcttcttccaaacagtagtcttcctgctatgctatgtctttcttcaaataatttgttagattttcttcagtctactctttctcccatctgccttgccatttataaaagttttacacattttttaaaataaagctcaaattctacttctttttgaagagatgaaacaaaggcccgtttacttaggaattttaacctgctgatgttgacatgttgaaaggattaaaattagcagagataggcaaagtaggtagaaactgttgtaacattaggcatgaatgttagcaattttgattctcaactcctctttgctagaatttctctcttccttctccacacataagcctttgtgtccttgatcagcctggtattaaatctacttttatacctctgtagctatgctgacttatgagctcctgaataagttcatgtgccttctgcttctgtgaccacagtgcctagcagagggctctgcacagtgcatgaacccagtaaatct

SEQ ID NO: 852462 - DNA, 619 bp, Homo sapiens
gcatttttttttctcaaagcatgtagaattaagtgtatgttcttcatgtttgccctgaaaactctcacatttagcattatccaccttwccagattgatgctccatcattacattttcccttgctcttcttccaaacagtagtcttcctgctatgctatgtctttcttcaaataatttgttagattttcttcagtctactctttctcccatctgccttgccatttataaaagttttacacattttttaaaataaagctcaaattctacttctttttgaagagatgaaacaaaggcccgtttacttaggaattttaacctgctgatgttgacatgttgaaaggattaaaattagcagagataggcaaagtaggtagaaactgttgtaacattaggcatgaatgttagcaattttgattctcaactcctctttgctagaatttctctcttccttctccacacataagcctttgtgtccttgatcagcctggtattaaatctacttttatacctctgtagctatgctgacttatgagctcctgaataagttcatgtgccttctgcttctgtgaccacagtgcctagcagagggctctgcacagtgcatgaacccagtaaatct

SEQ ID NO: 852463 - DNA, 619 bp, Homo sapiens
gcatttttttttctcaaagcatgtagaattaagtgtatgttcttcatgtttgccctgaaaactctcacatttagcattatccacctttmcagattgatgctccatcattacattttcccttgctcttcttccaaacagtagtcttcctgctatgctatgtctttcttcaaataatttgttagattttcttcagtctactctttctcccatctgccttgccatttataaaagttttacacattttttaaaataaagctcaaattctacttctttttgaagagatgaaacaaaggcccgtttacttaggaattttaacctgctgatgttgacatgttgaaaggattaaaattagcagagataggcaaagtaggtagaaactgttgtaacattaggcatgaatgttagcaattttgattctcaactcctctttgctagaatttctctcttccttctccacacataagcctttgtgtccttgatcagcctggtattaaatctacttttatacctctgtagctatgctgacttatgagctcctgaataagttcatgtgccttctgcttctgtgaccacagtgcctagcagagggctctgcacagtgcatgaacccagtaaatct

SEQ ID NO: 852464 - DNA, 601 bp, Homo sapiens
aaactcctactcatgttaatattttgatctccactcatggacgatgaatgctctgaatggcatctagaatggtggatcttcaggttttcaatttactttacccagatccatcagaggaatcactatctatgggcagctatcaccttacaaaatctatttcttaaataataagacttgaaagtttaaatgactctatgggctgcaaaatggatgttgtgttagcaggcatgaaaataatctccttgtaaacatctccatcagagctcttaggtgaccaggtagattgttaatgagcataatattttgaaaggaatcttgttttctgcgcagtaggtctcaagaatggccataaaatattcatttcaataaaccatgctgtaagcatgttgtaagcagatgtgcctatataaacaggctttgctgctccatttatagaacacaggcaaagttgatttagcatcattttaagcaccctagcatttttggaatggtaagtgagcattgacttcaacttaaagtcaccarctgcattagtccctaaaaagagtcagtctagggggcgtcacagtgactcacacctctaatcccagcactttgggag

SEQ ID NO: 852465 - DNA, 601 bp, Homo sapiens
aaactcctactcatgttaatattttgatctccactcatggacgatgaatgctctgaatggcatctagaatggtggatcttcaggttttcaatttactttacccagatccatcagaggaatcactatctatgggcagctatcaccttacaaaatctatttcttaaataataagacttgaaagtttaaatgactctatgggctgcaaaatggatgttgtgttagcaggcatgaaaataatctccttgtaaacatctccatcagagctcttaggtgaccaggtagattgttaatgagcataatattttgaaaggaatcttgttttctgcgcagtaggtctcaagaatggccataaaatattcatttcaataaaccatgctgtaagcatgttgtaagcagatgtgcctatataaacaggctttgctgctccatttatagaacacaggcaaagttgatttagcatcattttaagcaccctagcatttttggaatggtaagtgagcattgacttcaacttaaagtcaccagctgcattagtccctaaaaagagtcagtctagggggsgtcacagtgactcacacctctaatcccagcactttgggag

SEQ ID NO: 852466 - DNA, 619 bp, Homo sapiens
caaaatgagaataagggagcaaaatgttaaaactgcttaaactcacaagaataaagagaacaagggggaacatgacagcraaagagattcgttataaaattgtagatgatggatacttttagaacaagtaaaagatgactaacaaaacaaacttcttaattattctaagtgtctgttgggagtggagccaacataaagcaaataaactcatgccacagaatattagaaagtatcagaaatttgaggcaagaaaagagttgcagagagagggcaaatattaaaggatatttgattgtggcaattttgatgcagagaagttaatatttcattttaggaagtcaatagatatcgaaataaaaaaatgtaaacttaggctatataactgaaagtaaatacaagaacaaagagatgaaatttgaatttggggaaataaattccatcttatcaaatatttgtaaagctattctactttaacaaatacgtgtagacatttccttagtttaaagcaatcaaataaaaaaacccacaagtacaatcagaatatagtaccataaactactaataaatggcccccaaatttttgaaatgtaagtagaaggtacatagaaatttagtctct

SEQ ID NO: 852467 - DNA, 616 bp, Homo sapiens
ataattttttgaacttttgtggtatcagatataatgtctcaatttttatctttgattttatttattagggttttctctcttttttttttctaaatctggctaaaagtttgtcaattttgtttaacwtttttcaaaaaagcaacctgtgtgtttcatttatcgtttgtattgtttccttcattttaaattcatttatttcttttctgatatttatttttttcttctactagtttcgagtttggtttgttcttgctcttctagttatttaagatgcataactaggttatttgaagtttttcttcctttttatgtgagcacttatagctataaacttctcccttagtattgctttttccatatcccataggttttggtatatggtgtttgtttatcaactgtttcaagaaatttttcaacttccttcttaattttttcattgacccactggtcattcaggagcatattgtttaatttccatgtatttgatagtttccaaaattcctcttgctactaatttctagttttattttgttttagtcagagaacaagcttgatattatttatatgtctgaattttttaagacttgttttgtggcctgaaatatggtctatcctt

SEQ ID NO: 852468 - DNA, 616 bp, Homo sapiens
ataattttttgaacttttgtggtatcagatataatgtctcaatttttatctttgattttatttattagggttttctctcttttttttttctaaatctggctaaaagtttgtcaattttgtttaacttttttcraaaaagcaacctgtgtgtttcatttatcgtttgtattgtttccttcattttaaattcatttatttcttttctgatatttatttttttcttctactagtttcgagtttggtttgttcttgctcttctagttatttaagatgcataactaggttatttgaagtttttcttcctttttatgtgagcacttatagctataaacttctcccttagtattgctttttccatatcccataggttttggtatatggtgtttgtttatcaactgtttcaagaaatttttcaacttccttcttaattttttcattgacccactggtcattcaggagcatattgtttaatttccatgtatttgatagtttccaaaattcctcttgctactaatttctagttttattttgttttagtcagagaacaagcttgatattatttatatgtctgaattttttaagacttgttttgtggcctgaaatatggtctatcctt

SEQ ID NO: 852469 - DNA, 616 bp, Homo sapiens
ataattttttgaacttttgtggtatcagatataatgtctcaatttttatctttgattttatttattagggttttctctcttttttttttctaaatctggctaaaagtttgtcaattttgtttaacttttttcaaaaaagcaacctgtgtgtttcatttatcgtttgtattgtttccttcattttaaattcatttatttcttttctgatatttatttttttcttctactagtttcgagtttggtttgttcttgctcttctagttatttaagatgcataactaggttatttgaagtttttcttcctttttatgtgagcacttatagctataaacttctcccttagtattgctttttccatatcccataggttttggtatatggtgtttgtttatcaactgtttcaagaaatttttcaacttccttcttaattttttcattgacccactggtcattcaggagcatattgtttaatttccatgtattygatagtttccaaaattcctcttgctactaatttctagttttattttgttttagtcagagaacaagcttgatattatttatatgtctgaattttttaagacttgttttgtggcctgaaatatggtctatcctt

SEQ ID NO: 852470 - DNA, 616 bp, Homo sapiens
ataattttttgaacttttgtggtatcagatataatgtctcaatttttatctttgattttatttattagggttttctctcttttttttttctaaatctggctaaaagtttgtcaattttgtttaacttttttcaaaaaagcaacctgtgtgtttcatttatcgtttgtattgtttccttcattttaaattcatttatttcttttctgatatttatttttttcttctactagtttcgagtttggtttgttcttgctcttctagttatttaagatgcataactaggttatttgaagtttttcttcctttttatgtgagcacttatagctataaacttctcccttagtattgctttttccatatcccataggttttggtatatggtgtttgtttatcaactgtttcaagaaatttttcaacttccttcttaattttttcattgacccactggtcattcaggagcatattgtttaatttccatgtatttgatagtttccaaaattcctcttgctactaatttctagttttattttgttttaktcagagaacaagcttgatattatttatatgtctgaattttttaagacttgttttgtggcctgaaatatggtctatcctt

SEQ ID NO: 852471 - DNA, 644 bp, Homo sapiens
ctatggtagatttagctctgcaacagcagagttgagtagttgcaaaagagatcacatgtctggcaaagcttttttttttttttttttttttaactatcttatccttgcagagaagtttgccagcctctgwcctgtaggaaaacttcccagtaagaaagatagaagccatcccctttcatgactaagcctaggaagtctcataactcacttctggcatagtagtaacctgctaagattaaagagaagagggattaaactctacttttaaaaagggaagagggaggttccagaaaaacctgtggaacaatagatatgcttacagccatcttgtaaaatacgaacttctaatggctagattgtgatttgtttcgtaaaaatagtattccaaaaaacaaatgaggcagttcacaagcaaggaagtgattttttttcatcataaaaatttgttaatgtgtagcttagagatgttttctactaacagaataattcatcaaaaataaaatacaatattactttttaaataaggccttacatttaaattcacttttaaactgtgtctctatggtgtaccaaacaggctaatattcttcttaaactaagtttttaaaatagaaaatgtcaagatgtatacaagacaatacaaa

SEQ ID NO: 852472 - DNA, 658 bp, Homo sapiens
atgcacacacacacacacaygcacatatccccacacaaatatacataagaacttttatacctcctattttccatgaaatgttattctacacatagtgattaacaactaataaagtcaattctgcacacagtattcaaaagtatacattttctaataatatgaaaccactctttaacaatgaagcatattttagacttcttattaaattaaggaagagcaataacaattaatttggacatctgcagtaaacctgattaatccctcctatgaggaaatattgatataaagatgctgaaaaaatgtatagcaaacaaaaatgagtagcaaaaaagccacttattttcaaagagcaaatatttacaaaaggtataaatagcacgtaaaaaccatgtgtctctaatttacacttactcagctattatgctaagaaatagttttgcatagtatccacaatttataattatgcctcactgatacattagttaaatgcatggcaaatgtcctgcttgattttgaattagcaacatcaaaagctgatttataaatcttttactgaacattttaattctttttagaaagaaagccctttggctataacaaataaaatacagtgcatgctaagtcaagtgtatctgttctgcatggtttttgtcatcac

SEQ ID NO: 852473 - DNA, 664 bp, Homo sapiens
gtggtggatagtgcaatcaggattctcactgtcgaagtggtgtgtgttatagatcagcaaatggaggaggttaaaatgatctatgtagtaatggattagaggtggagacatcagtatgaactcatgtttagcttaatatagatgctgatggcaacatgtaatatatttatagatatgtggagatggaatagtatacatacattgttctgtcagctgatgggtataaaagcattgacaccccaagggcaacaagcacacctcacacttagcagatggtttctaataccactcctcaataaagaaaatcaaggtcattggagaaatgtctgatactaggactgagacatgaaatatataaggtgatctgggcacaccttgcagtctcagaaagaaagataatactcaaggaaacactgtggggatggattatgtcataaacagagacacaggagccaaatgaaagagataccaactgccaagactagaacaatttgagcaacaaactaaattactttgagattaaactccaaaatatactatgtgtgtgtgtgtgtgtgtgtrtatatatatatatatatgtcattataggctcatctcattgatttatatatacatatatatatttatatacatagaagagatgagtctatgatataaataactg

SEQ ID NO: 852474 - DNA, 569 bp, Homo sapiens
tataattgaatacttggcaatgtttttaagtaattttttaaaagttttyatattaatgtattctctagcaatattacattattcttgtttattatcttattctttgtatcaattttggcaaattgtatttccttaaaaactgataatatgcactgtttttcaagtttatgacgaaaaattgtataaattatttttagtttaaaaatatctaacattatttatttatttcaagcctttttattttatacatgtgccttacaatcaatatatccaaataaggccaggtgtggtggctcactcctgtaatcccagctctttaggaggctgaggtgggaggattgcttgagctcaggagttcaggaccaacatggcaagactctgtctctattatatatatatattatttcaagatatagatatataataattttacttgatatgcttttagtaatttctttattaaaatagcattctaaaatatatatcaaaatgattgtttattttatggtaacttcaatcatattatattttaatatgtgatctatgttgcaataaagacacatttttct

SEQ ID NO: 852475 - DNA, 364 bp, Homo sapiens
ccaacagttttatttttgaagaaaaaattattttgaagaaaaccttttttcttcaaaaaagttttaatttaaaaggccatgaattttatttggctgccataatgaattctaaaatagtatattgacagagtaaagcaaaaattttaaatgtgtggaatggcctcgtttcttttttttctagttttatattgctgctcttaaattttgtataatattgaaactcttggattattatagctttatttttgtatctttttaaagttcaaatgtattaggtgattactatctatagggagataccayaatttaatttgttttagtagctttgtttcttattgttttcagatatttataatctttctta

SEQ ID NO: 852476 - DNA, 646 bp, Homo sapiens
aaatgctgttttagaacctgaaaaaataaagtccatctttcttgaacctccataaaaaacaaatctaaaaaccaagaagaaatgaaatggatatgatacgttcttaaaattgccagccttctcttatggggcacagcatttccaagtatattcctgccctataaaaagaatagtcaggctctgcaactacaaaaaagtggtgtttaccattgaatccatttcagctgaattcattgcaataaaatatttgcatttgagttttttataatgagcttttactataaagagaatgtgcaggttctatagctagaaaagagatacttaccattgaatccatttcagctaaatttcattaaaggaaaatatttgcatttgagttctttataatgagattttactgcttttcttataatatctccacatagtactttctataacgattgttttaattttaaaactttgatcacttaatattaaaagccaccagaaagaatttttattaagtaactatcttggatagatgatatatacctatattcagtttatcaccctaaaaaaaaggtaggaaacctttaatattttgtagmgcttcctaggacatcttacctatttaaagtttattgtcaaatctccttatctccttcgg

SEQ ID NO: 852477 - DNA, 613 bp, Homo sapiens
tttcctccaaatgcaatctttcatacattttcaagtgatcaaaacggcacacatttataaagtggaaaatttgtagtattttcctttttaaaatgtgtcagttgaaaggacttaaaaatttgaaagtaggattgtgtttgacataatttatttctgtattaggtttcatacaagtagttataaatagtaaaaattttcatactaattctgtaagaatatatttcctcttgattcgactaatccaggaacttgaaagtggaataaaagatactgctccaaattttaacactggcaaatctgatagtttatatttcatatctattttcttttaccctactttgtcaatagcaattattatcatgctattctgagttctccaaattttctgttctttctggcttttatcatcagcaaaccagattactactactactattactgctgctgctgtcatcgccacctgcagcaagtatttacctactacttgttatatgctagacacaattttaagcagtgcatgcatattaacttatttaatcctcataatcrccctatgagacaggaactataattatccccaatttatagttataaaaacagacacacagtaatc

SEQ ID NO: 852478 - DNA, 628 bp, Homo sapiens
caacctgagtcagtatgataatgtagctaagattcatcactgaaagtttattttttctggaaatgcattagcttggtgatgattgctacatatcagtgggagggctggattccaagtctgaatcatgactttatagtcaaagttacactagttattagtcgtatttgaacctctcacattgcttaacatgatttcaatctggtttttgtcccaactgtaccactgaaactttccttcactaccagtaatctcctaattgccaacgctttgttcttattctatttgaactttcttttagttgttgttgttttttgttttgttttgttttcatttaagacggagtctcactcttgttgcccaggatggagtgcaatgacgtgatctcggctcaccgcaacctccacctcccagattgaagcgattttcctgcctcagcctcccgagtagctgggattacaggcacgtgccaccacacccggctaattttttgtatttttagtagagatggggcttcaccatgttggccaggctggcctcaacctcctgacctcaggtgatccacccacctcagcctcctgwagtgctgggattacaggaatgagccactgtgcctggcctctatttgaag

SEQ ID NO: 852479 - DNA, 654 bp, Homo sapiens
tcttagtctgtaaaatgggatgataatgaagaatacttgctttgtagaattactacagatgttctattactaaccaattgcttaacacatggaaagtcccttgaacaacaactgrcagataaacgtgttatacagttgtttgcttgttgattacactgaaatgcatgcctttggagtttctgaatagcagcttttgtgttttgtgtagagagggagaattgtgttgtactggggaagttgttctgtgatggagaaacgaattcacataatcacttacgcctttccaggctttgttcatttttgagcatccatcatgggtcaaaattgtgaaagacacagggattagagatgatgaaaaagatgtctaccctagacagaatcacctagtgacagaggcggggcaaagcattccataagtgcctggtgcagagcagtgtgatataaactgacttattccagtttccatccaacatggagttatgttcctccaacacatgtatctatgcccagcactgtttgaggtgctgaagatagagtagtgaagaagaggagtttggtctctgtcttttttagagtttaaagtgaagcatttaatggtcatggacaccatttaatctgtaaattatttttagcttggaaaacttcttgaattcc

SEQ ID NO: 852480 - DNA, 617 bp, Homo sapiens
ttaagacttcttctaccttactgctgagatgatttgaggcagctttcagattaaaaagtacaaactacagcatcaaagaataaaggaagaactgactctaaggaaaacagaaacagttgctactttccagcacccgaactggtcaggcctcatggaggtaataaggcaataaaactgggtatccttatttgtcagctaaagcaaaaatggaaacacgtcgggtggcagagtttttgttttctgacagcagaaaatacacatcttcatctgcagagacaaaatgtttccaggaaataaccccaagcatgaatttatcatgagtccttgtataaaggacactgagtgacatagtgggcaatatatgcaattctgttttcataaaagacagagatgctgttaggttcgtcagtttctcgcatcagggttctctgaagacagcataacattaaatcataactcagtggaggcatttctttaaggaactcaaataatgaagtctagaagagatacctttgggtccattccacaaacaktactgagcacctacttaaccatccattcatccatccatccatccatctgtttatccattcatccagcaaaaattccctgaatgt

SEQ ID NO: 852481 - DNA, 612 bp, Homo sapiens
aattgtattaaaaacaaaggtaataaatactcagaattcatcatttccaaattattgtacttcattttactactatctacgctctggggattatttgcatctattatctccgtatggtggaaatattacatcatggtgtgttactgcacagctctgcccaactcggtgttcagtaacatcacattggtagcttgaagtcagccaaggtgggtgtatttataccatggaaatgaaaaaaatgctacaaatcagggcttgctttattgttttgttgattgtctagacttaagaaagtgatagagaaatggtaataatgcagattaaacttaaaagcctgtcatgtctggaaatgttacatggcaaatggcataaaaattgagaaaatactcttccagtatttgaaaactgttatctggttcagcaaagcagtcgctcatctcattcatgaacgaatggagttctggcatgccattgttgcttcactttcatcttacttgttaatataaaagaaaatatcagccracattcatgtcagaactacactcatttcccagttgcttccctagattggctatagatacaagagctcagcaaaagtcaattaaagtgttc

SEQ ID NO: 852482 - DNA, 593 bp, Homo sapiens
aaagatgctgtcagtcctgtcctactctgctgacagacctccacatggcctgcctgtgcaacatttgggatttgagtcagggcctctccagcatctttggggctccgggtcccatgcacatgggagcagacagagggtacttgggccctgactccagtaaagtgggagagaccaggcttgatgacttgaaacctcttgccacgtttcacaagccaaggctttcttcatgtccaaacctggtcactcttctgtgtttcttctaggatatgttttctttagcataaacaccagacccagagaaaagctgtaatctgcatttgaactataaaatgtaatcagttgtttatacaactcacaaaatgaagcaattaaaaaaactgaccctcctaaataagttaataaaatttattaaatacagtttagagaataaatttaaaaactgaaccctcatcctcctgttatggtgattaatgactatcactctgtgctacagttattttatacatcttaactttctattcaattctatactctgaaaaaagaccatatctgatttgyatttatataaattaatttacatggagttatataag

SEQ ID NO: 852483 - DNA, 538 bp, Homo sapiens
atctttattaaacacctgtgaactctgtcctcagggaaayaatggtgaacaagaccaacaggatccctgccctcatgggacttacattctaatcagggagagaggccagaagaccaatagataaaaaatatctcccacccgtattccaacctattaccaagttctacatttctagctctgcaggagcctcctcccaggtctccctgggtcccatctgcccttctgccaccagtctccacccagtcaccagagagagagcttcttaaaatggaaactggatcagatcatgtcacccctgcttagaaccctgtcaatggctgggttcccacttcgtgtacaatccagactccttaggagggcctgtgatgccctgctgctcctcatggccttcctgcctccgcagacctattcatgcccctgctctcagcccctgagaccagcagctcactttcctgtcagtttcccacacatccccagctctctcaccttcagtgtttttccacttgcttttccctcacggggaccacttcaccccagt

SEQ ID NO: 852484 - DNA, 476 bp, Homo sapiens
tcattaaaaacttttcttcaagagacaccattaaataaaaagccacagactggtggaaaatattcacaacacatatctcacaaacgacttgcatctggactatattaagaattcctayaatcaataatggaaaggcaaacaactcaattaaaaaatagacaaatgctttgaacagacacttcatgaacatatataaatggccaataaacacatgaaaaggtgttcagcatcattaccatcagggaaatgtaaattaaaaccacaatgagataccactacatacatacctactagaatggttaaaattaaaaagactgacaacaccaagtgttgatgaagacgtgaagcaaacgcaactcttacaaactgttgatgaaagtataaaatggtacaatcactttagaaaactgctagtttccaataaagtaaaccttacagcctatagaatattttcacaaaaagacctgcagaacaat

SEQ ID NO: 852485 - DNA, 624 bp, Homo sapiens
tacctataaaaatgtatagtacgctgggcatggtggctcacgcctataatcccagcactttgggaggccaaggcaggtggatcatttgaggctaggagttcaagatcatctctgctaacatggcaaaacctcataccaaaacacaaatattagctgggcatggtggcacatgctggtaatcccagctacttgggaggttgaagcaggagaattgcttgaacccaggaggcggaggttgcagtgagccaagattgtgccactgccttctagcctggacaacagagagagactgtctcaaaacgaacacacacacacacacacacacacccctatagtaataaacatcattttaactggagagatgttgaaaatattccttttaaaatcaggaatgagaaaagggtgccaactagcatcatttgtacacataattttattggaggtcctggccagcacagtaagacaagaaaaagaaaccagaaacttagactactgggtgggggtgggaagtctacagccatatcaccctgaaggcatctgatctcatctgatckatgcagggtcaggcctagttagtacttgcatggaagtctgcttaggaataccatgtgataaacaaacaaa

SEQ ID NO: 852486 - DNA, 620 bp, Homo sapiens
tagctgagaattggccaatcccagcagccataattcaactactcatacactgctgagtgttcaaaccgtgttcaaataaggcaaatgccgagctgtaaccaatccagttgtttttgtacctcacttctgatttctgtacgtcacttcctttttttgtctaaaaattgtcaaatgcctctgaccatgaggcatccttggagtctttctgaatttgctgtgattctgggggcttcctaattcatgaatcattaattgttcaattaaactcctttaaacttaattcagcttgtttttctttctacagatggtgtcagaagtgggatctgaagtagagctttaacaaccccaggagcgctgagtgaacaagcaaggtacctgcaaggacccacttatgtccattgatctctcagagtgactgggatgtgggtaagctctctctcagatttcagagctccaaggatttgtgttttgagctgtccaagtttctttgagcaaatttctgatccaaactaggtttggaagtcacaagagaaacttgastgggtccaggattggacttgatccagtaattagctggcttggatccagctaattacttggcttcttacatctgactgggt

SEQ ID NO: 852487 - DNA, 551 bp, Homo sapiens
gtcactgcctgctctcacatattctgtgatcagcatggcagtggtgagtttagtcrctcaccagctatctgtgctgcctggaacagtaccctttctggaaagctagatattgtccgcacagaactcaatccatcagagaaatataaagctatggtattggcaggactgcgacaagagatcgtgttggacgttagctcctgagcagtggccttctggacatatcaggtacatcaggaacatctctatcaagaacacaatttcatcaaggctgagggccatctgaaacagacggagaaaatatatactcagcaaatacaaagcgaggatgtagaattgacctctatgaaaggggaagtcgcctccatgaagaaagtgctagaagaatacaagaaaaagttcagtgacatctgagaaacttatggaacgccatcttcagcatcaaaagctccaaggcctctatgatagccttaggctacgtaacatccctattgctaaccgtgaaggcacccttgaaccatctacgattgcacagtctggtgtttttggcttcc

SEQ ID NO: 852488 - DNA, 545 bp, Homo sapiens
atattctgtgatcagcatggcagtggtgagtttagtcactcaccagctatctgtgctgcctgraacagtaccctttctggaaagctagatattgtccgcacagaactcaatccatcagagaaatataaagctatggtattggcaggactgcgacaagagatcgtgttggacgttagctcctgagcagtggccttctggacatatcaggtacatcaggaacatctctatcaagaacacaatttcatcaaggctgagggccatctgaaacagacggagaaaatatatactcagcaaatacaaagcgaggatgtagaattgacctctatgaaaggggaagtcgcctccatgaagaaagtgctagaagaatacaagaaaaagttcagtgacatctgagaaacttatggaacgccatcttcagcatcaaaagctccaaggcctctatgatagccttaggctacgtaacatccctattgctaaccgtgaaggcacccttgaaccatctacgattgcacagtctggtgtttttggcttcccattaggaataa

SEQ ID NO: 852489 - DNA, 616 bp, Homo sapiens
aatacatacatttgtttttaaaataaaatctcacttgttacattgctgttaaaaaatggagtttatggctgggcacagtgactcatacctgtaatcccagcactttgggaggctgaggcggacrgatcacgaagtcaggagatcgagaccatcctggctaacatggtgaaaccccgtctctacagaaaaaattagccaggtgtggtagcaggcacctgtagtcccagctactcaggaggctgaggcgggagaatggcgtgaacccaggaggtggaacttgcagtgagccgagatcgcgccactgcactccagcctgggtgacagagcaggactccgtcttaaaaaaaaaaaaaatgcagtttacatgacagaggaggtagggaagagtaaacaatttccagaagaaactggttagtgaagttatgattaatttacatatatatatatctccacaccaacacccattatagtggaagtttggtacactggggtcaaagagaacatttataagtttcctgagggaggaaaattaaaacaagctatggacaaagcatcagggatcagaatagcttataatcagcaacggaagctgatcagaatacagtccttctaacag

SEQ ID NO: 852490 - DNA, 648 bp, Homo sapiens
gtggaaaaattaaaaaaggaatggaatgttatttgtattactgatgttgtctacaatcatactggtatgagcttcattgactgccttcattaattttgatgagaatttatgcacacacacatatacacacaaataagagaaaggaagaaagaaagagaaaggaaaggggctaacataaattttaaaaacacaaatgatgattaggtgtccttctgtttaaaaaattaatatttttcctttcaaagaaaacattcttaattgaggattaagtcaatatataagtatcttgcatctgttgcttataaatacaggagagtgatcatagaaggaacataatgatcacatatttcaacttacagtacagtagtccccccttattcgcagttttgctttctgaggtttcagttacctgcagtcaatcacatttcaaaaatattgaatattccagaaatcagcaattcataagttttaattttcatgctgttttaagtaacatgacaaactctcatgccatcctgctctatcccacctggaatgtgactcatccttttgtccagtgcatccatgctgtaaatactacctgtmcaccagttacttaatagcctgctcagttatcagataaaaaaacacaaaatatcaaaatatata

SEQ ID NO: 852491 - DNA, 610 bp, Homo sapiens; identical to SEQ ID NO: 843978

SEQ ID NO: 852492 - DNA, 466 bp, Homo sapiens
agaatcaaaggcataaatgcttaatacttgatggtaaccgccaccttctttctacaaaggacacaaggactgcaggagcaaagaggctctcactgaggaagaagaacaatcacaaaggaagggccrgatggcccatgatgctcttgaagatcaagaattcaagccaaaagaaaaaagcaggttaagtaagaactggaaatggatgtagctggacttccatgtgtgcacaggctcttcaagtgtgactgactttttctgggtttgtatcctcattaggattaggtaactgccaaggtcccttgtagtgttaagatgtaatacatgctccagcctgggcaacatggtgagaccccatctccagaaaaaaatacaaaaattagccaggcgtgctggtgcatgcctgtggtcccagctacttgggaggcagaggcgggaggatcacttaagcccacaaggtcaacgctgc

SEQ ID NO: 852493 - DNA, 601 bp, Homo sapiens
agctttttattagttctaattgtattgataactcaaactgaaggtgaattttttaatctaagttttgatagtccattgatctgaattcttaaaattatttgcagagacaggaaaatatatagaaagagccaagytcaagctaggagttaaaagtcttgggctctactcctatctttgccacttgcccttcattcattaaacaatttttgagcatactgccaggccccacccaggctgaagtacagtggcaggatcagtggctcactgcagccttgacctcctgggctcatataatcctcccatttcagcctcatgagtagctgggactatagtcccacgccaccatgcccaggtaattttttaaaattttttgtggagacagggtctcactttgtcgcccaggctggtgtcgaactcctgagcttaagccatcctccccccttacccttccaaagtgctggaattacaagtgtgagccactgtgcccagccactttattacttatatttagaaaagagacccaggcaaatacataaatgattgtagtgaagtgttaaaatacgagaaaggtctgcacagagtacagcatggtttcaaagaa

SEQ ID NO: 852494 - DNA, 430 bp, Homo sapiens
tagtagttttttaatttttaattttttttaggaatctccatactggtttttcacaagggctgtactaatttacattcccaccaacaatgtgcaagggtttccttttctccacatcctcaccaacacgtgttatcttttgtgtttttgataacagtcatttctaacaggcgtgaggtgatatctcactgtgatttttgatttggggcactttttcatatacctgttggatatttttatgtcttctttggagaaatgtctactcagatcctttgccaatttttaaattgagttctttgttttctcattgctgagttgagtttctttttttttttttttttttttattaaccccttatcggatgtatgatttgcagacaggttgtctcttcactttgktgtttgtgttcttggccgtgcaagagatttttagt

SEQ ID NO: 852495 - DNA, 528 bp, Homo sapiens
ggcaagacagcaaatggcttggatcgagctgtaaaattgactcctgtggcggggaaaagaagaygtttcaatgatatgttaataagatgctaatataattaaaatatggtaaaaataaatacattcataatagtatctgggatatagtaggtgttcaatatatattcattaaatttaataaatacataaattataaatccaagatttatatttctagagaatcacaagattccaacaataacacataatagttatttccaattctgtcaattattgattgagaattcttccaattctctcttttaattttcagaccaaccttccataccaatgcaaaatttcagcttctttcactcatgtttcactaatgagaataaaaatattctcagctccagaatgtgtgaaattacttgctctgatgtatgtatctactcaatacgtgccatataacacatcaaaacaggggcacagggactcctgctgcagcaccatattgtcttagagagttatgttatctggaaaactagg

SEQ ID NO: 852496 - DNA, 490 bp, Homo sapiens
gagggactctgaagctcccacctagctccgagagtaaatgggacttggcwtttgtcagtccaccaggactaaaaagaacaaatagtcagtctgcattctcccagggctcagcacagatgaacaggcaataagtttcagcccccagttcctccttggaagaggtttgactgcacacattttcagttgctatttaaggattggacttttaagtagcttgcatttgggagtcgatggagtagagaattagtgagagatccaagagcctgaacaggtgtttgggtgtttcctgtgtctcctaccccatggcttgctccaatgataaaagtaagtttaacttccagccacgttttggacagtttatccacacaacaaacactccaacttttatagctcacatacaagagactggctcttaaatcacttaggagttaacagggctcagcatttgtgagtcttcaggaacataaagaacaaaagtggttttaaatgg

SEQ ID NO: 852497 - DNA, 609 bp, Homo sapiens
aaaaaaataaaaactagaaatgctttgagttatggttgacagtttaaataagcatgctgcccatgcactgaaacctttgaaagtcactatactacttagcttggatatcatttcatatcatttaattgcatagcaagttgattttacacagtttttttgtcaaggaccaaaagagggaggggttggaaataaattctagtttcttcctaatttttggcatgattctcattaacatctgaaaagatcagagctgaaaacatctaaaaggactcttaattataaacattataggttgggcacaatggctcatgcctgtaatcccagcattttgggaggctaaggcaggtggatcacctgaggtcaggagttcgacaccagcctgaccatcatgatgaaacccagtctttactgaaaatacaaaaatcagtcgggcatggtggtgggcacctgcagtcccagctactcaggaggctgaggcaggagaattgcttgaaagcgggaggcggaggttgctgtgagctgagatcgcgccactgcactccarcctgggtgacagagcaagactctgtctcaaaaaaacaaaacaaaaaacgattataaaatctatca

SEQ ID NO: 852498 - DNA, 501 bp, Homo sapiens
attgtgaggaatggatgatacttatttggggattcattaaatgatttctacttttgaatatgtttggacatttatataataaaactttcttttctttttttttttttgagatgtagtttcactcttgttgctgagattggagtgctgtggcatgatcttgggtcactgcaacctccacctcctggattcaagcgattctcctgccccagcctcccgaatagctgggattacaggcgtacaccaccacttccagctagttgttgtatttttggtaagatggggtttcaccacgttggccaggctggtctcaaactcctgacctcaagtgatcctcccaatgtggcctcccaaaatgctgggattacaggcaaaagccaccacacccagcttatataataaaacttttggaaaggaaaaaawttattaaagttctctatattgtgtttttattttctttatttttgtgtttggtatgaatgtgcagtggtttctaaacctgaa

SEQ ID NO: 852499 - DNA, 657 bp, Homo sapiens
cagggcatctctgaaagaaaggcaacagccccagtcaggggtctatagataaaactcccatctccctgggacagagcacctgggggaaggggtggctgtggaygcagcttcagcagacttaaatgttcctgcctgccaactctgaagagagcagcagatctcccaggacagctgtcgagctctgctaggggacagactgcctcctcaagtgggtccctgacccccaggcctcctggctgggagacacctcccagcaggggtagacagacacctcatacaggagagctccagctggcatctggcaggtgcccctctgggatgaagcttcccgaggaaggagcaggcagcaatctttgctgttctgcagcctcctctgttgatacccaggcaaacagggtctggaatgcacctccatcaaactctagcagacctgcagaagaggggcttgactattagaaggaaaactaacaaacagaaagcaatagcatcaatatcaacaaaaagcatgcccacataaaaactccatccaaaggtcaccaacatcaaagattaaaggtagataaatccacgaaggtaaggaggaaacagtgcaaaaaggctgaaaattccaaaaaccagaatgcctcttctcccccaaaggatcacaactcctcacca

SEQ ID NO: 852500 - DNA, 591 bp, Homo sapiens
gagggtgggatcgctacaagctgcttctgggaattgaggtatggtggggatttgaggagaacctgcagtgaagaaggtcttgcacttctgcttcctgccatggtccctgagaagtgattgcaacatccttgatttctgaaagcctttcctctgtttcccttttctgtcccacagcctttagggagaaaggggtcttttctgacatcctcgaggaagggttttctaaagtcaaggttaccagcaccagggttggataagtaatagtagctgtgctgtgtgctttgagggagaagggaggatgggagttagctcaggcagtgggaatagcttcctgagattgtgagtatcagctgaaatgtgacctgcctcccttttctttcccttccttcccttttctcctgtgtctcctcatcccaggcctctccagccaattagccagatcttgtcccttaggatttcttcatcctttatcatgtcatrcaatttagtcttctcttggtcactttcttttgtattcccacccatcattttttcagcaaaacaaaagatcagtttttcagcaagacaaaagatcagttagaagaagagagg

SEQ ID NO: 852501 - DNA, 592 bp, Homo sapiens
caaacttgtaagagaataaatttgttgttttgtaactgcagtgttggtacttcctaaaggagatccaagcatgtgacaggagagacagttgttctagggaagtcagatccaaattygtgtcacctcctgacctggaaagtaatctgggcctcactgaagtcaaggttttgtctggtagtgctcggtatacttcctgctgcacattttggtcaatctctcagaaacaggtaaagttccatctcttggcgtgaccgcgtgacagtccataggtcttatacctctcagagggctgcatacatggtagaaatagttgttctctgaatgttaggttccaaaagtgagactgtgaccgatggacttttctcacaaagcccacctgtaaactaggaacactcggaaatcctcggtccatatacaaacaggcagggattcttgttgcatgtgtgcaccctgtggtaattctcaaagagaaggagagagcttggggaaatcgcgagactgttgctcatgtaatctagaacaaaaaaatcccactctttggttttagtgatggagaaaatttatctaacaaaacggttaaaaaacagctacc

SEQ ID NO: 852502 - DNA, 576 bp, Homo sapiens
attcaatttctcagcaagtcgtttgtttcatcttcaaaatatttcccgaaactgtgttttctcattaccatgattgattctgcccttttccaaatgaccgtcatctttcctaaaccaggtaatgtcttcttaatgacacagtttcaactcctttccacctactgacacttttccactcagcagccagactgatcattcataattgtacatcagattacaccactcctccactcagatctcctgagccttcttatctactcacagcaaaaggcaaatttttccacaccaaggaagctctgcatgacccaacacatgcctgcccttccaaccttgtctctcatatggttctaggttattcacttcatttgccacacctatttctgacttaacttttgataagctaagattgttctgatttcagattttgcactttatttcttctttgccaggaatgttcattccccataaagctcattttcttactgtattcagagttctattsaactgtcctctgtggatcatcccatgaaaaattctctagcctttgctctgctttgttttctataaacaatttat

SEQ ID NO: 852503 - DNA, 590 bp, Homo sapiens
aattaaacattttttattttctttgttctaacaaaaatgtattcatttgtggattttttgccttgttatattgtaaatgccaacatttatggcctgggatgcaaacactacacattattgaataaaaatcaatggcttattaacaaacatattgattgtttagtaatgagatgaagatatgtttacatatcatgcactctgaccctatcaattgtaatgaatctaagtttttttcaaatgttgtagctccattgttcagaaattagtggaaggcttcagcttgataagtaacccttggtaagtttgtttactgggaaatgaggtcctagttgatgttcttatgcagtgtctaatcttggggaatggattactgatgttacctggaaaggcaatgcctttgcttcatcacacccagaagacagattccaaggcagtgagtgacctgttgagataagatggaagcaggctctagatcatggtgaatcatagctactaggataaataatttgtataaagacatctctggaaagtctttgagtgatctcagtgatgtgmatttatttgaacttagaaaggtcattctgctgtca

SEQ ID NO: 852504 - DNA, 483 bp, Homo sapiens
cctatcaagtttacagatttaggcaacattatgagttcaaattataatagtggattcctatcatctctttatgtcagtcctagtgaaacaaattatactaattatatttctcaatgaaagttttatgtgggattttattctttcttgagttatataattaagatgtgttttttccctttccaagtcataatatcactttattttgtccacgagttggtctgccagccttatactctttatgctttcctcttccctctcagcttccactatgtcctctttatgctgtgtaataaaacatagtgaaaaataacacaggtttttcccaatcccaaataacacatagattgattactagctatatggwctttataaaatattttagtacctaagtgttctcatccataaaatgagagtgaaaacatgattgattttgtccgtatattataatgattcaaagaggtaatgcatttacgaagcttaaca

SEQ ID NO: 852505 - DNA, 505 bp, Homo sapiens
ccgctggttgagaaccattgtcccagacccttttcccagtactcctttctctggtgttttaatgaaatgcttgtttaactttgttccaggtwgttcacacatcaagaggcactcaccgtgtttcacctccttcacagcagtgctcagtatctccctgattttatgctgccaagttgctctgcctgctcctatatgctgaaaagaacatagcaacctcccaccctttccccccacccccagccccatggacacagggactctcttgggctagtgttctcttttggctgacctttacaattcagtcactcttggtatttccaagagaacccagggttcctgttctgacctaggagggaattacaactctttcagcagggcctgcatctccagcaatgaaatgatagtacaggaaagttttctcaaatgggaactgtggcccttctgaatatggccctagccagagataccttttgagtctcctcaggatagaaagagccatgacaac

SEQ ID NO: 852506 - DNA, 592 bp, Homo sapiens
ggaagcgcgtgccgctctcccgggtttcgggaggcagcctgttttgtagcctctgaggctccggggaaaggtttggctgcgtctaagagagacgtttggagccatccgtcttattttgtttgaaaagtcactcgttcaagttgtcactgtgtgacagctcagaataaaaccaatttgcggccgcccctcctcctcgcttcccggaggatctcctgggaggcacgaggcggacgcggtgctgagttgggccgggactcagggcggcaacatttgggcaagggcccaggaaagatgaggggctttgccgaggacacggactcctggaataaaagcagaatgaggtcaagagaagggaagcaaaggggccaaagcgcgctccgctctccaccgggaggcgggctttgcagagccctaaagagtgagattaccgtcccttccccacgcccccaactcgccccgggtgacaagcgcttcaggaaagctcctgtgatcaacsctccttgccccgtggcggttcggagctgcagaagttagaagagagtcagagccctccggagcggctgcctggcccctacgcagagtagcaagaagc

SEQ ID NO: 852507 - DNA, 485 bp, Homo sapiens
agggtacttactatgaatgaagcttgcaggactagaagctgctctggatgagtcagtgattaggtggtaaatgaatgtgaaggcctaaaacattactgtacaatacttcagactgcaaacattgtatgcttmggctacactaaatttattaaaacgttttctttcttcaataataaattaacccaagcttgctgtacctttttaaatttataaactttttaattttttaaaacttttcgactctcttgtgataatacttagcttaaaaataaatacattgcacagctggaccaaaatatttgctttctttacgccctttttctataagcttttttctatttttaaaagtttttaatttttattttcacctccatatgtggtagcctggaaactctctccaggaattaagtggaaccactgtagagcttactttgtttgttcctcataccttcaggatcactttccttcattgcctggtgaccgat

SEQ ID NO: 852508 - DNA, 289 bp, Homo sapiens
ccggccctacatatataattaaaaaaattatcttgcagtaagataaaggataaatagaaaatatttctgacagattagcttgacatgacagctacctgagtagactgctatragggtatttgcaacttaaataccaggagaagcaaaccagtacagtgaacaattctttgcaaatgtacaaataaaactcaagtacaacttctttcttcttcttttttttttttttttttttggtagtgatggggtctcacttagttgcccaggctggttttgaatttgtctcaagctg

SEQ ID NO: 852509 - DNA, 563 bp, Homo sapiens
agtaatggccacttggagcaggaatatgatctttatatggaagactcagtggatccttatcaccttcatagaaasgtactcacctcccacgtcaagagaaaagccaacatgtttttcctccaatgcataaaaggaacttccgtagggctggcaggagtcaggctgttcaagacaactggaaggagttgaataacatccagtgagtcctgcaagacttcaggctctactacctccagcagctccctgctgagcctggaaaaggaggaaaaagtaaagaataagccaggggaaatcacacacaacagagccccaactaggtttcatgggtagcataaggaagtggttaaaaaagtaaaaggatagatctattaatgaggtaacaaattattgccttcatgttgggacagaacagggccaaatggaaaagaatgaaagagaaagacagacacacacacacacacacacacacacaaacacacacacaaagacacacacacacactgagagagagagagagagaaaacgagctcagtgaattgtccaggtgacacactgatgaggga

SEQ ID NO: 852510 - DNA, 630 bp, Homo sapiens
gcaaactggggaaactgtaaacctgtgactcccagtctttgaagggtcaycatatgagtgtgaagctactgtatggtgaacagtgaacagtgcaggtcagcaggtctcccacctcctgcagcattacagccacatagacgtatttcctgattgactggagtttccttcaagcctttggaaacagagatagggcagctgtgtcagaggcgtgtgaaccaaagcaactccatcttgaataggagctggttaaaatgaggctgagacctactgggctgcattctcagatggttaaggcattctaaatcacaggatgagataggaggtcagcacaagatacaggccataaagaccttgctgataaagcatgttgcagtaaagaagctggctaaaactccaccaaaaccaagatagccacgaaagtgacctctctgatcgtcctcactgctttactcccaccataacaatttatgccatgacagtttacagatgccatggcaatgtcaggaagttgccctgtatggtctaaaaaggggaggcatgaggaatccaccccttgtttagcatataatcaaggaataaccataaaaatgggcaaccagcaggcatcgggctgctctgtggagtagccat

SEQ ID NO: 852511 - DNA, 582 bp, Homo sapiens
atctttcccctttcaatgagatcattcttatcaacataaaaacatgctgtcatttttctcatyttagaaaaaactcttacctccacttctccctgaatcttcagcctctacctacctcattttacagtaaaacttctttaaaggattgtctatacttgctgtctctattttctcatctctctttatctcttgaatctattctaatcaggtttttaccccacaactttatgaaattgctctttctgaggtcagtgacctccaagctagctgctgatcctatgggattttgtaaatcctcgtcttaattgacatatctgcagttttcccctagatgatgactcctttcttttggcttccaggacactccacttgcctggttttccttttctctttctcattgcacttcctgagtttctttatggttcgtcttcatcttggagacctctaaatgttgcagttctccaggactctttccttggtctcttctaactacacccactccttgggcaatctcatctgcttttacaactttacataacatttatactctgacgtctttaaatttttatctctatctgggag

SEQ ID NO: 852512 - DNA, 597 bp, Homo sapiens
cagatagttagcatagtaccgaataggtagtttttcaaaccaaacggatccttcccctccttccccccatagtagtttgcagtgtctattgttgtcatctttatgttcatgtgtgctcaatattgagctcccacttataagggagaatatgtggtatttggttttctgttcttgcattagttcacttaggataatggcctccagctccattcatattgatgcaaaggacatgatttcattctttttatggctgcatagtattccatagtgtatgtgtaacacattttctttattcagttgaccattgatgggcacctaggttgattccatgtttttgctattgtgagtagcatggtgatgaacatcggtgtccatgtgtctttttggtctaaggatctattttccttcagatatacacccagtaatgggatttctaggtccaatactagttctgagttatttgagaaatctccaaatcgctttccacagtggctgatcyaatttacattcccaccaacagtgtataagtgtttccttctccacagcctcatcagtatctgttgttttttgactttttaataatagccattctgattg

SEQ ID NO: 852513 - DNA, 576 bp, Homo sapiens
ttaattaataaataatgttgcatatctgcatacattcttagtaagactgaataatgaaaatttattgtaatgcatagatttaaatttttatacttttgcttcattttatatggtgcagaatggtggttttatctttgagtcacattaatgaatcacttaaaaaaaggtgtaaaagatgtgtggctatagacagttgtgttaagtgtatttttatattttgctaatcttctaaaatatttgattaagacacacttcacagctttctctctcccattttttcctgggaaataaaagttagtgactttgatggaaagttatttatttgagtggtttagagtatacccagagtactagtgacaagaaatagaaccatgcatgacagataataaaaaaaattactgtttttcaagcgtagagtaaataattttgtggaaaagtgtatatttaggttgtctcagaatatatgagtataaagaaagacaaaacttgaggaagaataacagattataaaagattttagaaragtggatattatttgccttaatttatatgatttgtattagttttctattggtg

SEQ ID NO: 852514 - DNA, 528 bp, Homo sapiens; identical to SEQ ID NO: 847933

SEQ ID NO: 852515 - DNA, 607 bp, Homo sapiens
tggcagagacacctttatgtttcctatgcaaatactgcttacaaaagccattaatgggaattatggaaggggaaagccaactaaatacatgggccagaataagcaggatgattcaactggtcttcaggggccttctcctctgctggtaattttattagaaccattaccagtgaagaaattttcagcttttcgaattgaactgtaaattgtttctgctttccatagtatcttaaagggatttcagggggaatttttgtttggtttgtggagtgatcagactaggggaagttttttggaaatttctgggttactgttgggaatttttccagaaatggattcttcttctttggaagtcttttggtcattagtttaaatactatattggaaaatttctacataaagatttgtaatgtgcccccaattttctgtttataggatttataagaatattattgtaatggtaacatcttgtaatggtgacaatatttctattaattttatgaaaccctataccactgctttaatctctgcagtaagaagtcattattttttaaagcrccaaacacagaatgtgtttattacaattcttcatgacccaaattatttt

SEQ ID NO: 852516 - DNA, 422 bp, Homo sapiens
atgtggtcagccctaattgtaaaccatcagtattatctaatatattttagacccgtccaccaccacaggaccaacttgctagtttaactgttacactgccctcagagaatcctatttatctacttaatttttcatccactcatttattccattgttcattttctcaaaaacagtttggagaaggatataccacttaaggactggcaaacctataaaaagaattaatgaggcctaattgtgacaataagcatgcactttggtgagctggagtcattgactaatataagccaatcctcccytcacctctaattcattcacattgcattgtggtaacaaaatgaataaggggtttagtcatttatatgtgacccaggacgatgcttaagacatattttatttgacctagagaaaaaatatgtaag

SEQ ID NO: 852517 - DNA, 607 bp, Homo sapiens
gtttactatatttgaatttactacatatattgaattaaatataaatccttaggttatactttctagtaaaaattacatattaatataaatgtgtattaataacamaaatttttttaaaaaagaaaacaggccaggtgcagtggctcacgcctgtaatcccagcagtttgggaggccaaggcaggaggatcacttgaggtcaggagtttgagaccagcctggccaacatggtgaaaccctgtctctacaaaaaaatacaaaaattagctgggtgtggtagcacatgcttgtaatcccagctactcaggaggctgaggcaggagaatcgcttgaacctgggaggcagacgttgtagtgagctgagatctcaccattgcacccaagcctggcggacagagcaacactccatctcaggaaaaaaaaaaaaagaagaaaagaaaacaacacaataaaataacaaaaaatgtaaataactacttctggggcagtgagagaacattactaccagtctgataagattatattctccttggaatatgcctccatatcacccctgaagtgtataagtggtgtttgcttaggggaaagaatgacttaaaatttagtaa

SEQ ID NO: 852518 - DNA, 542 bp, Homo sapiens
cgctaaagtttcttacatacattgggccctcatgttttatccatcaaagtataaggttatycatgtgtatggctggctgcacactccttcacaaataaaagtacaccccattagtgcacataagagacctccttttcacttcttttgatcatagaggcacaagcaagaaaaaatattcaaggataagagtttcatgagagtagaagtcttaatccatgaacctggaaaaagatattcacatcaaggatggcacccttctcctgggagaaacctccctggtaagttttaccccaagggttccaatgggtgtacagttccaagattgtggagtgacccctctcagttgtgagaccatgaacccaaagcccaaggtctcaaagttttgctgcagtgtggatggcaaggacagtccctgtctgatgcctcgagaagacccaaaccataaaaagttttccccatctggtgaaaacacacaatagcataacaatccactattacaacatcagactcttgtgtgggaaagccttcatacaactagaaaa

SEQ ID NO: 852519 - DNA, 613 bp, Homo sapiens
aactacatacactacctacgctgtttctctcctttccttcatagtcaagcctttagaaaaaataacctatgttcatgatgtctacttctccaccttccattcattctccaattcctaaaatayggcttctgtctgggttacttctctgaagctgttttctctaagggcttcattgacacacttattatcaaaccaactatacctttttattccaattattctcatctttttgtagtgttcgcttctgttcaccactacatctttctgaaaattattttatcattttctatcctgcaaattcctcctgattctctttctattctttttatgagcactccttagttttcccattgatgtttccccaggtacccactcaaatcatttatttctttcttcatgcaattttcttaggcaatattttcaacttccacaatgttaactccacatatcctcaattactcatccatatctacctatcacctacaacagttcttggagctgaggaggcatttaattagtatgttctgaataatcaatggatggatggatggctggatgggtggatctacatgagaagtcacaatctagaaatgttaacgatgaatgtgaagta

SEQ ID NO: 852520 - DNA, 664 bp, Homo sapiens
acaggttcttactgcagaaaggatccttgtaggtgtcagcctcaaagtgaactgttttcttgatcggcaaagagttggacctcccgttctcctttctggatgataaaatggaggattctggagatggctcactgatgtcgctggtcttacctgggcccccttgcaggacctggtcaataatctggtgcatgaactcggtggagctgtctgacagcgcatggctggaaacaccatccaggcggaattccttcatgctctcgggcttgtcacagacaaagactttggagggtggtgggtggctggtttcatggttaacagtgtaggtacgctccccattttcagtcagaacgaagactttgctctcctgttcagaaggagtttctttgatgcgaacaaaagtggattcgataggaacttctttatctgaatcgaaaatatcttcctgcaaaaaaaaaacaaaaacaaacaaacaaaaaaaaacaaaagaacaacaacaaaaaaaagcacagagcaacatgagtaagaagagkatttaagtacaacccatatccacctttcccaaaacacaaacaaacaaaaatggaaaaagccacttcaaaccaatgcaaagtgttctaagatgtaaatggttagagaagactcttgttcctgctgaaatatgaaa

SEQ ID NO: 852521 - DNA, 619 bp, Homo sapiens
ctgtataagacccgttcttttcaaatgcatatggcacatttaccaaaagaaaccatgtgctgggccacaaagctagcaacaatgtgtggtacayggtcagggcccaacaaatgtttactgaaatgaaataactcagcagaattgttaagaacagttcattgcgtgtctggataagctgtgaattctcatctgtattcccttgtagatgtaaatagactgttctgcagtgatgcagcatgttctgtgaaccagaatgactttctccaggtattatttctggctcaatcttttcccatctgcagtttctgacctcagcattggggagatctgtgtcagatttgctcaattttagctgtggctttgactcacacaaataccgtatgttttagttgatttcaaactctgcctacagattaagagctcagggctaatgaaagccccaatgcctagtatttcaaaatacagtaacaggccaggaaaattgaattgcaaaataataatcactacttttttttttttgcttaaaacaacaaaaatttgttatgttacacttctggacatcagaaatccaaaacaggcctcaatggactaaaatcaagatattggcagggccggatcc

SEQ ID NO: 852522 - DNA, 526 bp, Homo sapiens
cacgtcctgtttagagctggcagagtggagctatgacaaacctggaagcaggataggaaaagaaaagtgaattgagggaaaatcgcttatttacamatccgtctgcttaatcaacagtggcacatattccatgattttgttgatcccagctactgtggaaagcaaggactccttgggtcccaggactcatttgttttgtgtcattttggttttgaggcccagctctctgtctggcctttatagttccctggaacctgaggaatggaacacctggcatttgtactttgtgttgacccagcaggaaagtgtgatggaaggactatgtacttgagaatcagaaagggctcacccacatgttacttaacttttctgggcttcagtaacttcatctgttgaataatgatttaatagctttctctgaggatattgtaagttttaaatggaatattatatgtaacatgaggagcacatgataatgcctaataaacgttgcgtagagttcttttgtgcctacaaagtatttctt

SEQ ID NO: 852523 - DNA, 583 bp, Homo sapiens
ggccctggagaaacccctgtccacgtcctgtttagagctggcagagtggagctatgacaaacctggaagcaggataggaaaagaaaagtgaattgagggaaaatcgcttatttacaaatccgtctgcttaatcaacagtggcacatattccatgattttgttgatcccagctactgtggaaagcaaggactccttgggtcccaggactcatttgttttgtgtcattttggttttgaggcccagctctctgtctggcctttatagttccctggaacctgaggaatggaacacctggcatttgtactttgtgttgacccagcaggaaagtgtgatggaaggactatgtacttgagaatcagaaagggctcacccacatgttacttaacttttctgggcttcagtaacttcatctgttgaataatgatttaatagctttctctgaggatattgtaagttttaaatggaatattatatgtaacatgaggagcacatgataatgcctaataaacgttgcgtagagttcttttgtgcctacaaagtrtttcttttgcttgtcacaacaactttgtaaggcaaggcaggg

SEQ ID NO: 852524 - DNA, 590 bp, Homo sapiens
attggcttgattcacgtggcttgacttaaattatgtgacaaactttagcaatctctgaagccagggaaatgtgatgttctgattggccaggcctaagtcacctgctacttctggtgtttggggtagagagcttttccagaaactacctgagagtggaggaaaggtgatttactgaagaaaatgaagattccagaagtggaaagaatagatgatgggtgtcaaaaaaccccacagctctattagaggagtcaatgccattcatagacctctccactgctttgacattgaatgctgtttacaagcctgtttcaaggaaaagcctagatttgttgtgtcaccacatatgccgtatatcaccacaggaccccaaacacctatttctcagtgcttatggacacatgtctaccacaagtcagggaacactatatatacacacacacacacacacacacacacacacatatatatacacacacacacayatatatatatatatatttgatgctgtgcatcatctgtcactgctgatttagatcatggcttttctcctgcatgttaaaaaaaaaacaacctctcatgcacctttttag

SEQ ID NO: 852525 - DNA, 659 bp, Homo sapiens
ccatctcacatcagacaaaactgagctaacacaggggacgaaaatttcccaaagttttcaatcttcagaaggaaaacatggagcatgtaaggtcatgtagtgccactacaagaatgagacagctctttgatccaaaaaaggcaggttcctggcattgcctaacaaaagaatgcaaccaactctcatagaatctgccttttcccacggtgtttcctgataattaactagatacacatagcagccggccagagccagtgggaatcctgagaaaatctcagtccaaatgtttataaggtcctaatttaatccaccaaatacaaattaaagttacttctcttttatatcaagaggaggaaatagaacatgaaacagaatgtagccgttttcctaataacaaaaaaggtatcagctcactgtatcagtttaagtgtattttaagttgtaaaacatattaaatagtcttcatccaaaaaatatggcaatgagaggcaggctcttttaagtccaagtaaagtaaatttaaaagttctcataaaccaattttttttaagtcttcacagaaatatcracaagtgacacaaaaaatggcaatttatacaagaaatataaattaatattcatgctatattttccatgtaaaattagaaaataacttttca

SEQ ID NO: 852526 - DNA, 442 bp, Homo sapiens
tatcaattccagaaaggttttccctaattactcaacccaaatgaatccattcyttctctcctctactgttatatcatactcttatttttcttcatacttatttaaaatcatgtggcctatcattaattgtctattgtctgcctccaccactgaaatgtaagctccaggatggaaaggcctttaatctgttttgtttcgagctacacctgagcaccagaacgggacttgggacatgataggctctaattcactacacttgattgaattaactaactaactatccctgttctaacaaatacatatgtgctatacttaatttaaaatcctatccagaatgaagggaacagactagcaccctctgcaaattttattgtattatatccaagacccagcctgcagagactctgattttaacagtttagcagaactcaaaattctacat

SEQ ID NO: 852527 - DNA, 406 bp, Homo sapiens; identical to SEQ ID NO: 850264

SEQ ID NO: 852528 - DNA, 609 bp, Homo sapiens
tggagaaggaggctgacaagcagggaaaatggtggcctgccaaagaagtcataggtaagggacataacagctgccttcagttatttaagacctcactaccaccatcatgggagaggaattagacttattttgtgtagtttcaacaaagtcaaagtttacctgctgacttggggagtaccaagatcaatgggtaaaagtaataaaggatacaaagtttgctcaccataaagaagggctttgagagaactagagctcctcacgagaaaaaggggctggattattcagcaaatccagatgccaccagggagaatgtgatctggggggaactagatttgtagctttcagaccattttacagattcctaagggttctgcagcacctccctgagagtagcaaaaggaagggagctgaagactccccaaagtttaattcctatctgctttttattggacttctacatatgaggctctaagaaggcaattttaatatagcaactattcttgcttcagatttatactcaattttgctttaaagtaaaagratatatccaaagtttatatttatatgtagagtatctaaggggcagtgattttaccattaaagatgaaa

SEQ ID NO: 852529 - DNA, 573 bp, Homo sapiens
aaacttgaatccagcaccatatataaatggttatataccatgactaagtgggatttatccaggaatacaagattgggtcaacattttttttttaatcaaggtaatccaccacatgtgtagaatgaaggaaaaaaaaacacatcatgtgattttcagatacagaaaagacatttgacaaaatctcaacatactttcataataaaagcactcgggaaattagaaacagaagacaactttctcaacctggtaaagggcatctacaaaaagcctgtggctaaacttattctttaatagtgaaagactgaaacctgctccttgagatcaggaacaagacaaggatatccactctcaccacttctgttcagcattgtactgtacgtttcagccagagcaattaagcaagaaaagaaataaaaggcatctagattagtatggaagagataaaactatctccgtttgcaaatgacatgacattataagtagaaaagtccttttgttcytcaaaggacagtgaagaaaatgaagacaaccctcagaatgggagaaaatattagcaaaccacatatctgataa

SEQ ID NO: 852530 - DNA, 503 bp, Homo sapiens
attctttgttgccatttcaacaatattcacatcttcaccaagagtccatctcaaaccactttctttgttcatccataagaagcaactcctcatccactgaagttttytcatgaaattgcagcaattcagtcacatcttcacactctgcttattttagttctcttgctatttccaatacatctgcagttacttcctcattgaagtcttgagcccctcaaagtcatttatgagggttggaatccatttcttccaaacttctggaatgttgatattttcaccccccatgaatcactgaatcacaaatgttcttaatggcatctagaatgatgagttccttccggaatactttcagtttactttgcccagattcatccactatctatagcagctatagcattataaaatttgtttcttaaatataaggcttgaaagttaaaattactccttgatccgtgggctgcagagtggatattgtgttagcaggcatgaaaacaacattcatc

SEQ ID NO: 852531 - DNA, 560 bp, Homo sapiens
ttagcctgttcctccaagccagctctaagcatctggtacatctctttgaatggacaaaggagtgaggccaaagctgtagtcccttgttgtctgagctcttgatctgccttccctgacagccctgcttgcagagaaacagagagattagggagatgcctgggggctgggaatgtgacaggtgacagtttccatcagcatttatctctacttggcaaaaataagaaaggtctggaaacaggcctctggtggaacgtgttggcaatcacaaagcatcctgagtcgtgctttggaatccagaaatatatgtgtattatccatataaccaggtaacaagcctcatagtgactgtgagagtcactagaatttgaccttcattgaaataagagcaaccatttattggccaagagatttatacgcattgcctttaatcattacaataacctctgagataatctattttatgcttgaagaaaactgrgattgaggaagatttgatggtttgtacaagagcacaaagccataaatgtaaggggccagggatccaattcgggcttttctgg

SEQ ID NO: 852532 - DNA, 686 bp, Homo sapiens
aaagaatgagttttaaccactctccaccaagagcaaaagctgctcagccaagtcagagatttcctttccccttacctctcctctttctctgccccttcagcccttgcaggatagaacataggagtctgggagtctgcaagaaggtaagtaagagaaagagtagaaccttaaaggcaggcagctgccaattattggcctcagcccactaaaaagaaggcgatgtctctcctctgaatgaagactgagacattgattaatgtcatggactggattgattctatttactgaattgagattgtgtgttgagactcaaaatgaccataggaccatctattatttaccaaacattttctaggggcaggggataaatttaaatcacccaaaaactgataatgatagggttgagcttttactacatcatgagttgtgcatgctcaacacaattttgacaaaaattttctgctgactgaagacacattaaaaaatagcaccatgttttgttttgttttgtttcactgtattttttgtttttctttttaagaaattctcttttaacctgtatgaattctggggtgaaaaaaaawttttttttttttaagagacagggtctcactatgttgccccagttggccttgaactgctggactcaagggatcctcctgcctcagcatcctgagtagctgggt

SEQ ID NO: 852533 - DNA, 620 bp, Homo sapiens
tctaaactataactaaagagaagttgaaagtggcctcagatgcattctctgtggagatcagaaaagagacatctkgaagacctggtgttactaaagaaacaaacttgtcactcttcatcaacaccctcagccacttcttgtcctccctctgtcccctcccacaatctaactctgaagttgggcttcaaatctaacatctactcaagccctcttattcaccaaatacagtgaattagaataattcactatattaattgcttccagacccaccctcatgttccctcttattgtcctgctatgtcctcccttcatttcaaagagagtattttctctaagaaacctccccaaatctaccaagaggtatctgtatccttcttgtccccccatttatatgtgaagagtcctccaggatgtatatatgttgagacattttcacaactaatgacattcatggctgtttcgtgccataaccccccatgtgggacctgctctgtgttctgcagccctgtctccatgtctcacatgtttgccagttttcactaggctacactgtggtaacaaatatccccaacatctcagtggcttataacaaccaatgcttatttttcactcctatacat

SEQ ID NO: 852534 - DNA, 627 bp, Homo sapiens
ggccacaggagtgcttgtgtcactccacccctagctttacgtggctcagaacagagtgagaaactgtctctttgggaaaaaagtaaaggaagagaaccagagtctctgcctggtaattcagagaattcttctagattttgtccaagaccgtgaaggcaatacttccatgagtctgcaagaaccatggtgttactgaacttggggtgcccccctaaagcagatacagcttagatcacaacaccaaagtcctttcaaatatctggaaagcctttgcaagaaggacagctataaataagcccagagagttaaggctacagtaatactcctcaaggagagcaagcccaagatacataatcttcagattcgccaagattgaaatgaagacaaaaatgttaaaggcagccagagagaaagatcaggtttcccacaaagggaagcccatcagactaacagcagatctctcggcagaaaccctagagagagaagccagaagagagtgggggtcaatattcaacattcttaaagaaaagaattttcaacccagaattttatatccagcaaactataagggaaggagaaataaaatmctttacagacaagcaaatgttgagggattttgtcaccatc

SEQ ID NO: 852535 - DNA, 513 bp, Homo sapiens
tccaagggctggacgtaactgtcagataaagagaaattagaactacgtgatgaatctactgaaagatagaccagaacctttctcattcagtcatgmtctagttgttaaactaaaccctgttttttgatttgggctccaaattcatttcttttattatttaagtgaaaccttatgacattcaaaagcaacttggagttcatctgcaaaccaaagccatgagaagagaaaaaagtgggctgtcactttcctgactgtggctgatttaggggtctaagtgctagtgcttctatttttcttcctttatttcaatttcctggctagaaactggcattttccacttacttcaccctttctgatattggcacataccatacacaaaagagtggccacaattttaagtcatcaatcttcatgtaatacttaatctttaagggtaaggataatgtatttaaaatttgctggtgaaaaaaatgacacaaaatgatatcttttacttttgagatctagaaaagc

SEQ ID NO: 852536 - DNA, 643 bp, Homo sapiens
ggatctttggttcagaaaaattaaaatgatccagggtgttttgatgaggaatgtattaggctgattgggaatttctgttgttttaattgaaagctttacagagaattgttagggtttttttctagttgtttatcagggttggcaagtttagaatggatacagtaacttaggggagaattccttctagaaataaagattacatttcactggagaaaccattgtcttgcattcttgggaacttgaaagtaacttggtgatcacatcactttcatgtttaaactattattattattgtaattattgatgagaatacaaggaatggcaacataacatcttggtctataccattgtactctatgacctaaatagctccttcacttttctgcttccagatttacctcaattaaattcatgctcaatatcgctattagacaaatttttgcagttactttcttaggaaacctcaatggctttctattaactaaaagattgattcaaaacttctctgctgacttttaacaccttctgtatctaatcctgctcaatcaacccaawtgctgatttcccacaaaatgccagtacacaccatttgcttgagcaagcttaattatggttatcttgagtcttccctcaacccttcaat

SEQ ID NO: 852537 - DNA, 614 bp, Homo sapiens
cccaacctccaaaaattctggtcgcaaagagttggaacttcgctcgggatattaacatgkagtggataaatacctacggaagggaaaactttacctctaccctcttaggatctctggctgggtctgagaactaaattcttataagacagattaacatgagaaaagcatacagattttcacatgtacatgaaaacccacctaggaaaatgaagacccaatggagtggcaatactaaatatatgtatagtaaattgaacaaagaatggtaactgtggaaaaagtaactaaagtaactaaattgggaggctaaaggcagagttattttaacaaggtctggctgtacagaattttctaggccttgactgtctatctctggtgacaagaatgtttcttccctcctgttatagggagtgcatctttcacatgggagttttctctagtctctagtgatgagaatgtttctttcctcctggtgccagagcacagtgtcccttacaattgcttttgttcaagtgcctttagctcaaaataatcttcatgccacacttgcatatttttgtgtgcatattctaccaccttccgcttactcttgaggagtaattttgaagagccag

SEQ ID NO: 852538 - DNA, 614 bp, Homo sapiens
cccaacctccaaaaattctggtcgcaaagagttggaacttcgctcgggatattaacatgtagtggataaatacctacggaaggsaaaactttacctctaccctcttaggatctctggctgggtctgagaactaaattcttataagacagattaacatgagaaaagcatacagattttcacatgtacatgaaaacccacctaggaaaatgaagacccaatggagtggcaatactaaatatatgtatagtaaattgaacaaagaatggtaactgtggaaaaagtaactaaagtaactaaattgggaggctaaaggcagagttattttaacaaggtctggctgtacagaattttctaggccttgactgtctatctctggtgacaagaatgtttcttccctcctgttatagggagtgcatctttcacatgggagttttctctagtctctagtgatgagaatgtttctttcctcctggtgccagagcacagtgtcccttacaattgcttttgttcaagtgcctttagctcaaaataatcttcatgccacacttgcatatttttgtgtgcatattctaccaccttccgcttactcttgaggagtaattttgaagagccag

SEQ ID NO: 852539 - DNA, 504 bp, Homo sapiens
gtatttctgtttttcatattatttatgtccgctctttattttcttccttctgcttgctcttccctttctagtttcttaaatagaaggctagatcattaacttgagaactttttccttttctaatagaagcagttaatgctataaattttcctctatatgcctgtttagctacatccgcccccccgcccaaattttaacaggttgtgtttttaattttataaaattaaaaatgcttataatttcccatgtgacttgcctttttacccatgaattacttagaaagttctgtgttatttaatttccagatattggggaattttctagattgtttattactaatttctgcttgaatatgttataaccagaaaacattatttacatrattttaattctcttaaattttgtaagacttgttttatggcctggaatatggtttatcatggtgaatatttcttgggcatttgaataaactatgtagtctgccgttattggatagagggttct

SEQ ID NO: 852540 - DNA, 622 bp, Homo sapiens
tgtaaattagttttcccaaatctgtatctagccttcattttcttatcagtcatggaaaaaggatgattatttcattattggttctgaagagtctttcatattaagtggtgcagctctggtttcaggcaggcatttaatggactctctatttgttttattgtctcatcatcttaatcaaagccctctgagacagagtcttttgtagtaacaaacaagaataaagggaaattatgaattgttgcttccacagaaaatgcagtattcattagaaatttctgttgggattaaaaccaggctgacttcaaacatgtaaaaacaattataatcacctatgagaaaccttttaatcactaggatacctgttttctgagtctctcattagcctactaccaaagcaggtccctcgcttggggctcatgcttcactgtattgtcacaagatagctagtggaagattttcagctctcaagtttattttttttgtgtgagaactgcactmctgctttctcccaacactttataatttttttcttacagctttttttttatctttgctatataaaatttaacattaactctctgatttactgaacagacactgtcctagattcctgatattgaac

SEQ ID NO: 852541 - DNA, 617 bp, Homo sapiens
taatcatgtaatctccccatcccctcacacacacacactactttttgggtcaaaggaatcatttcctgtattttcatggatttttgcataagtaaacaggcatagaaccaactcttatgagccgtagattaatgagaagcttcttttgattctgacttatgttaaacacagagaagatgtgtgaattctctgcgctcacacaagatttgctacaaattaatgtgaattgtagactgatgagaggcacagaatgggacccgcacatcacacatattcaaagacaggagaagaaaatcttgatgagtaccaggtcagagatttccctaagttattcctagttatcactttctctgatgccctgaaaagtggagagtgaaaattaccctaaaacctactctcagtgatggctatcaattttttgtaattgatgtacataattatacttaaattaatatttgaaatagtgaaagttttgacacgcttyggtttgtgcacatgagggaggtagtaagcaggcagggtaaagctgaggtgtcctgggatctctgccaatctcctttaagactcaggccatgatcagtgtcttccaacacttacctgtctgtctagatatacta

SEQ ID NO: 852542 - DNA, 610 bp, Homo sapiens
attgatagaatcttggaaactgtgaccttaagcaaaatgacacataatgaaacccattttgccgtaggcaaattgacataaacaagagttaagttcttacagtatttttttggtaacaaaaacatcacaaacttctaaataaagacccaaaacacttctaatagtaaacactaaaataaatgtgagctatacacagatttaagaaaaaataataaaaacaagtgacaattatttacccaatttgtggttaatcagtgaatgatggttgtcatagtggtggtgagttaagtcaaggaataaacttcttgatttattcaaaggaataaatcaaaagcaaagcaaaattgtaaggagcatctcctcccatcatataatttaaaagcaatcacaaatatggtggcttacagagtgcttttgtactgcattgtttattgtctgcatttgtataattattgtatatgaatttttattttataataacttgtattcattcattcattcacatgttttgcagcctacttatcccagttaagggttgcagstggttggaacatatcctagcagctcagagcacaaggggggagccagccctcgacagaatgctatgcca

SEQ ID NO: 852543 - DNA, 597 bp, Homo sapiens
actttagggttcactgttggtgttcgtattctgggttttgacaaatgtgtgatgacatgtatatgatcattatagtatcgtacagaatagtttcactgccctaaacatcttttgtgctctccctatttatttctcccttacccctaactcctcacaaccactgacctttttgttgtgtccatgattttgcttttttcagaatgtctaacagttggaatcatacagtatgtagcagtctttgtctgctcaggctgccataacaaaataccatagactaggtagctgaaacaacagaacttattttctcacagttctgaaggttgggaagtccaagatcaatgtgctgactggtgaagaagggctctccttagttgtagatagccaccttctcactgtaccttcatgtagtctttcttttaaggccaccaattctgtaagattaggagtccactcttacaatctcattttaccttaattatctccgtgagggcatatgtccaaatacagtcacattagagattagagttttgacatataaagttgagrgataaaattcagattggcttatttcaacttagtaatatacattttaaggtt

SEQ ID NO: 852544 - DNA, 524 bp, Homo sapiens
ctaggggaaggacacagcattaggagaaacacctaatatagaygatgggttgatgggggcagcaaaccaccatggcatgtgtatacctatgtaattaacctgcacgttatgcacatgtatcccggaacttaaactataataaaaaataaataaaataaaattataaaatgtcaatctctactgaattgggggtttgggggtcatgggtgtcagctaaattatttctttgtactttttaaattgtttgaaaggtttcatattttaaaagtttcatcaggtagtatgactctgtagtttaattgtttagagtactagttgtagtttaagactgccctggcttgtcatctgagtttttagtgtttgtatgattttgtacctgtttcttattttcttcaaatctcagtttccaaatctggtatctgtgaaaattaaatgaaataacccacatgaacatcttagcacagtgtctcatacacagtatgtgctaaaacataattttattatcaactgaaattaatatttct

SEQ ID NO: 852545 - DNA, 524 bp, Homo sapiens
ctaggggaaggacacagcattaggagaaacacctaatatagatgatgggttgatgggggcagcaaaccaccatggcatgygtatacctatgtaattaacctgcacgttatgcacatgtatcccggaacttaaactataataaaaaataaataaaataaaattataaaatgtcaatctctactgaattgggggtttgggggtcatgggtgtcagctaaattatttctttgtactttttaaattgtttgaaaggtttcatattttaaaagtttcatcaggtagtatgactctgtagtttaattgtttagagtactagttgtagtttaagactgccctggcttgtcatctgagtttttagtgtttgtatgattttgtacctgtttcttattttcttcaaatctcagtttccaaatctggtatctgtgaaaattaaatgaaataacccacatgaacatcttagcacagtgtctcatacacagtatgtgctaaaacataattttattatcaactgaaattaatatttct

SEQ ID NO: 852546 - DNA, 503 bp, Homo sapiens
ggttctcaactctgtacactagaatctcctgaggagctttaaaaacataatgatgtcaamactctataatggaccaggtaaatcggtatctctcaggggataggatcgtagacaagggtaatttttttaatactccttgtgtgattctaatgtgcttccagaattgagaagcattcgtctataccttctgtgatgaatttgtcaacaaagcaattagagtgtatttattttgtaacttgaatctgagagacgattaatacttaaagtcccactctattaatatatcctaccctttattttgttccctatcagtactaggaaaacatcagtgaagaacaaataatatattcttaagaatactgtccctttgtctaattcccccaagttgttttctctcatggttttatgtaacttttagtactgttaattaatgatatgaactttaaggtcagttaaatctgctgggtgtgagtgattaggtagatctcagcttcttaatttaa

SEQ ID NO: 852547 - DNA, 503 bp, Homo sapiens
ggttctcaactctgtacactagaatctcctgaggagctttaaaaacataatgatgtcaaaactctataatggaccaggtaaatcrgtatctctcaggggataggatcgtagacaagggtaatttttttaatactccttgtgtgattctaatgtgcttccagaattgagaagcattcgtctataccttctgtgatgaatttgtcaacaaagcaattagagtgtatttattttgtaacttgaatctgagagacgattaatacttaaagtcccactctattaatatatcctaccctttattttgttccctatcagtactaggaaaacatcagtgaagaacaaataatatattcttaagaatactgtccctttgtctaattcccccaagttgttttctctcatggttttatgtaacttttagtactgttaattaatgatatgaactttaaggtcagttaaatctgctgggtgtgagtgattaggtagatctcagcttcttaatttaa

SEQ ID NO: 852548 - DNA, 641 bp, Homo sapiens
gtgagtaaatgaaaacacaaacagacccataaacaaattacatgtgcatgtatttatttttttttctatgtaacaaaaattctggaaagtagctgttcttagtttgagkttagtggctcatgtgtatattaaagccttgatatgtgatattatcttaacattttcctcatgtctccatgaaggaaccagtagttctagctatcaaatccattttctatgcaaaagagagaagaaaatgagaaagaagaaaggtaattttctgaaaagcctcagcaaactttagtttattgctcattggttgcagcaaagtcacagagaaatctttactgcaaagaagtaggggaattttttttttaattttacatattttcacctaggaaaatatcagggtctattagttaaaagtgaggaaagaacaaatattgtataaacaattggtactaattgacacaatttcctgggtcaaaatatggaaagcattatatgcctttctaggagaggatccatttttattgaatgttgcatccttatcaatgaagcataatagatagtcaattagtaatattaatgtgagccctatagaaagggttctagcaacatataaaagtatagtttgcaagaggtacatatgaataacaatg

SEQ ID NO: 852549 - DNA, 507 bp, Homo sapiens
tgtggtgtccctggctcctggaatcacacagaggatttgaataacttgtgcaaattctaaagacaaagaaaaaagtggtagcactgagtttctcactagtgatttccagaatgtgaaggaaaccaggcatcctttgccactagattaactttgagcaacatctgtagaatgctgggagatgtgtgcactccaggagaactgccaatgtcacagacaaaaggtttcagcataattataaagtctccatgggggaaagaagcacagtatctcactggagaaatggaaatgatctttaggacactgttaatgtgcataaaattctggatagcaaccaactgtgaacacataaccattaaatcgcaaaggaaaataagaraaaaaaattgcatgtgtctgctttgaacattttccacaagcaacttcatgtatgagacaattatggcaagtttaaattttgtggttttgttcaattcaaaaggaaagctattatattaattacatcaactt

SEQ ID NO: 852550 - DNA, 449 bp, Homo sapiens
agataaactttaaaaatattaacaactaattagttatttaatgtttaaaaatgacattaccataatgcacaaggaaagaaaagcagcagcctctacctaaatgatattgtatttattttctcattacatgtgaaatagtaaataggaccaaacaacttaagcctgcctatctctttctttctaagttcaaatacaggaaagccactttgaggtggcttttttaaaaacaccaccacacaatcaaacacacttctaaaatgtctgtctttgtttccgctgctatagatgcacactaggatctgaatatttagtcaaaagcttttctgggacktactggaaaggacactggggaatgattgaatctaattctaattctgtcaggcgtttgtgaacttttaatagaaagctaaataataagccatcaaatccccaccttaacttgtaagata

SEQ ID NO: 852551 - DNA, 593 bp, Homo sapiens
gggagggaggggaaaagaaaaaagaaaagaagaaatgtgtccctcctacctgcctctagctgcttttamtgttttttccttgtctttcatttgcagcagtttaagtatagtgtgcctgggttgggtgcggtggctcacgcctataatcccagcagtttgggaggccaaggccagtggatcacctgaggtcagaagtttgagaccaacctggccaacatggtgaaaccccgtctccactaaaaaatccaaaaattagccaggcatggtggcgcgtgcctgtaatcccagctattcgggagactgaggcaggagaatcgcttgaccttggggaggcggaggttgcagtgagctgagatcgcgcgccaccgtactccagcctgggtgacaaagaaaaactccgtctcaaaaaataataataaaaaaaaagtatagtgtgcctggatgcagttttgtttttatttatcctgcttggggatcataaagctttatcagttttggaaagttctcagcctatatttatttaactgttccttctgccccatcttcctcccttcttcaagactccagttacatatgtattaggcctgttcacc

SEQ ID NO: 852552 - DNA, 593 bp, Homo sapiens
gggagggaggggaaaagaaaaaagaaaagaagaaatgtgtccctcctacctgcctctagctgcttttactgttttttccttgtctttcatttgcagcagtttaagtatagtgtgcctgggtygggtgcggtggctcacgcctataatcccagcagtttgggaggccaaggccagtggatcacctgaggtcagaagtttgagaccaacctggccaacatggtgaaaccccgtctccactaaaaaatccaaaaattagccaggcatggtggcgcgtgcctgtaatcccagctattcgggagactgaggcaggagaatcgcttgaccttggggaggcggaggttgcagtgagctgagatcgcgcgccaccgtactccagcctgggtgacaaagaaaaactccgtctcaaaaaataataataaaaaaaaagtatagtgtgcctggatgcagttttgtttttatttatcctgcttggggatcataaagctttatcagttttggaaagttctcagcctatatttatttaactgttccttctgccccatcttcctcccttcttcaagactccagttacatatgtattaggcctgttcacc

SEQ ID NO: 852553 - DNA, 591 bp, Homo sapiens
caaaaattagccaggcatggtggcgcgtgcctgtaatcccagctattcgggagactgaggcaggagaatcgcttgaccttggggaggcggaggttgcagtgagctgagatcgcgcgccaccgtactccagcctgggtgacaaagaaaaactccgtctcaaaaaataataataaaaaaaaagtatagtgtgcctggatgcagttttgtttttatttatcctgcttggggatcataaagctttatcagttttggaaagttctcagcctatatttatttaactgttccttctgccccatcttcctcccttcttcaagactccagttacatatgtattaggcctgttcaccacttcccacaagtatcttatgttctttgctgtattttccatactctttgtctctgtttttcagcttagagtttttattctgtcctgtattacagttcaaagaatgttccttctgctaaatctaattgtagttaacccatatgctaagtasttaatttcagttattgtatttttaagttttaaatttccatttcattctttcttatagattccagttctttgatgaaagtctctattccacccat

SEQ ID NO: 852554 - DNA, 591 bp, Homo sapiens
caaaaattagccaggcatggtggcgcgtgcctgtaatcccagctattcgggagactgaggcaggagaatcgcttgaccttggggaggcggaggttgcagtgagctgagatcgcgcgccaccgtactccagcctgggtgacaaagaaaaactccgtctcaaaaaataataataaaaaaaaagtatagtgtgcctggatgcagttttgtttttatttatcctgcttggggatcataaagctttatcagttttggaaagttctcagcctatatttatttaactgttccttctgccccatcttcctcccttcttcaagactccagttacatatgtattaggcctgttcaccacttcccacaagtatcttatgttctttgctgtattttccatactctttgtctctgtttttcagcttagagtttttattctgtcctgtattacagttcaaagaatgttccttctgctaaatctaattgtagttaacccatatgctaagtacttaatttcarttattgtatttttaagttttaaatttccatttcattctttcttatagattccagttctttgatgaaagtctctattccacccat

SEQ ID NO: 852555 - DNA, 689 bp, Homo sapiens
atggtttcattgtttcttttggttcctcaagtctcaaacccattttaaatttctcctcccggccagtagcggtggctcacacctgtaatcccagcactctgggagayggaggtggctggattacttgaggtcaggagttcgagacatgcctggccaacacagtaaaaccctgtctctactaaaaatacaaaaattagccgggagtggtggcacatgcctgtaatcccagctactcgggaagctgaggcaggagatttgcttgaacccaggaggtagaggttgcaatgagctgagattgtgccactgcactccagcctgggcaacagagcaagactctgcctctaaataaataaacaggtaagtaaactactctttctataccttctctttctagttacaagctattgaggcactccagagtgacggcatgtgatccccctgacacaagaaacaggcccagataacacaccgttcagaccgacagcagttctggttatgctgcagtacatcagacgagtgctcttatccatccacagttcttatcacagttacttatgcatatattcattttttatataaaagaatcttgaatcggtcacttaaatattgaatctcaataataaaaaatactaaaagtatagctaaatgtgttattttattttgcatttgtcctacactcttcccctcac

SEQ ID NO: 852556 - DNA, 689 bp, Homo sapiens
atggtttcattgtttcttttggttcctcaagtctcaaacccattttaaatttctcctcccggccagtagcggtggctcacacctgtaatcccagcactctgggagacggaggtggcyggattacttgaggtcaggagttcgagacatgcctggccaacacagtaaaaccctgtctctactaaaaatacaaaaattagccgggagtggtggcacatgcctgtaatcccagctactcgggaagctgaggcaggagatttgcttgaacccaggaggtagaggttgcaatgagctgagattgtgccactgcactccagcctgggcaacagagcaagactctgcctctaaataaataaacaggtaagtaaactactctttctataccttctctttctagttacaagctattgaggcactccagagtgacggcatgtgatccccctgacacaagaaacaggcccagataacacaccgttcagaccgacagcagttctggttatgctgcagtacatcagacgagtgctcttatccatccacagttcttatcacagttacttatgcatatattcattttttatataaaagaatcttgaatcggtcacttaaatattgaatctcaataataaaaaatactaaaagtatagctaaatgtgttattttattttgcatttgtcctacactcttcccctcac

SEQ ID NO: 852557 - DNA, 560 bp, Homo sapiens
aatgttgagtcatcctatccaagaacaggraatgtctttccatttattcatgtcttcatttctttctggagtgtttaaattttttcctcatataggctttgcatatttcttgttaactgtattttgaactatcttctttattactatagtaaatgagtttttcactatcattatgccctctgtttattatttgtgtatattgtctaattactattattattattttttttttgagacagggccttgctctgttgcccaggctggagtacagtggtgcaatcacagctcactgcaacctcatcccccagcctgggctcaagcaatccttttacctcagcctcccaaacagctgggaccacaggtgtgtgccaccacacccagcatttttttctttttctttttcctttcctttttcttttttgtagcccaggctggtcttgaattcctgggctcaagctgtccacccactttcatctcccaaagggctagaattacagacgcaaaccactgcactcagcctaatgatattttttaacattaattttgcatcctgttatatc

SEQ ID NO: 852558 - DNA, 487 bp, Homo sapiens
aactagagatcaaataggttaaataacctgcctaagggcacgaaatgacaaaacagcaaatctaaaatctaaatctaggtaaattaacaaaattkcttctttatattcaaatgatagcagtatggaagtccactgctctatataaaaaaggtttaatagtttttatttacataaggaaaatgttatcatgtatatttctgatacatcaaaaataattttttttaggaccagaaggcaaagtagtggttccaaagccgtagtgcctaggagagtaataatattcagtatgcactggtcccttctactataaatatatctgaatataacacacttgattatttttccctaaatagcacgataattatcttccacataagttaaaagtgaaagactttggaggtagggaacattttccaattggaaagagagagctgtatatctaagacggatagagtagaatcaggtagaactaaacataccaacaggt

SEQ ID NO: 852559 - DNA, 487 bp, Homo sapiens
aactagagatcaaataggttaaataacctgcctaagggcacgaaatgacaaaacagcaaatctaaaatctaaatctaggtaaattaacaaaatttcttctttatattcaaatgatagcagtatggaagtccactgctctatataaaaaaggtttaatagtttttatttacataaggaaaatgttatcatgtatatttctgatacatcaaaaataattttttttaggaccagaaggcaaagtagtggttccaaagccgtagtgcctaggagagtaataatattcagtatgcactggtcccttctactataaatatatctgaatataacacacttgattatttttccctaaatagcackataattatcttccacataagttaaaagtgaaagactttggaggtagggaacattttccaattggaaagagagagctgtatatctaagacggatagagtagaatcaggtagaactaaacataccaacaggt

SEQ ID NO: 852560 - DNA, 504 bp, Homo sapiens
aattccaagtgattacttacagatttagattccagaccctttcctcagcttttgaaccttttatctacaactgcctaatggaaattcccacctggatattccattggctccccaaactcagcaatgtccaaatctgcttttcctttcatagcgcccaactcatttattgatgctatgctgctaatcaagtaaactaaaatctgaagtcatcttgcctctcccttcccactccttgccaccagctcccacctacccctctgctgcttaaatgtgcccatgccccaccactactactgttttacattacacattcctttccctcccaacaggtgcttgtcccgcctgcaacccatttcttacaatgctaatgagtcattwatcagagcagtaatgagttcaggcgagtgatatatcagagcattaatgagttcaggtgacttactaaaaaacagtggttccccactgcctagccaggaagagctagtacagcattcaagacttttc

SEQ ID NO: 852561 - DNA, 504 bp, Homo sapiens
aattccaagtgattacttacagatttagattccagaccctttcctcagcttttgaaccttttatctacaactgcctaatggaaattcccacctggatattccattggctccccaaactcagcaatgtccaaatctgcttttcctttcatagcgcccaactcatttattgatgctatgctgctaatcaagtaaactaaaatctgaagtcatcttgcctctcccttcccactccttgccaccagctcccacctacccctctgctgcttaaatgtgcccatgccccaccactactactgttttacattacacattcctttccctcccaacaggtgcttgtcccgcctgcaacccatttcttacaatgctaatgagtcatttatcagagcaktaatgagttcaggcgagtgatatatcagagcattaatgagttcaggtgacttactaaaaaacagtggttccccactgcctagccaggaagagctagtacagcattcaagacttttc

SEQ ID NO: 852562 - DNA, 501 bp, Homo sapiens
actccacctgactagggaaggcttattaaaggaggggataagtggaaagaaggggcagagctgagaaggatagaacagaggcccagaagtggcaatgggcaggagagtggacaatggaaaggagagcaatgcagatgcaataaagggatcaattatgctgagctcagaagaggcaaatgactaaagaaagagtcttcaaagactaagtgggagaaaaacaaaaacaaacaaaacttagctttataaaataagctaccactataccataatgacctcacccgtgagtaaaattatatctccaagaaacactgtaaatgcccaaaatgctgcagtcctccacagaaaaaccttcttcttagtttctgattgatcamttactgtaactgttgctaaaggcactttagagccagaatttggtccgaattttgtttatttccttcacatggcatggagatagcaccatgactaaacaattatacttctggcttttagaatcacagt

SEQ ID NO: 852563 - DNA, 503 bp, Homo sapiens
gcgggcgcctgtagtcccagctacttgggaggctgaggcaggagaatggcgtgaacccgggaggcggagcttgcagtgagccgagatcccgccactgcactccagcctgggccacagagcgagactctgtctcaaaaaaaaaaaaaaaaaagattcttgttctactgaagaactgactgtacctaaaaactactcagtagtttttatactttttagttgccgtaatcaatctttcactctcactaggcaagttagcaattaaaagtgaaaactttctaccagctatacattaactcagtaatgctaggacaagcatttttccatttcacaataggtagcctccaacttatgcacagattgtgctctccaaattgagttatcctgtgttataaaacttgtgaaacgtttcctcaaagaaataaaattakgaaataaagttgggatcccaggcaataaacaaagggcaatttaatccatagagtagaacaatttattcctaagag

SEQ ID NO: 852564 - DNA, 395 bp, Homo sapiens
ccaaactagtgtcctggagattttccccaaagttttcttgtaatagtttcatagtttgcggtcttagatttaaatatttaatcaactttgacttcatttttgtatatggtgagagacatgtgtctagatagattcattcttctgcatatggatatccagttttcctaggaccatttaataaagcaagtgtcatttccccagtgtatgttctttgcactttttttgaaaatgagttcactgtaggtgtgtgcacttgtttctgagttctttattctgttccattggtctatgtgactgattttatatcagtacyataccgttttagttactgtagctctgtagtataatttgaagtcaggtaatgtgattcctccagttttgttctttttttctta

SEQ ID NO: 852565 - DNA, 621 bp, Homo sapiens
agacaagaccactaggttcatgtcggacatgatctgatgtacattttagaaggaagctatgtggcagcaatatggcgcttagattgggctcagggactgagcgagaaatgaggattttaacttcttattttctacatgcattgagaccatctgggatgtgttgatcacaattttcagtagtccccagagaagaacagtagcttatttgtggtacttaaaaaaattggaaacaccagacctgggtaagtactaatgagaagcctgataaatcagtaaggttgaacatttatagaaatagaaggcataggctgggcgtggtggctcacgcctgtaatcccagcactttgggaggccgagatgggtggatcacgagattgagaccatcctggccaacatggtgaaaccccatctctactaaaaatacaataattagccaggtgtggtggtgcactcctgtaatcccagctacttggcaggctgaggcaggagaattacttgaacccaggaggcggaggttgcagtgagccgagmaggcgccactgcactccagcctggcaacagagcaagattccatcacacatacacacacgcgcacacacacacacacgaaagaaatagaag

SEQ ID NO: 852566 - DNA, 621 bp, Homo sapiens
agacaagaccactaggttcatgtcggacatgatctgatgtacattttagaaggaagctatgtggcagcaatatggcgcttagattgggctcagggactgagcgagaaatgaggattttaacttcttattttctacatgcattgagaccatctgggatgtgttgatcacaattttcagtagtccccagagaagaacagtagcttatttgtggtacttaaaaaaattggaaacaccagacctgggtaagtactaatgagaagcctgataaatcagtaaggttgaacatttatagaaatagaaggcataggctgggcgtggtggctcacgcctgtaatcccagcactttgggaggccgagatgggtggatcacgagattgagaccatcctggccaacatggtgaaaccccatctctactaaaaatacaataattagccaggtgtggtggtgcactcctgtaatcccagctacttggcaggctgaggcaggagaattacttgaacccaggaggcggaggttgcagtgagccgagcwggcgccactgcactccagcctggcaacagagcaagattccatcacacatacacacacgcgcacacacacacacacgaaagaaatagaag

SEQ ID NO: 852567 - DNA, 614 bp, Homo sapiens
tctgcacagtccaactgccctttgtggattatctttgcatctcgtgaagcacatacctagcatgttctkatgatagcagtgtggtccagatagtgaataacaaccactacagcctattgaactcttattctgtgcattttatctagcccttcttctggaatgtgcctctgcaaaacttctgttttaacatctgtgacaattaagtgatttttttcatattataaaaaacaatacaacaaatattaataacagtgctcattgtatgccaggcactgttttaagtattttatgtatcttgatgcacttaaacttcagaaccaccctgtgatgtagttattctgatccccattttacagatgagggaattggagctcagcgagcagacatgtggctccaaaatcatatagctaatgagtgatgggtcagtgtactgataccgaagccagagctgttaactcataaatgatgaaatagattgaaatgtagttcactagaaggggaagacatctttaggaatttgctattgattcaggttgctccctgattttttagcacaagcgtggcaaggcattcttccaataacctcagctgaaatgcctgcttggaggactcag

SEQ ID NO: 852568 - DNA, 608 bp, Homo sapiens
cttgtggctgggcccacagaacatgttgaaaacgagttctcagtattgtggcaggaagtattgggtcacgagtcgcaactcacacctttctatagctggctgtctcagctctttgtgaaatctgggtctgaaatcacctccttctcccttcttccctgtgtctgcacagtccaactgccctttgtggattatctttgcatctcgtgaagcacatacctagcatgttcttatgatagcagtgtggtccagatagtgaataacaaccactacagcctattgaactcttattctgtgcattttatctagcccttcttctggaatgtgcctctgcaaaacttctgttttaacatctgtgacaattaagtgatttttttcatattataaaaaacaatacaacaaatattaataacagtgctcattgtatgccaggcactgttttaagtattttatgtatcttgatgcacttaaacttcasaaccaccctgtgatgtagttattctgatccccattttacagatgagggaattggagctcagcgagcagacatgtggctccaaaatcatatagctaatgagtgatgggtcagtgtactgataccgaagccagag

SEQ ID NO: 852569 - DNA, 626 bp, Homo sapiens
agtctgtcaagccctaagacctggtgggtgttggatccaaattccctcttcaacacagtgtaagcatccaatgcattcatcatccccttttcaaaatgcttggtctgtgcktcttctttttcctgaccctgaatgagatatttttgagacttaaaaggaaaagtaaaaaggaaagccagcttagataaggtgctctttggcaaaagaataggataaaatgcattgtaattgcttctaaattagttaccttatctgatttgggtctgtctttttataagcaaagctcaaaacacttaacccctagttgtccagttgtagtgcaactaaagccactaaagctctgaacctagtgagtggatagacaatactgctttttgtgcagagaacataatttcacacccccctcctttgctaccctccattgcctggcaacaatgctgggcacaccatgggagatctgtaactacttgctgaatggaaggaagggctgaacaaccctgtagaccctgtagtttggggtaagaagacatctggatgctgacctgtacaccaagctacatgaagaatttccccatagttcattagagagtgggagcaagagggtacccagatgccacacagacccc

SEQ ID NO: 852570 - DNA, 592 bp, Homo sapiens
cgcatcatacagtttggcaagattcacagaagtcccataaatgagagttctacaattaacctccaataccttgatgaagtatgtggaagtttgtcagagcacaaggccagatgccttacaattttccaaacattactaaaaaaacagcccacgctcactctgaattattgtggtctttcaaagtatatacaaagtaatacgcaaggagacaaagctattttaccaggcagacagatattccaaattactggttcttaacaagcatggtaatacatcagtcaaaagcaataaatttaaacttaatgaaatctcaatttgcctacagtgcatttcactttgacatgttctatattgccacggtgctttgataaagttttttaaaatgcaaagaaagtgtctgtaaggctaaagaccagacttggtaccattgtggccaaggcaacattacagtacttaartttcatcactctgtgccccgtggcaggcagagccccggcgctaacacaggttcagttttcattatcatcatatgattacgcattttactgcatttaactgataatacaactaccagctcaccttaaaagaatta

SEQ ID NO: 852571 - DNA, 570 bp, Homo sapiens
tttgagtacctattgactgacccagaaggccatattctttttattaccctttctttccctcccaggacataaaccataaactcctaggcacaggaaagccatttattatgttgaataagaaaaattcaactttttgaagtgtcaaagccttggatttaagctagggtaaatcagttttcagatattacagagctctggagaacacacacccaaatgtcggcagagcagagccatgtggctgaagctcctcgcatcaaagcagcctgctgggttacaccgagatggttacatgaaagcttggtggtgttttccaaagattctgtttagggcctgggaagagaggatagaccctcactttaattctgcaaacactggtgagttatgccatgtgcccaaatctgtgctggtgtctgggacccgtgctgtctgttctcagtagccttggcatgaacattcaaacactttttggccatgccagtgacaagagtaagagcctctgagagaaagagtagctgatgttgcttgktgacatctagggaggcatcccagaggaggggacatctgagctac

SEQ ID NO: 852572 - DNA, 483 bp, Homo sapiens
acaggttatagttttctgactttattaagatagatttctttgtgtgacctgagaggcaaataccattgacacaagttgctaaatgcttatggattaggataatgacacgaaatagcttgagctctgctatttttgcaatagacaaatttaggtataaagcatattacttatctttgcctgatgtttatatttctcataaacttttcagtcaatctaattttttaaatcaaaatataaccaaagccctagaggttgctcaggttaaaaatatattttaactatgactatcataggaacactagtgaccaaaaatgtattttaccaatgactcccagaaatctaagctttcagaattttcaraaccaccagaatagaaacagactttggtggaccccggatttttatttttgtttttgttttaacaaaccccacctctttctccagcatcttatcagtacatgcaggccatttatgatttttcct

SEQ ID NO: 852573 - DNA, 534 bp, Homo sapiens
tgagaaggatcttttgatagagaagagatctggggacaggatggagggaggacaggaaagccaataatgaaatttcaagcaactaaacattcaaaacatctggttcagttgcttcaggaaacatcataattggcctgatcaatgtccccaaaactgagggtgctggtgggatggacccctaaaattcctggagagtgacttccgtacagagcacagcctaggttaaaacttgattttaaatgggtatgaaaacctgaaaagaataaaccaactccagtaatttagtaaatattcaccttaggaaagctgcctgagttcactatttaacaattgctacctcattattttaaaacattccacaattcagttggccctaagcataggattagttctggagatggctacagtttgggtttgcaacctgctgaaaaacatggacccataaagttgtaatgttgcagaaaggtaagggcatcgtaccaacctgagtgtttgtrccacaaacgcagccgctgcacaacacacctatatgtc

SEQ ID NO: 852574 - DNA, 664 bp, Homo sapiens
agagggatcctaccagggacagttttcttctttggttattattttattaagatttcatgtgtgttctctctcctgatataacccaaaatcaaattatactgaaacacctagatctatgtcaaaaatgttacttataaaccccatctctattaaaaaatgcaaaaaattagccaggtgcagtggcgggcgcctgtagtcccagctactctggaggctgaggcaggagactggtgtgagcccaggaggcagagcttgcagtgagcggagatcgtgccactgcactccagcctgggagacagagcaagacttcgtctcaaaaaaaaaagttacttatgcttcgtagccttcgaaaaagactacagcaaactgctaaactagaaaatgttaccagtgtggaatgatccatttggtctacagtgcagattaagtccaatgttttcttgttgattttctgtctggacggttttcccaatgctgaaagtggggcattgaggtcttctctgattactatgcactgcatgcctgtatcaaaacgtcacattcaccccataaatatgyacaactcttatgtatccataatataaaaaataaaattttttatatattatcacaccaccaccactcccctccacagacacacatacacacgagccctttatatact

SEQ ID NO: 852575 - DNA, 566 bp, Homo sapiens
ggactggaaatacattcagaaggaaaacacagtaattaatttgtcactgaaacctgaggggtccggctccacttataggtgataatgaatgttttgcacgtaattagcaagaataattagcacattcctggtaacaaatggactgactggtactctgcaaacaaaattaattgttgtgctaacagaggcaattgtgtctctttattgtctgacaatgtcccttatatgcactaatacctactttagaactcagcggctttgtgcagataggaaggggaatctataaaattgtaccccttccatccgcttctcagaaatttcaagaccaccaggggacttgtttgtcaaaacttgttaaacaatttgtaatctttaacatgtgttttactgtattaacggatgaaccgttcaaatcaacttactggttaagccaggaaagctactctaatcaatcaaatgccgacattttaaactctgggaactttttttttcctttaccttctttggaaaggaatagataaaaatattgaactagaagygagagggaaaattttcttaagttctac

SEQ ID NO: 852576 - DNA, 644 bp, Homo sapiens
gggatcctgatctggttggaagctctctaacaggatgtccctgccccttcyacactgaacccctagacaacacctccatcagtgtgcaaatctgtgtctgtcctctcaatctctcccccactgtaaggcaggctcacagcatcactgccttctctagactttaggagaaatcagattctcttagactttaggagaaaccagatctacatccaggtgaagcaatgccatctgcattttcttccttcttttcttgttttaattggtatatcattgttgtacatacttatagggtacatgtgatattttgatgcctgtatacaatgtgtaatgataaaatcagggtagtagggaagtgcatcacttaacatttatcttatctttgtggtgggaacattccaatctcctcttgtagctcttttgaaatatataataaattattgctaactacaatttgcatactgtattatcaaacactagaacttattcctctgtctaacagttttgtgttttctttccttagggcgtgttttctgcatctgtggtcagattagttagccttctccatatcttcctttgtatcttccctttcacaatagggaggcaaaaattagacatgatgtctttgatagtcaatcaaccacagc

SEQ ID NO: 852577 - DNA, 530 bp, Homo sapiens
cttctcctctgggctataatttatttagatttatttataatttatttagatttgagtaattcatttagatttatcttccagcttagctgaagcatgggcttaattttccaggatattttttcagttctaytgtcttagtatcttacttatgtttttcttcttacagtttaacctctgagcttcactggcatgtatgtatgtgtgaggctgagaatgttgaaataaatgcagctgttcttacttcaataatcaggcatgtgaattctggcccagattttcatcctatgtaactccatgggaactctctaaggacatgattcagatgactgaccttaaacaaccacctccctgttcatccatcaatcattcacaaatccatctgtttctgagtgggttactgcaattgcaccaaaatacctagcatctgtagtctcgggggaaatgtgttgcaatcttcatcagtggtaattttctgtaaggaaatgttagtacagaaaacaagctcctcacaacaaattgtaagtatgact

SEQ ID NO: 852578 - DNA, 629 bp, Homo sapiens
ggaaaaaacatagtataataggattagatactattgtggtttcaggcatctgctaggggtattgaaatttatcccctgaaggtaagggggtagtactgtaggtagaatcacacaatacgtagtctagctgkatctggcttctttctctgagcataatgttttcaagggccatctgtattgtagcatgtatcggtacttaattccttcttacggatgaataatgtttcattgtatgaatataccacattttattcttttatttttttagacagagtctcgctctgtcacccatgctgtagtgcagtggcatgatctcagctcactgcaacctctgcctcccgggttcaggcaattctcctgcctcagcttcctgggtagctggaattacaggtgcacaccaccacgcctggctaatttttgtattttcagtagagacagggtttcaccatgttggtcaggctggtcttgaacttctgacttcttgatccacccgcctcagcctcccaaagtgctgggattacaggtgtgagccaccacacctggcccacattttattcatttattcgacaattgagggacatttgggttgtttgcattttttagctatcatgaataatgttgctatgaac

SEQ ID NO: 852579 - DNA, 601 bp, Homo sapiens
aaagcctctttggatttacttttccatgtcctaaagtacttttcaatcaaaagtgaagatcaatcaatcgtctcagggccattgtaaggaacagcactttgtttcaatgagtaagagggacatcacagatttgtccctcgccagtgaggcgtgagatattccaaccctgcaagcagatggagatgttgaaactatcttcaagaaaacagaaccacagaaccaggactgggcgtggtggcccatgcctgtaatgccagcactttgggaggctgaggcaggtaaatcatctgaggtcaggagttccataccagcctggccagcatggtgaaaccccatctctaataaaaatacaaaaattagctgggcgtggtggtgggtgcctataatcccagctactccagaggctgaggcaggagaatcgcttgaacccgggagctggaggttgcagtgagctgaaatcctgccactgcactccagccttggagacagagcgagactccatctcagaaaaaaaagagaagrgaaaacagaaccagatttcccactggcactgacagggctggtattcttaaagcagtaactgtgaatttctatctgaaca

SEQ ID NO: 852580 - DNA, 568 bp, Homo sapiens
tctcaaactgaatttcagctacttgtctgcttctttcacatcacaaaacttatttcactaaattgtaacaatacagaataactaacatttattatgtttttaatttgtgccacttttaagctaactgctggccrggcctggtggctcatgcctgtaatcccagcattttgggaggtcgaggcaggcagattacttgaggcgtgaagttcaagaccagcctggccaacatggcgaaatccccatctctactaaaaatacaaaaattagccgggtgtagtggcacacacctataatcccagctattcagaggctgaggcacgacaatcctttgagccggggcatggagtttgcagtgagctaaaatcatgccaatgtactccagcctgagtgacagagggagactccctcttaaaaaaaaataagctattcactttccaaacatagatatatatgtttgaaaagtgatatatatacatattatatatatatatatatatatattttaagttatataggtcaaatttctgcacaaaatctaattatcatcattatcattatttgaagattt

SEQ ID NO: 852581 - DNA, 572 bp, Homo sapiens
gccttgacctcccaggctcaagcaatcctcccaccttagcctcccaaagtgctgggattacagatgtgaacctccacacatggcccctgtagtttctatcttcaaaatagatccasaatgcaaccatttttcatcacctttaatacccttccctggttcaacatagcaccatttagtgcctagagtatttattacattagcccccaactgtgtttctgccttggcttccatactgcctgttcttaactcagcagtctggatgatgctgtggaaatataatccagatcatgtcaaccttctgcttaaaaccttcctatgtatctccatttctcttaaaataaaaatcagtctttacaatgggcaatgatctacaacagcagcccccaactttttgacaccaggtagtggttttgtgggagacaatttctctactgatggttgggggatgactgaatggtttctggatataactgtcccacctcacatcatcaggcttagagtctcataaggagtgcacaacctggatcccttgcatgcacagttcatgatagaatttgtgctcctatgagaat

SEQ ID NO: 852582 - DNA, 622 bp, Homo sapiens
gaaatggataatgatgatggatttaagctctactttgaggattggtaagaagaaaagatcaaacagcagaataaagcatagaattttagcctcagtttctgtagatttcattgtatattttttgggaagttttggagtcaagaaactaatatacttccacaagaagttagcattttcatgtagctaatcagagattcatgttgttccacctaggagacttaataaaaaaataaagttagaaaaagattgaaagtgattttcagattttatttcagctatagtaagacatttctttaacatttgttctcagataaaacagtgctctgacattctcctagacctggtgaattccctctaggagcagaggttgctgaagtatataaacactgcaccacaaaatcattcccttcccagttcttcaggtaagaacggaaaaaaaaataaagttcaaattccctgtttacacaagggtagatattaatagggaccacatatatcctgatttattttgtaccttctctgttgtttacgtaactttgccctgatggccaaattccataggagtagggtatgccaagtgttagaatyacaattagatataaattagacaaagtttcagtct

SEQ ID NO: 852583 - DNA, 596 bp, Homo sapiens
aatctgtaagtagagagtgaattggaagattattcaaaatatgataaaacaaaatgaaaaaacataatatttaataacagcatttggtaatktgcagaatacttcataacctaatatcaatgagatatagatttagaattttaaaagatatgaaaaagatctaagatttgacatttactgaaaaaaaaaaagataatcagaaacagagtctcttcaattgcatttcaaaattattaccattatcccaagaaagggagtataaggcactctgcttttgagagacctagtgtaggtttattcaactgtattcttacaaattcttacaaatgcttcctgaatatttcacttgagtagtggccctctctctgcttcttacagtctcacaaacaattagcctaaaagcatgtcaaactctaaaaacatgggcaaatatgagattgattccttcttagagtgtgcaaaaataatgaatatttcaataagtttatttcatgtagactctatcaaaaacattgacctagcatataaaatgctttaaaaatcataagtaaaatggaatcataacactcacatttaatcacatttgcattaacttt

SEQ ID NO: 852584 - DNA, 588 bp, Homo sapiens
tggagagccctggtccaactttctcacatcaaaggtgggacaacaggggtgacttaccccccagtcagcataaaggggactgaaggctgggcatggtggctcatgtctgtaatcccagcactttgggaggccraggcgggtggattacctgaggtcaggagttccagaccagcctaacaaatacggtgaaaccccatctctactaaaaatatgaaaattagccaggcatggtggtatgcacctgtaatcccagctactcaggaggctgaggcaggaggattgcttgaacctgggaggcagaggttgcagtgagctgagatcataccactgcactccagcttgggcaacagagcgaggctctatctctaaataaataggactgaaaagtcagcttcaggaccctgcgctctgcaaactgtcctcactcccccacgtgcttgtaggctgcaggctcccctcggctgctaccccagccgaaagtaaactgatgagttgggaggccccagtgttatttcacaaaggagaaactgaggcccaattgggaagtgaccttgtccaagttccacagcttggagatggcagagctgg

SEQ ID NO: 852585 - DNA, 642 bp, Homo sapiens
acagagattatacactcatacatgctagttccttctaagggggtcacaactaagccttaacctcattggtgagactatttctgggggcaagtgggattaattaattcagcaaacatctcttgagcaagtgccttgcatcagatcctgccttgggtggaatatgaagatgaacaagactcagtctgtgccctcaagaagcccagcatccagagtggtgacagtcatttgcaaggcagttacactactgagaaggatacagaataggattaggggagagggctccagccaatctggaaggagagtggtgaggttaggagggcttctagaagaggagttgcttgtgtgcttggagggtacacaggagggaggtggacatcccaggctatggcaacagcttccaccagcccagctcagcccactttacctctcagagcatatgatgaaggagcgggaagagaatctcagacccttgggttggaaggaacctgtcaaggccatcttgcctaatcactctgcttaccagggcctggacttcaaaggctttcagtaaaggaagaagctgctctttaactcaaggtccctttgaagaggaatctgtcgacagcaatacttcrtgacttgcacagagagttgcagacaagt

SEQ ID NO: 852586 - DNA, 480 bp, Homo sapiens
aaggatcgcactagataatggatgtgacagggtcgtattaatggtgcagggctttatacagagtcaagctccctggaaacatcaggtattatttggaggagcacatagaatgtagccccccacatggggccacctgaattcatgtatgaacagcaggacaattcaacgcacctgcagccacttaagacatgccccgtggcaaggcaggtacttagaggatgctgacctggccaaatgcgtgtcattacctcttatggagccctaaagctctctttcttaaaatgcctaaggtttgaatcagaacaaatgcagacagcattttaaacaagctccccagtaactgatgtgaaagtctgagaatcacagctccagagcagcccccmaaagacaatccctctccatttaagggtaatttggaattacattgactactgcttaaaaagcgcctactgtgtgccaggtagtttacatacgtgattt

SEQ ID NO: 852587 - DNA, 452 bp, Homo sapiens
ttttggctctgtgagcagggtcaccaaagtctctctgtttgaagccgcagtgaaggaatccaggacctgaaaagctggcagaaaggaaagaaattcttatcagccaggcttccagactctttctctgtggaacctgtttaagcagacagtaaaaatcacaatttgttcttgtttcttctccaaaatcttgattaatgggaaaaaaaggatttgcgtgactagtcctgagtatagtgactctggtgtactttttggtatgaacattcatattgtttgagacatttcctcccagaaatagtgtttttctctgtctttgtctttctgtgttgttctgttataaagagggtaccatagggtaraacacaggcctaaaacccctatacgcctgttgttcaagctggcccagtcaggggcgtttgaacaagagtgactccatcttgaatacagggtgg

SEQ ID NO: 852588 - DNA, 663 bp, Homo sapiens
gtaccatgcaccgcttgtggtgttgagtatatataagggaacaagacagacaaaacgatacagaaggtccccgactcacaatggttcaacttaygatttttttacttaagacagcgtgaaagtcatacacactcagtagaaaccagactttgagtagccatacaaccattccatggttcaatttcagcatggtatttaatatattccatgagatactcagctctttattacaaaatgggctttgtgttggattattttgcccgagtgtaggctaatgaaagtgttttccgcacatttaagctaggttaggcgctaagccatgatgttctgtagatcagatgttttaagtgcattttcgacctaagatattttgaacttacgatggacttattgggacgtaatcccatcataagtccgggaacatctatacttttaaatgaccacactataaagacaccttttctctggaatctgcctcctgtctacatccgtctacttcttagagggaggaggctggacgttaattaacctgtcccaggatcaaggtcattaaaacaaacatcaatctcatcctgtcgagtcttaggggttttgcaatgtgttaggtgagtttatcctgatgctaaatgtctcctgggatccttgcctttgtttgtttcaatt

SEQ ID NO: 852589 - DNA, 448 bp, Homo sapiens
cctcctgctcagggtcctctagcaggacctggtgcttcccttggaccctctgctgggacccagtgcctgtttcggatgagagaagattgtaaggcarggaaagggagagggcacgtatgggagagcctatgggcagctttggagccaaggggctgggaacactgacttattctacagttgtttactgagaacttcccatggccagcactgtcccaggctcttggcatacaacagtaagcaaaacaaaaagatccctgcctatgttgagcttacattctaggggagggacatacaaaaataagacacttcagtcaattatgtagtttgttagaaggcagtaacttccaccggaaagaagaaaacaacaacagggcatggggctaggggctggacagtgctggctacagtattaaacagattgggccaagaggacactggaatgaagacg

SEQ ID NO: 852590 - DNA, 483 bp, Homo sapiens
aataatgctggtatgaatgttcatgtacaagtttttgkgtgaacctatgttctcaattctcttggatatatacctgggagtggaactgctgggtcatatagtattgctgtgtttcatgttctgaagtactgtcaaactgttttccagagtgcttgcactattttacactcccaccatcaatggcggaatagattagcacagtgaatatgcagacaaaacataaacaagtattgtttagatttctccacatctcacaacgcttgttattttccattattttggttatagccatcctaataggtgagaagtggtaggtcattgtcattttgattagcatcttcctgtgaataacaatgctgggcatcttcccatgcttattggccatttgtatgtctgtcttctttagagactgtctattcaaatcctttgcaagtttttaaattgggttgtctttttattgctgagcttttaagagtcctttat

SEQ ID NO: 852591 - DNA, 617 bp, Homo sapiens
cccatttccccatacctccatacatattaatatatgtttgacctgaaagttttgaagatactcttatttcatgcaatgctctctgatatttttagyctatctatcagattttaaaacattagttgggacctgctaaactgatttcatgactcactaatggtttgtgacccacagtttgaaaatcactgagtaacaggacaaaaaaaaagtaaaatgtaaaaaataaatcctgggactagttaaagaagaagttgtctttttattatcattcctctttgggtcacatgtggggccatttggagaacttaggagacacagtggagcagggcaaattgattataaaaaaaatgggaactgtgcatgaaataaaacccatggtcactcgagaactgtcagtgtctttatcactacttacaacacaatagtacggcttaggctagttcatgttttacagcctcaagacagtgttctttcaaaggtttgcatggtatctgcaaagtcataacccagtgtcacgttgccactctttgccaggattttcaggatttcacagggatcatttcaggtggcagcagatacttttttctttcttttctttccctttttgtatgtcagat

SEQ ID NO: 852592 - DNA, 628 bp, Homo sapiens
tgtcagatgcacataatgccaccaaacagtgggttgttattgataatgtcatctagaaacaattctatctcatggagcatgtgttagatgggactctgaggaggctgtcatggggcatgtaytagatggggctgtgaggatgcttagggagcaaagcatctgaattagtccatctcaacattttctctgaggaagcatctcaccagcttatattctggtctatgctagcagaagaaagcgacagggagggtgtccagcatcctggcctgggacctccacgacaggaccaagccattctccgacagcgatgcacttgcttacctgatgtgcatcggaccagctactccaaagtgacaacgtcatcagtcccatcttgctgatgtctaaaatcacaccatctacactccattgaggactctaatcctagacatgatgaaaataatcgcgcaaggggaaacacgactcttttcattttgaaccttagtgtaaataagtttcaaacccttttctaggggaccaggtttagattagaggtaaaaggaggaatgtagggacttagggaagggcatgaagggaagttctgtgtgacgtgctaaagttaaaaaaagagtttcctctttacaatctt

SEQ ID NO: 852593 - DNA, 628 bp, Homo sapiens
tgtcagatgcacataatgccaccaaacagtgggttgttattgataatgtcatctagaaacaattctatctcatggagcatgtgttagatgggactctgaggaggctgtcatggggcatgtattagayggggctgtgaggatgcttagggagcaaagcatctgaattagtccatctcaacattttctctgaggaagcatctcaccagcttatattctggtctatgctagcagaagaaagcgacagggagggtgtccagcatcctggcctgggacctccacgacaggaccaagccattctccgacagcgatgcacttgcttacctgatgtgcatcggaccagctactccaaagtgacaacgtcatcagtcccatcttgctgatgtctaaaatcacaccatctacactccattgaggactctaatcctagacatgatgaaaataatcgcgcaaggggaaacacgactcttttcattttgaaccttagtgtaaataagtttcaaacccttttctaggggaccaggtttagattagaggtaaaaggaggaatgtagggacttagggaagggcatgaagggaagttctgtgtgacgtgctaaagttaaaaaaagagtttcctctttacaatctt

SEQ ID NO: 852594 - DNA, 634 bp, Homo sapiens
ggaaataaaaatataatctttttccctggaatcacataaaagatggacaatcagaaattatatcctttagttttgactctttcayatgactctatttcatatttcatgacatgttgctcatgtacacctatgtatgtatacacagacacagagcttcctgccacctgtttaacagacgtatcagaatcaacagttaagcaaagagacatgctgaaagaaataaatttgtttaattcaacctccctttcctcccaccacaaacatacctgtagttatcagtaaaactaacatcacgattcagatctgagttgtttttatgttctgttggggtgtccaagctttgtgtagacaggaacagatcatttattaatttcctctccctctattgtgaatgccaaccagccttgggaccaatgtcctccctccctatctcaactgtcaatgcagcagttctggctattttgagacactgtgatgtttatgttgaagggtagacatgaagggactcgtgaggtcttttcttatgcacacatctatgattggactggccttttggcgagtcagcaattcagttctggcccaatctaaatacaccctgggggtctctgcctttctctctggttcttctgtgatg

SEQ ID NO: 852595 - DNA, 616 bp, Homo sapiens
acacacatacacacacacacgatgatacaaactgacagtatacggaaacacaaatatttataaaaagaagtttaggccaggtaccgtgactcacacctgtaatcccaacactttgggaggccaaagggggcagawcacttgaggtcaggagttcaagactcgcctggccaacaaggtgaaaccacgtctctacaaaaaatataaaaattagctggacatggtggtatgcacctgtaattccagctactcaggaggctgacgcaggagaattgcttgtacccaggagacggaggttgcagtgagccgagatcgcaccaatgcactccagcctaggtgacagaacaagatcctgtctcaaagaaaaaaataaataaataaaagaagtttaaagtcatttattaaaaacatgcaaattaaaattactctgagatacagtattaacctaatagataagcaaaaatccagatgtttaatggcatactctaatgataaggcagcaggaaaagaggcattctcatccattgctagtgggagggtaatctggtgcaactcctatagagggcaatttgacaatagtcatcaaaattataaaatcataccctttgtcccagcaatt

SEQ ID NO: 852596 - DNA, 505 bp, Homo sapiens
acctcccttgatagcaactaatacaaatttgcctttggcacaacagataccactaagttctacccagttctccgcacaatcattagctcaggcaattggaagccaaattgaagatgccaggcgtgcagcggagccctccttagttggcttacctcagactatcagtggtgacagtgggggaatgtcagcagtttcagatgggagtagcagcagcctagcagcctctgcttctcttttcccgttgaaggtgctaccgctgacgacacccctggtggatggcgaggatgagaggtaagatcatgtcatatttctggagacattcaacagatttgaagttaatctatttagtagctatatgtatgcacaaaatgactytaaaacattgtatattgtgttttgtatgtgaaaaatgcatttttatgggaagttttatagagcaagagttatggaatggtttcagagggagtaggaaataatagtaatatgtaaacaatattttcagaat

SEQ ID NO: 852597 - DNA, 609 bp, Homo sapiens
ggaacaaagatcatcaagattcaggaggatagcaaaacccaatctgaggaaaacaagaatcatgataaagtaatataggagctgaaggacaatatagccagtataaaaaagaaaccaatggttctgacagaactgaataacacaatataagaatttcacaatgtaattacaagtattaacagcagaataaaccaatttgaggaaagaatctcagaacttgaaaactggttctctgaaataagacagacaaaaataaagaaaaaagaataaaaaagaatgaacaaaacttctgagaagtatgggattaggtaaagagggcaaatctatgaatcactggcattcctgaaagggagagggagaaagcaaacaacttggaaaatacattacaggatataatccatgaaaacttccccaaccttgttagagaggccaacagtcaaattcaggaaatacagagaactccttcaatattctacacmagaagatcatccccaagacacataatcattagattttctgaggttgaaatgaaagaaagaatgttaaatgcagctagagagacagggcatgtcacctacaaacggatccccataaggctaatagtagacc

SEQ ID NO: 852598 - DNA, 612 bp, Homo sapiens
aaaggaccaggtccaagttctgcttatacatctaactagttgtatgaacttggacaagccctttaacttcattgggtctcagtgtcctctttaatgtgctgacagcagggatggtttccatagggctaattgagatgatgcatataaagggattttgtttagtgcttaacatgtagtaaacatttacaaatactggtggttgctgtaacggtagttgttgccgtctcttaggccctttttaatagtaacattccatttttttttccatttccatttttggctaggggtaagattttatagaaaataagactttcagcaataacaaaataataataataataactgaaaatgagtaaaagatgatagtcatatgtttgcatcatgaaaaaacatagacttgcattggatcttttatggaaaatggagccaaattttctattgctgatgagggaagccctcaatcaacaaaccaaccaaataaacaaaaatgctgtttaaaatgatgctgttgatrctttgggaggctgaggtgggtgggtcacttgaggccagaagtttgagaccagtctgggcaacaaagtgagatcctgtctgcatgaaaaataaaaaaat

SEQ ID NO: 852599 - DNA, 635 bp, Homo sapiens
tctgttttagctagctttctcaaacactcctctggcagggtccagtggtagccaccttattacttccaggccgaggtaaaagtccaggtgccctgcttgtcctccagtgacacctgagggtggggtagacaagggtaggaattctgttttctgtatcgtctccactgacagtgcagtgaagggggccttgttactgctaggtgatggtcttgactctcccttagacctcatttaataccaccctagccgggagaggaagggccaccttattactgctggatgggagttcagtttcctcacttggtcttcactgacactgaaatggaatcattccatgtgttcctcagattccaaagtccctggctggtttcagagtcttatgtttgcttaatatatattatgtccagggtttttagtggtacttagcagtcagaatagagaaaaatacatctacttcagtttcctggaagcagatgtcctcagtgaaaattttaaaaatttggtaacacttaatattgtcaagagtgtgaygaaatctcaatactgggagtatgaactttttcaaatttggaggagagcaacgcccaaaattcaaaaagatcaggaatcctacttgtaaggatctactgtataca

SEQ ID NO: 852600 - DNA, 557 bp, Homo sapiens
atgttttccaaaacaattgtatgaagtggcaacaggcttattctgtaatattaagtgacaaaagtagaatataaactgcatatacaatattaacctaattttgttatgtttatcctctatgtctctggaagtaaaccctttcttcccaaatgctttaaaataatcataatgatttttatggttagaaaaccaaattagttaacagaatctgttttaatttggcaacgatctgttttgggggtttctggtttcgggggtttctggtttcgggggtagaagcctctcatggtgtactgtgtctttaaaggttcttagagatggactggaaaaacaaaaagttggaagccagtttattcactcccccacagatgtagttttaattgttctcattgtttcatgttctccttcagtctttgcccaagaacgttttttaaaaagttgaaaattgatccaaaagtrgtcatggtatgaattagtggagaggaaataaactcattcatctcagtcaatcattctcttaacctacagaatggttagacttccctctatggcaagag

SEQ ID NO: 852601 - DNA, 557 bp, Homo sapiens
atgttttccaaaacaattgtatgaagtggcaacaggcttattctgtaatattaagtgacaaaagtagaatataaactgcatatacaatattaacctaattttgttatgtttatcctctatgtctctggaagtaaaccctttcttcccaaatgctttaaaataatcataatgatttttatggttagaaaaccaaattagttaacagaatctgttttaatttggcaacgatctgttttgggggtttctggtttcgggggtttctggtttcgggggtagaagcctctcatggtgtactgtgtctttaaaggttcttagagatggactggaaaaacaaaaagttggaagccagtttattcactcccccacagatgtagttttaattgttctcattgtttcatgttctccttcagtctttgcccaagaacgttttttaaaaagttgaaaattgatccaaaagtagtcatggtatgaattagtggagaggaaataaactcattcatctcagtcaatcattctcttaacctrcagaatggttagacttccctctatggcaagag

SEQ ID NO: 852602 - DNA, 568 bp, Homo sapiens
gccacttgggtggctgaggtgtgaggatcgcttgagcccaggacatagaggctgtagggagccaagatcgcgccattgcactccagcctgggtgacaaagtgagaccccgtccccccccccaaaaaaggaaatataactttttaaaaaacttattctaatacatttgaatgtacctgatatgaaatattgagaaggatagtggaattcagtatcatataatttatgagttaatgtataagattcaaaagagaagaaaaagcaaaagacaggttctagagacaaaaaggtttggaaaattgatgaactgtttgaggggatggtccctaagatgatgcagagggccttgggaggtggggaatgaaaaattagctcagctatcactctgatggtctatcattcatagtttttgagttgattttccagtagtggaggtaagtttctgtgaacacatctatcatatttaaaaattttttcacttaggaccaaaagtacatatttacaagatggctgcccayatccatgtagcagaatgatggcccaccgtatatagctcatctccaaatggcc

SEQ ID NO: 852603 - DNA, 345 bp, Homo sapiens
ggaagagggtctcgtagcgcgtcggctgctccgcgtcctggcaggccgcggtgggcagcacgaagtcccgcagccagcgcaacatggtcccagaggcgcaggcggcctggccgaggaagtcacgggagatcgagggctgcggggcgagaccgggaccagcgcgaggccgggctgggcggggcgcgcggcgcaacagcgtttggggcgccgtcggggttgcggctgcggcgcgcagggcgcagggcgcaggagcggagaccccacccgagcccgcgckgagcgcagggtgtggccgtcccgccgctgctggggaggagctcgccgcgctggcctcggcggcactgg

SEQ ID NO: 852604 - DNA, 504 bp, Homo sapiens
tggaaaaaatatattacagaatgtaatcaagaaatatacaaaaatgtaaaataaaatagcatgaatataaacatggagatataaatgtaaacatggaaagaaaagtaatagatgagacagcttggtgaaaagagctcaaacgcaacaaaacacgttaggcatagagataggaaattttaagaagtcagttggggcacttgacaaataaaaaccctgtgagtgattaaagatagatagatagatacagatggatatttagacgtgtattctaaaagaccacatatgtgtgtgtataactatgttttaaaatattttaaaaaataaataaaataataaattttccatttctcaattatttgcttctagaatgagatatatatatatatattcaattctagaatattcttcaaaactatatatgtgtgtatatatatacacacacatattcacatatatatacacacrtgtgtgtgtatatatacatagtgctgaagaatattctag

SEQ ID NO: 852605 - DNA, 579 bp, Homo sapiens; identical to SEQ ID NO: 851181

SEQ ID NO: 852606 - DNA, 657 bp, Homo sapiens
ttagtccttgaggtagagcttacctgttggagaacatggcagaaatcattgtaccaaaattggagcacaggtcagaggctaaagcatggcttactgctgtggctcatggtgaacttgagcttctcatggcccctcctatctcctgaggatggctgagctcacagatggggactgttatgtaatcagaggtcaagtggtttagctggggtggcagagagccaggtgaagactgaaagtgttcaaataaggaagagaacagaattgctttatgtctgccttcatgaagacaaaccctaatagccaaaggactgaaagtttgcccaaagagacctcaatttttgaaaggaaaatgcatcttctccttatgttagaatgaccacgtctaaataaaataaactcttttgccttttgttgttacttgtcttggtatctaccattgtttgacactaaaaaaaaataaagcagtgactaattattggctaatttaatctgtcatgatggcatttgtaattcaggtacatccttcattaaagcaagtataggcattattatttttaaaactttttttttctatttggatttcttctattttgtttgattatttattttgttgttactggtggtgktggtgttttacagtgagacatactggttagc

SEQ ID NO: 852607 - DNA, 635 bp, Homo sapiens
acgcaagtatagttaaacatatgctaatcaataaacatgatacatcataacatatgatcatttcaatagatgctgaaaaggcattccataaaatccaactttccttctttaaaaaaaaatttcctttggttattatcttgattaaaaacacctaacaaactaagtataaaagaagtatacctcaaaatagtaagggccacatctaacaaacccacagctaacataatactgaatgggaaaacattgaaagcctttcctctaaggtctgtaacaaggcaaataggctaactttcaccactcttattcaacacagcattggaagttctagacagaggaatgaagcaataaaagtgaataaagaacattgtaaaggaagaagtcaaattgtccttttttgcagataatttgatcttatatttagaacataaatattgaaaaaaacctaaggattccactagaaaccgttagaactgatccatgaattcagtaaagttgctacaaaatcaacatacaacaattaataacatttytatattccagcagtaaacaatctgaaaaaaatacaagaaagtaattcaatttacacagctaccaaaaacaaacaaacaaacaaaaacccgggaataaatttagcc

SEQ ID NO: 852608 - DNA, 504 bp, Homo sapiens
attcatacatttgaactgtttatacatgtggcaataaaatgaaatacaattgtgaaacacatattttatataaagtatagttgccaatgtttttgttttcttgaaataatctttttattctttttcgcttttaaagcataagtttgtgtcacaatttaaattcattctagaaacttgcagttaatccctgattacttgtcatgattagatattcagctaaggtatacatcacagaccatctgtgagaggacactatttcatttgtcttctgggtaatagggaggctcattttgaggatgaacccaccctgctcttttgtgaaagcaggagagtgccaggtggttggtagagataaacacaaagggtaataccggggaaaaagaaacgcagggctttcccagcaaacctttacaatattggtgcactacaacaggtggaaaacagtgagatgtcatatatgtgtgcaaarccagaacacatttcacaatttgtagctcagattcc

SEQ ID NO: 852609 - DNA, 587 bp, Homo sapiens
aattaccgagttttgggtatgtcttgatcagcagcatgaaaacagattaatacagtaaattggtactgagagtgggatgctgccgtaaagatatctgaaaatgtgcaagcaactttggaactgagtaacaggcagaacttggaacagtttggagggctcagaagaaggcaggaaaatgtggggaagtttggaacttcctagagacttggagggctcagaagacaggaagatgtggggaagtttggaacttcctagagacttgttgaatggctttgaccaaattgcttacggtgatatggacaataaggtccaggctgaggtggtctcagatggagatgaggaacttgttgggaagtggagtaaaggccactcttgctatgcaaagagattggcagcattttgcccctgccctagagatatgtggaactttgaatttgagagagatgatttagggtatctggtggaagaaatttctttcttttttttttgagacggagtttcactcctgttactcaggctggagtgcaatggtgcaatctcggctcaccacaamctccgcctctcgggtacaagcgattctcctgcct

SEQ ID NO: 852610 - DNA, 643 bp, Homo sapiens
tttagcctcatcaggagtggcaatgggcgcctcactggatcggaagcacagcggacacccttccatatctggagggatggaagtcagcggcgggtctgcgacggcggcaaacagcagtggtggacggtgagcraaagctcagctcgagctgtaataaacatggaccagaagagtgcagttgcaagatttaatagggtgaaaacagggctcccgtacaaaaggagggggaggggacccaaagggggttgctgttgccggctcaaatgcctgggtttaaatccagatccttgtctctcccgttgtgccctcagacaatagatgattggctatttctttacctcttgtttttgcctaattagcattttagtgagctctctgattggtcgggtgtgagctaagttgcaagccccgtgtttaaaggtggatgcggtcaccttccagctaggcttagggattcttagttggcctaggaaatccagctagtcctgtctctcactttcacaattacaatcctattgattacaggtaagataattgtcagaggcaatcaaatcagagcgactccatcttgaagaagggctggtcaaaatgaggatgaggtcttctgggctgcattcccaggaagttaagcatgataaactcc

SEQ ID NO: 852611 - DNA, 624 bp, Homo sapiens
caaagtgctgggattacaggcgtgagccaccrcacctggccggtatctctttaagtctctataccctgtttcaaaaacttcttaacaaagtgtaatatacatacagaaaagggtataattaataagtatttatcttaatgaattttcagaaactgaaaatacctgtgtagccagcatctagcaagaaatgaaacattaccagaacagaatcctctgcttgcccattctcatggtggccaatggatttctgaaaatatagatgaatttgtctgtatttgaactttgaaatgaaatgaaataatataggatatacttgttttatatctggcttcttttgcttaatattatattcatgagtcatccattttctgcatcattctcattgctgtagagtattccattgtgttaatatggcacagtttatttcatttgttctataatagatatttggacaggtttccttttttgttgtttattatgaacagttttgctgctgtattctagtatgtgtcttttggtgaacatatgtatgcatttttattgtatttatacctgtaagtgggattgctgggttaattataagttgggtaaatattcagctttagtagatactacaaaggtttt

SEQ ID NO: 852612 - DNA, 514 bp, Homo sapiens
atataacctaaaaatatgattatttttgtgtttattctgcctgtgattcattgagtttcttggatctgtgaccttctaatttttattaaatttggcaagttttgtcaattatttctttgaatactttcttctgtcctttctatttacccttctctgtgcctccaattgtttttctattagcatgtttaacatttccccacacgtaattgatactcagctcatttttcttccattatttttatttatcccctctgtatttaattttggattatttctttgcctaggtcttcaaatttagtattgtttttcttattatgtctctgatctcccataaatcataactagggtagtttcttatcagttatattaccagctctagaatgtctactatagacccttcaaccttccattcttttcctcctcatgttaacattttgctctactttttgaatataytgtttatttataatagctgtattcattattttgtgtgttaattttgccatttatgaca

SEQ ID NO: 852613 - DNA, 578 bp, Homo sapiens
tttctgtctttcataaggatcctgtctgtcagtaggtttgtcctatttcagattccaaaactgcattccggtttagaatgaccccaaggggatgcaaattcccagctcacagctaaaaacttatttcctatctgtaatttttattcctatagtcctcattgcttccaccgttcactgaatcttttttatttttatttttccctatcaaataaatatatattgacaaataaaaattgtttatatttaagatgtatcatgcgatgttttgatacgtgtatacattgtgaagtgactaccacactcaagctcattaatgtatccattacctcatatagttaccttttgtgtgtgtggtgagaacagttaagatctattctcttagtaaatttcaagtttacagtgcattgttattaactgtaatcattatgctgtctatcaaatctctagaactcattcattttataactaaaatttgtacccttggaacaaaattccttcatttccctcaatctctagcccttggagaccaccaytttactctctgtttctgtgagttaacttcttttgatcccatataa

SEQ ID NO: 852614 - DNA, 463 bp, Homo sapiens
ttgtcaattttggcttttgttaccatcgctgttgctgttttagtcataaagtgtttgcccatgcctatgccctaaatggtatcacctaggatttctyctagggtttttatggttttaggtctgatgtttaagtctttctttcatcttgagttaatttttgtataaggtgtaaggaaggggtccagtttcagttttctacatatggctagctagttttccttgtaccatttattaaataggaagtcctttcccaattgcttgtttttgtcagttttgtcgaagattagatgtttgtagatgtgtggtgttatttctgagggctctgttctattccattggtctatatctctgttttggtaccagtaccatggtgttttggccactgtagccttgtagtatagtttggattcaggtagtgtgatgcctccagctttgttctttttgcttaggattgtcttggcta

SEQ ID NO: 852615 - DNA, 463 bp, Homo sapiens
ttgtcaattttggcttttgttaccatcgctgttgctgttttagtcataaagtgtttgcccatgcctatgccctaaatggtatcacctaggatttctcctagggtttttatggttttaggtctgatgtttaagtcyttctttcatcttgagttaatttttgtataaggtgtaaggaaggggtccagtttcagttttctacatatggctagctagttttccttgtaccatttattaaataggaagtcctttcccaattgcttgtttttgtcagttttgtcgaagattagatgtttgtagatgtgtggtgttatttctgagggctctgttctattccattggtctatatctctgttttggtaccagtaccatggtgttttggccactgtagccttgtagtatagtttggattcaggtagtgtgatgcctccagctttgttctttttgcttaggattgtcttggcta

SEQ ID NO: 852616 - DNA, 482 bp, Homo sapiens
ttagtcttacttcattcctccaatcttytcaataagaattattaaaatacccagtcatggaactgacaactgggtaaaagtaaggttaaaaaaattatgagcaatcatttgatatatgacccgagagattaaaataaagcaataatactatactattaccattattattattattattacaaacaaaataataaaatcagagctagtattcattcattgagtgcttggtctggatgttggcagaccatgtgacagacaatttacctacgttactctttaatgtacacgatttataaaataagtatagttatctcattttacagattagaaaaagtgaggtttgtgaaatgaagtagctagctcaagatctctctgctaaaattaaattttgaaaccaagacctaaaatctacaagccaaaattttattgcctcagttcaaggcagtaagtaggactgatgtacttgcaggagttgcatctaa

SEQ ID NO: 852617 - DNA, 565 bp, Homo sapiens
ttattttcatatgaaacgggtataggcattttgattagagtggataagtgtaattattattcaactgtaatattttaagatgtctgtgattatttctgcttttaaagcagtcagcaaattaggtaaatggctcctttcttcactgcaaatatcagtttctaatctgtgtgtatctacttctaataatatttaaggttcaattatctttctgtgttttagatggtgaaaatgttcaattgaatgcttgaggaaaaatgtaatctgcctacatactaaaaatataatgtatattcatggcttaaggcagtggttgacatagtctgtcaggcagtcagcagtttttctatcacttatctgaccctatcaaagaaaagagtgtccctgaccaaataacttcttggtattttatttcattaaagtaactttcatcatcagaggtatccrctgctttgtaaacttaaattaaacttaatgaagagagagagagagagagagagatctttaatgttaaatgaagcataacaatagcatgcccacttagtgtcagattttccatgttacatca

SEQ ID NO: 852618 - DNA, 565 bp, Homo sapiens
ttattttcatatgaaacgggtataggcattttgattagagtggataagtgtaattattattcaactgtaatattttaagatgtctgtgattatttctgcttttaaagcagtcagcaaattaggtaaatggctcctttcttcactgcaaatatcagtttctaatctgtgtgtatctacttctaataatatttaaggttcaattatctttctgtgttttagatggtgaaaatgttcaattgaatgcttgaggaaaaatgtaatctgcctacatactaaaaatataatgtatattcatggcttaaggcagtggttgacatagtctgtcaggcagtcagcagtttttctatcacttatctgaccctatcaaagaaaagagtgtccctgaccaaataacttcttggtattttatttcattaaagtaactttcatcatcagaggtatccgctgctttgtaaacttaaatkaaacttaatgaagagagagagagagagagagagatctttaatgttaaatgaagcataacaatagcatgcccacttagtgtcagattttccatgttacatca

SEQ ID NO: 852619 - DNA, 665 bp, Homo sapiens
aggtatactatgtgtgtttctaaagtaacaacttgctaagcatacatatgaagaaaattctagatgtattatatttacttgcgtatttcatctgccactttttatgaacctgggcttacccttaccaatgttaaagaaaaaaatgaactttttggggagtcattttcctctataaatttctactctccttaatcatatctgtgggtgtcatatcaaacatctggccttttgaacttctaagagtatagcaagactagaggtccaacatcaagacaggagcttttgaacaaaaaagcacattttttctcattcctttttattgatgttgtctattagggtgctattatgtattgtctcaagtattaagaattaggatgagagtggtgatttgaccatgcagggaagggatcaaacactgaatatttttttttttggaagatggagtcttgctgtgttgcccaggctggagtgcagtggcatgatctcacttcactgcagcccccaccttccagattcaagggattctcctgcctcagcctcctgagcakctgggactacaggcacacaacaccatgcccagctaatttttgtagctttagtagagatggtgtttcactattttggccaggctggccttgaactcctgacctcaggtgatctgccca

SEQ ID NO: 852620 - DNA, 583 bp, Homo sapiens
gcactcgtaccatgtaaagggcacattataaaatgtgtcagaactatgccagagggtcatgaaagaagataatcattatatatatatrtgtgtgtgtgtgtgtgtgtgtgtgtatacatgtatttattaatgaagccgattataccagaatttattctaatgtatgccatgctaataaagtaataaaattcaggagatgaactacgaatacatttgaggaagtttagcactgagcttgcactttttacacttttttacactgttcttcgcaatgctctatatttgacctgtaagttaaatatttgaataaggtttattcacagtagtagattaacaaaaatggaaggggtagtaacattctcagattttaaaatttttaaaggagtgtgtggtagatgactgacattgaccatgaaacatttctttcagccaatggtcaatggaatcagtggggtcattggagtggttgttccaagtcctgtgatggcggctgggaaaggcgaataaggacctgtcagggtgcagtgataacagggcagcaatgtgaaggaacgggcgaagaagtgagaagatgcaatgagca

SEQ ID NO: 852621 - DNA, 578 bp, Homo sapiens
tgtgtgtatttagttgtgtgcaattttatcacacatgtatgggtttgtgtatgcttgactcaccactgttaagatagagaacactgggctgggcgcggtggctcatgcctgtaatcccagcactctgggaggcygagatgggtggatcacctgaggtcaggagttcaagactagcctggccaacatagtgaaaccctgtctctactaaaaatacaaaaattagccaggcgtgatgacatgtgcctgtggtcccagctgctctggaggctgaggcaggagaatcacttgaaccccggaggtagaggttgcagtgagctaagatcacattgctgcactccagcctgggcaacagagcgagacgccatctcaaaaaaaagaaataataataatagagaacacccctacaagggtcactcgtcttcccattttatgaccatacccatctccttccacagctttttccttgtaattcctgaaaaacactgacttgttctttattactattttgggaatattgtatgaatggaatcatgtagtatgtaactttttaaaaatccactcagcataattcccttgag

SEQ ID NO: 852622 - DNA, 433 bp, Homo sapiens
aggttaaataaatgaataaataaatgaacaaatgtgtatataatattttcattagtcttgtggtttgaaggcatatgcagaattgtgttaaatggtcactctcttgacagacaagaagacaggcaatcgaaaatttttatcttcatgacacgttcctcaagcttcctaatacaacacaagatagcaggacctgctctagccaaacagacaaagacaactggaggaccaatatattttatagaaatcagggtttagagtacataatgcaggcatgataatcctatcaagaatgtcagaaatggccactstaatgaaagggtgatgtcttaactgagccctaaatcatatgtaacaaatgtcagagaaacaagagagaaaatcccagactgagaaaatagcacatgtaattttcctgggatatgagagaatgtga

SEQ ID NO: 852623 - DNA, 513 bp, Homo sapiens
actatgttatctcactttataaactgaatagtgtattsatagctcacagttactgagtacttactgctcgccaatcctgtgttgttacgtgcttaacctgctctttgtagcatggtagttaagaaattaagctctgtagtctgaatttcagacctattttttttaccactgcttcgcatacatccttgggcaaataactgccccaccaagtgcttgagttttcttatatgaaatatgaactaatattaactaaataagataattgtaaaattgaaataagttaatatacaaataatttataataatagtgacatataacaggcactcaacaaatgttagttttaaaaatttttattattatcgttaatcaacctaacatgtaatagacacctcactagatcctggatatgtaagaacagtaatgcatagtctgtgacttagtatttttataatatagtaaaatatacatatatttaatatattatggctggaataaaaatatatgtgaagtac

SEQ ID NO: 852624 - DNA, 513 bp, Homo sapiens
aagtctatcatagttatcgaattttctctaaacaaggaaatatggaaaaaatcccataatgccatactttttaaaaaaaattgagacacataatctgtgttttttattattgaaaattttttactattccttttttcttttcttttctttttttttttttttttgagacagtgtctcactctgcacccaggctggagtgcagtggcactatcatgactcactgcagtctcaacctctcaggttcaggtgagcctcccacctcatcttcctgagtagctgaagctacaggcatgtaccaccactccaggctaatttttctattttttgtacagacagagtttcaccatgttgcccaggctggtctcaaactcctgggctcaaacaatccacccgccttggcctcctamagtgctggaatttacaaatgtgagccagcgtgctaggtctactactgtatctattttcataaaattttaaaaatctcataactttatagaatgaccttgagggagg

SEQ ID NO: 852625 - DNA, 481 bp, Homo sapiens
taaaatatcatccttctaggtccagaggtaacaaaatattatttctaagagactttataaaaattactaaaacccaggcttatttgtttgtttgacctgcaaaagaattatagggaattcttgggagactgyatagtccaactagggttcctcctctactatacataacagagttggtcaactaaactctagatcagtgtatttcacaaagaaggttatgccttactagtgagttatgaaattaatttagtggattgttatcggtgcttttaaagaatagaaaagaaaaaggaaatactaatgcatcacatgtgataaggataaaacagtttcatgaaaattttgttttaattgtgtttgagtatattgattacaatgtaaaatattttttagatgagtgcaataaaaaaagtttgaaatccaatgccacaaataaatactttctagtgaacacaaatgcattctttcaaaatatgatcct

SEQ ID NO: 852626 - DNA, 602 bp, Homo sapiens
aaacatttagcggaagaaatcatgaaagctgtgtaacaaaacatgatattgtaccgatggcttaataattgagatccctttatayactgattccctggtacatttaaaatttaccaaaattatatgcttattttcatataactctgaaatttaccaagaacgtgagaccttattgagaatgcaaaatgaagcaacctatgtttacttaaccactttgatatttgcaccactggatcaaatttaaacacgtcctctctaaacctcttgctgtcagggttgacgtgatgtgccaggatttatatgatgtttatgtgaagggttcccagataaaacaacaaaagtcagctatcaatgtgagaaattaattgaagggacagtttatataagcatttcttgagctaagaatttaccgattacctaaagtatatcacaaaaaccactatacattttctgtgtgctaactcatgtaatcatcaaaataaatagtctgaaaaggaaactgaaactcagaggcataatttaacttgattcgtgtcacaaaatgtgcaaatggtgaaggagggaactcccatcagtcctacctaactggatagcaagcttct

SEQ ID NO: 852627 - DNA, 649 bp, Homo sapiens
tatttttattttagccacttatatttttatgtattatttgtatttttattttagccatctgattgtagtgatttctcattgtggttttaatttgtacttttctaatggctaataataactggggaataatacatttaagtgaaatttgtcattataaataaataaaccatttgctatcatatcactgtagatattgatcctgccagacatcataagcttgagtaataatacagacattgggagaaaaaatagacattaacagaatgtcagatagtttagtagatgtttcttttgtcttggatcttttttgtaccaggtaggatcttttatgtgtcagagaaagtgctattgaagatgaaggtctgtcgtttttcactgagatcataattgcatgctattcctaactgtcctaagatgcttttatgtccttttactgactgtcacgttggataagtttaataacttctgtaatttgattaaaaacttaaggagaatttaaaaattctagtacatgcaaaaataccattaatgtcattaaatggattttgtactttcttggaaagggagcaatgtaaaaaatgtagatgcatctcttgattagtyaggagtcactcagttggaactcttagaaatctaagtcaaagcaagc

SEQ ID NO: 852628 - DNA, 619 bp, Homo sapiens
attaattctcttgtcaaatatgttgagatgcttcacgatcattcagagtttttcaaaataaaaattcatggaattaatcatasaggagacaaattttgtaaaaagaatttaattttagggtttaaaagcaacaaattctccacatagggaagtgaagattcagaaggcatgtagtaagtaaagaatttgggcttgctcaaagagaaggcctagccttataggattgtctgtttgtctgggggacttgggtcaaagtaggtatctagcaatgtgatttagggtggggactagccacacatatacagttttatgtttggggctagacaaccaaaaataccaacaacataacttaagtgaggagctttgggtcacacagtgtcacagtatcaatggtcatgtatcgtaatattaaccacatgggccacaatcaatcaattatgcttatatgatgaagctccccccaaaaaaccactcacaatactcaggtaaacttccctgatttgcaatactatatgcatactgtcacacgtagatgacagaacagtgatatcctgatttcatggctagaagtcaagtgaaatttcatatttaaaactctcctggacaacgttctatgtgt

SEQ ID NO: 852629 - DNA, 619 bp, Homo sapiens
attaattctcttgtcaaatatgttgagatgcttcacgatcattcagagtttttcaaaataaaaattcatggaattaatcatacaggagacaaattttgtaaaargaatttaattttagggtttaaaagcaacaaattctccacatagggaagtgaagattcagaaggcatgtagtaagtaaagaatttgggcttgctcaaagagaaggcctagccttataggattgtctgtttgtctgggggacttgggtcaaagtaggtatctagcaatgtgatttagggtggggactagccacacatatacagttttatgtttggggctagacaaccaaaaataccaacaacataacttaagtgaggagctttgggtcacacagtgtcacagtatcaatggtcatgtatcgtaatattaaccacatgggccacaatcaatcaattatgcttatatgatgaagctccccccaaaaaaccactcacaatactcaggtaaacttccctgatttgcaatactatatgcatactgtcacacgtagatgacagaacagtgatatcctgatttcatggctagaagtcaagtgaaatttcatatttaaaactctcctggacaacgttctatgtgt

SEQ ID NO: 852630 - DNA, 534 bp, Homo sapiens
gtttgcggtgatgctggtataggcaaacctactgcgttaccagttgtataaacgtatagctcgtacagttgtgcatagcacattctacttgataatgatgatgmgtgctatactatacattttattgttattttagagtgtactcctcctactaattagaaaaacaagttaattgtaaagcagctgcaggcaggtcctgtgggaggtgtccagaagaaggcattgtcatcacaggaggtgacggctctgtgcgtgtcattgcccctgcagaccttccagtgggaccagatgttggggggaagacagtgacaccgaggaccctgaccctgtgtgggcctaggccactgtgtgtttgcctctttgtttttaacagaaacattttaaaagttaaaaaaaaaaatgaaaaaatagaaaaaagcttatagaatgagaatataaagaaagaaaataattttgtacagctgtataatgtgtttgtgttttaagcaaagtgttataaaagagtcaaaaagttaaaaaaatttaagtttataa

SEQ ID NO: 852631 - DNA, 509 bp, Homo sapiens
tgctatgggagatcatggtgagaggcaaagccagctggacttacggaccaatcaacactgtaaaatggaccaatcagcgctctgtaaaatgtaccaatcagcaggatgtgggcggggccaaataagggaataaaagctggccaccccagccagcagcggcaaccggctctggtccccttccacgttgtggaagctttgttctcttgctcttcacagtaaatcttgctgctgctcactctttgggtccacaccaccttaaagagctgtaacactcaccgcaaaggtctgtggcttcattcttgaagtcagtgagaccaagaacccaccggaaggaagaaattctggacacaatgggatccagtgctcacagtgaaatacgagggaarcagtacaacctctgctcacttccttaagagggaggctctggccttcccattggaagccacgtgttgaaggtggtggagctgccatcatccaggttgtcttgatggcttctgggagcagagcta

SEQ ID NO: 852632 - DNA, 564 bp, Homo sapiens
tccaagattccagagatgataggctttggatctgggcgagaacaatccagccttctcattttagaaatgccgaaggctaaggacccaaaaccacccatacacaggacgtcacccagtgtgacatagaygaggctatgaccagagccccccatccagagctctccccagccaaccactccccatgtgggcagctccaagctggctccaggcttcaggagaggaagcacttgctgactctctccttagacgtggacatgctgaagtgaattccaggcatgttttcaagatctcctcggactgcctggatcagaggctagggtagttatctctgcttgaagtatcagtggtggaagccttccatcggctcctcccttcatcttgaaagaatcccggggcatctggtggctggcctcgctccgaagatggtggggacgaaagcctctgggatacacattttcttcaggggcggccagctgtaagagacatcgtccaatccaaggggtggcaagttcattgagcacaataacccaactccgccactgagtgtgtaagttagaaccctgc

SEQ ID NO: 852633 - DNA, 564 bp, Homo sapiens
tccaagattccagagatgataggctttggatctgggcgagaacaatccagccttctcattttagaaatgccgaaggctaaggacccaaaaccacccatacacaggacgtcacccagtgtgacatagacraggctatgaccagagccccccatccagagctctccccagccaaccactccccatgtgggcagctccaagctggctccaggcttcaggagaggaagcacttgctgactctctccttagacgtggacatgctgaagtgaattccaggcatgttttcaagatctcctcggactgcctggatcagaggctagggtagttatctctgcttgaagtatcagtggtggaagccttccatcggctcctcccttcatcttgaaagaatcccggggcatctggtggctggcctcgctccgaagatggtggggacgaaagcctctgggatacacattttcttcaggggcggccagctgtaagagacatcgtccaatccaaggggtggcaagttcattgagcacaataacccaactccgccactgagtgtgtaagttagaaccctgc

SEQ ID NO: 852634 - DNA, 539 bp, Homo sapiens
cagctctgtcctaaggattttacttagaatatttcatttaggccgggcgtggtggttcacacctataatcccagtactttgggaggctgaggcaggtggatcaccaggtcaggagatcaagaccatcctggttaacacagtgaaactccggctctactaaaaatacaaaatattagccaggtgtggtggcacacgcctgtagtcccagctattcaggaggctaaggcatgagaatcgcttgaacccaggaggcggaggttgtagtaagctgagattgtaccactgcaatccagcctgggcgacagagcgagactctgtctcaaaaaaaaaggaacatttcatttaaccccaataaggtgggtagtatcattggacccattgtacagtaggaaaaagggacagaaggtgtgggagctggaccaaggcctcagatctagtggttggtggagataaattcaagtccagggcagcctggatccagtacctatgtccttgycctacactctcctgtctatagaaagggtgttttccatttattt

SEQ ID NO: 852635 - DNA, 553 bp, Homo sapiens
ctcgcctgagttcctgtctttccaccatctctcacctgagttcctgtctctccacctctcgcctgaggtcctgtctctccaactctcacctgagttcctgtctctccacctctcgcctgagttcctgtctttccaccatctctcacctgagttcctgtctctccacctctcgcctgagttcctgtctctccaactctcacctgagttcctgtctctccaactctcacctgaattcctgtctctccatcatctctcacctgagttcctgtctctccacctctcacctgagttcctgtctctccacaccctcacctgagtttcctgtgtcacctgttgtaacagccctctcttaagaggtcagctggttaggaagctccagtgtgaaaaccgtccataggcattggtggttcacgggacattttcctcggcagaaacttcagttttactgagaactgagctggaartgtacgtgtaagcacaagaggcctcccagagcatttgacccaaatccagcaccagtgttgcatcctcttgctgtaaaataggacatttt

SEQ ID NO: 852636 - DNA, 578 bp, Homo sapiens
aaaagcctacttttattttgattagtatctttataggttttctttctttggtagtttttaagagtttctctttgtttatgataatctgtaatttcaytacgatgtatttaggtgaagattttggttttgcactattcagaacttaatgtacttttttcaacttaagatttaagtcttgcaatttgagaaaattttctaacatatctctttaaatattgtctcttccaaatttttctattctcatttgaatcttaattaacttaaattggagcttctcattttatcttccatgcgtcaacctgtctttcatacttcccgagacagatccagggtttttgggacctgcagtttagacaatctgggagtctttatggactcccacaaaggatctgggaaaggatacaaaagtatgagtagaacattagatatgaagtacatatttctttagaatgagaaaaggtaatcacacaaattgtcaattgaaacaacaccgacaagttctacaaacattattaactccagaaaaatattgtaatatgtatattactactggaatacctccatatagttttattctt

SEQ ID NO: 852637 - DNA, 578 bp, Homo sapiens
aaaagcctacttttattttgattagtatctttataggttttctttctttggtagtttttaagagtttctctttgtttatgataatctgtaatttcactacgatgtatttasgtgaagattttggttttgcactattcagaacttaatgtacttttttcaacttaagatttaagtcttgcaatttgagaaaattttctaacatatctctttaaatattgtctcttccaaatttttctattctcatttgaatcttaattaacttaaattggagcttctcattttatcttccatgcgtcaacctgtctttcatacttcccgagacagatccagggtttttgggacctgcagtttagacaatctgggagtctttatggactcccacaaaggatctgggaaaggatacaaaagtatgagtagaacattagatatgaagtacatatttctttagaatgagaaaaggtaatcacacaaattgtcaattgaaacaacaccgacaagttctacaaacattattaactccagaaaaatattgtaatatgtatattactactggaatacctccatatagttttattctt

SEQ ID NO: 852638 - DNA, 626 bp, Homo sapiens
ttgttatgtcacactttaatttccttaagctagttcttttcttttcccctacttttcttttctcactttttctgtgtggaccacctggtaaaacaatatctaagagatggaaatagttaaaagagaaatcaaatggaagatgaaagatggaaaagagttacagcgggttatttttcttaaagttattcccatatcacaaagcccactaatccctttccaaagaatacacaacaccacaatataaagctaaaaatatcaagaaacatatttaagaacttaagaaatgtataggactaaagaaaaaactactatatttaagcaaaaacaactttctactctacaatattgtaaaacaaacgaaatatactaaagttcaagaaaataaatacatttcttacataagtgctgaaagtttctgatgaggcattggtaaatcgaagagacaggaagaaagctttccccttgtttgttgtgacaaagaaactctcctttccctgccccagcacagcctacgcaaattccagacatgttagaggatacaagggcacattatggggcctgaaaggcagtacttaggactctgagcactsatctgcaagaaggaaaatagagataaaaaactagac

SEQ ID NO: 852639 - DNA, 406 bp, Homo sapiens
gtggtgcatgcctgtagtccccagctactcaggaggctgaggtgagagaaccagggagccaagatcatgccactgcactccagcctacccracagagcgaaaccctatctcaaaaaaaaaaaaaaaaaaaaaatcatcattatcatatctgatcttgtgaataagcattatacatttccctatctatctaagctcatgtggtctcaagtcttttagccatttgatagagttttgccataccaatgaacctaaaataggaatgaattacataaaattgtcctttcgttcctataaaatatgtaacacatttgctattcacagattatttctatcagaaggactttatgaaaaaccttgaaacacagggtctgtgtcatcactcttacacagaggacaccatctatca

SEQ ID NO: 852640 - DNA, 645 bp, Homo sapiens
atgttgtaaaatgtaaaactataaaacttttagaaaaaacagagaagaaaatatgcaaaatctaacgctaggcaaagtgttcttaggcttgacacaaaaagcacaatctataaaaggaaaaaattgatawataaatttttttgaaaattagatagagctgtaaaaaccttgcctcttgtgatactgattgttgctctttttagactttatacattttccaagtcatatcgtaataccacctagatttatttacgtgtgaagttattaaaaactgttattttgctcaattaaaagctcattttaaagatttcaaaaaaaattcaaagcaactcaacatgcaacagataaaataatttgctgttaattggaggaattaattaactgttaattgaagaaattttttagaaactttattatctttagacagataatattgctaattttccactattaatagatgctgtggctaatgatttctacagtggtgtacatagtcaatgtgtgaaacgtgctcaaatgtgtatttgattattttagttgatgttaagaatcttctagaatttgcataactcactgtggttgatctgcaaccaaccctagaaactactatttcaaatagattgcatttttaggagctggcatatt

SEQ ID NO: 852641 - DNA, 472 bp, Homo sapiens
ggctgcttctttcaaattggtcattactagacattttcattgcaataatatttattatttttatgtcttttgaagcctttaacccagaaaggcctctaagtacgttttggatcataaaataaatggaaaaatctttaatcttaaataatcattagtttagcaaatatttctgttgatggttttcactggaacagagcttgctgatatgattgtaagtgtaggataaggccacccagttcagataattctcttccagagtaggacttctaagttggaaaacaataaagactataaggttgtttaaaaccatgcttattttacttatagataattcaggcattgacatatgtattatgycatttgcaaatgatcattaagaatctctacttgggggatagataataataatcatatctttctcaataagggaatatggtaaaattccagatttagtagtggctaatgtaacctc

SEQ ID NO: 852642 - DNA, 536 bp, Homo sapiens
tttagagaagagagagacacagcttatgccccacaggtacataaagtttagatacgaagacaattgatatacacccatcaaaatagtagtaatcaaaggaaaggaagaggaagaaacaggtatttcttgaagacctactgagtacctgccagatacttattattgttttcattttaaacaggaaacagaagtttagatgggttgtgacatttgcccacgttcacacaggtatagatttagagataagactcaaattcaattctgtctcctcccagagccagcactgtgttcactaagccccctgactcacacacatgacacagggatctggagatctctgctgaggtgttgaagctttgaggaagagatagcattttatacatgcattggagatcaagttgtaacaaatggaattttagyacatagttattccagatcatcatcttatggattgagggggtaaatgaaggagcatgtgagtcttccttggtttttccctgaagtatttgggaaactgaaggcaaaaaaaatccaaa

SEQ ID NO: 852643 - DNA, 476 bp, Homo sapiens
actaacccaatctgacaaagaaaaagaaaaaaaawttaatgaaaaaagcctctaagaaatttgggattatgttaaatgaacaaacatttaactggtgttcctgaggaagaagagaaatctaaaagtttggaaaacttacttgaggtaataatcaaggaaaatttccctggtcttgctagaattctggacgtacaaatacaagcagctcaaagaacacccaggaaattcatcgcaaaaagatcatcacctagacacatagtaatcaggttatctaaagtcaagacaaaggaaagaatattaagagctgtgaggcaaaagcatcaggtaaactataaaggaaaacctatcagattaacagcagatttctcagcagaaactgtgcaagccagaagggattgggatcctatctttagcttccttaaacaaaataattatcagccaagaattttgtatccagtaaaactaagcttcataaa

SEQ ID NO: 852644 - DNA, 476 bp, Homo sapiens
actaacccaatctgacaaagaaaaagaaaaaaaatttaatgaaaaaagcctctaagaaatttgggattatgttaaatgaacaaacatttaactggtgttcctgaggaagaagagaaatctaaaagtttggaaaacttacttgaggtaataatcaaggaaaatttccctggtcttgctagaattctggacgtacaaatacaagcagctcaaagaacacccaggaaattcatcgcaaaaagatcatcacctagacacatagtaatcaggttatctaaagtcaagacaaaggaaagaatattaagagctgtgaggcaaaagcatcaggtaaactataaaggaaaacctatcagattaacagcagatttctcagcagaaactgtgcaagccagaagggattgggatcctatctttagcttccttaaacaaaayaattatcagccaagaattttgtatccagtaaaactaagcttcataaa

SEQ ID NO: 852645 - DNA, 631 bp, Homo sapiens
gcaatggcgtcttcattttgtgagtccaatgcccagtgcactgtttagactgcggagaaatgggtcttcagtgattaaataagagtccctaagattttgcttytgagaatctttcacatctttaattaataacaataataatacttagttactgcgttacatattttccttatcttgaattgagaaacatttcaaacatacagaaaagcagagtaatacaataacaactaccaccttctactgaggccagacaaaagctaatatttactacgttgatgcaggcttttttttttttttttttttttttttcaaaataaagcaccatgaatacaggtaactacagataaacctctctgtctccatttcctgtccccctgacacaacttctccactcaagttggtgtggcttcatccatgtatatttttggcttttactacatatgtatgtgttcaaaaactatgaactcttctgtgtatttaaatattacatatatcggattacatggcatgaaacattttataacttgcttttaaaaatttaacacttgaaatttttccaggtagatacatgtagatccagttcattcattttatttcaaaactgtattatttcaaaactagagtttatcaa

SEQ ID NO: 852646 - DNA, 620 bp, Homo sapiens
tttaaccacagtgctgtatgagctctgtgcctcttggcattgagacgtgaagccagctggacttcctgggtccagtggggacttggagaacttttctgtcttacaaagggattgtaaaatgcaccaatcagcactctgtaaaaacgcaccaatcagtgctctgtagctagcaagaggtttgtaaaatgcaccaatcagtgctctgtaaaatggaccaatcagcaggagtctaaaagtagccaatcacagggaagattgaaaaaagggcactctgataggacaaaaacagaagatgggcagagacaaataagggaataaaagctggccaccccagccagcagtggcaacactcaggtgcctttccacctgtggaagctttgttttttcactcttcacaataaatcttgctactgctctctctttgggtccatgccttctttaagagctgtaacactcaccgtgaaggtctgctgcttcattcttgaagtcagcaagatgagaccacgaacccacgaaccaacactaggcacagcatgagcagtcctggactgcttggcctaactgtagaatactgtratgatcaatgacttcatgcagactgaacgaaagaaacaagaggg

SEQ ID NO: 852647 - DNA, 563 bp, Homo sapiens
tcaagggatcccaaataaatatatttatttctaaattcattctaaatgtttgcartgttaagtatgtgtggcaaaagaacagatacctttcattttttcaatcacctttcaaatattgttacaaaagcacatattactgtgaaatagtcgtaatttcagaaagaaattattcttcattcaacttctcttaagatttttaattaaactttttattttgaaaacattcagaacctacagcaaagttgcaagaatattacaagttaatgattatatgctcttcccctctattctcccaccattgatacttagccatgccaactctctccatctctatattctacacatttacagtgcaattatcaaatttagaaaacttaacattgacacaatgctattatctaatatgtggtgaatattcaaattttgttgatggttacaaaattgccttaaaagcaactttttcccctcaacacaaaatccaatctagggtgatgcgtcgcatttaggtgtcatgtccccttagacttccttaatcaggagcagtccttagcctttctttgttc

SEQ ID NO: 852648 - DNA, 563 bp, Homo sapiens
tcaagggatcccaaataaatatatttatttctaaattcattctaaatgtttgcaatgttaartatgtgtggcaaaagaacagatacctttcattttttcaatcacctttcaaatattgttacaaaagcacatattactgtgaaatagtcgtaatttcagaaagaaattattcttcattcaacttctcttaagatttttaattaaactttttattttgaaaacattcagaacctacagcaaagttgcaagaatattacaagttaatgattatatgctcttcccctctattctcccaccattgatacttagccatgccaactctctccatctctatattctacacatttacagtgcaattatcaaatttagaaaacttaacattgacacaatgctattatctaatatgtggtgaatattcaaattttgttgatggttacaaaattgccttaaaagcaactttttcccctcaacacaaaatccaatctagggtgatgcgtcgcatttaggtgtcatgtccccttagacttccttaatcaggagcagtccttagcctttctttgttc

SEQ ID NO: 852649 - DNA, 553 bp, Homo sapiens
acaggaaggagacggccatctatttggaacagagcttcccttatagacctcagaaggaaccaactctgataccttggttttgggcttccagactccagaactgtgagacaataaattcctgttatttaaggctcaccagtctgcggggctttgccatggcatcctaagaaagtgagcgtgaaacttaattcatcagtacggaaaacatcttggcagtttaaccgctattgtaatactcatgtattgatacgtgtttcagaatttttctgctctcttcctcagtatgtatgtacagcaaaagcttcagagagaaactccaggccatgcaaactcatgaactaaactctgggagaggtgctggtgatgacctggaagggaaagatgagtgtttggcacaggacgggaccgaccgaaagtggttgtktgggagggtttgatggggtggctgctggttgttgttgggagaggaggggcaggtgggttctctcctctggcaaggccacgggtgtggtctggcttggagcaggatccagagccattgaactctgaggaa

SEQ ID NO: 852650 - DNA, 635 bp, Homo sapiens
ggattcgtccttcatccttgacctttgggagtttaattattaaatgccttcaggtagtttgtttgggttaaatctgcttggtgttctatcaatttcttaaacttggatattgatatctttcaatatgtcagttgggaaggtttgggaagttctctgttattatctttttgaataaactttctacctcaatctctttctctgcctcatctttaagccaataactcttaaatttgcctttttgaggctattatatctgatcctgtacatgtgctttattgttttttatttttttttcttttggctcctctaatttttcttttggctcactaattatttcttctgctagatccatcctattaaaagactgacacattcttcaacattctaattgcattttccaggtccagaatttttgcttgattttttaaaaatatctctgatagaattcttaattccttcttgtgttatcttgaatttctttgagttttctcaacacagctattttgaattgtctttcttaaaggtcacatgtgtctatttctctaggattggtccctggtaccttatttagttcatttgctgaggtcacgttttcctggatgrtgttgatgttagtagatgttctttggtgtcta

SEQ ID NO: 852651 - DNA, 559 bp, Homo sapiens
ccctgactatttgaaaggagaatggctagagaaagatgtgaatgaatggaaacaatggagagcaggcaggaggctgttgcaaycattcgtggaagagacactgggggcataggggacagaaaaagtggctggagcccaggcaaggttagggttaacaggaagtggtgatagattatgcaggagaggggtccctgatatctcctagatttctagatcaaggaacgggctcttcacactttgcatgtcatctcattgcttgtgtatcttcccatcttcctcctgcacgcaggagagagctacccagaagcgtgcagcaggaagatgggccatttgcctaagaattcatgcttgctgaaatattaactagctagtagtttcctctggtgatccctaaaaattcttattaggaatttattatccaggaaatgagaatattctgtacattcctttcaagggaccctccataaggcagagacttactgaaagcaagctttatacattcctggtgtctttccacccattgagatcaaagtcctcaagagtcattggtttgggttat

SEQ ID NO: 852652 - DNA, 576 bp, Homo sapiens
tgtacagtggagataataaaacattaacttgaagggctgttgtgagcatttagaaatayacataaagatgcctaactgtatattgcacacagaaaccattcatgtttgttaaataaatgggtaactattcttatgagcaaatacatatattttatgaagcactgtttatcataatatgcctttatcacacaccttgccccatttatgattttgattatggaaagttttgacattattgtcagttggtgagcaatcaaagtggagcgataatcttaatatgtagtacaaggcaccatgaaaaggaaatgcaaattacaaaaattggttttagccacaatttcaggaatgtataccgtatttgtttgttttcatgctgctgataaagacatacacgagactgggtaatttttaaagaaaaagaggtttaatggactcacagttccaagtggctgggtaggcctcccaatcatggcagaagatgaaaggcatgtcttacatggtggcaggcaagacagaatgagaatcaagtgaaaggggaaaccccttataaaaccatcagatctcgtgagacttatt

SEQ ID NO: 852653 - DNA, 546 bp, Homo sapiens
tttggaaacgcaccagtcagtgctctgtgtctagctgaaaggtttgtaaacgcaccaatccatactctgtaaaaacgcaccaatcagcgctctgtgtctagctaaaggtttgtaaatgcaccaatcagcactctgtaaaaatgcaccaatcagcgctctgtatctagctaaaggtttgtaaacagaccaatcggcactctgtaaaatggaccaatcagcgctctgtaaaacggaccaatcagcaggatgtggaagtggccaaaaaagctggccacccaagccagcagtggcaacccattcgggtccccttccacaccgtgaaagctttgttcttttgctctttgcaataaatcttgctgctgctcactctttgggtccacactacctttatgagctataacactcaccaccacggtctgtggctttactcctgaagtcagcaagaccaccaacccaccrggaggaacaaacaactccagacgtgccacctttaagagctgtaacactcactgtgaaggtctgtggcttcactcctgaagtcagtga

SEQ ID NO: 852654 - DNA, 371 bp, Homo sapiens
aaagtttgatatcaaaaatgaaaatacccaaaagggaaaaatgaaggcagaacagctgtctcaatttccaagcatcggagtttggaagcaagcaacttttccccctcaagatttcttggaacttacactcattcaaaagggcatcacactcaaatactttctgttagtaacatctcagtgctccataatctacccatcctaggaaagtgtgctcaaactcattatctacttcataaactaccatgttkcctgtggcactgcttttgcttgtttaaatataaatataagctcagaaagagatactagagacttgattctaattttagataatgtaaaattatttatttatttttaaattaaatttaattttt

SEQ ID NO: 852655 - DNA, 371 bp, Homo sapiens
aaagtttgatatcaaaaatgaaaatacccaaaagggaaaaatgaaggcagaacagctgtctcaatttccaagcatcggagtttggaagcaagcaacttttccccctcaagatttcttggaacttacactcattcaaaagggcatcacactcaaatactttctgttagtaacatctcagtgctccataatctacccatcctaggaaagtgtgctcaaactcattatctacttcataaactaccatgtttcctgtggcactgcttttgcttgtttaaatataaatataagctcagaaagagatactagagacttgattctaattttmgataatgtaaaattatttatttatttttaaattaaatttaattttt

SEQ ID NO: 852656 - DNA, 621 bp, Homo sapiens
ctctaaaaacaaaaaatttttttttttttttttttttttttgaggcagagtctcgctctgtcgcccaggctggaatgcagtggcgtgatctcggctcactgcaagctctgcctcccgggctcacgccattctcctgcctcagcctgccgagtagctgggactacaggcgcctgctaccacgcccggctaatttttttgtatttttagtagagacagggttttaccatgttagccaggatgatctcgatctcctgaccttgtgatttgcccccctcggccttccatattgctgggattacaggcgtgagccactgcgcctggccaacaaaaataattttttattttaaattattttttaattttaattttaatttattttgagacggagtctcggtctgtcaccaggctggagtgcagtggtgtgatcttgtgatctcggctcactatagcctctgccaggactgcctcccgggttgaagcgattctcctgcctcagcctccagagtagctgggattacaggtgcccaccaccatgygcagcttttttatggtttttttttttttagacagagtcttgctctttcaccaggctggagtgcagtggcgtgatcttggctcact

SEQ ID NO: 852657 - DNA, 558 bp, Homo sapiens
atcttctcatctcagactgccaagtagctgggcctgttggtgcatgccaccatgcccaaacttccagcctttttttgttttaaaaaagtagagttwtgaaccaggcacagtgattctcacctgtaatcccagctacttggatagctgaggcagaaggatctcttcaggccagtagttcaagaccagcctgaataacatagtgagcccttgtctctaaaacaaacaaaaacggaattataaataccatcttgtaaactgccttttaatttttattttatttacttattttgagactgagtctcactctatcgcccaagctagagtgcagtggcatgatctcggctcactgcggccttgacctcccagattcaagcgactctcatggcttagcctctcaagtagccgggattacagacgtgtgccaccacgcctggataacttttgtatttttagtagtgatggggttttgccatgttgtccaggctggttttgaactcctgacctcacatgatccacctgccttggcctcacaaagtgctgggattacaggcgtgagcc

SEQ ID NO: 852658 - DNA, 558 bp, Homo sapiens
atcttctcatctcagactgccaagtagctgggcctgttggtgcatgccaccatgcccaaacttccagcctttttttgttttaaaaaagtagagttttgaaccaggcacagtgaytctcacctgtaatcccagctacttggatagctgaggcagaaggatctcttcaggccagtagttcaagaccagcctgaataacatagtgagcccttgtctctaaaacaaacaaaaacggaattataaataccatcttgtaaactgccttttaatttttattttatttacttattttgagactgagtctcactctatcgcccaagctagagtgcagtggcatgatctcggctcactgcggccttgacctcccagattcaagcgactctcatggcttagcctctcaagtagccgggattacagacgtgtgccaccacgcctggataacttttgtatttttagtagtgatggggttttgccatgttgtccaggctggttttgaactcctgacctcacatgatccacctgccttggcctcacaaagtgctgggattacaggcgtgagcc

SEQ ID NO: 852659 - DNA, 519 bp, Homo sapiens
gctaaagagtgccaagttgctccccagagtcaattgtcagcctttgacagagtccagtaggaactcagattgcctcccgttgaggacaatgagccgcctytcttgtgttaagccttttctgccgttcccattgtgattctactgggggtggagaggagggtgcctcaactcctgagggcaatgggacggtgaggggatgcagctggatccaaatagcaatttctggaccatgaatccttgcctaagtcaacttactgtttttctcctaccattgagcctttattctgggtatcaagttataaaactgagctggggtctcctcacccagcacagtaagaccagacatccacactgaggttctgcagtgatagaaaggaagctgttggtttgcagggtgccaaacaaggaggaccaggccataatgctcaaatcctgacctcccctatatcttgcaggaagagatttttaaaggcaggggtaaatttcaggaagcagaaattactggcaaaattagaaatc

SEQ ID NO: 852660 - DNA, 515 bp, Homo sapiens
tgtgctttgtacccattctcctttccagacactggcctcttctctctttttttctctttcccagacagtttctaaatgtcccttatgatgtccagagttsagagtcattcatctctgtacactcagcaaagcaaaaagttctgcggtcagcagaacgaaccatcttgacgtagcagttcagggaccatcgattttaactcatatgtcccttgaaaggttcaccaaataatttatcaaagtattatggttatttccttgagataaattcttagaggtggaactgctggatcagaaagcataaaaaagggaatgttttcgatgacttaggaacaagggtgtcaggtgtgttgatttgctttctgccagtgctcttgagagaatgttgatttgactgcagtcattaactagctgagatttcgagtagaattcctctggttcatttgtcattctattccctgtcaccgtacttggcagtagagcatcagagctctgtctgggaagtacaaccactatga

SEQ ID NO: 852661 - DNA, 601 bp, Homo sapiens
agggaactaggttgatggagattaaggaacacagcagaaagcacctgctttgrcataattttctttctccccgtctttgctttcaaaccagccatcctgaccctcaattcactgtttgttgttgagtcctcctgaaaggtacgagaagcagctgccacttgctgatatactctattttttttttcttaaagctactaatctggttggcacctttcatcaaactcctacaaagtgagcctctgggaccacctggatctgtctctcttctggcccagaatctttcagacaaccaaatctcctctcttttgggcagaggataatgtctgaatattcttttgctttgattgacaggaaataaagggcacttgaaacagcaggagctgcctctggagctgggtccagggtttggtggggcctgaagcttatgtaattctggggcctccttgaagaaaaatagtacaaaactacaaatacaaaattagtgatcaaagtggatccttaggattggaaaagaaatcacaacaaactacaaattttaaaaaattgaaaaataacacaagcttcagaaagtgcagaaaataactgaataggctgataacaa

SEQ ID NO: 852662 - DNA, 677 bp, Homo sapiens
ctgtcactgcctctgggttgggatccattctggtttcctttatgagacataaattgctgatgcttgccactttgtattcacagttgaggtgcatgaatcctaagttaaatatttatattttttgtttcctatgccttatgtatctgagttttgttcatatctacctgtattttatatttagaaatatgcagacagtagaagtaaaatatcacacattgagtttctcctcctcctacatgcatgtgcgtgcaaagacacatgcttttatttttatttatttatttttttgagacagagtctcactctcttgcctagactggagtgcagtggcaggatctcagctcattccaacctccaccttctgggttcaagtgattctcctgcctcagcctcctgagtagctgggattacaggcgcccgccaccatgcccagctaattattgtatttttggtagagaagagttttcactatgttggccaggctggtctcgaactcccaacctcaggtgatttgcccgcctcggcctcccaaagtgctgggattacaggcatgagccaccgygcctagcctacatggcttttaatacgtttaaaataacctagaaaatttaaatgtaagtaacattgaatgtattaaaggagaaaataagccaaaaatggaaaagttgaatggggta

SEQ ID NO: 852663 - DNA, 677 bp, Homo sapiens
ctgtcactgcctctgggttgggatccattctggtttcctttatgagacataaattgctgatgcttgccactttgtattcacagttgaggtgcatgaatcctaagttaaatatttatattttttgtttcctatgccttatgtatctgagttttgttcatatctacctgtattttatatttagaaatatgcagacagtagaagtaaaatatcacacattgagtttctcctcctcctacatgcatgtgcgtgcaaagacacatgcttttatttttatttatttatttttttgagacagagtctcactctcttgcctagactggagtgcagtggcaggatctcagctcattccaacctccaccttctgggttcaagtgattctcctgcctcagcctcctgagtagctgggattacaggcgcccgccaccatgcccagctaattattgtatttttggtagagaagagttttcactatgttggccaggctggtctcgaactcccaacctcaggtgatttgcccgcctcggcctcccaaagtgctgggattacaggcatgagccaccgtgccyagcctacatggcttttaatacgtttaaaataacctagaaaatttaaatgtaagtaacattgaatgtattaaaggagaaaataagccaaaaatggaaaagttgaatggggta

SEQ ID NO: 852664 - DNA, 537 bp, Homo sapiens
ggcagctccagaattattaggaacccagacctcttatgtgttgcactgccgtcctcaacacccagctttcaactcatggtacaagatgggctgctgtggctccagctatcatgtccaacatccagccagcaggaaggagaatgggagagaagagggacacaattaaaccttcttttaagggatgctctctagaagttgcgcatgcaactgacatttacatcccattgaccagaccttagtcacctgagtacacctagctatgagaacagctgggaaaggtgggcaaccatgtattttggctgaaaatgagcagtctcaatactgcagaggaaatggagatgggctattaggagacaagtagcaggctgtgctacatcaatttgtaattcagattattttatgggtctttgcaaatcactttaagttctgtccacactggggaaagggtggttataagtaaatgaatgaataaataagtttaaattccttaggaggmggatggatcctgttactccttctgtttaacgtgagtctgca

SEQ ID NO: 852665 - DNA, 580 bp, Homo sapiens
tatgctgctgtctgtgaaccatgagtacagggagtttaccctcctccccrcaaaggagaatctatggttgcccctgtgggtaagctgatggtgtaggacacacagttctggattcagcttttgctggtgaaattgctggctatcccctgattgggtaaacaaacctaattcctcagagatctacacagtgctcacccctccccagctgtcagccttgtatccaactgtactggtaccataatttttgattctctgagggctaggacttctcttttcttcctggactcagggcaaggatggtcgggcaaacttgcttttgtcttattcatacccaaagcatctgtgttgtcagtgtaaaaggctactgaagacataaaccgtttatagttccaacactgcaactagaaaattcatctttaatccaatgaggataacctggtatgtcatttgccaaaggttgttattaatacaaagtggatgccagtggttagtgtatgaaatcacacataagcccaggcttgctgactggtttcaactaccatctttttatttaagtggacagatataactgggtgtcttt

SEQ ID NO: 852666 - DNA, 609 bp, Homo sapiens
tggcgaaggttctccatgtgggtrcagggatggaaggggcagtatgggggattttgcaaagacaaaactgacctggcggatagaagctgtttagtttactaacttctttccccctactggtgtgacatgtgcagcaagtcaggtgactgagagtgtctgtgggaagagggtattagtgtcctagagtgaagagtcactgcagtaggaagatggaaaatgcagcaagggattgggaaatagagggagaaaacttctcctgaggctaatggtttctctagtgctgtgcaaatgtcctttcaagactctggaaaaatgcggccaggcgtggtggctcatgcctgtaatcccagcactttgggagactgaggtgggcagatcacctgaggtcaggagtttgagaccagcctggccaacatggtgaaaccctgtctctgctaaaaatacaaaaattagccaggcgtggtggcggatgcctgtaatcccagctactcgggaggctgaggcaggagaatcgcttgaacccgggaggtggaggttgcagtgagcctatattgcgccactgcaataaaggcaggggtaaatttcaggaaagcagaaattacagacaaa

SEQ ID NO: 852667 - DNA, 637 bp, Homo sapiens
gatacagacatcctggccacttggggcttagagctygtatggctataagtacacaaatgcccaacaagcatgtaaactactaggatgtcaactctcaaagtccaccactggtgtctgggtgttgtgcggtttgcatggagatggaaggcagaaatgtctgctctttgggttggagagaactttggatattaacttcttggtttgatatttaaaacttctgttgtgtcgatagcccctccagaataactgtggaaaaagaaaaatattttaaaatattcaaacccaaatcgtctttgatttagactttttcaggtggagcaaagctttcacatatccttgggaggaaagaattcaaaaactggatgtaaatagagctgcgtttattgagataggagagagcggatgcagtgaatgaaatgtgtgtgcagatagtaatgaagtatttacctataggagtgtgctgtttgtatgtgctcttccacaatttacttggtacttgaaaaatgttgtcatggcaacagtataacaaacaaggtggaattgcgtacagatgaatcacaactttatatgccagacaaagaagcgaatgttctattagggctgggcttattaagcttaaaagttacagcaaacattt

SEQ ID NO: 852668 - DNA, 568 bp, Homo sapiens
gcctcaatgcactcagaaatataccttaacagattctamaaaaacagggtttccaaactgctgaatgagaagaaaagattaactctgggagatgaatgcgtacatcacaaagtggtttctcagacagcttccttctagtgtttatcctgggatatttgatttttcgccattggcctcagtgagctcccaaatgtccactcacagaatcaacaaaaacagtgtttccaaaatgctgaatcaaaagaaagttttaactctatgtgacaaaaacacaaatcacaaagcaatttctcagaaagcttctttctagttttcatctgaagatattttctttttcaccatgggcctcaatgagcaccaaaatatccgtttgcagattctacaaaaacagtgtttccaaactactgaatgaaaagaaaggtttaccccagtgaaatgaatgcagaaatcacaaagtggtttctcagatacattccttctagttttttccctgggatatttgcttttttgccattggcctcaatcagctacgactgtccatttgcagaatggacaaaaacattttttc

SEQ ID NO: 852669 - DNA, 571 bp, Homo sapiens
gtgagatgaatgcacacatcaaaacatggtttctcagatagcttccttctagtttttatcctgggatatttgctttttcaccatttgcctcaatgarcttccaaatgtatatttgcagaatggacaaaaacagtgtttccaaacttctgaatcaaaagaaagttttaactctgtgagatcaatgcacacatcacaaagtagtttctcagaaagcttctttgtacttttaatctgaagctattttctttttcatacgaggcctcattgtgctcccaaataaccctttgtagatcttacaaaaactgtgtttccaagctcctgaatgaaaagtaagttttaactctgcgagatgaatgcacacatcaaaaagccatttttcagataccttccttctagtttttatcctgggatatttgcttttgtaccattggcctcaatgagcacccaaatgtccattcacagaatggacagaaacagtttttttattctgttgaatcaaaagaaagttttaattctgaatttattttgtttttcatcatagaccacaatgtgctcccaatgtcccatgcca

SEQ ID NO: 852670 - DNA, 575 bp, Homo sapiens
tacaactggtaaatgataagatggatacaagcacaggaaactgttcaaggaacaaaaatatatgtgtttactaaaaggaatatgagtgatgccgccayaccaccctccataccaccatcacaatcatcagcctaactgttgtggttctacttaaggtagatattgaggatgttattaaaggttatatttttaaaaagtgattcattatcaaaggtattggaaacatgatgttaaagatttctttcttgacaaatgtctctaagcctttaatgtgttattatgctccttaggtctttcagagatgtatctgaccaacacatttaactaccaatttcttctccaccaacttccacacacagttacatcttttggggataacattcaaggaaacactttgaaaatattaacctgaaatatccataggttatccatctgctatttcaaagctccaaggactactcaaatacctttttttttttatggctgccaaagtattttgttgttgttgttttatgtttttatttttaaatttttttttttaggttcaagtgtacatgtccaggtttcttatgtag

SEQ ID NO: 852671 - DNA, 625 bp, Homo sapiens
ttgagattttgtttttggtttattgctcaaccagtatctgagggaagtattatttaattgtggcaaaatacaacataaaatgacaattttaaccatttttaaatacaattcagtagtgttaagtgtattcgcattcagaacacaaccagtctccacaactttttcatcttgtgaaacagaaactacatccattaaataacttgtcccctccccacagtgagagaggtattttaaactgtctctctggaatatctgttcacttatcatgattttgtcaacttttacatcatatggattgaggctttttatatgcataaaggtgaactttattattacttcttactttataataatgtattattttaagcattttaagtacttacaaagctgattatgtatatttagtctctaaatacctgcaaggaataagtatagtgctttatttctaaggagaaatttctgttttcacctagagaatagcaaagttccctatcctttctctctttaaaaaaatcagtctactgtttgaatgtgccctattttctatgtgctggctgggtgcaggcatctstattcccattcattatatcacaaaggtcaaaggctttatctctgatatgtgcaa

SEQ ID NO: 852672 - DNA, 565 bp, Homo sapiens
aaacaagtaatttgccaagagtcagttttccttggattcgtacattccaattcccctgccaccaccccacacagacatgttcacatttgccaccactctctcactgcctgcaatgagatctagttagccagagatgtttttcaggctttttcagatattatgttcatgttttgacttgccatgtagcatagttaaggaggcctggctttgttttcctactgtgaaaggtttggagagtttgatgtcccactgggctgaatgaatgacagtcaattcaactttcttcctcatgtaggtatgcataagtgacttctcaactattagaaagttacttttaagtaggattcacttgagtaataaccaccttaatatttctcttcttctcttaaaaggaagagaaacatttgccatataaaatactgtatatcttatttcaatataaatagcaaattgatttttattattcatatgcaatactaaasacccccagcaacatttcgaatcagagtttcacatgaaatatgtaaaattgccaaacttgaactgaaaggcatcttaatttcat

SEQ ID NO: 852673 - DNA, 338 bp, Homo sapiens
caatactctttccccatgagccaggggtgagggtaactggcaaagcaatcaggtcttggtgccaacaaaatcccatttcatccctgaaatacaaggcccatcaggacgtgacatctgtctgtattacttcctactatataatccccagtacctagaacaaagcagttaaaaaatattcaacgcagtcagaaatatatttatcatatgctgctaaaaataccctccattttctagctctctaatcagttaatatgtgcacatttaaactacatcacagcattggatttgttctatctgtctgtrtggacacaattgtgctgctgacaatttagtcaagt

SEQ ID NO: 852674 - DNA, 338 bp, Homo sapiens
caatactctttccccatgagccaggggtgagggtaactggcaaagcaatcaggtcttggtgccaacaaaatcccatttcatccctgaaatacaaggcccatcaggacgtgacatctgtctgtattacttcctactatataatccccagtacctagaacaaagcagttaaaaaatattcaacgcagtcagaaatatatttatcatatgctgctaaaaataccctccattttctagctctctaatcagttaatatgtgcacatttaaactacatcacagcattggatttgttctatctgtctgtgtggayacaattgtgctgctgacaatttagtcaagt

SEQ ID NO: 852675 - DNA, 631 bp, Homo sapiens
catttttctgcctggcaacaccctcacagatacatccagcatcaatactttgcatccttcaatccaatcwagttcacactcagtattaaccatcacaacatgattgtgttttaaaatgtgaggacatgaaatttggaggagccatgggcggaatgaaatggtttggccctgtgtccccacccaaatctcatctcaaattgtaatccccatgcatcaagggagggaccatgtgggaggggataggatcatggggactgtttttcctacgctgctcttgtgatagtgagtgagttctcatgagatctgatggttttatacggggcacttttctcttcacctcctctctttcctggccccttgtgaagaagatacttgcttcttcttcaccttacaccatgattgtaagttttccgaggcctcccaggccatgctagaactctaagtcaattaaacctccttgtttataaattacccagtctcaggtagtatctttatagcagtatgaaacagactaatacaacatactaagttcaattgcagtttgctacctatggagacagctttggaccaaatttaatgtaatttaacactctgcatctagaatataagactccatgtgttggaatttctt

SEQ ID NO: 852676 - DNA, 481 bp, Homo sapiens
ctgcagccacaagcgcccccggcaagtattcttggagcaaataggaaaagggttaaaactcaataataagaaaacaaataactggagtaaaaaatgaactaaagaccttaatagacacctcactaataagaatataaagactgcaaataaacatatgaaaagatgcaccatatcatatatcatatgagaaatgcaaattacgactacaatgagatatcactatacacctattagaatggtcaaaatccagaatcccagcaacatcaaatgctgatgaggatgtggaacaacaagaactctcattgattcctggtgggaatacaatatgttacagctactttgtaagataatttggcagtttctcaaaaaattaaacatacttttactatatgatgcagtgactgcgctctttagtwtttaagcaaaggagttacaaatttatctccacaccaaaacctgcacatggatgtttatagcagct

SEQ ID NO: 852677 - DNA, 579 bp, Homo sapiens
gagggcacatccctacttgggcctaggaggggttgagttcccctcttcagcakgagaaggaggtgaatagtgatgctgctgctgcaggaacccacctatcaagctgtgactgtgacacttggattccccagctctccaggggctttcaggcattgcttaagttactcctcgcaactttggtaccttttctgccttctcccttcttccccaactggcgacctctcatctgtccttggaaacttggtccagctgttgtctcttcctgcagcctactcaaagcacctagcttcctgccagtcttgtccagatacctcgtttatttgttcccggtacacgtatattctagccctgaaaacgctctgtgggaatgttgtgttatatatctccccaacaacacctgccttcctagcctgagttgccccggggtggtagtaacagcagccaaacagcctttctctggcttaaagtggaagctgcaggctcacagcagcatcctgccctgtcctggtgcaagtgctttctgatttcagactccagccatgagcaaacctctctcttatgtcccaggcagaagcacag

SEQ ID NO: 852678 - DNA, 619 bp, Homo sapiens
ccaagactttgaaaaacaagttacacaagcacctttggggaggttggccatgccacaycacagctgtagctacatgggagaggaggagggagctggcctcaaggacttagtcagggacaatacttccacccctaaacacaagttcacaggtccaagagtccagtagaacacaagcccttggaccaccacaccatgccccagcctgtggcccaaggagtcagtcactgaggataatttcgcagactcccctgccaccatcactgacagatcccagagttcaaagagtaatcaatcgcctgtcattagagccagtgctcaggcccaggtggggctttcttggaactggtcactgggatatcttaaattctttttttttttttttttccagacagggtctcactctgtcacccaggctggagggcagtggagtgatcatgacttgctgcagcctcaacctcctgggctcaagcaatcctcccacctcagcctcccaagtagctagaaccacaggtgcacgccactatgctcagctaattttttagttttttgtagagacgggggttttgccacgttacccaggctagcctcgaactcctgagctcaagcaaactcctggtct

SEQ ID NO: 852679 - DNA, 619 bp, Homo sapiens
ccaagactttgaaaaacaagttacacaagcacctttggggaggttggccatgccacaccacagctgtagctacatgggagaggaggagggagctggcctcaaggacttagtcagggacaatacttccacccctaaacacaagttcacaggtccaagagtccagtagaacacaagcccttggaccaccacaccatgccccagcctgtggcccaaggagtcagtcactgaggataatttcgcagactcccctgccaccatcactgacagatcccagagttcaaagagtaatcaatcgcctgtcattagagccagtgctcaggcccaggtggggctttcttggaactggtcactgggatatcttaaattctttttttttttttttttccagacagggtctcactctgtcacccaggctggagggcagtggagtgatcatgacttgctgcagcctcaacctcctgggctcaagcaatcctcccacctcagcctcccaagtagctagaaccacaggtgcacrccactatgctcagctaattttttagttttttgtagagacgggggttttgccacgttacccaggctagcctcgaactcctgagctcaagcaaactcctggtct

SEQ ID NO: 852680 - DNA, 570 bp, Homo sapiens
gcttgagccaccacgcccggccgcaagtgtatttttttttttaactccttcactaagtcttctgtgactcaaaatttcaggaccagtagaccagctgccctttttgggtccttcctgacctagagatatatgcttctacataatgtggaatccccgacctcagattcactggtgttccattatttctgatttttctttaaaaaggataaaatcagaagtatgagtttgttatccaaacttaaagcaagaaaacgggcatccagagagaatgtgaaagttactcaaggtcaccgacagactgcctccatcagcagtagacgttttaactcaaagaccatgcggtgatgctgtcctatagaataagcagcaaaaaaaaaaaaaaaaaaaaaaaaaaaaagacctgtgaccctgaatgactcagccactgccctgcaaggtgaaagtcaattaatgtctgtgcaccatctctgcatccatgacatgacagcgataatgtttgcctccatttcaggcaacagagatgcttatgaaacactgraaggataaaagtgttaggggaagacacaactg

SEQ ID NO: 852681 - DNA, 590 bp, Homo sapiens
atacaacaaatagccctagtcccatatatttgataacatatggataaatttcttgaaagatacaagttaccaaacctattcaagaagaaatgtattttctgaatgccactatgtctaattaaaaatatattggtagctaaaaactcctcaaaaaatactgaggtcggatgatttcaataatgaattatattgtacatttgagaaagttataaagccaattgtacacaatatctttcaaaaaattgaagaggagaaaacatattctaactcattttatgagggcaacattaccctaaaaacaaatttaaaaaaaaaaacatttcactagaaaaggaaaccacggatgagtattattccttgacattgatgcaaaaatcctttacaaaactgagtccagcagtgtattacacaggataatacaccatgaccaagtgtttttcattctaggaatgtaagtttgatcccacctttataaataagtcaacgcaattcatcatattaacagattaaattataaaaaacrtattatcccattaataaatgaagaaaaagcatccaaccatgttcaacatacattcataattttttaa

SEQ ID NO: 852682 - DNA, 569 bp, Homo sapiens
atgaactagtgatggctaattgtatgtgtcaactttactgggacatgaatcatccagttatctggttaaacattattctcggtgtgcctgtgagaatatttctggatgagattaacatttcaatcaatggactgagagaacagttactctccctaatgtgtgtgggccccatccaggctgaagatctgaataggcaaaaaatgttgaccctccctggaataagagataattcctcctatctgcctgtcttcaagctgggatattggtttgttccagccttcagattcaaactgaatcatcagctcttcctggtctcaaggctgctaaccatggacttagaacaataccatcttctttcctgggtctccagcttgcttttagaacctgccatccttcataattgcatgagccaattttttatttgatagatattaatagatcgagatattgttagatataatacaggtgtagagataggtaggtagacagacaggcacacagacagatagayagatgatacagatagagatggatacatacatcctattggttctgtttctctaattctg

SEQ ID NO: 852683 - DNA, 607 bp, Homo sapiens
agcaagaacaaatatcaaatttattgtgaagcttagatgaaagaatggtgacatcaytgatgctttacaaaaagtttatggggacagtgcccaaagaaatcagcagttatttatttacaaatggataactcattttaagaagggacaaaacaatactgaagataaagcctgcagtggcagactatccacatcaatttatgaggaaaaaattaatcttgtctgtatcttgattgaagaggagacacagatgaatgattaacagcacaaacaatagccaaaacatagacatctgtattggttcagcttatacaattctgactggacaattaaagttgagcaaattttccactcaaggggtaccaaaaccactgtacccagagcagctctgcagagcagagctttcaactgaaattttaagcaagtgggatcaagattctgaagcatttctccaaagaattgtagcaggagataaaacatagctttatcattacaatcctgaagacaaagcacaagcaaaccaatggctaccaaggggtgaaagtggttcagtcaaagcaagagctgactggtcagacgcaaaggtcatagcaacaattttgggggatgc

SEQ ID NO: 852684 - DNA, 628 bp, Homo sapiens
cgagacaattagaaatacaaatgaggcagtgacaataaaagcacttgtcacacttcccaccataaaaatttactactcattaacctttgawgaattcagctctccaaggaatttttgtgaatgcataactcacgcagtgaaattaacagtcaatgatatatttaataactaagtgcaaagtgatttcaatagtctgtgtttactcttcccatttttgccttctgtaaaagtaatacatttatgcatatttgaaaataaaactgaagcaatgcaaatccaatttcagaacattaaattttgtcctaacagtaccttataaagatacattgtcattaccaggttgttcacacttcccaccatatgtactatgtcaaaagtgttttcatgtattaacttattagtcctccaactgtatctgtaatccttaatatttaaagtcctgacattacttaaaaagatttttattttaatttggggagcatggaaatagaagttctggcatatattacagaagtcccatcctttacagacattttggcaccagagaaaattttgtaaaatgaattctaattcactgatggatttctattatgcaatttgaataagtacgatcacaataaagaaaaaa

SEQ ID NO: 852685 - DNA, 613 bp, Homo sapiens
taatcatcttttaaagtccctacctcccaataccattatattggcaattaaatttcaccatgttttaggggaacattcaaaccatagcaggcttcctgccaaagtagttatatttattttgtaaaatatatggaagtgaaaaggtcatgagtgacaaaatacaaataccatattttatgagatgagtcttggtgtggcttggtgaaatgtggcacatgtatcaagatattcaagtaaacatccactgaagagcaaacatatgcagtcatttgagagaactgcgtccaatcaaaggaaagagtggataacaacaacaaaaaaaaagttcaagggagtcccaccaacaggcagaactagaaagtcattatgcagaatagggtagatttggaagacaagagttcagtagatgggagcagtacaagaggagggaatgtcaaataggaatacaacatggtgaaaaagtaaaggtcacgcctgtaatcccagcactttgggaggccgaggygagcggatcacttaaggtgaggagttggtgaacagcccggccaacatagtgaaaccctgtctctactaaaaatacaaaataataataataataataacaattagccgg

SEQ ID NO: 852686 - DNA, 619 bp, Homo sapiens
ccaaatatgctaaattatctattataaaagrctgttgaaattatcaagtgcttttttgataaccattaaaattttcatatatttctattctctgtgatctgttaatgttttgactgatattaattagtttccaatcttaaacaaaccttgcattctgggtataaacttatcttagaaactcatttttcatatactgctaaatggcacattgctaatattttgtttaggaatattcatatatatatatccatgagtaaaaatttaatgtattttttgcatatcttgtatatttttaaatttttgtgacaggttatgatagtgtcatggattgagttttggaatgttttctcttgatctatttattgaaggaatttgtttgatatggagaatcatctttgaaaaattggcaaaatttgctaaggaaactatctgagacctaagtttttatttaaaaaatacttcacttctttctcaatgcagttaatgataatatgatgatttcttttttatttattcttgagttaatatttatcttgtatacatgcatagttaaccataaatttttaccttattagcataatatatttatattatcttaatttctaaattacccgcagtg

SEQ ID NO: 852687 - DNA, 593 bp, Homo sapiens
catgagccaattacacctcttttatttataaattacccagtctcaggtatttctttatagtaatgtgagaatggactaatacagacagtgagaaaattagccatagagtacattatatgagggctcacatccagaaatcaacacatcaataagaaaaagcagacaatccaataagaaaaaaatgggtaaaagtcttaaccaagctttcataaaaaaggctgtcctaataaccaacagacatgaaaaggtgttcagtttcattagtcattagggaaatgcagattaaaacttcaatgaaatacaacttatgtacatcagaatggctatgatttaaaagacagataataccaaatgttgacaggaatataaagcagctgaaactctcacacacttcttagtttgtgtatagtttggtacaaccactttagaaaatcatttggcactatatagtaaaactaaacatatacaaacmtataacccagcatttctactctgagatatttaccaacagaaaatgcatacacacacagttatcagaagatgtgcaaattttcatggtagtgttattagtaatagtcaaaactggatgtaac

SEQ ID NO: 852688 - DNA, 533 bp, Homo sapiens
atctcttttccagttacccgtrtgtaggcagctgcctactgggtgtgatttgacaacacctaccatccgattactgggttgacattcctactcttcaagaccctcccttgacttggacattttgtttccaagaaactgcccttatgaaaatccacgcatctggtctgggatgatgttagcagggatgggattattacatgagttaatttagcaagcagagttgggaggaaacaaggcattgaacaggtaagtttggtgatcagcttccccctatttgaatgtaagctccataagggcaggcattgttacccatatatatccagcccctagaacagtgcctggggatgaatatgccagggaggagagagaggggacacagtgtgggttggttgatggggctctcctgaaaagcctctctgtgcaggatgattgtgtggcattgattctctaactgcagtgtatgttatagaggaaggtgctggaggtctcttcttagctgagtttatagtgcaactaagtagtttggagtttgt

SEQ ID NO: 852689 - DNA, 576 bp, Homo sapiens
atatatatgtttatgtatttaagatacaaattytttgttgactacatggaatagttgcctagcttctggatgtcttcctagtcactgtgaatttccagtctattcatgagaagttcctcaggagaccaataagagcaaatagagcagccacttacctctgaacctgtaactttattggggtgcttgtaaacccttgcccatgtcgaacagatttaatctgcttccaagttcgtaatatactgtgtagtacggagaggtcctttcccctttctaagtcatacatctgttttgtattactacaacaaaaaggcagagcaaaaatttgtcagtggattagaactaaaagccttcaaagttggcatggaagaatgtattgcaataactcttctgaactccctccccaccttattcttttcattttatacacatctgaacgccatcttactatattttatgttacccactgcaattccattagaaatttgttcctttatgacttaatggcttttcactattcaaaagtgccctgctaaaatgcaaatgcttctgagaaaggaaatagcctagctagaattc

SEQ ID NO: 852690 - DNA, 601 bp, Homo sapiens
tgttagaagaccaacaggtttgtatgtctcttgtgcagtaacagaccaatacacagagataggagggtttgcagcacagagcttcataattgcaggacatcaagtgaggagatgggaggagacctgtaagagttaaagaaagaggaaagaaacatgaaaagcagctcaacagtcaaagacaggtttattttggggaataaacctgagagggacttctggccgagttaggtcagaggcattctctctcacagactaagagtttttagggattcaggtggcataccttatcacaggcttcgaatgtttctgtgtctctttgtcttgcttatgtgggagggagagtttttgtatacatcttcctgcagctgcaggcataccccctgagtcttcttttagctttcctatcttagtgcacctaaagggaaagtaatgtgcttaccagggcccactgttttactggggcccattgtgtgagtgtgaagtttggtggttacccaagagaytttccccctccctctgtgtctgacctgtcttatctgtgttttactgtctgctctttcttgctgcttgttgttagaagagaagtgatttccttgaaatg

SEQ ID NO: 852691 - DNA, 585 bp, Homo sapiens
tatactgttcttgctctcgagatcatctttaacagggtgatctttaacagggaaaagctctccccatgatgtgcccatccatgtggcaatatgttgatgacattttcccctgttttccatttctctgtcacttagaacaaccacattttttagagggaagatatatttttgtgtcctatttcaaatctgctctggcccatattatcctaatatttaagatgggataaatagaagcagaactgtcatagaatttgttttggtggtgaaatgggggtgggagagaaaactaaataagtaaacaagaaaagtgcctaatgataaaaataataaaaatgataacaatattgcagacactcattaactggacagggcaacacttgtaaagctatgattcatctgcttcttgttctgatgtgattagacaatgacaatgtttttttgagttaattgttcattgcaatacacattttgggtgtatggtttcattatttataagcttctatgtcagattatmtggcactgaagttatttgcataaattaaagcacattctcagaaagtttgcttgcattttctctgatatggc

SEQ ID NO: 852692 - DNA, 455 bp, Homo sapiens
ctaaggaaaaaaaaaaacttccattctctctccctgagagtttcttgtgatttctttgagaaataaaagggcttctctgaagtctctaagacaacgtacctaatgtatgaggaaatggagagtgaaaaagcaatggcagtgaaatctgtgctctagaaggagcccgttattgctttttgaagtgttttaacaattcatgagccaacattatcaaggaggtaatatatagaaaatattattttgggtactgagaacacccaaaattataaaatcttcctcttacctccaaggagttcaaaatctagctgagaaaagagagaaaatagtaaataccattataaggtttaaatagcagtaatataagggagactcccagagcaacatatgattaattcccaaataaatgataaagtttgkacctgccacgtaaagtcaggaaaggacggacttttgaa

SEQ ID NO: 852693 - DNA, 645 bp, Homo sapiens
ttattatacatgagaattcagctttcaaacccttttctacattagccttcccagaaagcaccttttcatagaccccatgttaaataasccttctggtgttttgttaaaaaaaaaatggttgctacaacacatctccactcttactacaactgagatcaaacagagccttaaaattagcttttctttaccttgggccaaattaaattcttatccagagtttcttctcccaccaatcaggactcatattttaaacaataatgtatttctagctccaagaagaacaatttacagggttagtctagaaagtccttgggagtttgagaatttttttctgaccatagagtacaggaaagcgaagacaaaatgaggtcttaactttatttttactttccatatttcagaggaactacagggatgaggaaagagaaatatagaaaatatgggaggagagaagccctaagaactggtccaaattttgggaagcttggtgttataattattgcaagattcagaggaaatacatagaattgtataaagaagagactgcattcagatgcttcaccaataaaagtccatttgggtggattatttctggagtggtaaaggggagccggcaggggtcatttgcaaggactttcgcctcat

SEQ ID NO: 852694 - DNA, 569 bp, Homo sapiens
agtttatgagaatgtagcttcatagcaagttgagaagaatctgtgggtgtatttatcttgttatttgttaagaagaggcataatatayataccttcttgcccattgtttttgtctgttttgtattgctataaaggaatacctgaggctgggtaatttataaagtaaagagaataatttagcttatggttctgcaggttgtacaaaaagtgtgggaccgacatttgcttggtgagggcttttgtttgtgtcaaaatacgtcagagaaggtcaaaagggaagtgggcatatgtgaaaagagaccaaacccgaggggcgtcttggctctcaaaggaactgatcaattcccctgagaacaaatcctgtctcacaagagctaaaacttactcactacttcaagacaggcaccaagtcattcagagggctctgcccccttgcctccacttccctccaggccccatctcccaataccaccacactggggatcagtcttctacatgacatttggtggggacaaacaaccatatccacaccattgcacccatttctcttggttcacttcaaactgtat

SEQ ID NO: 852695 - DNA, 627 bp, Homo sapiens
agcactgttggacagtcagaaatccacaaagcccctaaaatgatgttaaattgcccttttcctatcagatcacagagagttcttcctcagtgggtgtgaaatttattttttctttggtctccatttctayttcccttccattgcaacccccaggatatttttacttatctgtctctggaaaagcttggacaatctacctcttccaattttctccttggtgaaactagagggtaaaatcttactatcccagatcctttagagtaagcactgtgtaaagtgaaggaatctttctcatgacaatatcaaaagcttcctctgtcctaccctggatattatttgctatttctgtgtcttttccctgctttcctcccagtgaagtattaatgaggagagaaaaatctcaccctactcttaagtataggtttgaatccaagctccaccacctcctaggtctgagaattacataaaatagagaatgagaacattccggattttgccactcagtgcaaattaggtcccattgacatggatgccacacattctgagagctctgaggcaccacctgctcctgcaggacgttcggccctttgaggcttcccctcaggtgtgcatggagcggactcagtg

SEQ ID NO: 852696 - DNA, 627 bp, Homo sapiens
agcactgttggacagtcagaaatccacaaagcccctaaaatgatgttaaattgcccttttcctatcagatcacagagagttcttcctcagtgggtgtgaaatttattttttctttggtctccatttctatttcccttccattgcaacccccaggatatttttacttatctgtctctggaaaagcttggacaatctacctcttccaattttctccttggtgaaactagagggtaaaatcttactatcccagatcctttagagtaagcactgtgtaaagtgaaggaatctttctcatgacaatatcaaaagcttcctctgtcctaccctggatattatttgctatttctgtgtcttttccctgctttcctcccagtgaagtattaatgaggagagaaaaatctcaccctactcttaagtataggtttgaatccaagctccaccacctcctaggtctgagaattacataaaatagagaatgagaacattccggattttgccaytcagtgcaaattaggtcccattgacatggatgccacacattctgagagctctgaggcaccacctgctcctgcaggacgttcggccctttgaggcttcccctcaggtgtgcatggagcggactcagtg

SEQ ID NO: 852697 - DNA, 633 bp, Homo sapiens
gcactggtccaggctctgtggatccccgcagcaggctcttgggggcaatgaggaaggagagagctgctgttccataacaaacttcctagaaacttgggcttgaggtaacaaccactttattacatcttgcgatgttgcacgtcaggaatttgctcagagcttagatggcaagtccactttacaccatgtagactaggttcacttggtccttggctggtggctggatagtctcaggggttccagatgcctttcttcacatgcctggtaccttggaggaggcagatggaagggtgggtctgcccaggttcgtctccgtctccaacagtgtagttggacatgtaatgcagtggcttcagtcacccagaactggtaactgtgtcacttacaccatcctccattcgacatagcagtcacaggccagcctggattcaatggaggtaacaaacagccccacacaataggaggagcaccaaaggcatcctgagtccactgcacccaccttcacagccatcgtctatttctgcattcagaacccactgggtccttatratgtatcagatgctgagctgaatgatacgggaaatgataacactcatatttactgagtgtttcttacatgctagtcactgatct

SEQ ID NO: 852698 - DNA, 652 bp, Homo sapiens
gagacttgaaagtatggggcaggcggatcctctctacatttaggagggaaggctctgactgagccggcctcagtgaaaggagactcagtgcggtgggaggcatagaccaaaggaagcgaggggarcccttccagctcctccagctagagggaagttggctgtggggtggcaactagtgtcttcttcagtgaggggattaggggaatctaaggctcattctgggtttgccctcaacacgtcaacttcaatttctgctatgaagatgataacgagcactaggcagggtttccaaatgctttctgcttgagactttactttgggaaatgcactggccgcaggctcggagagcattgccaggtggtgggaactcccagtggaaggaggtgggtgagaaggaaggtcagccctccaggacaatgtcactgtccctcaggtagacagatgcagagccagacagtatcaggccagcactggaattaaggtaggacccctgaatccacaggaagagcaaagtctgaggctacactctggattttgtaccaaataggaactcctgctcttgaagacaccatctcatgaatctgggctccatctgccttgtgcaccactatgaggggttaagagttctcagagttggaagtgaccctgaaga

SEQ ID NO: 852699 - DNA, 661 bp, Homo sapiens
caagcattcctatacacaattaacagacaaacagagagccaaatcatgagtgaactcccattcacaattgctacaaagagaataaaatacctaagaatcaaacttacaagggatgtgaaggacctcttcaaagtgaactacaaatcactgctcaaggaaacaaaagaggacacaaacaaatggaagaatatgccatgctcatggataggaagaatcaatattgtgaaaatggccacactgcccaaggtaatttayagattcaatgccatccccatcaagctaccaatgactttcttcacagaattggaaaaaactgctttaaagttcatatggaaccgaaaaagatccctcattgccaagacaatcttaagcaaaaagaacaaagctggaggcatcacactacctgacttcaaactttactataaggctacagtaaccaaaacagcatggtacgggtaccaaaacagatatatagatcaatagaagagaacagagtcctcagaaataataccacacatccacaaccatctgatctttaacaaacctgacaaaaacaagcaatggggaaaggatacccaatttaataaatggtgctgggaaaactagctagtcatatgtagaaagctgaaactggatcccttccttacaatttatacaaaaa

SEQ ID NO: 852700 - DNA, 661 bp, Homo sapiens
caagcattcctatacacaattaacagacaaacagagagccaaatcatgagtgaactcccattcacaattgctacaaagagaataaaatacctaagaatcaaacttacaagggatgtgaaggacctcttcaaagtgaactacaaatcactgctcaaggaaacaaaagaggacacaaacaaatggaagaatatgccatgctcatggataggaagaatcaatattgtgaaaatggccacactgcccaaggtaatttacasattcaatgccatccccatcaagctaccaatgactttcttcacagaattggaaaaaactgctttaaagttcatatggaaccgaaaaagatccctcattgccaagacaatcttaagcaaaaagaacaaagctggaggcatcacactacctgacttcaaactttactataaggctacagtaaccaaaacagcatggtacgggtaccaaaacagatatatagatcaatagaagagaacagagtcctcagaaataataccacacatccacaaccatctgatctttaacaaacctgacaaaaacaagcaatggggaaaggatacccaatttaataaatggtgctgggaaaactagctagtcatatgtagaaagctgaaactggatcccttccttacaatttatacaaaaa

SEQ ID NO: 852701 - DNA, 662 bp, Homo sapiens
  misc_feature 639: n = A,T,C or G
gtctccgcgcggcggtgccgggcccctgcttccggaacgctaattttagggttcgccggcccccctttcttttcacccgctttccgtgcgagccgctgcgcagcagtctgcgcttcgagtgcgctgtgttttaaggaggccccggcgctttccccttgggctcgggggcttgggtgcgcaggtgggggctggcacgcagcccgttgggcaggtttcgcgcagcgaccctccccacgccggagctaagttctttgggtgagacgtgcaacaacgcaggccccaaagctctctgcgcgcagcgccgcggggcttggccttctccagtcctcgggagtcagccaccgtctctggcttgttataggattcccacctcgtggtgggcaatgatatatacatattcaacattagaaaaagaaggaaaaaaaaaaacccactcacaatctaatgccaatggagagaatggtattttaatctacgaaactgtaatgaaggctcttaaacaatcccactttccataattgaggctttcaaaagggccaggtagctggtggtgtttgtattaacatctcataggctctggatcattcacagccacgtattgatctatgkggttttgacgtttaaatttaatgaagcagnctttagtggggaagaaaacagct

SEQ ID NO: 852702 - DNA, 509 bp, Homo sapiens
gcatatgcttgcagtcctaggtacttgggaggctgaggcaggaggatcacttgagcycaggagtttaagactgcagtgagctatgactgtaccactgcactccagcctgggtgacagaggggaccctgtctctaaaaataaatacataaataaaaataaaaataaattagattgcctctgggaggaggggattctggactagaagtaattaaagaaactttcagaaatgttggtagagtctataactttatttggctgatgattacaatgatatatatatacatctgtcaaaactcattgatctgtacattttattttatgtaaaataattgtgtaataaaatatgtaacataattttttaataaaaagcaacagagtggagtaatcctggcatggcagccccagcatgttggttgggaatgtaactgtacaatggagagagatgaactctgcgacacactgagctgagtttatatcctttctttactacttatcagtggtgaccttgg

SEQ ID NO: 852703 - DNA, 592 bp, Homo sapiens
aaaagctacatactgtatgattccaactatatggcattctggaaaaggcaaaaactatagaaacagcaaaaaaaaaaaaacaacaaaaaaaaaaamaaaaaaaaaacctgtggctaccaggagtttggaaggggtgaggaaaggttgaatatgtgaagcacagagggctttgaggcactgaaagtagtctgtctgatactgtagtagcagatatatgacattacacatttgtcaaaacccagagaactgcacaaaggatgaaccctcatgtaaactatggactttagttaataataatatatcaatattgattcatcacaccacactaatgcaagatattaataacagggaaactgggagaggagattgggagggaagaggaaactccgtactttataatcaatttttctgtcaatactactctaaaaatagtctattaattaatgtaaaaaaaaaacagacttgctgaaaacccatattactaggaagtggaaaaaccaagattcaagcctacatcttttttgctccaagacacacacttttacctctgttcttgtcatcaatcatgactaattatttacatagtgtatct

SEQ ID NO: 852704 - DNA, 592 bp, Homo sapiens
aaaagctacatactgtatgattccaactatatggcattctggaaaaggcaaaaactatagaaacagcaaaaaaaaaaaaacaacaaaaaaaaaaacmaaaaaaaaacctgtggctaccaggagtttggaaggggtgaggaaaggttgaatatgtgaagcacagagggctttgaggcactgaaagtagtctgtctgatactgtagtagcagatatatgacattacacatttgtcaaaacccagagaactgcacaaaggatgaaccctcatgtaaactatggactttagttaataataatatatcaatattgattcatcacaccacactaatgcaagatattaataacagggaaactgggagaggagattgggagggaagaggaaactccgtactttataatcaatttttctgtcaatactactctaaaaatagtctattaattaatgtaaaaaaaaaacagacttgctgaaaacccatattactaggaagtggaaaaaccaagattcaagcctacatcttttttgctccaagacacacacttttacctctgttcttgtcatcaatcatgactaattatttacatagtgtatct

SEQ ID NO: 852705 - DNA, 483 bp, Homo sapiens
caaatattcttttttgtttctctaaatgtaggattgttcatcagtactttcaaataaccaattcactaaatttaccaaaaacgtagtttctttacagctattagtttggaatgttgtattaagaaggttcaacaatttctacaaaattttaattgtccagttttctttttttttccccataataacatcttggggtgtatttgatttatctctggactaagtcgctgctggaacaaagacaaagatgagacagtgctccccagaacctggactacaaatgggacaaagggggctcttggtaaaaagcctgggagaccagaaaaaggctgtgcaacacaacaaggaaactggagcctagaggaaaacgcaggaagactaaggagggaaaagaagagggcrgggcacaggggagagacagacagaagggagccagagagggcagaaagagaggcaggccgaaaccgtctgtataaatggataaat

SEQ ID NO: 852706 - DNA, 603 bp, Homo sapiens
agctgaaatgaaagggagagaagacygatgaaagagaaagtggggagtggcagaaagaatattagaagtgttcgtgtaaaacactaaatgtatatagcaacaggggactggtagatgtgatattaatatatatctgtatatttaggaagattcagagcctgtaacttctaaggcctcttcaacaagtacacctggtaagttcaagataaatattttaacctttataaactttctctaaatattaatactccccagttaaaaattccccctttccccatatttggaccaagtgactggacactaaaatgccagagttctttgttcccacctgaaagcattcacttttttcctcctggaagctgctgttactttcttgaggttacttactaaaacaaggaaaatattaatgtactattagatgacaagagtatttttcataattgtttttctagaggtaaaaataaagtgagcatgttagttagtactacagtctgcttcagaacattctcaaattgagaaggatgtcctagccattcatttgggtgatattgataattaagggaataaagtttctgatttgtaaacttaaaaagtctccttaaa

SEQ ID NO: 852707 - DNA, 478 bp, Homo sapiens
ctgccatttttaaataacagcaactaattcaaatgtttttaaaaatacactctgggcaaaacagtttgcctgcrggccctatctgtcccgtaggcagtggccagtttacaacctctgacctccctgttggtgtaaaaaagtgagaagaaaaaaggaggatgcaaaagaagtgtaagaacttgtctctgcctcccctgaccttacaacttatttgggagaaaaaagagggacccacatgaaaaaattaaatcttgacccaaatcggtgttgagtaagtgccaagacaagtggtatttctcttttatttttatttttttgagatggagtctcactctatcgcccaggctggagtgcagtggcacaatcttggctcactgcaacctctgcctcccgggttcaagcgattctcctgcctcagcctcccgagtagctgggactacaggtgcatgccgccacgcctggctaattttttgtattt

SEQ ID NO: 852708 - DNA, 583 bp, Homo sapiens
aggaatcttgtggcgcctagtactagcccctgtagtactcctaaccttcctataaagacatctcatggacatggatggagatttatacaagacctatgaaacattaataatattgtcactctttgacaccctgtcattccaaatctccatactctcatgacttccatcctcacagaatgtaaattttatagtgacatacttttatattacttttttaaaaaaagcattcatgtggacactgggagtcaaattttatttgtcttcacataggaaagtcaacaatatacctagatagtaatgtcttgagggtataccaaaagccctccctacttttcagatactgaagacatatttaacagacatgtctttcccccaaggattgactctcttgcagtatgttgatgacctccttctttgttccttgtgaacatgattatgttcatctccttaaacttctagcagacaaaatccacaaagtttccagggaaagactataatttacccaggaccatgtsaaacatttgggatacatgatataaaaccaaggacttctcttggatcctgacagacttaatggtattta

SEQ ID NO: 852709 - DNA, 635 bp, Homo sapiens
ttattattaacttggaagtccagactttatttggatttacctgggttttagctcatgttctttttctgttccaggatcccatctaggataacacattactctcagtcatcagatttccttaggcccctctaggctgtgacagtttcttagactttctttgttttcgatgaccttgacagttttgaagagtactggtcaggtattttgcagaatgtcctgcagtgggtttaactgatatttttctcatggctaaacagggattatgtgtttgggggatgaagaccacagaagtaaaatgccattctcatgacatcctatgaagggtctataccggcgatccccaccctttttggcaacagggaccggtttcatggaatacaatttttccacggacaggggttgggggatggggtggagatggttttgagatgaaactgctccacttcagatcatcagacactagattctcataaggagtgtgcaccctagatccctacaatgcgcagttcacaatagggttcaccttcctatgagaatctaatgctgctgctgatctgacaggaggtgggctcaggyggtcatgcttgcctgcacactcatctcctgctgtgcggctagggttcctgctgtgtggc

SEQ ID NO: 852710 - DNA, 619 bp, Homo sapiens
tggccgggcgcggtggcttatgcctgtaatcccaactgtttagggaggccaaggtgggtggatcacttgaggtcagaaattcgcacctggccaacatggtgaaactccatatctactaaaaatacaaaaattagcctggcatggtggtgggcacctgtaatcccagctactcaggaggcagaggtttcagtgagcggtgatcacgccactgcacctccagcctgggcaacagagtgagactctgtctcaaaaacaaaacaaaaaaaacctggttattctgaatcacagtcttttaaggctgggccaaaggctacactccaaaggctgagaaacactgtagcaagcactcaaatgcttgctaaatttaattgagtttagagaaactcagaccagccccatcacagatgtgcaggatttccagccttggggctgtaaggcaaatgagctcgcaccttcccccaagtgatgctctgtaggaaacagcttgtaatcaytgagaaggtgtccattaccccatgtttgggtgtttctgctcatttcctctgtatctggttccctgaacacctgatatttcctgatgtgaggccagactaactgggatccgttaccgcctgtggca

SEQ ID NO: 852711 - DNA, 633 bp, Homo sapiens
tctctctctctctctctctccccattctgactagtggcgacaatattggactatgcgctctagagtcagactatctggatttgaattctggctttgccatttgctgttatatgtccttggacagcttactcaacctccccaggcttccgtttttctcaactgtaaaatggggataataactgggctctctcaaagagttgtcctgaagattaaatgggctaatatacataaagctgctagaatagtgcctggtacccagccctgtagaagagttagccaatactaatcttactagtgtcacaaccagaaatcccccagggcctcctccaattgtcatccacacctggactcagcccctccccactcccatccccatttgcctgcagatggttctctctgctgtgtaaactgttgccataacaaccactcccagctcccagcagcagtgacttctttggagcagggtgtcacatgaagggtctgggcaggatcactaatggaaaamattttcagtaaaccttgaggttcactgggcaggaaagtcaaggcctgttggggaacagagggccacgtctccaggctgagacaggcaggccaccttctgcaggaggccagccctctgagcccagcccg

SEQ ID NO: 852712 - DNA, 536 bp, Homo sapiens
agagtgtgtatttccctagagtctcttcaatggaatgtattatcaagcttttgaatagttgctaatctggtgaatgagaagagtctctgtgtagtttcaattttaatttcacgagtgaaattgtacatgtttttctatgtttaagggccatgtttatatctctttttgggaaattttcatgtcttgtgcccactttaagatagtactgtcagtgtttcctcaattttacaaattcttacataatagggatattaactctgtatctgtgattaaatacttaaaatattttcttccaatttgttatttgtcttttaactttgtttattgtttttgccacttgctttttttgtagtcagatctgttaagcatttcttctctttcctgtggcttttgaggtatagtcagaaatctacctacaatcaaattttagagagattcatttcggtttcattctggcacttgtatagttacattyagaccttgaatccatttagcacgtattcttatgtgtgtgagaagtggacataattttatct

SEQ ID NO: 852713 - DNA, 601 bp, Homo sapiens
tagctctagtaattcaaagctacataaaacgtggttattaagtgaaatcattagaaatgtgtccagaaaaaaattgcattttctgaaggacagaaaatacacgtatatctctcttggagagtttcaagtaagggctgccttagggtcccctattaatgaggccatctctgaccccttaggtgtggatgttcagttgttacaatgtttctaacactactctattaaaaaggccaaaaactaactgcacaacagatgggcaagtgcccattatgggcctgccctgtcagtgcactctgctgcagctgtggttggacttgctcccttggcaattcctgggctcacagtggtcagtgaaatacttaggcaggacgtggaaggtcctaaggtgctgtgacaatgctccagcctctactcttgtgtctggatgtgagaggatatggcatagacagctgaaagcctcagaagacaggtggagtccaggaaattccatttgcagctatctttatcagggtgagctgcaattgtttgctgtgatagygagctgaaagcaacagttctatcagattattttttagagatgactaaagtacactatagaaag

SEQ ID NO: 852714 - DNA, 534 bp, Homo sapiens
tttttttaaaatgttatgtatttcatatttatcccaagcttttcataacacaaacaacaaacattttcagaaaacactggaaaatttttagtttaaatagaaattattgagaaaagttatgctatgatgtttgaacatgtaagctgaataaaaataaacaaatgtcaaagatcagaaagttgtagatttgtggtcttatttctaagatctctattctattccattgaaaggattccctatttaataaacggtgttgggaacactggctagccacatgcagaaaattgaatctggaccccttccttacacctcatacaaaactcaactcaagatggactgaagacttaaatgtaaaatccaaaactgtaaaaatcctagaagaaaatctaggcaataccattccgcacataggcacagtcaaagatttcacaacaaaatcaccaaaagcaattgcaacaaaagcmaaaattgacaaatgggacccaattaaactaaagagcttctgtgcagcaacagaaactatcatcagagtga

SEQ ID NO: 852715 - DNA, 647 bp, Homo sapiens
ttaatttcccctcctctatcccctgttaggggaggtaaaacataaatgtagttaatacctgaattgtgaataagtgaractttcgagactgccccagactaacatgaccttctcaccacactcgtagtacaaactgacagcacagaagaccccctccaggagaaaggacgacgggaagccaatgtaggacttacctggtttctctatcctatggttaaacctctggagctacgcagaccgtggcagcgataaatccacgtacgcaggctccaacaaagctcacacaatcggagaagtcacagtagctgcggctgcggcggcggcagcaacaactcctccctctgcttctcttttcccaccccccgccgcggcggccagccgcctttacccctccctccctcgactacccccacttccgggtgatgcccctgccggaagcagggccgccacgggaaagagagcgactggtcacgtgaaaaggaacgcgtggtctagagccagcttctcctgccccctgctgcccccgggccgacacgcagcctcgagtgggtctttgttagggtacgagtccactatcccaccccgcccccacgacaaaagcgaaaccagaaaacccatactaaaacagtgcctttgtcatctttagt

SEQ ID NO: 852716 - DNA, 585 bp, Homo sapiens
ctcctattaagtacattactataatgttaatatctcttgaacctagcctccttttctatagttaaaggtactcaaggagcaggtagagaactaaatagagaggtgtgtaaagcccttcagagagtgcctcccccaggagtaagccctcaaatgcaatgtgttattatcattatcattatcatcttcaccatcattatcattatcatgatcactccttccatatcccccattgattagcaggcaaatggtttccctctctacacttattaatctgataatataaaacaagtaaatttccctaaaggagcatggtctgattcttaagaattcttcaaggaaagcacttatggctcattatcactgtgtcatggaaggtacccagagaactccatggagagtagcttcagcccagctagaatcatgtcattcgaccagcaatatctaaattatttgctgcaacttcaacttgtgagtggttgtacaagtgcttggtgactgaattttttatctgtccatgttaatcactttatccactttgatttyagcactttcttttatgaaaatttattattcattttcattttt

SEQ ID NO: 852717 - DNA, 473 bp, Homo sapiens
ctaaccatatcccagggctcccttcgatctcacattctgcaacccatgctgaaacctcttcctcctgtctcaccagatcataggggaaatargaagagaaggcactgaccatgcagctgtgccttggcattttatttccttatcattgtatttccttagttatgacacatttccatttatggagtactttcccttataaaatctcccagtgtttacttctgatctactaaataattcctctggcctcttctttttaccctttaaatatattttgatggttcatttggcacattccccattcagttattaatggcccacaaaaacttactagcagcaatcatttactgattaatctacacaacaatccagaaagacaagtagtattaatccttcgtcctgcagagggaaaccaaggggaaaaggaaggttaactcagtttcccaaggtcagtggctaaacaagattataaccag

SEQ ID NO: 852718 - DNA, 623 bp, Homo sapiens
agaggtgcacacgtgactgccgccatcgataaaggctgaagtgagtgtacttagctaaagggcattgcaataatttttctcttccacgtgagaaagttagccttgaaaattctctggctcactgcttgtttttaaatcatcttttggggaggggtggccaagggggcatgttaagttcaaatcagcccctcttcccactcccatatcaattgcttttttaaaataataataagatagtagcacctatcaagccttcagatttgctttgaagacagtgctaatgactcaacattttaatgggcaatgccccccaatgtccattgtaggaaagcagtcctcgctgatagattaaatttgattagcactggggctggcgctgttccgtggaggcaatgtgattcctgtaggaatctagggtgaatggtagcctgagaaacagtcagtgaaaagatttataatctccaacaacaaatcagcccctggttccaaagaaatcattgtgtctttcccacccctgctgtagcatgtcatctatactaggaaacacactgagtatcttgaacccatttcaatgastgcagcaggactagaatataatttttctttgtttgccctgactctta

SEQ ID NO: 852719 - DNA, 580 bp, Homo sapiens
agagcagtgtgtggagacccatatagtgaactttttctccaagaactaccacaggaacataccaggaaagctgagagaatctacagacctttgaaggaggtggattgccactgcaggctccatgggacagcagaggaactgtgagtgtgcttgctttctcagctgggaggcttgtagcctggggcaagtactcagtcctgctcaagggctgtctggaaataaactcagtgctgttggggggagacagtgggagtgagactggcctttctggctatgggctctgtgggagctggtaaggcctatggttgctgcctttacccccttccttggcgacctgtgtgacgcagcagagacagccataatcctcctgggaatataactccattggcctgagaaccacatccccttatcccacaatggccacaacaaaccctgcccaaggagagtctgagctcagacatgcrtaatcctgcccccacctgatggtttttctctacctaccctggtaaccaaagacagaggacataatctcttgggagctctgtgaccctgcccaatgcccaagaaacctgaatactca

SEQ ID NO: 852720 - DNA, 525 bp, Homo sapiens
atatacacaatggagtactattcagccataaaaaagaatgagatcctgccatttgcaacaacatggatgaaactggagatcatgacgttgagtggaataagccrcacacagaaagacaaacatcacatgatctcgcttatttgtgggatccaaaaataaaaataattgaactcagacacagaatggttaccagaggctgggaaaaatagtgggggactggggtgggaggtaaggatgattaatgaataaaaaaaagttagaaagaataagacctactatttgatagcacaacagggtgactatagtcaataataaattaattgtacattaaaaataaactaaaagagtataattgaattatttataacacaaaggataaatgtacaaagggatggatactccatcctccatgatgtgcttatttcacattccatgcctgtatcaaacatatcaggtaccccatacatttatacacctactatgtaccccaaaaaattaaaaatttaaaaatttaaagaaatatat

SEQ ID NO: 852721 - DNA, 578 bp, Homo sapiens
ataattactggatgtgctatagtatttttagaaaattgcagacataataactgcattaatgtttgtggtattaagaacaaggttatatatgctctagaaatccttatttacagcttctgtgacaaaatgtcactgaaattcttgagtaagtcttatataactatgaattccagagaggtggaagttgttatctttaactaccaggagtgaacatactaccagtaataatagttactgttattattattattattggacatcatggcagtgatggtgacattgttgaaaagtcatagcaataataattgtcctattagtaataatagaggaagaagataaagactagctactgtttcccgaatgtttactctgtgctatacgtttaaggttcacatgtcatttattcaccagaataactcaggtattgttattttatcttaatttttcggatgaagaatttcacacaactggtatgcagcagaaagggaaaacaaattctttgctctctgattctaaatatgtactaatttccattgcygtatattgcttctttttctgtaaaaccttttataagaatt

SEQ ID NO: 852722 - DNA, 517 bp, Homo sapiens
gtttataacttttggtggatttctctcttagaaccctttgtactctgtggagcaattttgcattcccctggagtctagggatttcaaacctctaggtcagtctttattttattttatttttttgtcttgaggtttccataccacagatgcagtaaacatttagaatttacatcctgcaaggctgaagttttgatttatctcactcaagaaattattttcttttattctcttcccaaaggctccatcataggacaggcttctttgctgaatctgatggtgggccgagtttttctatcccccctccaataaatgtgacaaactttttagactccttcctctgtggattgcctcttgcttttgcttcctgcccatcgccataaaagaagataatgacaacaaaacrataacaacacaaatgtaaacgtaccttttcctcttaacttttccatatcatcaatttctcatgaattaaggtgtgatacctgaaagtcacatttgccttatcagttatattcat

SEQ ID NO: 852723 - DNA, 471 bp, Homo sapiens
ctgtgaatgtaggttatacctagcaatagctcccttcatactgtgaaatatattgtatttttgtattcaagcagagaatgagcaatatttattatttttatagcttctataatatctttatagattgaggtgttttataatcctattttggtggtccgggatattacttcagattttttctcatccaaaacattcatatcaacatgagatggagtctggcctaaattaatgatcaagccagcaggtttgaaaagaaatatattttattaatgttaagtattgtatgttataaagtaaaacattcgtgaatattaagtaaaactaagtaaaatgaataagttacagyaggattgctttccctaaatgttatgcattacgggcctgaacattcatatgtatttccacattgttactaaatcaattcacttatattgttggtggcatgattttattagtgacatctaaattaac

SEQ ID NO: 852724 - DNA, 586 bp, Homo sapiens
ttcccatctgatgtggatctgtggctgccacaatgkacacttcatctgatgggctagcctggcatcctataaatgtgccagctggctttagaagattacaccacctctatcaaaatagtttttgaggctgggcacagtggctcaagtaaaagcgggcggatcacaaggtcaggagattgagaccatcctggctaacacggtgaaaccccgtctttactaaaaatacacaaaattagccaggcgtggtggtgggcgactgtagtcccagctactcaggaagctgagacaggaaaatggtgtgaacccaggaggtggagcttgcagtgaaccgagattgtgccactgcactccagtctgggggacagggcgagactctgtctcaaaaaaaaaaaaaaaaaaaaaaaatagcttctgaaatctactccataaattttcaagaaaaactaacaaaacttgaaagaaaagactggatttattaatctgattttttgaaataccaatttcccaatgaaaagctttcttttaatttattattatttttaagaatccatactcgatgaagttcatgcaaccttccactcaacag

SEQ ID NO: 852725 - DNA, 566 bp, Homo sapiens
attgctggcactcatcttctatcgcatttcagttccttcagacaagtcccactttgcatgattgatcattatttttactttcatgaggtttaggtgggtgggatgaaaaccacagcaaaacagtwtggcaggaagttcccttgcaaaagattcatgtattacctttgggttatggcttcttaaaacccaaattcttaagtgttctgaggttaaaagcttcctatttgccacaaagtttaagaatgatgatttagcttgtgttagtttacaaatgcaattttgcatttggctgtctttagatgaattagtctttaattttcacggcggaaggtcactattagagagatggattctgggattcccgacagagctcatttgggaaatgaaactgaggaattctgcttaagaacacagtctacctcttctccagaaatgttctttgttgggagtgaggtgagaagggaactggctgagtggttcaggtctggaaagtgtgttaggttgttctagatcactgaggtaaatggaggaaaaataagggtgtagtaacagcctataaacttttc

SEQ ID NO: 852726 - DNA, 636 bp, Homo sapiens
tgataaaccaaaaattatgttaaatagcaattttaaggaagcaggtaagactagaagccttctgcataaatcaggcttgagctttgcggaagtggcttctttccctgtactgaggtgtgagaagcagcacatggrtttttattcctttaaaggattttcttcaagcaacagtctgtagttcaggttaatgggaaggcaaggcagtagcattgggatgaacatttatgatcccaaacattctaattctaggtgtctacagcattcaaatattgagtaggcacttacacttccaaagaccaattcttcaagataatgctgaggttaacttacagttttatatattattcaatggggcagttcacaggacatttgaagtgacttggagagaaaaaagaataccgccgttcatattattaatatttatggtacagttattatattcaggccatgctattgctggagagagccggtccattgataaatgtgcaatgttcatgaagcagtgaatatatcattcaattaaaaattcagcaactgatgtagtcagggatgtgctggtaaatgtctcacaactggctttccaggaccggtttgcagcatttgctgattttcatggtgtagacccttccctcatgg

SEQ ID NO: 852727 - DNA, 591 bp, Homo sapiens
tccatttgagtgagcaccaagtatgcatcacgacttgagattataaagttggcttaatgatgagacaggtttctcagtcgggttttccattggctcgaagttcacaaggcagttgttgcttgtctcagagtgtccttaggtggactacatctgaacccttggcgttattataatgcagattctagctgtgctcaaaccaatgaatcagaatctcaggagggtggcgctcagaaatctgcatggttgatcagttctttagcagattcttatttttgtatgctaaagtttgagggtcaccactggagagattccagaacagggcctgcaagggaattgttcaaagtttgctcaagttaactttgttgttacagcattagcttgaatatcaggaggttttgtatttaagttctctaaaaaaagaaaaagaaaaaaagagaacagtctcaatatataaaaggaaaggttttcatatatgtgcccaattataagtatcttgagtattctaggagtctaaacagaatgyctttagatcatccttataacgatcctgagactcttttgactgttttgagttgaagacaggtaataaga

SEQ ID NO: 852728 - DNA, 612 bp, Homo sapiens
tttacatatacaaccctatatgtatttcatatgtatgtatatatgtatatcatatakgtatataatataaagaaaaacaaagtaatgatgaatatcaaattcagagttttgtttacacctaaccagaaggaaaaagaattcactcaagagagacaaagacaacttccatactattcaaccactttatgcaatgagttatttttataggttatgatatacataaatatgtcacattattttgtatatcaaatatcatataataatattatttaagaattattggtaggaaaagaagaagaaatgcaaccatatagtaactcagtttaaagaaatgtcaaaaataaaaaagtaaaagcttaaatttttttttgctaacttggttgccaaacttcttcaaataattgcatgattttcctcactgcattgaattgattgatcaagtttctagaagtaacagtattgttatggattgaattttgtcctccccccaacatccccaaaaaggtatgttgaagttctaacccccaatacatcgaaatgtgactttatttggaaacagggttcatatagaagtaatcaaattttgttttttgttctttttgttgttgttgg

SEQ ID NO: 852729 - DNA, 577 bp, Homo sapiens
gacggatgaacaggcagggggagagaggcacaagacaggaatcctttactgcaagtggaataaacagaaatagttactaagaagagcaggacagtttgcatcctgcaaccaggatccactgtcagaggaaactagccaccagagtgacacaatgctaagaccctaagctggtaacagagacagaggaaagagaaagagaagagagaatggctttggagcttttccttattttatttacctatttactcaatcaccaactacatatttatagaatacctgttctgtgctgggcactggagatacaaaaagtctatttcatttggaaggatatgcattcacaaggagaatatgaatgaacagacattgatatatgttctttgtggagcctgggaaagaagcccacccacactggcagtagcctacagcacagaccattggagggtggggggtgggcagaagtgtcatcccaggtggtatgcagatttytaccaactgacctctccccttttatgcacacatcataccagttcctcatgaatcagaaatgtccctcctgctcagttgctgctccaggtcc

SEQ ID NO: 852730 - DNA, 643 bp, Homo sapiens
acaatctaaccaatttgataccatgtgagtactcaagtgtctagtttatagttacttctagtttttgagatctagattgtgaatggactttcttccttttaccacactgccaaatgaggtaaaggagttctagatcctgactttggagcttcttccctcagtgtaagataatcagtgtcgccgtgaatcttcccatgtttctatacctttaaaataagacacacagtgataatcaaccccgtctctgtcattgccctgttagctacagggtagttctgccagtcacttgccaatcaatttcacagaatgtaggttgtgcctcacccaattcatctcctaattaatgaagtgacaaaattttgacattttgttggcttctctggctctcgtgggaatttggggaaaaggattgaaggaggctgagaaggagaagagtgaacaagaagagaagaagatgcacttaacgggtttttgctaatttttagttaataaaaattttgtaaataaataatattttctgattatgaaagcaatatacgttcagtgagaaaatcttttttaaatactggaaaacataaakaataaaataaaaaccactttatttaagtttcatcagtttcattttgatataaaacctcaatgc

SEQ ID NO: 852731 - DNA, 552 bp, Homo sapiens
acagccgaatttgaacaaaggtacaaagaggagctggcaccattccttctgaaactactccaaaaaacagaaaaagaaggaatcctccctaactcattttaagaggctgccatcatcctaataccataacctagcagagacacaatacaaaaagaaaatttcaggccaatatccctgatgaacgttaatgtaaaactcctcagtaaaatactggcaaaccgaatccagcagcatatcaaaaagcttatacaccacgatcaagttggcttcatccccggaatgcaaggctggttcaacacatgcaaatcaataaacataatccatcacataaacagaaccaatgacaaaaaccacatgattaccttaatagatatagaaaaggcctttgacaaaattcaacagcccttcatgctaaaaactcacaataaactaagtattgatggaacrtatctcaaaataataagagctattcatgacaaacccacagccaatatcatactgaatggcaaaaactggaaacattctctttgaaaaccggcacaagacaaggat

SEQ ID NO: 852732 - DNA, 552 bp, Homo sapiens
acagccgaatttgaacaaaggtacaaagaggagctggcaccattccttctgaaactactccaaaaaacagaaaaagaaggaatcctccctaactcattttaagaggctgccatcatcctaataccataacctagcagagacacaatacaaaaagaaaatttcaggccaatatccctgatgaacgttaatgtaaaactcctcagtaaaatactggcaaaccgaatccagcagcatatcaaaaagcttatacaccacgatcaagttggcttcatccccggaatgcaaggctggttcaacacatgcaaatcaataaacataatccatcacataaacagaaccaatgacaaaaaccacatgattaccttaatagatatagaaaaggcctttgacaaaattcaacagcccttcatgctaaaaactcacaataaactaagtattgatggaacatatctcaaaataataagagctattcatgwcaaacccacagccaatatcatactgaatggcaaaaactggaaacattctctttgaaaaccggcacaagacaaggat

SEQ ID NO: 852733 - DNA, 329 bp, Homo sapiens
tctcatggataggaagaatcaatatcgtgaaaatggccgtactgctcaaagtaatttatagattcagtgctattcccatcaaactgcagttcacattgttcacagaattaraaaaaaaactactttaaatttcatatggaatcaaagaagaccccatatagtcaagacaagcctaagaaaaaagaacaaagctggagacatcaaactacctgatttcaaactattagaaggctacattaactaaaatagcatggtactcataccaaaacagacatatagaccaatggaacagaagagacctcagaaataacaccacacatctacaactg

SEQ ID NO: 852734 - DNA, 646 bp, Homo sapiens
ttggaaccttggcggtgcccagattktaaaagtcatcaactcagaatcataaaattcaaaagacatttcttgaacttgtctgaagaatcatgatcaaaggaaaaatgtgtttcttagctggtataatatgaataataaataaaatttacattgcaacaatgaaggggaggctaaaattaacacaagtttacctacataacaaacctgtacatgtacccctgaatttaaaatttcaataaaattaaaaataaataaaaataaataaatgtaaatttataataatacattttattgttttaaactttaaaaaggtatatattatagtatttgttttactaataaaaatattcatagtctaacatgccatttttatcagtttatatatttactggaggtgtgtattcacttccaatctcagtgtagcaatctaaatattttagaaagttttgaatttctcaattttatcatttcatgggcatttttaaggaaaataatctttgtaccaattgcagagtatagtgtagaaaatgcaaaatatataacgcgtaataattctattcatagaactcaaaatatggttggaaataacagcatttcaaaatgcaacaattaggtgaggatagaaactaaaccaaaaatccataaa

SEQ ID NO: 852735 - DNA, 624 bp, Homo sapiens
acagtaaagccctataaaatcataatcaaatacagatagaaccaaatacatctcattaacctgtaattaaatcaaattttgatctgcaggaagatacaagtttgaagatgtacatatatcattgattaggcaaatgcttccaatgttctcttccaaagaacatgcaaaatgaatacttattagtgtacagtatgtaaaacaatcaatctgaaattcaaatattttatttttgagcatgtgcaaatttgcatcaatttctcacgaatattattctgtgaagccatatgcttgaaaagaacctctaatacccacatgataatttaccttttaagaaaaatttctttaaatatctttttaatcctcactgctcctataaactgtattaaataactttaaattattagaattaactcaactttaccatggaatttaaattgctgcattttttaacaagttttttttttcttgaatacttgcttattatttcccaatatgcttatattctcctgattaaataaggccttcctacaactccttaacaggaattaatctgttacttccctctcctttcaargttctttttttaaccctaattatagttctgagtggagtaggtcttatttg

SEQ ID NO: 852736 - DNA, 624 bp, Homo sapiens
acagtaaagccctataaaatcataatcaaatacagatagaaccaaatacatctcattaacctgtaattaaatcaaattttgatctgcaggaagatacaagtttgaagatgtacatatatcattgattaggcaaatgcttccaatgttctcttccaaagaacatgcaaaatgaatacttattagtgtacagtatgtaaaacaatcaatctgaaattcaaatattttatttttgagcatgtgcaaatttgcatcaatttctcacgaatattattctgtgaagccatatgcttgaaaagaacctctaatacccacatgataatttaccttttaagaaaaatttctttaaatatctttttaatcctcactgctcctataaactgtattaaataactttaaattattagaattaactcaactttaccatggaatttaaattgctgcattttttaacaagttttttttttcttgaatacttgcttattatttcccaatatgcttatattctcctgattaaataaggccttcctacaactccttaacaggaattaatctgttacttccctctcctttcaaggttytttttttaaccctaattatagttctgagtggagtaggtcttatttg

SEQ ID NO: 852737 - DNA, 329 bp, Homo sapiens; identical to SEQ ID NO: 852733

SEQ ID NO: 852738 - DNA, 684 bp, Homo sapiens
gggaaattggataaatatatattttaaaatctttttaaaagcatctaatagctaacaagatagtaataaattattatgatgaattgtaagaaacattagtgtccaaagagcaaarcaacccataggcacttttggtctggagtatatatttttacttatcttctcatgtagaaatagggcaaaaaaaattttaagagaccaaaataaaagccacagagagtggtactctcacagaagacccactacacaaaagaaggattcatctaagttaaggaaacaatgcaagtggtcaagtcttagtgcaaaaataaaaaaaataggctttaaaagccttgctaatcaatggataatcaggtattcatttgacttgaggtgattccagactagttatatctccagctgattagtcaaagcaaatttaaaatctctcaggaaagagtaaccccatccaaggttgcatattgctccacaatgaaacatatatatatatatatatttaaaaatatatataatataaatataaatataactattgtgaatgagaagcatagtaatatttatggtgagggagaaatatattattgatagttggtacaaaccagaccctatgagggagaagcatatgtaaaaaagacaacttgtgaaagacatagtcaaatgttaagtccatgttaaccctctgga

SEQ ID NO: 852739 - DNA, 370 bp, Homo sapiens
tagtactgactattctaagcacagtcagtgtatggttatttagttattaaatctactcatttcaaggcagggaaggtaytaatagatataatttgactttcagattgatgggtaaaatcttcaaattaaaacatataaagccataaatgactctttacgtcaacatatatgattattatatattcatataggtataaattgtatttttattaacagtaaataaaaatacacttgaaaaattatttaaatacactatttccaaatgtatttttttcttacactgtgacaacattattttttgctggcaattcagagacctttcttcttttttcaatgtccctcttctgctaaagttaaataacaatgagat

SEQ ID NO: 852740 - DNA, 509 bp, Homo sapiens
attctctgaaatataggcaaaggctcacaagcctcaactcttgcactctgtgcacttgcaggcttaccaccacatggaaaccaccaaggcttatggttttcatcctctgaagcagtggcttgagttgtatctagggcccttttagctacagctggagctggagtggctgagatgcagtgagccctgtccctaggttttgtagagtggtggggccctgagcttggcccaggaaaccattctttcctcctaggcgtccaggcttgtgatgaaaggggctgtctcaaaagcctctgaaatgcctttaaagcatttttcttattgtcttgactatcagcatttgtcttccttttagttatgcagctttctgcagccccattcctcacctgaaagggagtktttcttttctatcaaatggctggactgcaaattttctaaacttttgaactcttgttcctccttaaatataagtttcagttttatgtaatttccttgcccacacatataaccat

SEQ ID NO: 852741 - DNA, 509 bp, Homo sapiens
attctctgaaatataggcaaaggctcacaagcctcaactcttgcactctgtgcacttgcaggcttaccaccacatggaaaccaccaaggcttatggttttcatcctctgaagcagtggcttgagttgtatctagggcccttttagctacagctggagctggagtggctgagatgcagtgagccctgtccctaggttttgtagagtggtggggccctgagcttggcccaggaaaccattctttcctcctaggcgtccaggcttgtgatgaaaggggctgtctcaaaagcctctgaaatgcctttaaagcatttttcttattgtcttgactatcagcatttgtcttccttttagttatgcagctttctgcagccccattcctcacctgaaagggagtgtttcttttctatcaaatggctggactgcaaattttcyaaacttttgaactcttgttcctccttaaatataagtttcagttttatgtaatttccttgcccacacatataaccat

SEQ ID NO: 852742 - DNA, 598 bp, Homo sapiens
tcacaatagcagcaagatggaggagctgccttcgaaactgccttaaatcctcattttatgccttcaygaatgtgtgataaattacttcattcccaactctctgtgggtctttcattcaaagtgtgcacctaatgtctccagacaggtggccttaatgctacccgttgacctcttccccatcaacttattaattggtactttctgaatttggttcaggaagcatgaaatatgtgtttaatgtgttgctgtatgaaaagaaatcactgcagcccaaggattaaagattaccagctgaggatgctgcacttccaagaaagagagagagaggggaatagaatcatatcttaaaagagcagagtgccaggcaaacacatggagctttctcaagcatttggaggcaatcatattaaagcctctgaacagttagtgtcatctttgaaagtggtgtcctgtcactgtaaatggcacaaaaggattgcatgccagacactctgcccaaactctgtttatgctatccaggacgaatttaaggttccttgctgttctttcaacctccccttcttgaagaggagaaaagggatgtaatggggtgaaggca

SEQ ID NO: 852743 - DNA, 471 bp, Homo sapiens
agggatccactcccttcaatccaggagcctgtctgcctcctgctgccatccatggtgcctatggtgcccagsctgcttgcaccaaaaggcacctgcaggccagtgccaagccaccctcagccctccccctcagtttctcctctcatgctcattttgcccaaattctggaggaggccgaggtagcagggtactggcatgtcagcactgccccaagcatgtgcacacctggccaggctgtgccagtgcccaggataggccccaacctggctccaagattggagtagggtgccaggagtggagaggtcaggcagcaggagcagacactctagagcctgtggggccagggggttgggggggacttctgaggcccccaagagtgaagactgcagagactctcgggtcctgcgcttgggagggtggccacagctgcacctagggaactcccgccttgccaactcaaaaggggtgggg

SEQ ID NO: 852744 - DNA, 567 bp, Homo sapiens
ggctggggtggaacctactgatacatatgttgggattctagctgtggccacaagagtgcgctgtgctccctctgcaacggtgcttccagccttcgtaattrgacttcaccctgagtacacacacaatcactgccactctcactatagacaaaccacactccctcctctgtcacccagtcactgccatctcaacacacatccccaccctgtgtacacacaatctctgttattcatactctcactccttatgcgcactctcaacagggcatgtagtctgcactcaagcatgccatcccagcctcaccctgcattttattcggctcatcccattttccctgaacattttcgctgaactagggccctggcaggatgctgggactgtgcaaggaggtaggacctatgcccacggagctaagagacaggaacacaggctcatctcccgcactaaccaacccctgggatggctcacagccctgctcccagtgctgtgtcatgacctgaaatttaggggacaccaacacccaaggccagacccaaatggaaagcaaaagaggatgcaaggctata

SEQ ID NO: 852745 - DNA, 595 bp, Homo sapiens
gggaggcggaggcgggcggatgtcttgaggtcaggagttcragaccagcctggccaacatggcgaaaccccatctccactaaaaatagaaaaactagccaggtgtggtggtgtgcacctgtattcccagctactcgcactccagcctgggtaacagagcgagaccctgtctcaaaaaaaaaaaaaaaaatcgagaaatgccaggcataattgagggtaggagcaccataaataaaacagaggaattaagtggaagtttacatactgaacagtgggtccttctgccttctccccaaaattggcttccaaaacactggctgatggatcaggttttgaaaaaaaaaaagagagagagaatctgatctagcctgaggtcatagaagcctgcctgcaggaggtgggcttcagaaagcctaaaacgtgagaaggaatgagctaggaagagatggggaagagcattccaggtagacggaatagcactttcaaggctctgaagaaggaggaaggggcttgatatatttgttgttcagggttgtttttgatacagactgccaagctgctttccagaaaaaaaaattacttattcgttcaatagc

SEQ ID NO: 852746 - DNA, 603 bp, Homo sapiens
agacttgctggagggcgtggctgcacattggtcgtttgaagctccctaggtgattctagtgtgtaggaaytgatctaggactgaaaaggatgtgaagagggcatgttcctaaagagagaagaaccaggagagtgagctgtgaaggcctgaggagggaatttgagttaaaaaacaggcgggcatcagcactgaatgcctcagttggaagctggggaggggggaagccatggaattaggttattgagctcactggtgactgggtgagaggcatgaggtcagggtccagtttgaaatgggctaaggaggggtgagtgcttcataagaagcctggtagcccatcaatgatacactggataaagaaaatgtggcacatatacaacttggaatactatgcagccataaaaaagaatgagttcatgtcctttgcagggacatggatgaagctggaaaccatcattctcagcaaactaacacaggaacagaaaaccaaacactgcgtgttctcactcataagtgggaggtgaacaatgagaacaaatggacacagggaggggaacatcacatactggggcctgccggggggtggggagaagggaagggaga

SEQ ID NO: 852747 - DNA, 601 bp, Homo sapiens
caaccacacatgcacacagcctcccacaccaccccagccacctccaccatcacacacrttcacaaccacacatgcacacagcctcccacaccaccccagccatctctgccatcacacacgttcacaaccacacatgcacacagcctcccacaccaccccagccatctccaccatcacacacactcacaacaacgcacatcaaagcctacacacacgtggcccacataccacccttaacacacagctctccaggcttacacacacagaaacagttctcgcacataaccttatgtgcacccagtgtttacaaatagtgactgagagtctgtacattccaggccctggtaatgtggcaggaacgtgaccagggagctccctgctctcctggagataatttcagagacggctgtgaagagtgtctgctgaggaagtggagcaaggaacatttggggtgggggtgggggaaccagggaacacctctgtaagaaggtgagacctgaataaggaggaggaagcttccaagtaaagagtcaggagaaggcagtccaggcagagagaacagcaaaggcaaaaaccagaaggctgacctgaatgtggcttg

SEQ ID NO: 852748 - DNA, 601 bp, Homo sapiens
caaccacacatgcacacagcctcccacaccaccccagccacctccaccatcacacacgytcacaaccacacatgcacacagcctcccacaccaccccagccatctctgccatcacacacgttcacaaccacacatgcacacagcctcccacaccaccccagccatctccaccatcacacacactcacaacaacgcacatcaaagcctacacacacgtggcccacataccacccttaacacacagctctccaggcttacacacacagaaacagttctcgcacataaccttatgtgcacccagtgtttacaaatagtgactgagagtctgtacattccaggccctggtaatgtggcaggaacgtgaccagggagctccctgctctcctggagataatttcagagacggctgtgaagagtgtctgctgaggaagtggagcaaggaacatttggggtgggggtgggggaaccagggaacacctctgtaagaaggtgagacctgaataaggaggaggaagcttccaagtaaagagtcaggagaaggcagtccaggcagagagaacagcaaaggcaaaaaccagaaggctgacctgaatgtggcttg

SEQ ID NO: 852749 - DNA, 601 bp, Homo sapiens
caaccacacatgcacacagcctcccacaccaccccagccacctccaccatcacacacgttcacaaccacacatgcacacagcctcccacaccaccccagccatctctgccatcacacackttcacaaccacacatgcacacagcctcccacaccaccccagccatctccaccatcacacacactcacaacaacgcacatcaaagcctacacacacgtggcccacataccacccttaacacacagctctccaggcttacacacacagaaacagttctcgcacataaccttatgtgcacccagtgtttacaaatagtgactgagagtctgtacattccaggccctggtaatgtggcaggaacgtgaccagggagctccctgctctcctggagataatttcagagacggctgtgaagagtgtctgctgaggaagtggagcaaggaacatttggggtgggggtgggggaaccagggaacacctctgtaagaaggtgagacctgaataaggaggaggaagcttccaagtaaagagtcaggagaaggcagtccaggcagagagaacagcaaaggcaaaaaccagaaggctgacctgaatgtggcttg

SEQ ID NO: 852750 - DNA, 498 bp, Homo sapiens
aatatgactgcctgcactctacagatgaggaacaaaggcacagcgagatggtagccayggaaccagaattcagatccaagtctttctggctccttagcttttgctcttacatgattcaccaaagttttcgattggttacccagtgtcagaattttccagggtgctcattttaaaatgcagatttctcagccccacactaagtcctgtgagtcagaacctctagaggtggaacccaggaatctgcatcattcatgagagctccacttgattctcaggtatcccaaggttgaaaactgctgcatttcactggactgtcttccccagtgagcagtagctaaatgttccaggtattatggttgtgtaatagatgacccccaaaatgtagaatgaccaccattttattttactcccaaattcgtggttctggaattcaagaagggcatttcttccaccagactccattagtcgaagcagtcacaagccagcctagattcaaga

SEQ ID NO: 852751 - DNA, 616 bp, Homo sapiens
tgccctctttattagttttctatggggaaaaagttcacgacattgcaggacgtgtaagacacactttaaaaaaaaaaagaaaaagaacagagtcatagaataatagtattcataatggcaaaattctggaaataactcaaatgcccatcagcagtatgataaaaatacataaattatagtatattcatgaaatgggatactccatagaaagaaaagaaaataccaactactgttagatgtaaccacagggatgaatttcacagacacaatgttgacagaaataaacagaaaaaaattacatagtgtgtgatctcatttacatggagttcaatcacaggcaaaaacaatttatactgatgaaagtcatggacttccacctttcctccagctatcactgtttagaaatcatcagctaatgtaattgcacttctttgtaagtgatctgtctttttctctggctgccattaggatcttctgtttttctttggttttagtgtgattttacaaaaatgtaccctagttggaatycattgggcttactgcatccaaggattgtctttcaacaacccaaaaaagtctatccttgaagagttcacattctctgtattctctcact

SEQ ID NO: 852752 - DNA, 616 bp, Homo sapiens
tgccctctttattagttttctatggggaaaaagttcacgacattgcaggacgtgtaagacacactttaaaaaaaaaaagaaaaagaacagagtcatagaataatagtattcataatggcaaaattctggaaataactcaaatgcccatcagcagtatgataaaaatacataaattatagtatattcatgaaatgggatactccatagaaagaaaagaaaataccaactactgttagatgtaaccacagggatgaatttcacagacacaatgttgacagaaataaacagaaaaaaattacatagtgtgtgatctcatttacatggagttcaatcacaggcaaaaacaatttatactgatgaaagtcatggacttccacctttcctccagctatcactgtttagaaatcatcagctaatgtaattgcacttctttgtaagtgatctgtctttttctctggctgccattaggatcttctgtttttctttggttttagtgtgattttacaaaaatgtaccctagttggaatccaytgggcttactgcatccaaggattgtctttcaacaacccaaaaaagtctatccttgaagagttcacattctctgtattctctcact

SEQ ID NO: 852753 - DNA, 623 bp, Homo sapiens
ggtaaatagtgtatacatcacctcaagcatgtatcacttctttgtgttacaaacactctatctatactttttttagttttaggtttgtttttttwtaagactgagtttcactcttgttgcccaggctgcagtgcaatgacgcgattgatctcggctcaccgcaacctccgcctccccgggttcaagcaattctcctgcctcagccacccgagtagctgggattacaggcatgtgccaccacacccagctaattttgtatttttagtacagacagggtttctccatgttggtcaggctagtcttgaactcctgacctcaggtgatctgcgcacctcggcctcccaaagtgctgggattacaggcatgagcctagggtacagagcatgaccctgtctcaataaaaaaaagaaaagaaaaagaaaaaatcaccaatgcaatgctaaatctagtgggtgaaattttgaggcataactagacctttatagagccacaaagtattgccacacaaggtatcagtgaaatacaaaaggtaaactgtaactttaccatggacaaacctgacagatactccttaaccaaagaagcaaagtcaacactggccagcaatgaaaccaagtgacagc

SEQ ID NO: 852754 - DNA, 623 bp, Homo sapiens
ggtaaatagtgtatacatcacctcaagcatgtatcacttctttgtgttacaaacactctatctatactttttttagttttaggtttgtttttttttwagactgagtttcactcttgttgcccaggctgcagtgcaatgacgcgattgatctcggctcaccgcaacctccgcctccccgggttcaagcaattctcctgcctcagccacccgagtagctgggattacaggcatgtgccaccacacccagctaattttgtatttttagtacagacagggtttctccatgttggtcaggctagtcttgaactcctgacctcaggtgatctgcgcacctcggcctcccaaagtgctgggattacaggcatgagcctagggtacagagcatgaccctgtctcaataaaaaaaagaaaagaaaaagaaaaaatcaccaatgcaatgctaaatctagtgggtgaaattttgaggcataactagacctttatagagccacaaagtattgccacacaaggtatcagtgaaatacaaaaggtaaactgtaactttaccatggacaaacctgacagatactccttaaccaaagaagcaaagtcaacactggccagcaatgaaaccaagtgacagc

SEQ ID NO: 852755 - DNA, 634 bp, Homo sapiens
ttaattagtaagacactattcttagttcagtttttcaggctgatggcttcattgtcatgacctataaagttagggtatatggtctttagtgcttaagcataacaattaattgctttaaagaaatatcaaatwtttttctccctccaaaaatttgttttttatatcacttaagagtgacatttatactcatcaaatttttagatcctataatgcataaggtaaagttaatcatcttattgaaaataattcttgagggccaatgagtgcaatgagtagatccctatgtagacaaacacatatgctattaggatcccttgtgtctgacaggtctgggcctactgtgactttccaaggtgaataacatctttatctttaaagatgagtcagaagaaaaagaaggtaaaatgcattttagttatctcatgctctatcaactttgcaagcctgaaaatgcatactttttccaaatgaagtcttcatgtagttccatttcaaatggaaagatagagtggaccataccagcctgcagtctcatcttggcttttaaattttttttcctctgggcatcaactccaaatggtataggtagggtactgctgctttcagggttgagataaatgcgttatgtttgtag

SEQ ID NO: 852756 - DNA, 519 bp, Homo sapiens
ttaggggaattggctcacacaatagtggagaggtcttgcaacaggccatctacaagctagagaaccaggaacgttggtagagtggctcagtccaagcccaacggcctcagaactgtggaagccactgctgtcgttctcaggccaaaggtctatgaacctggcaggctgctgtgcaagtcctggagttaaaaagtaggaggaactcaagttctgatatctgagggcaagagaagacgggtgtcccatctttagaagagagagagagaattcaccttttctgttctatctgggtgctcagcttattagatggtgcctgccaacattggaggagggtggatcttcctcactcagtctactgatttaaatgccaatctcttccagaaataccctcacagacayacctagaaataacactttatcagctatctgagtatcccttaatctagtaaagttgacacctaaaattaaccatcacacttaccttcctatagagtttgacctttccaactctaagccgaa

SEQ ID NO: 852757 - DNA, 604 bp, Homo sapiens
gcctgtatcataatttaaacacatgaaaatttctttccagagaaggtagtcatatttttcctgaaagctagctatacaggttcattctctgttcaggcatttctacagacatgggcaaactatgtttattatgtattactactgtacttctaagtaacttaatcaaaaatcagagtacagagtggatccatgggttctgcatccatgaattcaaccagccttggattgaaaatattttttaaaaaatggatggttgtatctgcactgaacacgtacagactctttttttcttgtcattattccctaaacagtacaatgatttacatagcatttgcactgtattaggtattgtaagtagcctaaagatgatttaaagtacagaggaggatgtgcgtagattacaggcaaataccacaccattttatataagggacttgagcatgtggaaccagtcccccacggataccgagggataactctaatcatgttygtatttaattacaaaatatacccaatttataatctaaggtcctccgtttttcataattatgtttctcaaaggttgataggtattttatttttaaaatataactatatgtcaaag

SEQ ID NO: 852758 - DNA, 524 bp, Homo sapiens
ggattagggctatcaatcttgggggacagaaacattcagtacacagcacctatttacatattgcccggggctgctttcacgctactatggcagacctgagtagttgcaatagagactgaatttcctgcaagctgaaaacatcgactatctggtcctctatgaaaacatttgcctggctgggcgcagtggctcatgcttgtaatcccagcactttgggattgggaggctgtggtgggaggattgcttgagctgagttcaaaaccagcctgggcaacacagtgagacaccttttctacaaaattacaaaaaaaattagttgggtgtggtttacagctatgggattacaggtgtgtgcctgtagtaccaactacttgcaaggctcaggtgggaagactgcttgagcctggcaggtcaaggctgcagtcgcctatgatcacactattgcattcccgcctaggcaactgagtgagatcttgtctaaaaaraaatttttttttgctgaaccctgttccaggacaacatct

SEQ ID NO: 852759 - DNA, 631 bp, Homo sapiens
gaatgaaagcaccttcactctgctgctgcttttctattgcgttaaattcaatgcagttgtttttatttaaaataattaaggggcctggggtsgtggctcgcacctgtaatcccagcacttttgggaggtcaaggcaggaggatcacttgagctcaggagttcaagatcacctggcaacatagccaaacaccatccctatgaaaaatacaaaaattagccaggcatggtggtgcacacctgtggtcccagctacttaggaggctgagacaggaggatcacttgagcctgggaagcagaggttgcagtaagccgagatcacgccaccgcactccagcctgggcagcagagtgcaactttgtctaataaaaagaaagaaagaaggaatgccgtagcacagtagacagagatgaagacactgactgagtttgctaatcaacagggaatgcgcatccccaggcatcaggagtggtgctgagcccataccccaacaccccagctggggggcaaagcacaggtcaccagctgagcacagagaccgcccccataaggcacaaagaggtaaggagagccgaggctggtcttccgctctatgacttaaacttggaataatcctcctattaacgagtcatta

SEQ ID NO: 852760 - DNA, 597 bp, Homo sapiens
caaaatcaataaatgtaatacaccatatcaacagaatgaagaataaaaaccttatgatcatctcaatagatgcagaaaaagcatttgataaaatttaaaatattcctaggaacatatcaacataataaaggccatatatgacaaacacacaactaatatcatactgaatgcggaaaagctggaaggctttcctttaaaaactggaacaaaatcgggcaaatgagatttaaggcatccaaactggaaaagaggaagtcaaattgtccctctttgcaaatgacatgatcttatatagagaggaccctaaagattccattaaaaaaactcttagagctgataaacaaattcagttgtttcaggatacaaaatcaacatacaaaaatcagtagcatttctataaaccaataacaagctagctgaaaaagaaataaagaaagcaaccttatttccaatagctacaaaaaaaaaatctgggaataaatttaaccaaggaagtaaaagatctctacaagaaaaastacaaaacacggatgaaagaaatggaacaggacacaaatgggaagatataccatgcttgtggattaaaagaattaatat

SEQ ID NO: 852761 - DNA, 612 bp, Homo sapiens
atacagaaaatatagacaacccaatagaaaaatgggcaaaaggtttgaaccagcactccacaaaagaggatatctaaayggtcaatgaacatttgaaaatatactcaaaagaactactcagcattcaaagggcattgagattatacaaccccacaaaatagtttaaatgattgtgtgtgagtatggacataaaaagacagagaatattgagaaaataccaattagagcattcatacagtgagtgggagtggaaattgaaaaacctactttggaaaactgtttgtcagtatcagctaaagtagaacataggtatgcccatcatttggttattccatacctacatacatactcagaagtaacatgctcatatgtcctccaaaagaaatgtgcaactattaggttagtgcaaaagtaattgtggtttttgccattacttttaatgtcattacttttaatggcaaaaactgcaacacttttgcaccaaccacctaataatacattcttaataatgctaactgcaatagcacaaaacaagaggctatccaaatggtcattaagagaagaatggataaatacattttgttatagtcacatagtggaataggttatagc

SEQ ID NO: 852762 - DNA, 519 bp, Homo sapiens
actgttgacttcagggacaaatacgacaattaattatataaatgctaggcaatctacactaaaaatttagactatgattgcatgataactctctaggtaatgcacaaattaataaagtattatcagaaactctctattttctttcaaaaaattaagaagaaacaaatgcagatagggagttactcagataacaattatattgagtaatgtctggaatattatcaatgacctcttgaatattcagagttatgttttgcatgttcatttgatttgtgcgatgtataatcctgttccctcaaaataagatcaaccatttccattttttaatttgcatcttgtgtttttggtgaattacttgaattttgcctctttatctttgtatttaaaattaatttattacaggakacttgcaagaatatagaacaataaaattatgtataaaatcaacaaagactcagttggatcaatgagtaagcttcaaatttgagcttttagaaagcaagggaaaaacaaaaacat

SEQ ID NO: 852763 - DNA, 530 bp, Homo sapiens
tgtccactgtaaccatacttcattgaaaaaatgcaatcaaaatttcttttctctaacggtgtgtatacaaaagggaaacattcaattacattaaataatttgtttcactccctaatccttaaattcaggtctgccactcactagctttgtaaccataagcaggtcagttgatttttccaagtatcaatttctgagtctcatttcctctgtaaaatgaaaataatgcatactgcagtattgttgtggggtttaaatggaataatgcatatatatgtcagtacgtagtaggtagtcaatcatcgttggcacttacttttgcaggcaaaaagtaggtattataactagatgatccttaatattctacatttctgtgatttaaaaaatagtaaagggtgggtaatgcaraagtgctggcactggaacttcaggcaacactgtagtaaattggtgctttttcccccgcaagagagagcagctttcttgatgtcatctcaaagtctaggaaacaggtcttgcatacacaaaagcat

SEQ ID NO: 852764 - DNA, 606 bp, Homo sapiens
gtatttcagagaaaaaaatagtgatagcgattaggaagaaggctagtaactcaaggctacagtccctggctttgattttgctttgaccgttctgtaaatgtgcatgtacacagcatgcttgcatgtactgygtctggtgtaatactaagacaatgaaattaaatgtgactggaggttaaatagcaaagccaccttagtttatgacattatttggatataatcactataatcactatgaacatatctgtttcctagtaactacttaaaaggtagacatgcaatttaggggataattctttctgaaaacatctctattaaggccatgcctttttttcttctcctctgcaaaatgttttcgacttgtgttttatttaaatttcagaccagaatagtacagcagattacatagtaacttatatctccacaatgagaaaataccttagttgatcaaatttctaatactgaatgtttaatttttaaatgttcttgtttttaatctgaaaggctgaagaagagctaataaaatatatcacatgaaattttaaaagtgagagataaaatgtatgcagacaatattattccatttacttccatgctaaacccctt

SEQ ID NO: 852765 - DNA, 606 bp, Homo sapiens
gtatttcagagaaaaaaatagtgatagcgattaggaagaaggctagtaactcaaggctacagtccctggctttgattttgctttgaccgttctgtaaatgtgcatgtacacagcatgcttgcatgtactgcgtctggtgtaatactaagacaatgaaattaaatgtgactggaggttaaatagcaaagccaccttagtttatgacattatttggatataatcactataatcactatgaacatatctgtttcctagtaactacttaaaaggtagacatgcaatttaggggataattctttctgaaaacatctctattaaggccatgcctttttttcttctcctctgcaaaatgttttcgacttgtgttttatttaaatttcagaccagaatagtacagcagattacatagtaacttatatctccacaatgagaaaataccttagttgatcaaatttctaatactgaatgtttaatttttaaatgttcttgtttttaatctgaaaggctgaagaagagctaataaaatatatcacatgaaattttaaaagtgaragataaaatgtatgcagacaatattattccatttacttccatgctaaacccctt

SEQ ID NO: 852766 - DNA, 542 bp, Homo sapiens
tgcactctttttttttaaagttctccaatttagacagggatataatttcactgggagatattttagaattaccttcaaatgatacagcaatctaatcccttctttgctttgyaatttatggccttctttgctttgcaatttgtggctcgtgtgtgtgtgtatgtgtgtgtgtgtgcacgcacaagtatgtgtactgtccagtgtttagaatggagtatacagtgggaactggcttggttaagacacgaggacataagaattgtattttgactgagggtaaaagtccatctaagaagtgttctcagacaggtgtgaatggttgactggacagtctgataattttgctccttgaaattgacttcaaaaggtgtttgtattcttctcgctaatttttctcaacttactgtggaggtattacctgtgatttatgtaaactctaattgagagtttatattttcatcttgtactatctcttaagggtaatcattttaccaagtagctagtactgcatgggatactattttatttgtctcataattatt

SEQ ID NO: 852767 - DNA, 542 bp, Homo sapiens
tgcactctttttttttaaagttctccaatttagacagggatataatttcactgggagatattttagaattaccttcaaatgatacagcaatctaatcccttctttgctttgtaatttrtggccttctttgctttgcaatttgtggctcgtgtgtgtgtgtatgtgtgtgtgtgtgcacgcacaagtatgtgtactgtccagtgtttagaatggagtatacagtgggaactggcttggttaagacacgaggacataagaattgtattttgactgagggtaaaagtccatctaagaagtgttctcagacaggtgtgaatggttgactggacagtctgataattttgctccttgaaattgacttcaaaaggtgtttgtattcttctcgctaatttttctcaacttactgtggaggtattacctgtgatttatgtaaactctaattgagagtttatattttcatcttgtactatctcttaagggtaatcattttaccaagtagctagtactgcatgggatactattttatttgtctcataattatt

SEQ ID NO: 852768 - DNA, 589 bp, Homo sapiens
cagtatttgctacttgcaggtgagaagaatgtatattctgttttcgttgggaggagtattctgtagatgtctattaggtccaattcatcaactgttgagtttaagtctagaatatctttgtttgtgttctgcckcagtgatctatcaaatgttgtcagtggggtgacaaggatttccactgttattgtggggttattggaatctctttttaggtttgtaataacttgttttattaatctgggtgctttagttttgggcataaatatatttaagatagttaggtcttttaattgaatcaaaccctttatcattatgtaatgtccttctttgtccattttggtcattattagtttgcagtctgttttatctgatataaaaacagtaatctctactctttttgtcttgctatttgtctgatagctttttcccatcctcttaccttgagcctatggatgtcattacctgtgggatggtctcttaaacacagaagacaattgagtcttgcttctttatccaacttgccactctatgcctcttaagtgggtgtttagcccatttacattcaaggtcagtattgatatgtgttatt

SEQ ID NO: 852769 - DNA, 634 bp, Homo sapiens
gtgtatctctacactgtttctgtcattggaaacattttcctgtggaaaaataaaatgacagctgaattaaatagaatacttgaagackttattttattgtggtgcaaactccttgtcgcattgtgggctagggaagtattgctaatattacatttaatcatacacatttattatgtaggttcatactatttcttacctgagaccaggaaaaatagcttagagctctttactctcttaaaaatctctttaatgaatcacttttccaagccttctctagtcttttattcttgcaaatattggaggtattggtcaccgattatttttgatttcttcttgcaggtcccattgacatgtgtctttttgttttgttttgttttgttttgttttttgcatttatctctcatcctcacctttgaagtcatggccaatacattaaaataaaagaatacataatcatcagttgagctcagatgcaaagtcacagagaggtaaaaagggcagaaataagcaattttggagaggtcttaagaggaatctatatctaaactatcataactaaattaatccaacatacgatgtcgagatctctaaaacaatgtttctcactatgttttcttaatcatttcctctctgt

SEQ ID NO: 852770 - DNA, 615 bp, Homo sapiens
ctgttctttcaccccctccccttttgaaacccttaataaaaacttgctggtctgagactcaggcagacatcacrgtcctaccaatatgtgatgtcactcttggtggcccagctgtaaaattcctctctttatactgtctctctttatttctcagctggctgacacttatggaaaatagaaagaacctacatggaaatattgggggtgggttcccccaatagcacattttattgattatttattgaaccagtcattgaaatcacctttacatcgagatgacatttttaataataatgtgtcaatattttgattacaatgtattgttcagtaaagttggattttattcaaaagcatagagaatatttctacattcaaattttaagaaaaacaaagcaatattattaatacattactaagattttgatgattttagtaaatcgcatcatctctacaccagggaattattttaaagctgttacactcttcttctttattatggcaagcctatcaatgcacttacaagcctctccaaccccttagaactaccataaacacacactctctctctctgtcacacacacacacacacacaccaacaactataccaccaccacc

SEQ ID NO: 852771 - DNA, 634 bp, Homo sapiens
gagactcaggcagacatcacagtcctaccaatatgtgatgtcactcttggtggcccagctgtaaaattcctctctttatactgtctctctttatttctcagctggctgacacttatggamaatagaaagaacctacatggaaatattgggggtgggttcccccaatagcacattttattgattatttattgaaccagtcattgaaatcacctttacatcgagatgacatttttaataataatgtgtcaatattttgattacaatgtattgttcagtaaagttggattttattcaaaagcatagagaatatttctacattcaaattttaagaaaaacaaagcaatattattaatacattactaagattttgatgattttagtaaatcgcatcatctctacaccagggaattattttaaagctgttacactcttcttctttattatggcaagcctatcaatgcacttacaagcctctccaaccccttagaactaccataaacacacactctctctctctgtcacacacacacacacacacaccaacaactataccaccaccaccaccacactctgagggaatttttcatgtgagcaatccaggtggccacagtctcactttctgcatgctggtgta

SEQ ID NO: 852772 - DNA, 610 bp, Homo sapiens
atgcaacctcatgggaacaaaagttcagtttcatttatgaatgttctagataaagcagtacttttaaaaaatttattaaatctctactcttaatgtcttttttaatattctgtatcacaaaatgagaaatacacataaagtccttcagttgcatgcataagtatgaggctatcttgagtgagatcacttgaacaattgtttgagttacgaaatgaacttgcagctttttgtttttggaatatcattttacttgaaagaaagcctgaatataaattatggtttcatatgtttgtggatgtccagacattttctcaaaataaaggaagcctagtaattctgatatacaattaatgttacttgttgatctagaacataatgtgttctaaacactctttacttcctcatttccaggtatgcccaggacaagagagttcaagcaatttacccaaatttatacaactagcacacctttgttagatttttagtatattgcwttttgttaaaatttctaatatcagaagagaaaattggtatactattctttctataatttccaggagaaatatataggtatcagctttcaagtgacagaaataagaatgaaaaaata

SEQ ID NO: 852773 - DNA, 657 bp, Homo sapiens
aggaaatttgtttaaataaaatataatcagtactgaaaataactggtatgtgatcatgataaacaccagtgacctaactttaatacagatattatttaatatattttgaagttattattaaagytcataaaggaagagtttaagtattataaaaataaaaatttaccccagtatcctatctcatattataccattggaaaatgacatcaaaatgtaaccgactcaccaaaaacatgtttactgtacttttttcttataattattactttaactttttaaaatgttttcatatttaaagtcattttactttttgcactaataaagttcaatttgccagttgttaaattatttcttcttacctattgtttaaatagaacttagaaaaaaatatatatttagcagaagtgatactctaatcatatttttttaaattgtttgaacatgtttataagagaacatatttctaaattctttaaacctatttcttgatatctgtgggcgtttgtctaatcaagccaacatcccagcccactcagagttggtttctagtcactgagcatgggtcacatattcttttgattttttttttttttcccaaatgatttatctgaacctaaactaacttaggactcctatactctattttctgtttttcca

SEQ ID NO: 852774 - DNA, 478 bp, Homo sapiens
tagtcactgatatactgctgtggtctgaatgtttacattcctccaaaatttacgtattgcaatcctcacccccaaggtgatggtattaggaggtgggaatttggggaggagattgggtcaagakggcagagccctcataattggaattagtgctcttataagaaggtccgagggagcttgtttgttccttgcaccatgtgagaacacagctagaagtcactgtctatgaggagtgggccctcatcacacagcactgaatctgccagtgcttttatcttggacttcccagtctctagaactgtgagaattaaatgcttgttgtttataaaccactgagtttatgatatttctttatagctgcctgaaagaacagactaagacagataccaaagttaagaagataacctttgtccttaaggagctccctgtctaccagggaatagaaaggtataaacaaacactgcaattacaaagtaaa

SEQ ID NO: 852775 - DNA, 576 bp, Homo sapiens
gatcaggatcagggaagaaaatttgtttattttttaatcccttatttcttagcttgtaaaacatattttctagagaaaaatgtgtctcttcaaggcaactggatattttgatgcaagatccctgactttaaaactttgggattgtcagaggcactgaaaccagagtgactctatcttgaataggtgctgggtaaaatgaggctgagacctgctgggctgcattcccaggtgaggcatttttaggcacaggatgtttacaattcagggaacagattcgtaatatttacccaatagacccaggacttgtaacagacccagcaaaagtcctgatgtcccaatatcttaacagtaaaagcattcatagtttaagaattagttttgctttaaagatagtaacataaattcttgtggaagataatagttacacaaagcttggcaatcctttgtcaggaacctttgtagtagagcacaccttccccatgactttttgctctgttgtcttatasgtaaacaagcttcaaacctaaggtgagtgcgtccctcctcttgctttggggaatgccctgctctgtctat

SEQ ID NO: 852776 - DNA, 607 bp, Homo sapiens
tatatccatgaaataaaactatacttttaccccttgtwttaatgcaaataaaaaataaaataattaatggtgaatattcaagagttatattagagatctaggtgatttgagtgaaactggtgacctaagtcagcaaagtcagtttttagtagccattggggtcacattttccaggacgtgaaaattacgattcactttggaaagttttggttttgcaacctcctgagccataatggtgtttctgtaattcccactgttgtcagtggcttaggtctccttctcttccccaaccttcattgtattttctcttcaagctgctgaagtggggcagggcactgggatatgagggagctggtcgaagagacgttagtgctatgtttgtgctggaggtgagggtgtgatgctggaggatttctgtttgggatgttgctgtgagttgctgcggtgctgtggtcaggggaggtttggggcatgaactgagagagacatgtgctatgtgctgaatgatgaattgatatcatggcttgtgatattttcatatatacttattgaagatataattcaggatttgcatattttctctaacaacacatttaaaagagtatag

SEQ ID NO: 852777 - DNA, 532 bp, Homo sapiens
atgcttttgtgtatgcaagacctgtttcctagactttgagatgacatcaagaaagctgctctctcttgcgggggaaaaagcaccaatttactacagtgttgcctgaagttccagtgccagcacttytgcattacccaccctttactattttttaaatcacagaaatgtagaatattaaggatcatctagttataatacctactttttgcctgcaaaagtaagtgccaacgatgattgactacctactacgtactgacatatatatgcattattccatttaaaccccacaacaatactgcagtatgcattattttcattttacagaggaaatgagactcagaaattgatacttggaaaaatcaactgacctgcttatggttacaaagctagtgagtggcagacctgaatttaaggattagggagtgaaacaaattatttaatgtaattgaatgtttcccttttgtatacacaccgttagagaaaagaaattttgattgcattttttcaatgaagtatggttacagtggacagt

SEQ ID NO: 852778 - DNA, 624 bp, Homo sapiens
ccattattcctctgcgccaatgtttcccaaagtgtggagcacccacractgatgataccggagaggaatctaggtatccgactgtgagtaggagaaacatggcatggtattatataacattgaatcccaccgtgggagaattatttccttttcattattctgatcaagtctaagaggaagtttcagtttgttggagtatgtcctcaactctttaatcttgcaatctcctattttacaaagagtctcagaatcagagcatttgttagctttctagctagaatataacaacgtattttttccagagtatttgtttttatggttactttctaattatggaaagtaatgctatttaaatttttacataatttgatattaagtttcccatttatatgcttaaattaagaaaaaacatttaaacaagtattagaaaaacaccagtggaaatggatgtagaaggtgtaatagtggcctatgtgaatgtcgtttaggacattaaagcacagaatgcctggctgaaaagaatttcactagataaacagggatggtggaacatagctgttggtggtaagagggaaaagagcactccaaggatagaaaatgactcataaactcagaaatatgtca

SEQ ID NO: 852779 - DNA, 250 bp, Homo sapiens
ttgctaaatgtcccttggggagcaaaatcacacttcccacacttcccatcccaccccttcatttggagaaccgctgatctagagtgtggcaaatggaaaacacyggttcattcccttcccatagaacatcagagagtacctcgtaaatacacacgtggacacatgatgcttgtttatttacctggagtggaagaagggagaaagtgtcccattaacctaacatttcatgtttgatggtgatatgtaagaa

SEQ ID NO: 852780 - DNA, 670 bp, Homo sapiens
tttgagatttcattagtgaaagggatatcctaaagcaagacaaaaaatagtagaataaccagataatacgtgtaggaataatcctccactatgattgtgacttttaattcatttagtagtttaatgagttatttagttagctttataacaagtacactacaaggtgatattagtctgaacatactggctgactttatgaaaaatagagtcggccaggcgcagtggctcacgcctgtaatcccagcactttgggaggccgaggcgggcagatcacaaggtcaggagatcgagaccatcctggctaacatggtgaaaccccgtctctattaaacatacaaaaaaattagccgggcgtggtggcaggcacctgtagtcctagctactcgggaggctgaggcaggagaatggcgtgaaccggggaggcggagcttgcagtgagccgagtttgcgccactgcactccagcctgggcgacagagcgagactccgtctaaaaaaaaaggagtcattgtcccctctgaatttaatatttcagtgaagttgccactcctgtgaggtagaaactcacttctgtctaaccgcatayagaaattagtctttgcaaatgaactcatatcctctacattcatgaacctcttattccaaagccaaatccatataataaaataact

SEQ ID NO: 852781 - DNA, 488 bp, Homo sapiens
agaagtttctatttaatattatgctgaaagataaaagcaaaaccattrgtaccttaccagtatactattaactacttaaaaaaatctaacagaaaaaaatacagtgaacaaaatatatactcacagtcataatgtttataagatttcaagggataatttttataagatttgtactagaacatacagaaaagcataaatgttactaaagaacaacataagacattcatgaaaatttgcactgaatattgtacagatgacaattatctctaccagttaaaactggatttgatgcctgtattagtccattgtcacactactaataaagatattcctgagactggagagtttataaaggaaagagatgtaattgactcacagttcagcatgactagggaggcctcgggaaacttacaatcatggcagaaggggaagcaaacatgtcctttttcacatggtgtccggaaggagaggaatgtgaaccaagtgaa

SEQ ID NO: 852782 - DNA, 511 bp, Homo sapiens
tgctcctatcaaattataatttaaaaactatgtgcaataaatatctactsaaattattttaactgttttttacctttagggcttttataatgaagacatataactcacaaatgattaaaatgtatcaaatatcatataatttgtgtggtttaatatataaaatgcacaggtagtattatttacattataccttatgacccaacttataatgtgtgttggttttgtgtatgcataaaatcattataattatactatttaataaattttttgaagagtacaaccattaattttaatatatttggacattttgtttgtgaataaaattttaataaacgtgagatgatgagaatgagaattttaggaaaatggaatttacttattaagttgtaagaatagcattaattgtgacctaacatatgtccattaataatgtatataacatggtatataaagtatatcatttagagtcagaaatatgccaaatagtttacaaagactggattatgcatct

SEQ ID NO: 852783 - DNA, 431 bp, Homo sapiens
aggcaattcatatatctctatttctttggggtcagccactggagctttattattattattttggtggtatatttccttgattttttatgttctttgaagccttgccttgttgccttctcatttgaagaaggagtaaacttctcaagtcttcgattactggcattgcgagagaacaatcttcaccattcagcctggctagagatctggaggtgtctcagatcatttcagttgatgtatccccttactgttcttattccctcttgggggatagtgtcaggattgtatgccttcccttgatcccataaaaccaggccaggtagtgagaactttccatttacttctcctagtgtaatgccaaaggtycttgccttagccatgccaaagaattggtgtggcagctgcccgcagcgagtgatagagacatggaccga

SEQ ID NO: 852784 - DNA, 618 bp, Homo sapiens
aatggggtagaatatttagatggggatatatcatagtttgttgaaaggaaggacagtgttttcaatttaattttcctttaatttttggcaatgcccaatcttytattggcatattggctgtaaccattgaggattattattttagaggagtagttaataatgacttatcattatcctctaaatacattttaaatgaaagtaccttgcttttgttcgtgctgaaactcatgtgacacatttttctcaacctccctgtcttataataacttcctctgatttatcctcatgcatttgggttttcatctcaaagaagagctgagtgtcatctacattccactttctgccttcaagtctcattttcttcatctgtaaaataggataataatacattactcataattactcataggatcgttgggaagattaagcaataaatccatgtaaaatgcctagcataatgtctgatgtatagtggcattcaagaaatgtaaattacatttctctctgttattgggtcctttgatgattgaatatgcccactgttttctattttctttttcttttgttttgttgttagaacaagataaaactccttgataaactgcagacatattcaac

SEQ ID NO: 852785 - DNA, 557 bp, Homo sapiens
tcaatcagctaccagtagatttaagtgatataatcaatatttattccagtagctgtatatagtactctgaaactaccaactggcaaatgtacatctgctcaagtaaaggaacacttatcaacatgtattattagkttattaaacaagtctctgtaagtaggaaagttgtcatatcatagacactatctattctgaccaaaatggagctaagtggtttctttacaaagataacaaatccaagatttttgaaaatttaaaaatgcttctaaaaaatccatgtactgaagaataaatcaaggtggaaattggaaaaaacgtaagcttaaatggtagtaaaatactacatatccaattatgtgtaacacagaaaaggagatattggtggcgattttgcagacttaaatatttatattagaaaataagaatggaaattaatgagttaaatgtcttaagaaattgcaaaaagaacaacagaatgcacaaagagaacaaagccaaaagttgatgttttgagattttaaagactgacactttgtaactagattgattttgcagga

SEQ ID NO: 852786 - DNA, 557 bp, Homo sapiens
tcaatcagctaccagtagatttaagtgatataatcaatatttattccagtagctgtatatagtactctgaaactaccaactggcaaatgtacatctgctcaagtaaaggaacacttatcaacatgtattattagtttattaaacaagtctctgtaagtaggaaagttgtcatatcatagacactatctattctgaccaaaatggagctaagtggtttctttacaaagataacaaatccaagatttttgaaaatttaaaaatgcttctaaaaaatccatgtactgaagaataaatcaaggtggaaattggaaaaaacgtaagcttaaatggtagtaaaatactacatatccaattatgtgtaacacagaaaaggagatattggtggcgattttgcagacttaaatatttatattagaaaataagaatggaaattaatgagttaaatgtcttaagaaattgcaaaaagaacaacagaatgcacaaagagaacaaagccaaaarttgatgttttgagattttaaagactgacactttgtaactagattgattttgcagga

SEQ ID NO: 852787 - DNA, 490 bp, Homo sapiens
ctccttgagtttgcagcatctgggaggctctgctcactaagttcagctggytttatgtcgtcatttattcaggccccaccttctaccaagagagaactgaaggaatccacaactatggctactgagatacagacaaggatgacataatgtttactttcttaattgtgtgtcttgccttccccaggaaaatttggcaggcaggcgtgggggttgttggttttgttttttattttttgttttaagagacagtgtctcgctgtgtggctcaggctggactcgaactcccaggctcaagccaccctccagcttcagcctcccaaatagcagggattacagatgcctgccaccaggcctggcctcccaggagaatgcacctgctgctgctgtcccatctgcacactcacaccatggctggcccacagagtgacatttccccaccacagcacaggctttggcagcttagaagcagacaagggcaaaagactgaata

SEQ ID NO: 852788 - DNA, 575 bp, Homo sapiens
gcacactttttttttttttttttttcctgagacggagtctcgctctgtcacccaggctggagtgcagtggcgtgatctcggctcactgcaacctccgcctcccgggttcacgccattctcctgcctcagcctccccagttgctgggactacaggagctcgccaccacgcccagctaattttttgtggtttttggtagagacagggtttcaccgtgttagccaggatggtctcaatctcctgacctcgtgatctgcctgcctcggcctcccaaagtgctgggattacaggcgtaagcccctgcgcccggcctagtgcatgcttttaagctccacgctacactattttgtatttaatttttttctttttgtgtcttctcatgcttgtttcctaactatactgttttttaatgcaactgacaatgtgtgtgagttatggcgtgcagagtcagagggatgatgagggaatggccaccatggggacgttatcctagaagaatgagtgggattttcttgccttcttttcccttgaacctcatattcccyttccagctctaagcactcaagatggagtggca

SEQ ID NO: 852789 - DNA, 581 bp, Homo sapiens
ctccaggaaggaaatataaatataaatatatatatttgaacaatcatatacatacatatgtatgtatgtgtatatgtatgtatatatatgtcatgtgccaatatacttcatagagttttttatgcctaagggaagttgtcagaaatgtcatgaggaatgacaagagtgtatgtatatatatgtcatgtgccaatgtacttcatagagttttttttatgcctaagggaagttgtcagaaatgtcatgaggaatgacaagaataataaaatgcataatccagatgtccaagtcatctacatctccatgtagtcaagattcttaaaaattgtggtggaaacagcagaaagggaacagaaagtgttcctgccctggatgaacactctcttaatcatactgtcaatttctttcttttctttaaatgtttactatttctggttataaaagtgacatatttgttgccaaaatattaaaaatacayaaataatctttttaaaagatattgttaccacccagaatttaaagtatattcctccaaaaacattttcatcttaacattatgatgaagaatgatcggcagctgt

SEQ ID NO: 852790 - DNA, 664 bp, Homo sapiens
aaaataaaaccctaaatggctctaatagttatgtattttattttgtctcagaggtttccaaacttytgcttttagcttccttttcactgggacaaatggatgtaagttattttccagtttcctgaaaaataatcagggactattttcttcatctatctcaggtgcttcatgagtttcctaagatattaattacggtttccatacattcagaatcaagggactcacggatatggtactgtgttcactgctacacagagtttttctagaaaaaaaaattctttatttttatcttctatttgtatccaaacgatggtaaaacaaaattcctctttagctaggtactgggattttttctttaggaaatactaatagagttacaaaggttagcttataggtagacaaagacataggcatagacataagcatagatatagagatacagtatttttgaaaccaatagtcagcaatacactgaattctggcacattatttcaataaaaagtttatgaaagacttaaaagaaatttaaaatattcctatcaaattgaacatacatttatattattattaataaaagtttccctcttccatttgttttaaatttacctacattatttttaacactaaactttaaatgagtatgtaaaattaaaattcatatgca

SEQ ID NO: 852791 - DNA, 659 bp, Homo sapiens
atctggagagaccacacacacacacacacacacactcacgcttatgcacataactgatgagaatgttcccaggccttggtaaccttccaacaaccattgttgccaactgctgtgccctttggtcccaaaccacctgcctggtgcaacacaagccagaaattccagctgagcatcccaggaccatcaaagtttacactagccaggtgacttccaagcctgagggaacagccagctcaaacgtttcactcgggatcacaccaaaaagcagctgcctgaataacaggaccataaccagctccactaagatttcccctctggataagaagggtcactggtgcagccaggatatgcgccgtgaggcaggaagaaatattcaggtaaaagaagcagagaatgtgatagtctatgtatttctttccggggaatttcaaaccttcttggacacaaagacctagacatgaccactgacatagcttctctttgcccctctacagctatcctaaatcataaaatagctagaacttatccaagatcacgcaactcyggaactctcactcttaagcatatactataccatgtcttgtgttaagatcccagggaaatcctcgtagtttgtatctcacatgctctcactgacacagagtaacccctcaatctct

SEQ ID NO: 852792 - DNA, 412 bp, Homo sapiens
attgccctcttctgttatatttacattttttactctcaatagagcacaaytgatacaaacctttggaaatactttaggaaaataaagaaaaaaactttattttttattcaaatgaatatagtgttgactttgtgccgggcactgttttaagggctttatatgtagtgattcatttaatccttacaatagtcctgtgagctaggtgctattattatctcattttatatataagaaaactaaggcacagaaaggttaagcaacctgtgtcgggtcacacagctcataaatggcacagcaaaggttaaaagtaggctgtctggctttccttctaggaatttcttctaagtgaatgattcaagacatagacaagggcttatatactaggatgaccagcactgtgtgttatatatga

SEQ ID NO: 852793 - DNA, 605 bp, Homo sapiens
ttaaaaggtgctaatacagcttcatattattaaacacaacctggtcagtttaaattcaggaaagcaggtgcatgtgccatgttaatgttatttaaattgtattatttaactggaactttctggcatttttactacgtaaagtaaaatgaataataaatttattcctaatctttataaattattgttgcatatctttgtacgtgtatattttattacataaatcgatataagcaaatactatgcatacttttattattattattattattattattattattattacctatgttttaaatggattatttggtaactcttgcatgagaaatcctgctctaggctttaaaacttttcaaataaaaaccagagtaagtaataaaagtaatatatttaccacaagcatatacatacacattcatacaaacactgaaaattttgcaagtttttcatttgcagtgtaacataaaaattataaagttcaatctgatgtattttattctcttccatttcaattataaatctgttcatagcscattgaattaattgaacagcctaatagtagtgaagccacacaatttgtaaaccactgcttgggagatcttgcc

SEQ ID NO: 852794 - DNA, 625 bp, Homo sapiens
cataatattaaaaatgcatccctttctactacttgatcaatagtactttccagttgattatcttgtctggctgaaatgtctgttatctttcattggctaattctcgagagtagactttaggatgttggtttggaaaacattttaaaaatgattatatctaactccttcaattttcggataagaacattgagtccagagaactcaatgatgataaatatcttagataacattatagacccagggctagaacttacagtgctttgaagcacaatctagcagtttttcaggtgaagtcttgatataaaagattcacaactataagaaacaagactttatttattctcaacaggtctccattttgctttttaaatgtaattattttctaaaaccatccctatgctcaaaagcttagaccctcctctcacttgtggagtaagctgcacggaatattgaatatagactgcatgtaccacagaaagtgggtttatagatytatcagtctcaattccttccacaaccacttattgactagctacagtgtgcctcctctgcggcaatggcaaaaataaaatggattgaatttctggccttgaggcgttcatgagagaattggatacctacataa

SEQ ID NO: 852795 - DNA, 621 bp, Homo sapiens
atttttcatttttttctaaagccaatttctgattattggcagttttgataaaaaragcagaggaaaaataaacttgctttctttcactgttttcccaaggattttgaaataatatagcttagaccatccacccttaaaaaagattattacagtctgaggactttggttcatttgccttttttttttaatttgattagcttcaagaccccatttacaatgcatatatacaaggttgttattgactctccagtagttagcttttctcatttccctaactcgtagataacactaacaaaaaatttagtggctggatcacggtggatgctaaaaaaaaaaaatgacaaatttaacaactattttcacccactattgggtctatgtttaatgctttgttttttgccaatgactagcactttacacattcgtgtctgtggaagaaattagcgcatgagagggtaaatggattttctagggttttgagtatttccacacaaagtatattgtttgacatcaacctgctgattgctaattatttttagtaggctaactaggctgtaaatatctttatatcattcctcagatcaataatttcatagttactaaaggagtgccttaaagatc

SEQ ID NO: 852796 - DNA, 597 bp, Homo sapiens
aaggatgttaaacaaatattgaggaaagaaagcatggttctgaagagtattgaagtaatktgttaataagttacaatgaaaaatatttgatttctacgttaaatttgctatatctcacaacagaaagcaagaagagcatcatgcaataaatatttattgagccattgctaaatgccaaagtgttcagaaagctcaagggaaagcaataaatagagctcataaaatcctgcccttgaggtgtttacattctagtgggcagaaacaaccaatatggaagtaaacaagaaaaatctataatatgtaagggatgaataagtgattagaataatgataatgcaattaaggagaaccagatgttgtatatgtatagggtggtcaggagatacctttgataagaaagtatttgagatatgaagaaaatgtaaaagtgaactttggtatatctgatgtattagtttattttcatgctgcttttaaaagcatacctgagactgggaggaaaaagaggtttaatggacatacagtttcatgtggctggggtggcctcaaaagcatggcagaaggcaaggaggagcaagtcacgtcttacatgcatgg

SEQ ID NO: 852797 - DNA, 597 bp, Homo sapiens
aaggatgttaaacaaatattgaggaaagaaagcatggttctgaagagtattgaagtaatttkttaataagttacaatgaaaaatatttgatttctacgttaaatttgctatatctcacaacagaaagcaagaagagcatcatgcaataaatatttattgagccattgctaaatgccaaagtgttcagaaagctcaagggaaagcaataaatagagctcataaaatcctgcccttgaggtgtttacattctagtgggcagaaacaaccaatatggaagtaaacaagaaaaatctataatatgtaagggatgaataagtgattagaataatgataatgcaattaaggagaaccagatgttgtatatgtatagggtggtcaggagatacctttgataagaaagtatttgagatatgaagaaaatgtaaaagtgaactttggtatatctgatgtattagtttattttcatgctgcttttaaaagcatacctgagactgggaggaaaaagaggtttaatggacatacagtttcatgtggctggggtggcctcaaaagcatggcagaaggcaaggaggagcaagtcacgtcttacatgcatgg

SEQ ID NO: 852798 - DNA, 646 bp, Homo sapiens
aatttatagattcagtgtcgttcctacaaaactaccaatgacattcttcacagagctggagaaaaaactattttaaaattcatacggaaccaaataagagcttgaatagccaagggaatcataagcaaaacgaacaaagctgaaggtgttatgctacctgacctcaaactacactacagggttacagtaaccaaaacagcatgatactagtacaaaaaaagacataccaaagaaacagaatagagaacccagaaataaggctgcacacttacaactttctgatctttgacaacaagcaatggggaaaggactccctattgaataaatggcactgggataactgtctagcaatatgcagaagaatgaaactgcaccccttccttacatcacatataaaaattaactcaagattcattaaagacttaaatgtacagctccaagccataaaaaccctggaagacaacctaggcaatatcattctggacagaggaactggcaacgatttcatgatgaagacaccaaaagcarttgcaacaaaagcaaaaattgacaaattggatctaattaaattaaagagcttctgcacagtgaaatagattattaacagagtgaacagacaaccttcaaaatgggagaaaatatttgc

SEQ ID NO: 852799 - DNA, 642 bp, Homo sapiens
tcaaggggcacaatttacattgtagtatatgtgaagttgtgcagggtttcagcacttctgccattttgtgcatgtcaactcatttaaaccttgtgaaagctcagtgaaggaagatgttatttttacagatgaggaaatagacctgggtcttgacttcagctccccaatgtattagctatgctatctttgaatgttacttaaccttgctgagcttagaagtccctccttattccactatcccacatggatgtcagatggcagccactgcagtataaatggcttccatggaaacaaaaactaaagaaattgtctaaatctgttttgtgttgctataggagataccacaaactgagtaatacaggcctatgaaggccctttaaaggcctatgaagccttgaccttggactaccctgcctctagaactgtaagaagtaaatcttcttacaaggtcaaatatcttgtgagggccttcttgctgtgtcatcccatggcagaaagcagaagggcaagagagcacrcacttgtgagagaggaagggagaccaacttacccttttatcaggaaaccactgtcatgataactaacctactcctacattaatgggattaatccatttatgtgggcagagcccttatgacttaa

SEQ ID NO: 852800 - DNA, 574 bp, Homo sapiens
tttgcaaattggcatatccttctgggagtatttatccaaactgataagcctgcctgtcttctttggcaaggtgaacctcttcaaccagaacaaaaataaaacagcattggtggagaaaataaagggatcactagcaataaaatatagggggtagggtggatgggaaaggtatgttgaagcttattgagatataaagttccaaaactgtttttaattaaaagaaaaattattttattttttaaatttttgacctatatcattcctgtatgatgatcaatgctaaaccagtaaaatttttcattaaagtttcttttctgaatttggctagagtaaaatattaagtaattaccctaataatgaggtgttctatttaattgtatgttaagtttaactgagtgtcatcttttgaaggttgttcttttgattagatacatgagaaataaaatatttgaawtaactttatactttggtcatttactccattttcttaaaatttgaaaattgagaaaattttacaatgtacataatggaattcccatctcttgaagtattttaaatatctggtccaacacaa

SEQ ID NO: 852801 - DNA, 656 bp, Homo sapiens
gatgaaagcatccgagggagaaaatgaatttcaggcatcctactgaagtctatttcatttttacagtctggtcacccccctgtggcaggggcagtgcctgggaggaacrggctgcctcctgactgacagctgacaagtgaggctcctcttggaagccttggctccggggcctaatcaagaaacaagagctgaagcagattcctagcttctccggcactgctcgaggtaccactgaagatgccgccaaggccacggcaggttttctgtctgggaggctgggcctgcctgagcaggcatttgtaatcaaggtcattcttaaaaccaaaggcagagctgagcatttggcagggagtgtgtgaaaggaaggagagaaggagagaaggagagaaagaaaggtaaataggaaaacgaggaaaaaaaaatggaagagaagagatccctatataattcccagatgctggtgtttccgggtggaggagcccagacaccctcaaagggatggcagctggccacaacaaggctgctcagagcagtgagttcatcaccctgggtttgagcaagcataaagcgagagttagaaagtcatgaaataataataatatttttaatatgacaacctgaatgtcacagcaaccaaaccaaattctttagctata

SEQ ID NO: 852802 - DNA, 552 bp, Homo sapiens
ctgcagagccacaggagcagagctgccaaggccttggaaacccaatccttgcatcagtgcaccctagatgtgagacatggagtcaaagaagattattttggagctgtaaaatttaatgactgccttgttggctttcagacttgcatggggcttgtgactcctttgttttgtctaatttcttccattttgaatgggaacatttacccaatgcctgtacccccattgtatcttggaggtacttaacttgttttttattttacagtctsataggcagaacggacttgccttgtctcagatgagactttgtacttggacttttgagttaatgttggaatgagttaagactttgggggactgttgggaaggcatgataggttatgaaatgtgaaaaggacatgaaatttgggaggggctagggcagaataatatggtttggctctgtggctccacccaaatctcatctgaaattgtaatccttacgtatcgatggagggacctggtgggaggtaattggatcatggggcagtttcccccatgccattcttgtgatac

SEQ ID NO: 852803 - DNA, 591 bp, Homo sapiens
tatgcctgccaaaatgcctcctctctattaagacagcagcactcaatcaaggcacacattctggctgaacccagattcagcctcaaaatctaactcagcacatcaagcagttcttctcaattgatcaagctgagcatttgagataaaacctacttgctactcctggcataatcatgccaacttgttaactttctctcttcctcctgtgaccctattatctcccatttcctgtgaaagcctcaacttcttttcactttccccgactcctacaccaatacgatcaaaggtacccatatttgtcctgtcccttagttttcactgacgcctttgtcccctttgtttttaaattcctgaagcagaaccatataagagaaaaagtcccggatgaggaatccagggccttgattctaagccccactttgcacaggttgagtgccccttatccaaaatgcctgagaccaggccaggcgtggtggctcaygcctcccaaagtgctggggaggccaaggcaggcagatcatttgagatcaggagttcaacaccagcgtggtcaatgtggtgaaaccccgtctctactaaaaatagaaaaaa

SEQ ID NO: 852804 - DNA, 453 bp, Homo sapiens
gcctcctgggttcacgcccttctcctgcctcagcctccccagcagctgggactgagaagtgataacgtactagcagccctcgctcactctcggygccgcctcagcctcggcgtccactctcgccacgcttgatgagcccttcagctcgtcactgcactgtgggagcccctctccgggctggccaaggccggagctggctccccctgcttgcgggatgtgtggaggaaaaggcacaggcaggaactggggctgtccatggcactcgcaggccagcgaaagttccgagtgggcacaggctcagcaggtcccgcacgcagagcggcagaccggcgggcagtaagggccttagcacccggcccagcagctgtgaagggtgtgccaggtcccccagcactgccacctgcccgtgctgcccttaaattctcgccggtctcagctgccttcctacggggg

SEQ ID NO: 852805 - DNA, 537 bp, Homo sapiens
accccacaggggcaccagcaggtccagcctgcagtatgtgcagccctgatgcagagccctgttctggccacactaaagctgtcattctgtaaatgggttaatttttccaaggccagaacctgaagtggtctargaggcatcatttttcctttacagtggtggtaagtgcaagatacaataattaattctttactttgcaggggatttccctgcatgccctagaacactagatcctaaaaaccactaagttggcaggttcagatcttggtaggatttctctctcaccgtctgaacacatcttttactaaggctttttttttttttttttttttttttttttttgagataagagtcttgctctgtcacccagtctggagtgcaatggagcgatctcggctcactgcaatctccacctcccaggttcaagctattctcctgcctcagtctctggagtagttgggattacaggcgcctgcctaattttttttttttttttttttttgggacaggtattcaccatgttggtcaggctggtca

SEQ ID NO: 852806 - DNA, 537 bp, Homo sapiens
accccacaggggcaccagcaggtccagcctgcagtatgtgcagccctgatgcagagccctgttctggccacactaaagctgtcattctgtaaatgggttaatttttccaaggccagaacctgaagtggtctaggaggcatcatttttcctttacagtggtggtaagtgcaagatacaataattaattctttactttgcaggggatttccctgcatgccctagaacactagatcctaaaaaccactaagttggcaggttcagatcttggtaggatttctctctcaccgtctgaacacatcttttactaaggctttttttttttttttttttttttttttttttgagataagagtcttgctctgtcacccagtctggagtgcaatggagcgatctcggctcactgcaatctccacctcccrggttcaagctattctcctgcctcagtctctggagtagttgggattacaggcgcctgcctaattttttttttttttttttttttgggacaggtattcaccatgttggtcaggctggtca

SEQ ID NO: 852807 - DNA, 626 bp, Homo sapiens
atcatcttcttcatttgacatcgaaatcaatttgtatattttaaaagcagagatcagccatagtaattccagttatattttatgagccaaaataatagcatgcctttaatctgccactttgtttggaagtcttattttcagaaactatgaataaatcttctacaccatcttcccgagagctttagtaagacctcagactggagtagagttgaaggagggaatgccagtctgaagaaggaaaggaagaggagagacagcaaggagaacttcagttgtcaaggtatcgggtgcaggggtcagaaagaaacatgactccatggaccactgcttggcccaagaccagatgtcaaaaccacagagccctgctgtagagcattacaaatgtattccaccaaatgttgggatgcatcctagacctgtgctggccagcagtccccagctgtgaggagaagcccgccatttgagttgatcacttggcagagttgatcatcataaaattatccttgtagagctaaataaggtttgtctttgacattcagtctggtttataggatagcaaaagggaartggcctcagctagtagatttgaaaagcaaaagtaggaataatgcttttcagatactaat

SEQ ID NO: 852808 - DNA, 647 bp, Homo sapiens
ccttcatcgtaccaccttctgagttggttttcctgatcttcatggatcctgatatctgctargatacacttagctttgaaatcactgaaataacgatacataaagctgatgcctgtcaatctcaaactcatgggatcattatgaggataaactgagttagcaggcatgaatggattgtgaaatctatttattttttattttttgagacggggtcttgctctgtcgcccaggctggagtgcaatggcatgatctcggctcactgcaagctccgcctcccgggttcaccgcattctcttgcttcagcctcccgagtagctgggactacaggcgcccgccaccacgcccggctaatgttttgtatttttagtagagacagggtttcactgtgttaaccaggatggtcttgatctcctgaccttgtgatttgcccgcctcagtctcccaaagtgctgggattacaggaatgagccaccgcgcccagccgtgaaatctattatatactaaatggtaagtcacaaaaataaaaaagacagtcttttaaacacaatcttttttcacaataaatactacatcaatatatacactgatttcctcaattatgatgagctaaaatgatcactcatattaatgcatcaaagaacatttt

SEQ ID NO: 852809 - DNA, 605 bp, Homo sapiens
gctaaatgttatcttattgctgcttccctagttatttaaaatatatatcaatatccagtaataaaagattaaaagctaaccatttctctgttaataaatggtcaagagtatgggtcatcaggtacgtttatttaggtaattttagagtttttctctttgctttgtttttgtcaatatccagcaagagaaattaaacacttcacatagtgtagtaacattgtactagttttctatttctgtgtaacaaatttccaatgaatgatcactaactgcttaatgacaaaacacagcagttaaacaatatagatgctttttgatttatgaagagagctgaaaatgcatttaatacacctcacccatctaatgcatagcttggtttagcccaccttaaatatgctcagaacccttacatcaacctacagttgggcaaaatcatcaaacacaaagcctattttacagtgttgagagtctataaaatgcaaatggratttcagaaaataccactacaagggtgatattttaataaccctccatgaccactgtgcattcacagacagcctgtggtcacttgcatatctgcattctttcctaagttttaaaaatcc

SEQ ID NO: 852810 - DNA, 620 bp, Homo sapiens
actgagtaaaactttataacataaattaagaatttgaaaaagttcagagtttatttcatcattaaaggtaataaaactttatagtttcaatatgaaattatgtcagttttgaaaactattcatgacaattcatggtgaagaagttttaggttcactgaattgggccagatgtgttggcttacgcctgtaatcccagcactttgggaggccgaggcaggcagataacaaagtcaggagttcaagaccagcctgatcaacctggtgaaaccccgtctctactaaaaatacaaaaattagccaggcatggtggcacacacctgcaatcccagctactcgggaggctgaggcaggagaaacaccggaacccaggaaatggaggttgcagtgagccgagatagtgccaccgcactccttcctgggtgacagagcaagactctgtctccaaaaaaaaaaagttttaggttaactgaatatacatgttatatattgcagaaagacatagcttaaaaccccataaccaagaaacttcgtgacttctaattcaagttatttcatgttaygaattcatatgtatgtaaaagtgattcttatatacaaagactgaaataataacttacaac

SEQ ID NO: 852811 - DNA, 470 bp, Homo sapiens
tgtatctagctcaaggtttgtaaacacaccaatcagcaccctgtgtttagctcaaggtttgtgaatgcaccaatcgacactctgtatctagatgctctggtggggccttggagaacctgtgtgtccaaattctgtatctaactaatctgatggggacttggagaacctttgtatctagctcagggattgtaaacgcaccaatcagcgccctgacaaaacaggccactcagctctaccaatcagcaggatgtgggtggggccagataagagaataaaagcaggctgcccgagccagcattggcaacccaatcgggtccacttctgcattgtggaagctttgttcttttgctttttgcaataaattttgctactgttaatgctttgggtccacgctgcttttatgagcrgtaacactcaccgcgaagatgtgcagcttcactcctgagcccagtaagatcacgagcccacca

SEQ ID NO: 852812 - DNA, 249 bp, Homo sapiens
ctttactaaaatatatcttaaatctatccacattatttacttcttctaccactatcttattgcaaaccataaaaaccctgaattattaaattggttctacctttccctattttttaaatttatgtctctgtattccaatygtcacacagcagtgagagggacttttaaaataaaaccgagaatgattttactcccagacttaaaactgccaatttcttatcatcaatcttagaattaaagtaaactttt

SEQ ID NO: 852813 - DNA, 656 bp, Homo sapiens
ttgtgtgcccccaagaaacctgggatcctgggaaacaccattatcagacagtgcctgctcaccaaaagtcctcctgcccaacagcttcctgagccatattgaaacccaggtttgcctgactccaaagcctgtgcttgaaaccactgtgccccacagcctccagcaccgtcagcaatgagaatccccagataagatgaaaacagcgcttccagccaggagagcaaggcccacggctgcagcaggaagagccacaggaggaactgggctcggtttcatgaggaggcaattatggttgtcagaggcacctcagaggctggatgatacatgtgtgaacattccttcattcattcctagaaatgagacattacagaatatggttgaagcaaagggtctagcatcagacagagctgggtttaaatcttggctctgccactcaaatgccaggtaaccttagtcaagccatctgaactgcctcactttcactcaactgtaaattgagaatgatcgtatccctattttaaaggttgttgtgaagattaaatgagataatgtrtataacagttattagaccctcacaaaagtcttacaaggtagatattttattcccattttacatttgagaaaactgaggcactaggaaggaaaaaaatgtttcc

SEQ ID NO: 852814 - DNA, 635 bp, Homo sapiens
atgactctggggatgaagaaattaatatatcccagggataggagcttataatgtcaagaatgataatagcaactcacatgtgaatatcattctcataaawcttgaaataaaacactttcaagaaaattaatttatttctaacatcgatcccgtgaggtcaataacctcatcccacttttacagaaggggaaggcagggcttcaagtcacatgcatctgtccactctaagtccagcgccactcctcaagcacacacactccggataatgagctcttggacaatggcgagtgtacaaacagaacctgtacttctgccctgggtgggagtctagaccagctgctctttgagtctgatctaactttgagatggtaaaattctgcaagtcagtggcaggactggctgcctcatggggctgacaggctgagctgtgggtggtcaggaatgtttcaggacttcctgtgcccagtgttccaagtcggagtgtctagattaatgatccatctccaagcagaccaagccgaggccctgacgccaagtgtggggcattgattagactttacactctgagcttgctttcatcttaagccctccatgtgggctgggccctaataattaacattctctgagccccacaa

SEQ ID NO: 852815 - DNA, 578 bp, Homo sapiens
cactctgctgagaaactttacgtggattatctcatggtatcatctaatttgatcttcataagagctttakgagtagagtgaacgtataatttatcatacaaactaagacacttctgtgagtaaaagggcactctattaataattacacagagacaacaggcagaaactgggacgtctcaggcaagccaggacagatggacaccctgtctacaaggcccatattcaagaatctggttttagaaatgagaaaatggagtcatgaggaagttaagcaccacacccaaatttccaccactcttcagagcagggcttcaaaccagcccatctgactccaatcacacggacacaagtaatgacaattcaaggtgaaacaaggttttctacaagaaaagggtgagacctggttcaggctggaagttgaagcaggaagagagggcagcaacagggcaagggaggccagccaggacagaggcacctgagctgagagcaggtgggaaagggtgcctcggggacacaggatgtgcagcaggtggaggcagaagagggagggagttgtttggagaagagggaggagctgg

SEQ ID NO: 852816 - DNA, 573 bp, Homo sapiens
ctgttaatttttgaatatggtattatataagggtccaacttcattcttcatgtggatatccagtttttccagaatcatttattgaaatgactctccttttcccagtgaacgctcttaacacccatgtcaaagattctttaaccattttgtaaaggtttatttctgggctctattatattccaatggtctatgtttctttttctatgtcagtatcacactgttttgattactgtagctttgtagtaggtctggaattagaaagtgtgagtcttctggctttgttcttcttttactttttaaaaattgaatccaatatattacgtttttatggggtacatgtggtattttgtgtgtaataatcaagtcagggtttgtgacaggtccatcactttgagtatttatcatttgtatctgttgagaacaatttatctcttctagctaytttaaaacatataatacattgttattgaccctactctgtagttgagcaatagaacttatatttttatttacgagcacgtgcgtgcccattaagctacctctcttaattcccccttgaatcccctcatccca

SEQ ID NO: 852817 - DNA, 600 bp, Homo sapiens
ctagtttgctaaggataatggcctccagctcyatttatcttctcacaaaagacacaatcttgttcttttttatggcttcatagtattccatggtgtacatgtaccacattttctttatccagtctgtcactgatgggcatttaggttgattccatgtctttgccattgtgaatagtgctgcaatgaacatttgtatatgtgtctttatagtagaatgacttatattcttctcagtataagtaacgggattgctgggtcaaatggtagttctgtttttagctctttgaggaattaccacactgctttccacaaaggtttaactaatttacactcccaccaacggtgtataaatgttcccttttctctgcaacctcaccagcatctgttattttttgattttttaataatggccattctgactgatgtgaaatggtatctcatttgatttgcatttctctaatgatcagtgatattgagctttttaatatatgcttgttggccatgtgtatgtcttcttttgaaaagtgtctgtttatgtcctttgtccacttttcaatggggttttttttcttgtaaatttgtttaaattccttatagatg

SEQ ID NO: 852818 - DNA, 643 bp, Homo sapiens
tatctaatggtaacatatatatwtatatatatatatatatagacacacacatctatacatatatatgttatatatataagaatatatatatatgttcttacatgtttcaacagtgtttaatatgcttgtgaccttaaaaataattcaaaaatgtcaaaattatgggccctattcatttttgtgggcttcaaattgacacaatataggttatttatttctaaacaatagcaacaaatgtttttcttacatgaattttctatttctctgtaacatcagaaaactatttagaaaatgaaaagatattaccagaaataagacataaagaatgttttgttattaagacatgccttcaagataatgagaattaaactgacaaaaggacatcttggcaaaatgctctccagtgcatttgattcatatgataaagataaaggaaatgaataagttattacaatcttggaagataatattacaatgctttgtatactcccttccatattaattctaatttctatcatctgttatacaacatgaatgtaacttggaatctctcaggaaacattttgcaatgattggaaggcactttatttatcaatattcacatgaaaattacaaaaactcccttgagcaagttacctttctt

SEQ ID NO: 852819 - DNA, 603 bp, Homo sapiens
ataacattttatttgacagtctatgatagatttcctatgagtggctaatcttcaattccttccatgtctaacttctaagatattgaagttccrttgtttccttcaaaatgaatcaaagtattttatattattctttactcatcagggtacaatagcaaacatcttttatgctgtgcaaaaaaatctgtgctttaatttattataaaaaaagtctgtagtgaaatgtacgggagaagaatgtatccataagatccagatttctgggggaaaaaaagcttttagagaaatttctgttggttgaaggaagattaactctaggtggaagaacaggtaaaaggagatcagcaatgttatggtaatgacaggaggaaacgggggttggggaagagggacagattaaagaacacagaggcagaaaacgtagttaagtaaaatgcctggctaagtaagaacatctctttggtagaagggaacttatcttgtgacttcttagagttcataactttagagaaatgaagagaataaaaaattcagaaattaaaatgaaattataatataaggtggtgccaaacttaatcatcataaatcataatgtcatttggt

SEQ ID NO: 852820 - DNA, 686 bp, Homo sapiens
tacttctcacagaagtcaggatccacacctgcagactatacagagacaaacaacacagattaataacacaattatcattgaaatcaaagggcttccaagtgtttttatccattttaatgggttactagctgttaatctgtctgcagctccttcaagcactccagttcctggcattaaggtcaggtgtgcctgggatgctttaaatatttgttcttttaattttgcaatatccaaagacaagtttgtagagtgtccttttagatggttttttattctttcccaaatttggatcttattaagagccattaatagtttccacaaatccttatgtttagctcctacagcgggccatatcatttgagattgaggtgccactctaccaccatgtttccagataataggaactcttgtcatacttcttaccatttctaccatctgaccattttgttcaaaccagctgaacatagtgtggccatgacacgcaaactgagaggtgcaattcaagctaaacatccccttatgggaccaatcagtaatgattccataagaatcattgcgcagcacctcttcctgttctgcaatgcaaycttcctaaacaagtacgttcattttctctggccaggttcaattttgtttacacataggtttctgagggtggtatgcctcaactataggagcagatttat

SEQ ID NO: 852821 - DNA, 633 bp, Homo sapiens
taatcccattactaggtatatacccagaggaatataaatcattctattacaaagatacatgcacctgtatgttcactgcaccactattcacaatagcaaagacagaatcaacccacatgcccatcagtgatagactggataaagaaaataagcagccataaaaagaaatgaaatcatgtcctttgcagggacatggatggagctggaagccattatcctcagcaaactaacacaggaacagaaaaccaaacaccacatgttctcacttataagtggtagataaacaatgagaacacatggacacaaagaggggaacaatacacactggggcctgtcagggggttggagggagggagagcattaggataaatagctaatgcatgtggggcttaatacctaggtaatagattgataggtgcagcaaatcactatggcacacgtttacctatgtaacaaacctgcacgtcctgcacatgtatcttggaacttaaattaaatgaaatttaaaaagaaaaaaagatcaagcatgggaacattctggcattctaggaaatttctctgggagtctggatgatagtatcacttcttcccaaaacctttyccggatccctctctttaatataccttcagtaa

SEQ ID NO: 852822 - DNA, 615 bp, Homo sapiens
tgttgttttacttcttctttgatggctctttcccttaggaagtcatataaacatgagccatacactaacttaggcaaagattatcagagggaaactagagaaaaaagactatatacattttttaattttcaagtttcaaagctgtggtccaagtgtaaaacaaaaaatattttagaactgatccaggtcatttcttgctgcttgctgttagatcaaaaattccgtggacttcaaaatgggtttaaagggaggactggactatgtgtgtggtaatcataaagaaactcacagctccactttcacaagtgccaattttccccaggaatgtcatcggagccattgtctataaaccagcagtctctatacaagagctcagtaccttatccttgccaaggctatcttaagtctagatgtccctaactggtgtctgacttccctctgtggaagtttaaatttcactcaacagtaaagcctgtacttgtcctgaaatatggctcattcactgtttcatgtatgctgtgtagactacatattttccaatgatctaggaaaatatttttaagatgctcrtaacagaggcaaaactttggatccctaggaaggcagttgtactag

SEQ ID NO: 852823 - DNA, 582 bp, Homo sapiens
ctagttttgtccacttcctttttctctttctcctgtcctgggattatctttcacaataaataaagcatcaaactctattttgccttcaagctctttattctaaggarcctgccagacaaagacattccctaagaccaaagttacatcactagaatgcagcaggtttcatgactgagtacaagaaatgaaatcccatttagcataaatccaataggtggcagtcagagaaacaaagatttacatttaagtatactaatcaaatatctgtttaaaaataagatagctgtagtgtttacccactaaaattctttacacaatcagcatctttttgaaatagtattattttaattaaaatatttgaaactcaatttaaaagtaatattctattccatgcacaggaattctgcagaataaatagcacatattctatgcagcaagcaaaaataatggtaattaatatagaacagacaaaggaatcccctttacaaaagaagccacttggaatcataagtgcccttttaacttgtacattttataatagacttcattatgcaacctccaaagatttttctaaggtcaaaa

SEQ ID NO: 852824 - DNA, 627 bp, Homo sapiens
atgcagggatatagtatgtcagatcaggaacaaaaaggagcataacattgaatcaggatgaatttatccaaatgggttkacttacatagaaattctggactgtagattcattatgttatcttgataactagaaatgaagaataagtttggtttaacttaagcacagattcatacatggcctatattaaatgggtttgaagtagcacagctccatgtaatatatgggaaggaatcacaaagcttatggagataggactacccatgtgcctgcaaactgcttaacatccaaaaaagcattttacgtggattgaccaaaaaaatatttcttcaaaaggcattaggaaatgcattgaggatatggcacggtgtggggataatatctttgagaagttttgcaatgtctccccactactagcagaatataattgtgagagatgccactgttcaaatgggtttcccgatttcagtgacataaatttctgaagcgacaaaaggcaagctgcatatctttggcactggagacaacgtaggcaagcttactggaatgaaaagagggttgatttagtaagcagaatgttttaacctgcaaatgtttttgtcagtggctaatggatcatgatatgctga

SEQ ID NO: 852825 - DNA, 627 bp, Homo sapiens
atgcagggatatagtatgtcagatcaggaacaaaaaggagcataacattgaatcaggatgaatttatccaaatgggtttacttacatagaaattctggactgtagattcattrtgttatcttgataactagaaatgaagaataagtttggtttaacttaagcacagattcatacatggcctatattaaatgggtttgaagtagcacagctccatgtaatatatgggaaggaatcacaaagcttatggagataggactacccatgtgcctgcaaactgcttaacatccaaaaaagcattttacgtggattgaccaaaaaaatatttcttcaaaaggcattaggaaatgcattgaggatatggcacggtgtggggataatatctttgagaagttttgcaatgtctccccactactagcagaatataattgtgagagatgccactgttcaaatgggtttcccgatttcagtgacataaatttctgaagcgacaaaaggcaagctgcatatctttggcactggagacaacgtaggcaagcttactggaatgaaaagagggttgatttagtaagcagaatgttttaacctgcaaatgtttttgtcagtggctaatggatcatgatatgctga

SEQ ID NO: 852826 - DNA, 641 bp, Homo sapiens
tatataaaatgtcctcttctagagttttctgtttccttggtttcctaaggcagttaattcattcctaaagattattctcaaaacattgtattgtggtctagtttttaatttttatttttccattttcctatcaagcccattaaagatcaccatttaaaaacattctgtactctataaagaattgataagaaaagttgattatggattcttactgtttttattataatttatcaaattataatgatcattattcacataataaaaaattccaatatttcttgtaccttactccacaagagctatgaagttgatcttatttggtaccatgaggtgtctacaaattaatatttttaatccaaacaataggacacattttatccagctattaatattgaagaacttatagcttttaagttggagaaagggctaacatttattgagcaacttctttgaagagactagcacaatatgcatttcacatacattacttcatttaacagatccaattctgtgaggcaggtgttaatatccccatttagcagacaagaacatgaaacttaagataagtaacttgtcaggttaaaagtctgattctaatgccwatgcacttgccactactctttcattatttttgcaaatat

SEQ ID NO: 852827 - DNA, 469 bp, Homo sapiens
ccttgcgcttgggaaaaatctagacacatcaccagtaaggaaagggtgaagagtgtgcttatcaactgctcctttgactaccccttasaattgttcttatcatctccaaccccacactcactataccccagaccttctttctcttagaacagaaactttagtgcctttgcactggaggtggcctctgcatcttttaagcctaaactgtgtgaatttttatcatttaaatgcaacaattgcttatttactgttgcttcaaatctgtgatttttgtactatatttgaccatgtaagtatttcttcaaccgtagcttaatgtgaaatctaataaactgcaatgatagttggatccctttgtgagaccacatccctcaaatcactgttgtattccataggtggtctgaaggggatttgtacaatctccagaaaaatgccttttcaaacattatgctgtagtatatattatgta

SEQ ID NO: 852828 - DNA, 601 bp, Homo sapiens
aagattggaactgaggtgaaagactaaaatacagctattgtgtattgtgataaagtacaaatactgtaggagaagggaaaaaagtcgatatgcctatattgctgtataggtattaagtagattttaaaagatcaaaatcctgattttgtgaaaaagttaacaaaataagtaaaccattagctaacttgacccaaaaaggggaaaatgtacacatatataaaataagatatgaaaagaggaaaacatcattgaaagagaacaaattcttaaaatcataagagtctaatttgcagacttccatgcaaatacattcaaaaacctagttaaagtagataattttctagaaaaatacatattgatctcattagggttacaaatcagataaatttccatctaagaaatagaaaaagttattaagaaactccccctacaaaaacatcactaggcacagatgatttcacaagagaattctaccaaacctttaaataccagctagttccaatgctrtataaattgctccaaagcattcagaataaaggaaaacttcctaatcctttttatgaaacaactataatgctcacacctaaacagataaagaaaa

SEQ ID NO: 852829 - DNA, 647 bp, Homo sapiens
atgatttcatcctgtataatgccagattagctcgatgaygaaaaatgttacactaggagctctttgatacacactggagagctcttacccaaaatgttattttccctttggactttcctgtgttgataagttctgtttgcttccaactgtggttcactcttctggatctttttctcagagacctaagtgatcatcatttccagagatatttgtggtacaaattctttattttcaagttctgaaaacctcatgctaaaaagttaccctttatttctcacttttaaaagcctgaatgggcacccttcctcatttttcatgaagttaaagtattgtcacaattcaaattccctagatgaatcccttaaagaatcaccacgcagtgttgactctccaatgtgcacacctgaccagcaggacatgtatgtttattccaaatatttgagttcttttccttgatcttttcataagttgctctcactgcagtcccctgatggctttaaatcttcgtactttgctcacaatttctcagagtagaatatttttagagaaagatctagacatctctgctttttctaggaaaaacaaaaacataaaaactaaaaaccctgcaactctcaggatagactggattatgctgaggtaataaa

SEQ ID NO: 852830 - DNA, 470 bp, Homo sapiens
tatttttaggcttatatattatttttagcattaatctttagccagatccacagaaggcttaattaggattacagaaaagaccataaatgctatccattttgacaatgtacatgtataaacagggttgacagatactgggatgtgaaacgggggcatggaggaagagtgaaagataaggataacaatattcttatctaacgtatataaatgtgctgaaacaggaaaaaggcattggatatattatttgacattacaaatgtaaccggtaagacagcctaagctataagtcttagcaattgggaagaggaaaatagataaagaggaaggaggaaatgtaaggtaattaaatattattcagagcagggagtgaatagtkattgtttaaagttggtagaaagagaaatagtgatataaccctgttagagttaaaaaggtaagtgccagaaaatccccccccagataaacaaaaa

SEQ ID NO: 852831 - DNA, 669 bp, Homo sapiens
tggtcatggtggctcatgccataatcccagcactttgagaggctaaggcaggaggatctcttgaggccaggagtttgagaccagcctggataacatagtgagaccccrtctttattttatttcaataaataaataaaacctgttttacatgataaatatataccttttttgtcaattaaaataatttaaaaatactacttaaggtcttgggaatacactcacaatgtattggtagttaaaatttttttttttttttttttttttttttttttttttaccagttgctgtggctcacttctataatcccagcactttgggaggccaaggtgataggattgcttgagcctcggagtttgagaccagcttgagcaacatagcgagatcccgtcattatatttttcaaaattaaaaaggaaagttttcagaaggttaaaaaaaaaattgaggcaaaattcactactttaaagtgtacaattcagtgttggcttactattgaccttggggagagtgcagaccatgtgcagactgaacatcttaatttttttctaaggagaagctagaaatcaagattttgtaagaaatttttattgttaaatgttggcaacttatgaattcatagtgtaaacactgtgggccaaacaaattaccactgtgggcagaatttgtctt

SEQ ID NO: 852832 - DNA, 642 bp, Homo sapiens
gaaatatataagcaatccaactgcatctcaccaccttcatctaaactgtcacttctcaggctgggcgcrgtggctcacagcctgtaatcccagcactttgggaggccaaggtgggcggatcacccgaggtcagaagttcgagagcagcctggccaacatggtgaaatcccatctctactaaaaatacaaaaattagttgggcgtggtggtgggcacttataatcccacctactcaggaggctgaggcaggagaattgcttgaacctgggaggcggaggtggcagtgagctaaaatagcaccactgcactccaacctgggtgagagggagactctgtctccaaaaaaaacaataaagaaataaatacactgccacttctcagttggacactgccacactctcttcactggtcccatgctctaacatgccattctccccacagcagccagaagagggaggctcttaaaaatttaagttacatcacctccatcattctactaaagtaaacaaaactaaacaagcaaaccctccaatggcttccctcaatcttcgggccctatctgcatgactgcctgcccctcctccatctctccactttccccactcactagctgttcaacacacaggcttcctgactgacttc

SEQ ID NO: 852833 - DNA, 642 bp, Homo sapiens
gaaatatataagcaatccaactgcatctcaccaccttcatctaaactgtcacttctcaggctgggcgcggtggctcacagcctgtaatcccagcactttgrgaggccaaggtgggcggatcacccgaggtcagaagttcgagagcagcctggccaacatggtgaaatcccatctctactaaaaatacaaaaattagttgggcgtggtggtgggcacttataatcccacctactcaggaggctgaggcaggagaattgcttgaacctgggaggcggaggtggcagtgagctaaaatagcaccactgcactccaacctgggtgagagggagactctgtctccaaaaaaaacaataaagaaataaatacactgccacttctcagttggacactgccacactctcttcactggtcccatgctctaacatgccattctccccacagcagccagaagagggaggctcttaaaaatttaagttacatcacctccatcattctactaaagtaaacaaaactaaacaagcaaaccctccaatggcttccctcaatcttcgggccctatctgcatgactgcctgcccctcctccatctctccactttccccactcactagctgttcaacacacaggcttcctgactgacttc

SEQ ID NO: 852834 - DNA, 637 bp, Homo sapiens
gtcctctacacacacgtgcaggcgttaaggaggcaagcaggtgaggggaaaggaacacaagttgacctgcccagcctgacaattctgaagaaagactgttwaccggggcatgaggaaaaagaagaaaagctgcggcagagtctcttcggaggcagcacccaaggcatccgttgtactcggggcccagcctttcctcccctgagtcctccaccaagtccacagcaagcaacgattcaccagaaaaaaacagaagacacaggaacagaagagctgctgatcactggctttggtgcttaagtgatgaggcattttcagtcacactcacactgatctggctcctgggaggagacgccacggcatcctcccagggtgaggctctgatgaggctgcacatggacagggtcccctctcaggtgggaaaggcagcatcctgccattggaggcgtgggtctggagagtttctacccaattcctccctcaatcatacctggaggtgacagctacccccaccactgctcctccaaaggcctcgagataaaaatccctgaaaagggggcaggggtgcttccaggtcaagctgtgcggcttccaaactattagctgttgtacaggggtatcacccgggtgattgcctgtc

SEQ ID NO: 852835 - DNA, 637 bp, Homo sapiens
gtcctctacacacacgtgcaggcgttaaggaggcaagcaggtgaggggaaaggaacacaagttgacctgcccagcctgacaattctgaagaaagactgttamccggggcatgaggaaaaagaagaaaagctgcggcagagtctcttcggaggcagcacccaaggcatccgttgtactcggggcccagcctttcctcccctgagtcctccaccaagtccacagcaagcaacgattcaccagaaaaaaacagaagacacaggaacagaagagctgctgatcactggctttggtgcttaagtgatgaggcattttcagtcacactcacactgatctggctcctgggaggagacgccacggcatcctcccagggtgaggctctgatgaggctgcacatggacagggtcccctctcaggtgggaaaggcagcatcctgccattggaggcgtgggtctggagagtttctacccaattcctccctcaatcatacctggaggtgacagctacccccaccactgctcctccaaaggcctcgagataaaaatccctgaaaagggggcaggggtgcttccaggtcaagctgtgcggcttccaaactattagctgttgtacaggggtatcacccgggtgattgcctgtc

SEQ ID NO: 852836 - DNA, 540 bp, Homo sapiens
aaaaaaaaaaggaaaaatcaaaagaaattccaatggaatttacaaaaacaaattctattagaactggcaagtgaatttagtaaggctgcagaatttaggtcaatatayagaaatcaattgtatttctatatgttaacaaaaaacaattataaagtgtaattttaaaacaataccacatataatagcaacacaaaacgttgaacacattggaatgattctagcaaaagacgcacaagacctttacacggaaaactacaaaaatttctaagagatattaaagagcatttaaataagtgaaaagatacctcatgttcataaatcgaaggactcaacactcttttgtccatttgacccaagttgatctctttaatacgttctcaaacaaatcccagcagactgcttatgaagacattgacaagctgaggaagaacaaaattaaaggatgtatactacttcattcaaaactaaccataaagtaatattatgacagtgtgctattgctacatagatagacaaatcaatcagtgtaacagaatagag

SEQ ID NO: 852837 - DNA, 520 bp, Homo sapiens
actaactttaattctacacaactatatcatttagcaattaaatatatacatagtcatagtccactatcattttcagttgtttcagggtattattcctctttcctctattaaactataaattgttgaagtgagaggatctatattttgtatctcaaaaatgcagaataattaactatatacctaatatgtatgtattgacccattgcctattggaagttttgacaaaataatcttgtttctgagaaagaggatcaaaattctcatagcataatccaagaccatctctatttcctttctaccatgaaatgctatcccccttgacccctcttcatgaaggaatcttcttctaaatgtttcagttacaagaataataccccagcaatagcagacatcagatctactacttggaaatgtctttccttaaaaaaaaaaaaaaaaaaaaaaaaaaaggatctagagttacattaggtatacacatggcttccttacckatcttccagatacagataaatatagctac

SEQ ID NO: 852838 - DNA, 608 bp, Homo sapiens
ctgtctattttatcatcctcctggtgagttccatttgcttctctgcagagtgcaggtgcaactttcatttgtgacaatgggagctcttttttttgaaatcaattgaagggaaccccagctggggaagagaagagcatcagggaaaaaacaaaagtagagacatttgctctgcaaaatattccaggccctttggctcttcctcgggcactcccttgtgtgggatggccctcagagtggggccaaagtgggaacaatctcccggatcctttggccttaggacactttgaaattttttgctataattttccataaaataatacacttccacagcagatggtaaaatctttaaaatggtttcacatcgattatcttgtgtctcctagcagctctttgaaaggagacatgaaattctggagctgagatgtagctggaggtcatttaggttaatatttttctcttgcagcacaggaagcccaccctagagacrttaacaggtaaagatctgggaccagaatcacctctccctagttctgattctgtgccctttattgaacaacacagccttatcacctaaacaattcctccctcgctctacttcccattaggga

SEQ ID NO: 852839 - DNA, 461 bp, Homo sapiens; identical to SEQ ID NO: 845719

SEQ ID NO: 852840 - DNA, 403 bp, Homo sapiens
gttgaaaatgcaagtatatctttagcagcaaagaaacagttgaatttagtgctgagtacaaagagttaagctgggraaatcagatgatgtttttatttagtgtttattgtaaccaccagtgagccaggacacacgcacattatgaaagatatttgaaatgctgaaataatttttcttgttgcttgtaccaagggttgaatattgtaacactggaaaatgtttaatgaatgaataaatagtgaaaaagttaaaaaatatttaatgatgatttttttttttttgagatggagtcttgctctgtcgcccaggctggagtgcagtggtgcaatctccgctcactgcaagctctgcctcctgggttcatgccattctcctgcctcaacctccagagtagctgggacta

SEQ ID NO: 852841 - DNA, 572 bp, Homo sapiens
  misc_feature 481: n = A,T,C or G
tctacatatcatttagcaccgcctcataatgagcgatgctgaccttgattacctctgaatatcgatcatgccttcactggtagacactgaacttataaaatgtataacccattataaaactatctatctgttatataaattattttatgcttaagtatttttcaaaagtttacatttataaaaatcataaaaaattgttttcaataatgcaagttttttccctctgtgtctgcatagaaattacttgatccagttatcttctatgtgataatggtaatcatatttttaaaaaatcatccttaatctcttctcacccctcattatgctttttccctctgatgctacactccaccctccccctgccaactcctacagagcagcctgtatatgcattcttccactgaatcactgtgcacatagtagtatctgtgtacatatgtgtgtgtgtgtgtatatgtatatgtgtgaatataaataatgntttaaggtcatctgaatcttcgtttggcaaaraaactacgttcagaagacacacattatgtgctacttgaacaaatgaaatactgtcatca

SEQ ID NO: 852842 - DNA, 661 bp, Homo sapiens
ctcaacatcattccagaagtccggaattctacaagaatcatgtaagtcatataaaggactgagaggtgacagcgtgctagcagtcctcacagccctggctccctctctgcgcctcctctgcctgggctcccactttggtggcacttgaggagcccttcagcctgccgctgcactgtgggagcccctttctgggctggccaaggccggagccggctgcctcagcttgctgggagatgtggagggagaagcgcgggcgggaacccgggctgcgcgtggtgcttgtgagccagcgcgagttccgggtggccgtgtgctgggcaggccccgcactcggagcggccggctggccccgccaccggggcagtgaggggcttagcgcctgggccagcagctgctgtgctcaatttctcaccgggccttagctgccttcccacagggcagggctcgggacctgcagcccgccatgcctgggcttccccccacccactctgtgggctcctgtgccgcccgagcctcccggaggagtgccgccccttgctccactgcacccagtcccatccaccacccaagggctgaggagtgcrgacacaaggcacaggactggcaggcagctccacctgtggccctggtgtgggatccactgggtgaagccagctgggct

SEQ ID NO: 852843 - DNA, 661 bp, Homo sapiens
ctcaacatcattccagaagtccggaattctacaagaatcatgtaagtcatataaaggactgagaggtgacagcgtgctagcagtcctcacagccctggctccctctctgcgcctcctctgcctgggctcccactttggtggcacttgaggagcccttcagcctgccgctgcactgtgggagcccctttctgggctggccaaggccggagccggctgcctcagcttgctgggagatgtggagggagaagcgcgggcgggaacccgggctgcgcgtggtgcttgtgagccagcgcgagttccgggtggccgtgtgctgggcaggccccgcactcggagcggccggctggccccgccaccggggcagtgaggggcttagcgcctgggccagcagctgctgtgctcaatttctcaccgggccttagctgccttcccacagggcagggctcgggacctgcagcccgccatgcctgggcttccccccacccactctgtgggctcctgtgccgcccgagcctcccggaggagtgccgccccttgctccactgcacccagtcccatccaccacccaagggctgaggagtgcagacacaaggcacaggactggcaggcagctccacctgtggccctggtrtgggatccactgggtgaagccagctgggct

SEQ ID NO: 852844 - DNA, 548 bp, Homo sapiens
ccagcctgggcgacagagtgagactctttctcaaaaaaaaaaaaaaaaaaaaattacaaaccactaaaactaacccaagaagtaggagaaatctcaacaaatctaaatcaagtaaagaagttgaattactagtttaaatttctcacaagaaaagttaaagcccaagtggattcagtagtgaatactgtcaaacatttaaggaagaaatgatatgaggtctaaaaaatatttgagaaaatacaggagggaagaatatttctcattttatgagtctggcattatgctgatagtaaagccaaagtcatcaaaagacacaaagtaaaacaacaacaaataatctacagaccaatattcctcataaaggtagatttggttccttatcaaaatattaacaaattgaatttagcaatatacaaaaagaataaygcatcataaccaagtggagtttatccttggaatgtagttattttaacttctgaaaatcgctaaatgttatgcatcatattaataaagaagtcttatgatcatctcaatagatgttgaaaaaa

SEQ ID NO: 852845 - DNA, 621 bp, Homo sapiens
atcactgcgggtaatttagaaattaagataatataaatatattatgctaataaggtaaaaatttatggttaactatgcatgtatacaagataaatattaactcaagaataaataaaaaagaaatcatcatattatcattaactgcattgagaaagaagtgaagtattttttaaataaaaacttaggtctcagatagtttccttagcaaattttgccaatttttcaaagatgattctccatatcaaacaaattccttcaataaatagatcaagagaaaacattccaaaactcaatccatgacactatcataacctgtcacaaaaatttaaaaatatacaagatatgcaaaaaatacattaaatttttactcatggatatatatatatgaatattcctaaacaaaatattagcaatgtgccatttagcagtatatgaaaaatgagtttctaagataagtttatacccagaatgcaaggtttgtttaagattggaaactaattaatatcagtcaaaacattaacagatcacagagaatagaaatatatgaaaattttaatggttatcaaaaaagcacttgataatttcaacagycttttataatagataatttagcatatttgg

SEQ ID NO: 852846 - DNA, 615 bp, Homo sapiens
acaccggctaattgttattattattattattattttgtatttttagtagagacagggtttcactatgttggccgggctgttcaccaactcctcaccttaagtgatccgctcrcctcggcctcccaagtgctgggattacaggcgtgacctttactttttcaccatgttgtattcctatttgacattccctcctcttgtactgctcccatctactgaactcttgtcttccaaatctaccctattctgcataatgactttctagttctgcctgttggtgggactcccttgaactttttttttgttgttgttatccactctttcctttgattggacgcagttctctcaaatgactgcatatgtttgctcttcagtggatgtttacttgaatatcttgatacatgtgccacatttcaccaagccacaccaagactcatctcataaaatatggtatttgtattttgtcactcatgaccttttcacttccatatattttacaaaataaatataactactttggcaggaagcctgctatggtttgaatgttcccctaaaacatggtgaaatttaattgccaatataatggtattgggaggtagggactttaaaagatgatta

SEQ ID NO: 852847 - DNA, 640 bp, Homo sapiens
actgggatatatctgatcttcctgggactgaccatgccagagaacaaccgctcattcacgggctggaaagccccagttctcaaaacaccctcgcttagygctgttagaagatgctggagagttcctgccctgaaacttgcatccacttggtccctaaagcagaggatacactaaagaacaccttatatactctccactgcagttctcccttgtggagaagaaggggttaggagctccgcatgaaattaaaataaaataaaataaaacgcctacatatatgggtcttcttaatacttctttgagccagtacataggtctggcaagtaaagggaaagtcacttgaggggatgtcagcttgcctggaaatttaaccctttcatctctgtattaggagaactttaacccctctgtttacctggtcttcagttccacacaccaatgcgaccaaggcaacaggaaatagggatttgactcctcagtttgaagctgtggcatttggagaggactctgatggtgttggtgggagagatggggaggttggtctcctagtaggtgatgttaactcttgggggaagtgggcagagaccagtttgcagcatctcccatgtccagaaaccctatttccccccaattctccatc

SEQ ID NO: 852848 - DNA, 533 bp, Homo sapiens
tgatgaagattataagagtgatgatgacaacaatgccagtgacatcatgctccccatatccccacccccaaaccactcctaccagtccaggcctctatcctgagctccatgagccccgtggcccagcttcctagacacccaaaatagaatctcccccttgagggcccctgggtcagagaatggcatcttcatcccccacggccccgccagcagcccaggcagctgtcttgcctcctctgccatttcttgtctgcactggggtcattctctctcactgttgcccatctcactccccccctccagcccgccctcctccagacgggcaatgccaccatccccaagcgtgaatctgaccctgttacccttccctgggtcctggtcacctctggaagttccgggctcctcggccgtcatctgaggctctgcccagcctcctgctgctgcctrggagtacacagccccatcgcctgcccatccctcgggtgcaccctgccccagccacaccaaactgctcacattgatggatggcattc

SEQ ID NO: 852849 - DNA, 490 bp, Homo sapiens; identical to SEQ ID NO: 812225

SEQ ID NO: 852850 - DNA, 506 bp, Homo sapiens; identical to SEQ ID NO: 812226

SEQ ID NO: 852851 - DNA, 346 bp, Homo sapiens; identical to SEQ ID NO: 812227

SEQ ID NO: 852852 - DNA, 618 bp, Homo sapiens
catgacaaataagcacatgaaaagctgttcaacatcattcttctttatttcccccccacccagagtctcactctgtcacccaggctagagtgcagtggtgcaatcacaacctactgaagccttgaccttccaggmtcaagcaatcctcccaccttagcctgggaccccaagtaactgggaccataggtgtgcaccaccatgcatgcttgtggtcccagccaattcttccattttaatttttttgtagagatggggtctccctatgttgcccaggctggtctgaaactcccaggctcaagcgatcttcctgcctttgcttcccaaaatgctgggattacaggcatgtaccaatgcacctggccatcattagctttagggaaatgcaaattaaaaccagaatgagataccactacccatccactggaatgaccaaaattaaaaggtgctggtgaggagctagggcaactggaactctcattcattactgatgagaacgcaaaattgtacagcctctttgaaaataaatttggcaatttttaacaaagttcaatatatgcttaccttataaaccagcaatcctgctcttaggcatttacacaggagaaatgaaaacttatg

SEQ ID NO: 852853 - DNA, 347 bp, Homo sapiens
tgggccccagaagggaccacctggatcctgtcttggcagcaggcaggccaacacggcgctgagasggagctgaggggaggtgtgggtcagatttctggcaagccctgaggctgtcagtgaaccgctgtggggtccccccagcatgtgctttggggccacaccctaatgggggtcttctttatgttatgaccactcctgcagttaatcaaccacaaggttgttttttgttgttgctgttttttctgtttgtttttttttttttttgagacagagtttcagtctgttggtcaagctggagtgcagtggcacaatcttggctcactgcaacctccatctcccaggttcaa

SEQ ID NO: 852854 - DNA, 624 bp, Homo sapiens
aaacttctaccatgcaggtgactctaaagaatgctgaacagcaagaccatgaaactacaaagaattcatatggcctgcacattcaaaactcccagggattttggagactttgcaaaacttyccattcctaaaattgtataagccactttacagtttataaaataccttgcttcagaaaacagtcaaaggtaaatactcccgtacattcagcctcgaaatggcctctgtttagaagcacactctaataggttcctcaaggtcagaccattgccttattacaggaaatggatgaagtcattcctggctctcagtttttctgaaaaactacctgctttctcagtttcacacaccacacccctctatagctcttgttttgtctcctcggtcgtggcacctgttctgagaactgaagctttcatcttggttctagtagcacatgagaaaacacatttgcaaaagcacaaacaagcaaaggggtccaagcgagaacttcaatgtttgggtgaaacaacagctaaatttgttcacagtaataataaacatgcatgagctcactctttcagagagcagtaatttgagcagcaattctgaggtcaggatccaaggttctaggccagctccagc

SEQ ID NO: 852855 - DNA, 619 bp, Homo sapiens
tgtacacttaccatatgacaatcgaagttaaaataaaattttattttaaaaatggcttactctccytactctcatgtccacttttcacccttttccacaagcttttttttttttttttgtcttttcccaaaagcaatttcccaagtatttgagggtccttttttttcacagtagcttagcctatggcctaatatacacagcttattgtataatacttgcctctatttcatgtccattatgcttattgatttatatatatatgtcccccttattagactatatattacttgtaagcaatgtatgtttcttattcatccttctctctagcacttaaagttcacctagcatacgataaatgctgaataaatgccagttgaataaataaatgaaccaatcaccttcttcaattagcaaatggatatactatgtattaaggcaaatttagatacaatctctatgcctgcatatttctcagaaatttgaaagctttaaccatattatctggagttcaacttcaatgttgaacttcaagctttataacataaacttgatttgccccttataggtcaaatcaacttttactgaactattttttacctaccacattggccaagatggg

SEQ ID NO: 852856 - DNA, 614 bp, Homo sapiens
tatacatacatacacacacatatatatatgaatcaatmataatatcacacttgtacatgaacaattgaaatactaatgctgctttgtcttttggtctctgttttgcaggcatatctattgtggagaatccatcttgtaaagtaacacacaggaactgttgcctctaaaatacgttcaaaagactttgtacttcaatgggattataatccattgtgtgtctattaatctaggtaatgatctcttaataaaacaagttcagatatctgttatgggccatatttgtcatagtatcatatgccttaatacttacaggtaatcttattgtggatgcaaagtaacaaggaaaaaggaatactaagcaaatggagatcaatgtcagtttagatgtgacacagtggatttatatatccaccactgatagccctagacccttctttcccattctctccctaatctatttctttaaatgtggtagtaaatatcactttttaaattttcctttttctttctgcttgcccagcatctattcccccctgatttctagtaaaaaattattcttttactctggaacttcccctcaaaccaagtgtgacagtaaatataataacccatat

SEQ ID NO: 852857 - DNA, 638 bp, Homo sapiens
ttttttgaggaattaacagtctttattgggctcagaccaggagtccgtgggtcttgaggacctctgtgtatttgtcaattttcttctccacgttcttctcggcctgtttccgtagccttatgagctgtttcttcttccggtagtggatcttggctttctctttcctcttctcctccagggtggctgtcactgcctggtacttccagccaacctcatgagccaggcgccccagataggcaaactttcttgtaggcttcagacgcacgaccttgaaggcagcaggaaccaccatccgctttttcttgtcgtagggcggtgggatgccgtcagacaccttgagacggtccaaagcggcctggccttgcttggtcttgtggggcagcataccttgcaccgtccgccagaagacgcggctgggagcccggaagtggtaggggcctctggaagggctggtgttcattcgcttgcggaggaaagccaggtagttcaacttgtttctgtagaaattgccagaaatgttgatgccttcgcagcatacraccaccaccttccggcccagcagtacctgtttagccacgatggccgccaggcggcccaggagatggcctctaccatcaagcaccaggacctgcacctcc

SEQ ID NO: 852858 - DNA, 597 bp, Homo sapiens
gatacccatatacattgtgtaatgatcaaatcaggacaattgggatatctataaccacaaacatgtatcttttctttgtgttgggaacattatagatcttcttctagctgtttcaaaatatacaataaattattgttagctacaatttcttttctgtactatcaaatactgtaacttaatctattagataagatctattagatagtatatattatcaaatactatagctttctatttgactgtatttttgtacctcttaaccaacttctcttcatcctccttccttccttcccttcccagcctctactaaccacccttcttctctacctccaggagattcacttttttagctccctcatgtgagcacgaacaggcaatatttgtccttctgtgcctggcttgtctcacgtaacacagtaaaatttaataccttccatgttgctgagtactaatagattttattamaatcgtcctgtgtatgccagtatcttaaatggatttcacgttaaacagatgtttcactaaaagtgcaatcagataactaagaataaaacctatatgaaaaataaaaaatgttaagacatctttgttagattt

SEQ ID NO: 852859 - DNA, 579 bp, Homo sapiens
tgacaaagtttcttacacacaacgctaaaaacacaaacaacaaaagtaaaaaatacatgaatataattttatcataatttaaaacttttatccatgacatgatattatcacaaaaggaagcccatakaatgggagaaaatgtctataaattatatttattataagtttctaatacctaggttatatgaaaaaaatttacaactcaaaattaaaatgacaatccattaaaaaaatgggcaaatgacttgaatagacatttctctaagaaggatattgaaatacataataagtacataaaaatgttcaacatcattactgattgggtaatgtaaatcaaaatcatctttttatactctcaagtggctatacagtattactttttaaagaagaagaaagaatgaaaaaataaataaaaagatatggagaaatcctgattggaactctcatgcactgttggtggggatgtaagttagtgtaaccattatggaaaagaatattaaagaacctcaataaattttaaaaaagaaatatcatatggcccagcaattcttctcctatgtacttaaaataattgaaaac

SEQ ID NO: 852860 - DNA, 588 bp, Homo sapiens
aacttaaatgttccttgctggattcatacagaaaatatgatatacatatgcaatgggatattattcaaccatcaaaaagaatgaaattctgcyatctgtgacaacatggatgaaccttgagggcattatgctaggcgaaataagtcagaaagagaaatgcaaatactatatgatctcatttctatgtggaattttaaaagtcaaacccatggaacatagaatagaatggtgattaccagagcctgcagggtgaggacatttgagagatgttgatcgaggaaacaaacgttccgttgtaagatgaataacccctggaaatctaatgtgcaagaataattttgctttccaagattatacaaaatatttcttgtatttcattaaaaattcatagtttttaactcttgttgcaactactttatttttttccggatttattgatgtacaattgacagataatattgtacacatttaagatgaacactatgatgcttagatatatgtatatattgtgaaatgattaccacaatcaagttagttaacacatgcatcacctcatatagttagtgtgtgtgtgtgtgtgtgtgtgtg

SEQ ID NO: 852861 - DNA, 314 bp, Homo sapiens
aattaaaaagcttttattaaaacaaaatgtgatgaaaggccacagaaggaacagatgtcttaaagtagatcatgaaacttttatttctttaacttcaaaataaatactacrgttagatttctcaaaattaaaaagataaatacaaaaatgtatattataaaacatatctaactcaccccctgtctctcagccacccaagtgttcttgccacagagaaatagctattggtctttcttttcatttcttgtaatgatattttatgcatatgtaaatagataaatttaatcatatacctttttgtaattcaagtgttg

SEQ ID NO: 852862 - DNA, 431 bp, Homo sapiens
tataactcaaaaaagttcttcttttactttaaaaaaaggagtaacagtgcttcaggacttttttaagatcttgaataagtcttcrgacttgaatcagtgtagatgttacttttctatgtctcagtggacaaagagaatccaggctggtaatacttgtaaggctttgttcagtaagaattattcaggttagtgcccactttgatccaccaatatttattattttctggggatgttggtatatctaaaggatcagaagcatggattgacattacccacaatttctgccttcccatgttctgactttggaatctaacccctacataagacacaccttattattcatatatgatatctgtataatgcctttgacttttaaggcattgtgacactcatactttcaacaattattaatatttccaatataaagatga

SEQ ID NO: 852863 - DNA, 517 bp, Homo sapiens
aaaacattcatttctttaaagttcactttgcataatacaatatcctgtgcaagggataccttgctaaatacatccagttttcagagccactctcctcctctgtgaaaggtggtacatagcaggtgatgcctctctatttccaagcaactagggaaggaggaaaagagtgcaccaaaagggtattaaggaacaagaatgagctttgtttcctttacagttttgcttaaggttgttactcttcactgtaattcttatcaaagttattgtctttatttatgacagaactttccaaggtgagcaagaggttctacccagtgtgggtgctaattacccgacagtccctgaaacttctctcaggtgtcaatagtattttctccctttttctcatatatgttaattattcagtaggattaatgacttatcactctgatttcggcagtacggcgaatattagtcagcctaactgcttagagcaacatagratctgaatagcaacagcaagatttaccttaatgct

SEQ ID NO: 852864 - DNA, 596 bp, Homo sapiens
ttggggtatccatcacctaaaacatttatcatttcttcatattgagcacatcccaaatcttctcttctagatatttttaactatacaataaattattgctaaccatagtcacctgactgtgctaamactagagcctatttcttctctataaccataattttgtacccattaaccaacctctcttcatccctccttccccctacactttccagcctgtggtagccatcattctactctctacctccatgagatcaacttttaaagctcccacgtatgagtgagaacatgcaatatttgtctttctgtacctagctttttgcacttcacataatgagctccaggctcatccatgttgccatgaacgacagggttttcttttttgtggctgaataatattccatcctgtatatataccactattcatcagttgatggacacttagtttgcttccacatcttggctattgttctgtctcttataaggatacattttgatggatttagaagctactcaggaaatccaggtgatcttgtctcaaattccttaactttattagacctgtaaagactctttctcaaataaggtcatattcacag

SEQ ID NO: 852865 - DNA, 426 bp, Homo sapiens
cacaggcaaagaacaggcattttcttcagcggaggccagaacaatatatgaaggagggcttgcctcagatggtgcctgggatctaaatcctaacacagctggagttacagcaggggcattgggccagatagttacctcagaccagtccttgggcctatttttttcattaatttcatacacaggctgaggcttaactatcctgctcacaggtttaggattagggtcaaaactagtatcatctccttcccaaaaccagttcccaataacattctcttcctcctcctcctcagcccctgacctaggtttgcaatcggccccagccgcaggttccaactcctcagcacagacctgggcaccaatttcaggtttatcattcttagtgctgaaacyattaccagcctcttctccattccagaaccaggaatt

SEQ ID NO: 852866 - DNA, 611 bp, Homo sapiens
  misc_feature 591: n = A,T,C or G
accttcatgcttggatgtcctcctccatactgaaggctaaataatatacacctgtatttagttcttttgaagttttaaacatttattctctcagtttcatgttgagtgagactattttcccaatagttgtcccatttggaaactgatttcccagcaccactgactaaatagtacttgcccccgaccaatttgaaatgttggcttccgcaatattatatttgtatttatgtctgggattacttgtttccattctcttccactgatctgttatttttgttccagttttagatatgtggcattaccatgtttttctaaatagaaaatacttgccgggcgtggtggctcatgcctataatcccaccactttgggaggccaaggcgggtggatcatctgaggtcaagagaagagtttgagaacagcctggccaacatggcaaaaccgcgtctctactaaaaatacaaaaaaattagccaggcgtggtggcaggcgcctgtaatcccagcttggggaggatgaggcaggagaatcgcttgaacccgggaagtggarattgcaatgaggcgagaacacactactgcactccagcctgngtgacagagcaagacagact

SEQ ID NO: 852867 - DNA, 368 bp, Homo sapiens
aaaaaacaccaaagttcattattttctgaattggcttatctgctgagaatttaggtgttggcctggctgtagtcaaaggctcctagcccttcaggtaaagatggagttcttctcacaccactcacactcctcttcaccctccagtcccctctccatatccactgcctaggactttctctggctctgggtctttgtccttgcagttccctcagctccaatctcctttcccttcctatttgcctgggtaaattttattcattcttcaaattctaggaagtcttcttgagttttcygctgccccctccgctgaccccccaaccctctacagcatctgggtttggtgcctctcctgtattccctatagcacc

SEQ ID NO: 852868 - DNA, 617 bp, Homo sapiens
ataagttttcatttctcctgtgtaaatgcctaagagcaggattgctggtttataaggtaagcatatattgaactttgttaaaaattgccaaatttattttcaaagaggctgtacaattttgcgttctcatcagtaatgaatgagagttccagttgccctagctcctcaccagcaccttttaattttggtcattccagtggatgggtagtggtatctcattctggttttaatttgcatttccctaaagctaatgatggccaggtgcattggtacatgcctgtaatcccagcattttgggaagcaaaggcaggaagatcgcttgagcctgggagtttcagaccagcctgggcaacatagggagaccccatctctacaaaaaaattaaaatggaagaattggctgggaccacaagcatgcatggtggtgcacacctatggtcccagttacttggggtcccaggctaaggtgggaggattgcttgakcctggaaggtcaaggcttcagtaggttgtgattgcaccactgcactctagcctgggtgacagagtgagactctgggtgggggggaaataaagaagaatgatgttgaacagcttttcatgtgcttatttgtcatg

SEQ ID NO: 852869 - DNA, 486 bp, Homo sapiens
caaatatttaaatttgtattttaatagaaggccctggttttgaacctcttttataaagccagaaacccatttttactttatatttcaatagagctaacccagggtttccatggccaattcagaaggccatacctgcactgttttcttgggcagaacaatcttcctaacagatcagaggagttcctggctaccttgtgctatagtgatcattgtatcaaaggttatgaacctcagaagtcaaaacttcagagtttcaatttgactatcaaggcatggaatcacagttcctggacttaaagatggaactgatgttcatacaaaacacaaatatctatgtaaaaggaggggactagatgtagtgtctggttcctgtgggagacactgaaagaggacccgctgggttagccatctatggtttctggcakggcaatactgcctctctaggacacatttgaaacagttggggtgtcttgataatggggaggg

SEQ ID NO: 852870 - DNA, 523 bp, Homo sapiens
ataaacggcaagaatcatttcttgggaacagggaaatgtgaatatggacagggcattaggtaatattaaagaatcactgttaattttgttaggagtgataatggtagtatagttatataggaagaagtttttattcctatgtagtgcatactgaagtattcaggggtgaattgtcacaacaccttgggatttatcttaaaatactccacacacaaaaataaagacaatatggccaaatgttagtaactattaaactttcatggtaggtatatggggcttcttaaacttctccctctacatttttgtgtttgaagattttcataagttaaaaaaaaaaatgtagtcaccaagtagtacaagcctcccacccacgccctctagtggctagtggtattgagctgggtgcaaacaggctggctgtggtagtcttgaacacactcaacccatcccctccaaaatamcaccagccactcatcagatacttacaaggacactctcaaactttttgttcttttatttgtgg

SEQ ID NO: 852871 - DNA, 628 bp, Homo sapiens
gtttggggaccagggagtccagggatcctgctctctccattccttcctcaccaactttctcctatccaatttgaatgacagcctgaacactgaatggccagtcaggagaaaggcatatacacamctcatccccccacatgcacatcagcaagtctatcagtcattctcattgggccaaatgtttggcatatcagaatttgtgatgtgagagggcaagaggattacagaatcttgctctcttgagcattagttctcaccctggtcctctctgtcataactagcaagttgcgttcaataaaattctagccaagctggtggtaactagattgaagatgctggtcacctgcaacccctttcctccacctgttcatgagtcagcatggctacctctcctcatgataaaagagctgggttgctgagttctggggatgcagagatttctcagtcttcctcctctccctccctaaccactttccccagcttcctccaaggtgaatcatcttctaagaacctgttcctccagccctgcaggagtactcagccccaggggctagctcagtttacccttcttcctctttccctaacaatatacctggcatcagactgcatctgaaacatgggtcaacac

SEQ ID NO: 852872 - DNA, 593 bp, Homo sapiens
acaggttccacttggttgactaatctccttatcagatggtcatttggccgcacccttggtgttctttcccaatgtgccttctcatttatttatttattcttttttaagagatggactctcactatgttactcagacaagtctcaaactcctgggtttaagggatcctcctgcctccacttctctaacagttaggactacaggcatgaaccactgtacccgttatctcattcttcataatatggctagggtgagaattttccaaatctttaagtgctgcttctctttgattaacaattctgtctttaaatcttttctctcttttcacattttaatgtaggctgtcaagagaagccaagccacaactttcacactttgcctagaaatttccttatccaaatatgtaatttcagtgttcaccgctctaccttctgcaaaacactagaatacaggcacaattcagccaagttctctgacgctttttaaaaaaatttkttttcttttactttaagttctgggatatatgtgctgaacgtgcaggtttgttacacaggtatacatgtggtttactgcatctatcaacctgtcatctaag

SEQ ID NO: 852873 - DNA, 648 bp, Homo sapiens
tatccagtaatttggttgcttgcatgtcaaaacttattagcttcaaattagagctcacatttttagggagaaaaaaaagagtagaaaacagagcaacgatgttaaagtgaattcatgcagaacctgtcatcaaagaaatcattaacttaagcagcagcctgtgggaataaaatgagagagttccctgagctgagtggacagagcacatattagcccatgataagaagcttttcagccaaatgtcctattcccacttagcagaagacaacgcaatgttttcctgttccagtaagcacagcagcacgcacgtggaagagggaacaggatgggtaaattttgtcatggcatcttgggcaactgctgtccaactgacttccagggctacagccaggctgaactatgagacctctgtcaagcctaatgcagtggttccctctgttcgagccaaagaggaccaacctagaagacagtctcaatcagggacatttccggatgaaactcctccctctacctctgcatttaatgggaaaaggagaattacttgcttaaaaaaaamcagaatctatcagcatgtaatcagacccagcataggaacaaggctaatgtgtgaaaacagtgagcacatttctttaggaacacacagctaaa

SEQ ID NO: 852874 - DNA, 633 bp, Homo sapiens
tctattggaagaagataccatctaggactttcataggtagagggaagaagtcaatgcctggcttcaaggcttcagagaacaggctgactctcttgttatgggctaatgcagctgatgattttaaattgaagccagtgcccactgagcattccaaaaatccttggttccttaagaactatgttaaatctactctaactgtgctttataaatggagcaacaaagtctggatgacagcatatctgcttacagcatggtttaatgaatattttaagcccattgttgagacctactgctcagaaaaaaagatttttttcaaaacattactgctcatttacaatgcattcagtcacccaagagctctgatgaagatgtacaaagacgttaatgttgttttcttgcatgctaacataacatccattctgtagcccatcaatcaaggagcaattttgactttcaagtcttattatttaaaaaatacattttgtaagcccatagctgacatagatagtgattactccaatggatctgggcaaaggacactgaaaaccttctggaaaggatttaycattctaaatatcattaggaacatttgtgattcatggaagaaaattcaaacatcaacaggaacataag

SEQ ID NO: 852875 - DNA, 551 bp, Homo sapiens
tgattcattattttacattaggccataagagatacagttatttatcaaataactaagcatgaaggcaatagaatgaaatgcgtgggtgatatagtttctatcatatccttacacattacaggctatacacacagacacagacacacacacatactttctcaatacaaacatcatgatcacaaaacgtaaattttttaaccttagatagtataagatttacttattttctctccttttacactaaactatttggcaagaaaataaacccttaaaacaggcaccagaaatgtattttaataacaagtgatattaaatcccattttgatttaaaatacttttatgtcagctcctctgaaggagaatatatttgcctgcaaacatgagcggtcacaggagaagataactgcaggagttcctctgtcaagaggtaaagggaaattcctggtagtgaaaagttgaaagcagctgggaggcgtgaatggttattttagttgattgagttcatggtgaaggraacattgtcattctttccattcccaaaggagtcagtt

SEQ ID NO: 852876 - DNA, 524 bp, Homo sapiens; identical to SEQ ID NO: 826351

SEQ ID NO: 852877 - DNA, 456 bp, Homo sapiens; identical to SEQ ID NO: 826349

SEQ ID NO: 852878 - DNA, 660 bp, Homo sapiens
ttggttttcatttgttgtctttgttagttttgttcttctacattttggtctgaaccgctgttgattgtttccatttcaagctaacccaggcagcacaatagtgtagtcaataacttctaacaktatccatcctgcaggtggaactggttatagcagacaggtttttaaaggcactttgttttgtggaagacagaataggggagttgtcacacttagagatctgtttttatcagtgggtcaaaaatttaataagctagaatattatcaaaattccatttgccctatcaaactaaatgtcaaagaatcatccctctgatatgaatataccacattccactttctacctgatttgtagcttctaagtggctgtttgtatcagaagacaaatcacaaatttgtcatctctatgaattaattgcttgaaggagaatggtttgattcagaaaggtaagttagttaagataaggagcgtttagtaagtgtcatgacaaaaacattggctgagattaagccaaatagatacacagcctacatggatattaaaaatagtttcccttaaaaagaaaaataaaggacttctgaaaaatcgaagtcccattttttaatgggaaagaacaattggtaatatgaattagggaaaaagtctgatagatgcatgca

SEQ ID NO: 852879 - DNA, 562 bp, Homo sapiens
gtatatctgaaaaatgttaattttatcttcatttttcaataaatatttttgctgggtaaaaaattctatgttgactttttttttctttcagtacttacaagatattgtccaactggttttatagcttgcattgttttggaagaggcagccactgtcaacatatgtttattattttgcatgtgattcttttttctctgattggtttttaagattttctctatcactagtttccagaaatttgattttaatgtgtctttttgtaattttcttcatgtacctttaaaaaatatatgtaacataaaatttctttttttctttttcttttcttttttttttgagacagagtctcactttgttgcccaggcatgcaattgtatgatcttaactcactgcatcctccacctccagagttcaagcaattcttctgcctcagcctcccsagtagctgggattgcaaatgtccatcaccaagcttgcctaatttttatatttttagtagagatggagtttcactatgttggccatgctggtctcgaactcctgacctcaggtgatccaccca

SEQ ID NO: 852880 - DNA, 521 bp, Homo sapiens
tttcaaaatcatttgtagctactgaagatttttttaacacaaagtagtgatgaaaatgacatcaaaaaagattaatttggcaacaatttcagcactgaataaaaaatatatcaactgttaaaataggaggcaattataatatgtagagctaagatgatgggagactactctaggttatgatacctacaaaaaagaataaatatatatagcagatgttctaagtattaaaaggatgaaacagaacttggaaaaaaacttggagaaagtagcaagatggatgatttattccattatttaaccagacggtccccaacttaacgatggttcaatacaggattttccaactttatgatggtgcaaaaacaagtatataccatacttctgtatagcactgaatgaattacatggtattcaaaactttattataaaataaactttgtgttagatgactttgcccaactgtrggctaatgtaaatgttctgggcatgtttaaaatagcctaggcccagttatgatgatg

SEQ ID NO: 852881 - DNA, 623 bp, Homo sapiens
aaaagaaaaaaaaaataaaagaaacaagacccgaaaagtaggtatactccttgctactggggtgatctggctctatgttaaatgttaattatggaattttttaaaaaatttattgaacactcyctatttgtctggaactatattgaacaccctgccatgagtactatgctcatggtttttctttcatggggcttacattttactggggtttaagttttttaaaaagtaggtaaattagtttattagaaagtaataaatactcttgaaaactaaagtctggaaggagaatgggaaggaatgccgttttaaatagagtgatcagagaaggcctctgctgagaatggtaaggggaactgaaagagtcatatgggtttttggggtagaaacatttcaggagaggaaacagctagtgcaaagaccctgaggcaggagcatgcctagtatatgcgcagaacagaaatgaaacaggatgttcctggatgaaaaagaagaaagttataaagggtgaagtcagtaaaagtcatggcatgatgctgcaaggggtgggaagaaggtacaaatcatgttgaataagtaggccattgtgagggctttggcttttgctctaagaaatatggggggaa

SEQ ID NO: 852882 - DNA, 615 bp, Homo sapiens
aaccctgtttccaaataaagtcacattctgaggtacaagggtactgtgatagctggacttcaacatatctttttgaaggacacaatccaatctgtaacacggccacatttcctatctcacatcttcccakagagtggtgaagtccacatcccctccccttgagcccaagcaaagctcgctgactgcttcaaccaaaagtgggtaccaaaagttattactgagcttaactcttggaatctggctaccatgctttcaagaagcccaaactagcccacgcagagaccacatggagagtacaggcattctcactaacagtccagctgaggttccagcctcaaccaccaggcacaaatgtgaacatacccccaactgattctaggccctaagtgaagagtcagccccagactctaagtcttcccagctgagaccaaagacgtgaagcagagacaagtcctcttcataatcctctgtctaaattcctgacccacagaatctaagcacatactaaaatgattatttgaagccattaagtttcatggtggtttgttacaccgctacagtaactggaacaatatcacattatcccacaaaacaaaattaaaatatttaacagtg

SEQ ID NO: 852883 - DNA, 471 bp, Homo sapiens
aatcccagctactagggaggctgaggcaggagaattgcttgaacctgggaggtggaggttgcagtgagctgagatcacaccgctgcactccagcctgggcaaaaagagtgcaactccatctcaaaaaaraaaaaaaaaattcaagtaaaatttatattgatgtatataaaactagactaggtttaaggcaaaggattggcgaaattgaaatgatttaacaagaagtcagtatttcaaagaagtagctaaaagaaaaagtaactgtgggaagggaaatggcaatattgaagaaaaaatgacaatggtacacctttcaagggctaagtgctcttaacagtgctggccatagaaagcagaaaaatttgctcactgtaggaacacagatatgataggagaaacccacatcccaggttttgaacttcacagatggtgaattattccttttcatgaggatccctctatgatatgtga

SEQ ID NO: 852884 - DNA, 600 bp, Homo sapiens
ggaatgctcaaagataaataaaataagataaaacttctgctttttgaaagacacttttaagagaatggtaagctgccagctgggggaagaatttgaaagtcatgtgcttgatacaagacttttaccccaaacatataaagaactctccaaacatagtaataagaaagcaaataatcaaatttttttttaaaaatcaaagaatatatacagatgacaaataaacacataaaaagatgctcaaaaccaacagagaaatgcaaattaaaaccagagatactaatacctaataaaatggcttaaactaaaaagactgatcataccaagtgttgacaaggatgtagaagaactggtaatttcatacactgctggcgggatatcaaaaatacaggccctttgaaaaacagtttggcagttaaacatatacctaccatatgatccagtcattccattccaagagaaatgaaagcatatatccatgcaaaggcttaaacacaaatgtttatggcatttaatagcaacaggtgagtgaataaactgtgmtatttccacatgatggaatactataaaaaggaatcaactatcaatatgtgctataacatg

SEQ ID NO: 852885 - DNA, 599 bp, Homo sapiens
taagtgttgttagaaaggcatcagtaaaatgagagatattcaagtgacttaaggatattgagaaattcatgaagaacagtctgtgaagaggccacagggggtaggattaagagcacaggaaggtaaacaggcattgtgcttagaagggagcaggggaagaatggtttggatgcaaagaagtttgcaggtaggaagtaggtaactgatggaattatgattacctgttcaacacatagcactatatatactaaaaatactcaataaacttatcaaagtatcgtgtgacacctgcattagaaatgggatttaatatttttgttttcatttttgtttcaattacaatttcagtgcaattcactgatctttaaaataaccctgcaaatgtgtattcatgctttcataatctccatcagtatttactgtactagtgtcattttaccatttttcatttttcatcagttggtttctgtaaatcttcctaagatatactcctaagagaaagagtttgcacataaataaaaagcagtgcactgtggtgtttrtttcacttaaatctctttacgcccttggcactcccttaattccttttcttagaataa

SEQ ID NO: 852886 - DNA, 596 bp, Homo sapiens
gctattgcactccagcctggtgacagagcgacactccgtctcaaaaaaaagaaaaaaaaaraaaaaaaaagttaggaagaagaggaaaggcatatacaggatactgacaaacagtagccaatgaagcaggggtgtgagctggaaaggctggtgacgctaaagcccagaagagaagagtatttcagagggcttagctcacttcgttaactatgcttagaggttgaatgagttgagaatggagcattaaccactggatttagcgccatggaggttgtcagtaactttgaccagagcagtttctgtggaatggaggggacacaagcctaaatgagcgtgaatttgagataacagttaatatggaagcaaatacaaacatgttgagtttttatgtgtaggaaagagaggatttagaaggaaggggtgaaggaaaattaatttaagaatcagagctattgggacttttttgctgctgagaataattctgcagagaatgagacactgataatgcaggagagaaaggagttggttgagaaactgcagttctcaaacatgcaagaagggatgggatacaaggtaaacatggagaagagaacctt

SEQ ID NO: 852887 - DNA, 596 bp, Homo sapiens
gctattgcactccagcctggtgacagagcgacactccgtctcaaaaaaaagaaaaaaaaagraaaaaaaagttaggaagaagaggaaaggcatatacaggatactgacaaacagtagccaatgaagcaggggtgtgagctggaaaggctggtgacgctaaagcccagaagagaagagtatttcagagggcttagctcacttcgttaactatgcttagaggttgaatgagttgagaatggagcattaaccactggatttagcgccatggaggttgtcagtaactttgaccagagcagtttctgtggaatggaggggacacaagcctaaatgagcgtgaatttgagataacagttaatatggaagcaaatacaaacatgttgagtttttatgtgtaggaaagagaggatttagaaggaaggggtgaaggaaaattaatttaagaatcagagctattgggacttttttgctgctgagaataattctgcagagaatgagacactgataatgcaggagagaaaggagttggttgagaaactgcagttctcaaacatgcaagaagggatgggatacaaggtaaacatggagaagagaacctt

SEQ ID NO: 852888 - DNA, 609 bp, Homo sapiens
gcttttcttatctagagcttttaaccacttgatgtaaatgattattttttaaatatcttataaatcttaatgatttttctatttcttataaactcagctacagttaatgccagaakatcctaccatgagtaaatatttgtgtgtgtttttaacattttggtgtatttcaattttgttccttttgttttcaattttttgggtacatactaggtatatatatttatggggtataagagatattttgatacaggcatacaatacattataatcacatatgcgtagacgggatatctatcacttcaggtgtttatcatttctttgtgttgcaaaaatctaattgtacttttagctactttaaatgtgcaataaaattattattaactatagacaccctgttgtgctatcaaatactagatcttattcattagagttagatacactaactatatttttgtaaccattaatcatccctactccccccacctcacactgcccctcttgttatcttctgataaccatcattctattctctatctccattagtttgttttaatttttagctcccagaatataagtgaaaacatgcagtttatctttctgtgcctggct

SEQ ID NO: 852889 - DNA, 496 bp, Homo sapiens
gggaggaggggtggactgccatctttgctgtttgggtgccttagtcattccagccttcaggctttgtaaagtccaagctgatgggtggcagaagggatccctcaacacagcccagctgctctaccaaaacgtggccagactgctactttaatcaggtgcctgatctcatttctcctcactgggtgggaacttccaactggggcctccaaccattgctgttggcattctacagcaaacagagatttgtaatctccctgggatggagctctgagagggaggggtggaccactatcctttctgtctgggcgacatatcctttccagccttcaggcttcatagtgtctgaggcaactggtgcgctgaagcagattcccagcacagcacagctgctctaccaatwtgtggccagactgctttttaaagtggatcacggatcctgttccaactcactgggtgggaacccccaactgggatcttcagccacctcctacaggtg

SEQ ID NO: 852890 - DNA, 627 bp, Homo sapiens
aaatggatctggcccttggtgaggtttcatctttctcctaacacctagcacagcctcatttattcatgcttgccaagcagaaaggtggtgtagccctctgtgccttttagtgctagggatataaccacatggagataaattctgcttgacatcacttaaatttctcaaaggcaccaaaaatcaatatatcaaaaataaactcttgatcctcccctaaattctagctttctcccagtgttttctatcccagaatatgtgaccccccatctatcaccttgagagaaagccacaatcatatagatctcctttccttcaaaacccatacttcatcaccagatcctgttggctttgccccatatataattctaaaatagtctttccccaaacattttcagggtccagagcaagggaacacataccataagtagaaataatttaaaggtataaataaagtgaacaagttgttaggaaagatagttctatttttccaccttgacaaacccatcttcataatgaygaggaaagcagggttcaaataaaaattctccatctacttggagttctgtgcccttaattagtgactggggattgctggaccacatgtcatagatggcagatgacaggata

SEQ ID NO: 852891 - DNA, 630 bp, Homo sapiens
atccatgccgcattccttccttctgggtatgggacaggatcctttctggagtggggrtcttatgacctacagtcaaataagataggttagatgaggtctttatggccagtttttacacagaaaggtggaaggaaagctagagttgtattttaggttttatggctggctttggggaaaaggggttctggtttttatatccgccttggggaagagggattctggtttctatggctggcctcggggagaatgaggggcaagagataggagggcaggagaagatcagagaaaaacttttgcttctgaggctaagccttccttttggggtattgttttctgagtcccaacacttgttatttggaacaactcattagaatgtagggactggggctatgtcatgtattaacatctcccagggagctgtcagcctccctcagcaaatgcttcctgaatgcatgaatgaaccaatgagtgttggccatgcaaagtcagtagttttctgccaaccccatgagttccaccagtcgtctccagagattccttgcaaagaacttggtactggggcatgtacttataatgtctccttctttttccttctattctatcatcctgtgtcttgtccagcctccagga

SEQ ID NO: 852892 - DNA, 607 bp, Homo sapiens
aacatctcccagggagctgtcagcctccctcagcaaatgcttcctgaatgcatgaatgaaccaatgagtgttggccatgcaaagtcagtagttttctgccaaccccatgagttccaccagtcgtctccagagattccttgcaaagaacttggtactggggcatgtacttataatgtctccttctttttccttctattctatcatcctgtgtcttgtccagcctccaggagttcagtgagaaaggaaacacacacacacacactacaaaaaccaggagaaaaaaaccattaaaaaatcccactgtaggaagattctgctgcctctagacattaggaaagccgctgacctaattcatttgctatggtggctttttcatcctcaggactggtgctgcctgtgtagttcagcctgtgaaggctccctttcaagtaggccagctgcatggtattctggacttacaatgtgcagggcagatgtagtgtccccttgaaatacacttaacggtgggcaacaaaatccaaargcaaacccccacaaatatctaacttaaaaaaaaagaactttctagatctcagtcctcatctggatactgcattaggatcctgag

SEQ ID NO: 852893 - DNA, 684 bp, Homo sapiens
ccaacacttgttatttggaacaactcattagaatgtagggactggggctatgtcatgtattaacatctcccagggagctgtcagcctccctcagcaaatgcttcctgaatgcatgaatgaaccaatgagtgttggccatgcaaagtcagtagttttctgccaaccccatgagttccaccagtcgtctccagagattccttgcaaagaacttggtactggggcatgtacttataatgtctccttctttttccttctattctatcatcctgtgtcttgtccagcctccaggagttcagtgagaaaggaaacacacacacacacactacaaaaaccaggagaaaaaaaccattaaaaaatcccactgtaggaagattctgctgcctctagacattaggaaagccgctgacctaattcatttgctatggtggctttttcatcctcaggactggtgctgcctgtgtagttcagcctgtgaaggctccctttcaagtaggccagctgcatggtattctggacttacaatgtgcagggcagatgtagtgtccccttgaaatacacttaacggtgggcaacaaaatccaaaagcaamcccccacaaatatctaacttaaaaaaaaagaactttctagatctcagtcctcatctggatactgcattaggatcctgagacatctggggaccagc

SEQ ID NO: 852894 - DNA, 684 bp, Homo sapiens
ccaacacttgttatttggaacaactcattagaatgtagggactggggctatgtcatgtattaacatctcccagggagctgtcagcctccctcagcaaatgcttcctgaatgcatgaatgaaccaatgagtgttggccatgcaaagtcagtagttttctgccaaccccatgagttccaccagtcgtctccagagattccttgcaaagaacttggtactggggcatgtacttataatgtctccttctttttccttctattctatcatcctgtgtcttgtccagcctccaggagttcagtgagaaaggaaacacacacacacacactacaaaaaccaggagaaaaaaaccattaaaaaatcccactgtaggaagattctgctgcctctagacattaggaaagccgctgacctaattcatttgctatggtggctttttcatcctcaggactggtgctgcctgtgtagttcagcctgtgaaggctccctttcaagtaggccagctgcatggtattctggacttacaatgtgcagggcagatgtagtgtccccttgaaatacacttaacggtgggcaacaaaatccaaaagcaaacccccacaaatatctaacttaaaaaaaaagarctttctagatctcagtcctcatctggatactgcattaggatcctgagacatctggggaccagc

SEQ ID NO: 852895 - DNA, 684 bp, Homo sapiens
ccaacacttgttatttggaacaactcattagaatgtagggactggggctatgtcatgtattaacatctcccagggagctgtcagcctccctcagcaaatgcttcctgaatgcatgaatgaaccaatgagtgttggccatgcaaagtcagtagttttctgccaaccccatgagttccaccagtcgtctccagagattccttgcaaagaacttggtactggggcatgtacttataatgtctccttctttttccttctattctatcatcctgtgtcttgtccagcctccaggagttcagtgagaaaggaaacacacacacacacactacaaaaaccaggagaaaaaaaccattaaaaaatcccactgtaggaagattctgctgcctctagacattaggaaagccgctgacctaattcatttgctatggtggctttttcatcctcaggactggtgctgcctgtgtagttcagcctgtgaaggctccctttcaagtaggccagctgcatggtattctggacttacaatgtgcagggcagatgtagtgtccccttgaaatacacttaacggtgggcaacaaaatccaaaagcaaacccccacaaatatctaacttaaaaaaaaagaactttctagatctcagtcctcatctggatactkcattaggatcctgagacatctggggaccagc

SEQ ID NO: 852896 - DNA, 553 bp, Homo sapiens
cccaatttaatgacactgaaccatgcttcgtttaatagattagagaatttaggcccagaaaaattgaattcctttcccatgrttagtaaatatatgaacttacccttaagcacagctaacctggatgtcttagtcccctaaaatgcacatactatacatttacatgcacataggtacaaatgcacaatttcttagtcaaattaaagactcattttctaattataaagatgaaactgaaatacgcttcttttatttttctctaaatgattggactttccacagagaacacaatttatttggtatgtcattacctaccaaccataactctaaagtggggaggggatgacagaggaaattgtggtccaggaagagaaacaggttccagcttctcactgcctcagtcaggatgtgacttgcactgttggcaacagagaaggcgagacagaaccattctgcagcctgcttttgttttttgtttttttttatacagagtttcgctcttgttgcccaggctggagtgcgatggcacgatctcagctcattgcaacctctg

SEQ ID NO: 852897 - DNA, 553 bp, Homo sapiens
cccaatttaatgacactgaaccatgcttcgtttaatagattagagaatttaggcccagaaaaattgaattcctttcccatgattagtaaatatatgaacttacccttaagcacagstaacctggatgtcttagtcccctaaaatgcacatactatacatttacatgcacataggtacaaatgcacaatttcttagtcaaattaaagactcattttctaattataaagatgaaactgaaatacgcttcttttatttttctctaaatgattggactttccacagagaacacaatttatttggtatgtcattacctaccaaccataactctaaagtggggaggggatgacagaggaaattgtggtccaggaagagaaacaggttccagcttctcactgcctcagtcaggatgtgacttgcactgttggcaacagagaaggcgagacagaaccattctgcagcctgcttttgttttttgtttttttttatacagagtttcgctcttgttgcccaggctggagtgcgatggcacgatctcagctcattgcaacctctg

SEQ ID NO: 852898 - DNA, 521 bp, Homo sapiens
gatattctttcactcttccatataattgccctccatttactgcttcctctttcctttctcttctcttttcccttttatctttttcaatgttttctcataactttttcttttcctttccattctactggcattacatcttagctcctgtggtgggtatgcagtatttgtttcagtttaaactacatgcaaagcatttcaaaaaatactgtgatgaaacatactgcttgataatttaattttgttctaaaaatagttattatttggggacattttaaataaagctagtcctagtgctaatttctttatatttgtgaaataactttgataagaatatcttatttttaataatacactctaacaaataaacactttaatgaagaaaaataataggttaattgatgtyccaaggcttcaaaattacttagtcactacatatgaaatagaacttagattcccagctatccctcagcctgtgatctctctgctacattgttccatgagcactaaagctaagctgaatc

SEQ ID NO: 852899 - DNA, 621 bp, Homo sapiens
ttttgcatagctgctttttttcttattatccaagccttgagtctgcagataggcctctcctgacaacataatctgaaatagctaccatgcttctgctccactcattctctgatacctcatctgataatttgatgatttggcactttatcttttagaaggttattaattatttattaattgtctattaattcttgtgtgcatttggcagattatagctttcaaataattagtccataatatctagattacccaatttgcgggcatagagtctatcattatctttctttattatctatttaggttccatggaatctatagggacacctcctctttcttttcttatatagttacctgtcttctctgttttttttctcagtaagactggcaagagccatgttaattttattgatcttttcaaagaaccagatgttggagggtttttttttttttaattttctgtcttgattttctgtttttaatttcattgatttggggtctaatttttgttatttattttcttatgattaatttggatttawttagttctttcttctctagttttctaaggtagaagcttaggttattaattttagatatttccttttttcttacttatgcatt

SEQ ID NO: 852900 - DNA, 622 bp, Homo sapiens
ttttttttgagaaggagtctcattctgctgcccaggctcaagtgcagtggcrcaatcttggttcactgcaacctccacctcccaggttcaagcaatactcttgcctctgcctcccaagtagctgggactacagacatgcaccaccacttctggctaattttttatatttttagtagagacagggtttcaccatgctggtctcaaactcctgacctcaggtaatttgcccatctcgccccaccaaagtgaattacaggcatgagccactgtgcccagccctgtttcctgactttttaataattgcaattttgagtgtggtgtgagatggtagccatactcagaaaactgaaactagaccccttccttacaccttatacaaaaattaactcactatggtttaaagacttaaatgtaaaatgtgaaaccataaaaaccctagaagaaaacctaggcaataccattcaagacataggcatgggcaaagacttcatgatgaaaacaccaaaagagattgcaacaaaagctaaaattgacaaatgggaactaattaaactaaagagcttctgcacagcaaaaaaactagcatcagagtgaactggcagcctacagaatgggagaaaat

SEQ ID NO: 852901 - DNA, 634 bp, Homo sapiens
ttacacaacttaataagataattcaacctttatctgataaaggcaactgcagaaatatgtcagtctaaaataagaaagtctttctatttaacgtattaaaaaggaaatagggcgattgtcaaaattttataaaaagagaaaatatgaatttgtttttgccttctgaaatactgctgagtgttactgatattatgctgaaaaggtccagaaagtttacttttgccagcaggatatttactagtctattaattttaggtaggagacagcactatgtcctttgagttaacccagaatggaagtccatagtctttctgcaagaacatctggaaagatcgggaagaagggatttttctcagtttcctagatgatttgtaactcaaactgtagactacaagaaaagaagggataatatatttctgtttttaaggccaaaaaacaaaagcagacattgacctgctagtcctccttcattagatcccaatatcaaattgtgttactttttatcctatgaaataaggagtcaccaaaaatgagccaaatattgcaaataatgtaaattactgaaaatgtatttwgtaacaaaatattatgcagtgaacacaaatatgtaacattccattcaaatattgtccat

SEQ ID NO: 852902 - DNA, 613 bp, Homo sapiens
aaattctttttttttcatacaacaatagaaattcatgaactgattctgtggcatttaggtctgtagccatttttattccagcttttattatttttaacctattattttttagaactattgagtgacttatgaaaaatacagtaacccattgtcatctgtcatattttaggagtactctgtcagtgaaatattctggttcaaagagagttgactaattgtaaagaatagtaataacagtcagaataatacttagaagcatttactaggtcttgaaacaaagttatcttaatattctgcaaagaagttttagtgagaaaactaaagcaacttgcttgtagtcaggagtagttccacagatttcctatgggccaagcactctcttaagtattttatatacatgtttccccttagtgatcataaaaaaaaaatccaaggagaaactatgattactcttattttacaaatgagatttgggaataatttttgccaaaaattgctatttaagttgwagctagaatctcattagagtctacctggttctaaagtgtattcacacctttcttctttgtggtatccagcaatccttctttgacgatagaagatgcttattaag

SEQ ID NO: 852903 - DNA, 596 bp, Homo sapiens
caatcagaatggctattattaaaaagtcaaaaaacaacagatactgatgaggctgtggagaaggaaacacttatacactgttggtgggaatgtaaattrgatcagccactgtggaaagcgatttggagatttctcaaataactcagaactagtattggacctagaaatcccattactgggtgtatatctgaaggaaaatagatccttagaccaaaaagacacatggacaccgatgttcatcaccatgctactcacaatagcaaaaacatggaatcaacctaggtgcccatcaatggtcaactgaataaagaaaatgtgttacacatacactatggaatactatgcagccataaaaagaatgaaatcatgtcctttgcatcaatatgaatggagctggaggccattatcctaagtgaactaatgcaagaacagaaaaccaaataccacatattctcccttataagtgggagctcaatattgagcacacatgaacataaagatgacaacaatagacactgcaaactactatggggggaaggaggggaaggatccgtttggtttgaaaaactacctattcggtactatgctaactatct

SEQ ID NO: 852904 - DNA, 627 bp, Homo sapiens
tgggatccatagtcatatatcatttttccctcaattctaagtagtttaaaatattttagcactaaaacaaataagcattatggcacagaatcaaaatatacacragttttcaagacaatgtaagactagaaaaaatgtagagctgaggtagccactaaagcacttaggtgtaaaattacccacttctgccattagaggcaaaaagtaggataggtacagagtcagaggaaaaatagaagttgttggcttcaatcccttctcatatgcattattttctttttgtatatttgcttactcaggacttttatttttacatacagggctttaagtcagcatccaactgtcagtgatgacctgccaaatcacataatttctggaaaagtccaagtaaagcccagcgtgaaggagttcacagaaacagatgccatttttgaagacagcactgtagaggagaatattgatgttgtcatctttgctacaggatacagtttttctttttctttccttgatggtctgatcaaggttactaacaatgaagtatctctgtataagcttatgttccctcctgacctggagaagccaaccttggctgtcatcggtcttatccaaccactgggcatcatctta

SEQ ID NO: 852905 - DNA, 627 bp, Homo sapiens
aactggggaaactgtaaacctgtgactcccagtctttgaagggtcaycatatgagtgtgaagctactgtatggtgaacagtgcaggtcagcaggtctcccacctcctgcagcattacagccacatagacgtatttcctgattgactggagtttccttcaagcctttggaaacagagatagggcagctgtgtcagaggcgtgtgaaccaaagcaactccatcttgaataggagctggttaaaatgaggctgagacctactgggctgcattctcagatggttaaggcattctaaatcacaggatgagataggaggtcagcacaagatacaggccataaagaccttgctgataaagcatgttgcagtaaagaagctggctaaaactccaccaaaaccaagatagccacgaaagtgacctctctgatcgtcctcactgctttactcccaccataacaatttatgccatgacagtttacagatgccatggcaatgtcaggaagttgccctgtatggtctaaaaaggggaggcatgaggaatccaccccttgtttagcatataatcaaggaataaccataaaaatgggcaaccagcaggcatcgggctgctctgtggagtagccattctttta

SEQ ID NO: 852906 - DNA, 590 bp, Homo sapiens
acaatttatttcatcagtgttttgtagttttctttgtagagatctttctttcaccttcttggtaaaatctattaggtatttgtagttattttaaatggaattgtctttttgatttctttcttacatagataattattggtgtatagaaatactactaatttttgtacattgattttgtatcttgcaactttaattcatgatcaaatctttttggtggagtcttaggtttctctagatataaagtcacatcatcagcaaacagggataatttgacttcctctttaccaatttggatgccttttatttccttctcttgcctaattgctctggctagaacttccagtataatgttgactagaagtgtaatgtgggcatccttgtcttgttccagtcttggaggaaaggcttaacttttctgtattcagtatgatgctaactgtgggtttgtcatatatattttgagrtgtggttcttctacgtctattttgatgctaagttttatcaaatgttttttctgcatctatgagaagatcatatggtttattgtccttgattgtttatgtgatataacacatttattgacttgcata

SEQ ID NO: 852907 - DNA, 332 bp, Homo sapiens
tccttcaaggtatatttaattttgagagaaatctaaagccactctgaagaaaaaaaaatacccacatacacacacacagtactatattggttggttctccttaatcagacattagaatccaaggaagtaagaactcagtgaggaccgaagtaatgcagtaatggaggaaaactatcaattaagacgtcaagttgtactgttaaagaatgttttgcattcaggtgattagaggaaagcacayattctttattatttcatagaagaaaaattaagagtgtttgggatgctgagtagaagtttctagaaaaatccagaacaaatatattcttcaa

SEQ ID NO: 852908 - DNA, 332 bp, Homo sapiens
tccttcaaggtatatttaattttgagagaaatctaaagccactctgaagaaaaaaaaatacccacatacacacacacagtactatattggttggttctccttaatcagacattagaatccaaggaagtaagaactcagtgaggaccgaagtaatgcagtaatggaggaaaactatcaattaagacgtcaagttgtactgttaaagaatgttttgcattcaggtgattagaggaaagcacacrttctttattatttcatagaagaaaaattaagagtgtttgggatgctgagtagaagtttctagaaaaatccagaacaaatatattcttcaa

SEQ ID NO: 852909 - DNA, 590 bp, Homo sapiens
atgattacataaggcagcaatttgacttctgggtgtacrtccaaaataagtaaaagcagggaatcaaagagatatttatatacccacattcactgaagcattattcgcagtggccaaaaggtggaagcaacccaaatgcctatcagtagatgacagttgataaacaaaatctggtacaaacatgcaatagaatattattcagccttaaacaagaaatacaattctgacacatgctacaaagtcaataaaattgaggttatagtgcgaagtgaaataagccggttacaaaagaacaaatgctatatgaggtccctagagacgtcaaattcatagagacaaaaactagaatgaaggttgccaggggcgagggaggggcaatggggagtgagtgttcaatggcaacagagtttcagttagggaagataaagaagttctggaaatggatcgtggtaatacaatgtgaatgtacttaatgtcgtaggactgtatgtttaaaatgagtaaaacggtacatgttgttatatatgttttcagacattacaaaaaatatgttgtataacactattttgtataacacccatagattgaat

SEQ ID NO: 852910 - DNA, 590 bp, Homo sapiens
atgattacataaggcagcaatttgacttctgggtgtacgtccaaaataagtaaaagcagggaatcaaagagatatttatatacccacattcactgaagcattattcgcagtggccaaaaggtggaagcaacccaaatgcctatcagtagatgacagttgataaacaaaatctggtacaaacatgcaatagaatattattcagccttaaacaagaaatacaattctgacacatgctacaaagtcaataaaattgaggttatagtgcgaagtgaaataagccggttacaaaagaacaaatgctatatgaggtccctagagacgtcaaattcatagagacaaaaactagaatgaaggttgccaggggcgagggaggggcaatggggagtgagtgttcaatggcaacagagtttcagttagggaagataaagaagttctggaaatggatcgtggtaatacaatgtgaatgtacttaatgtcgtaggactgtatgtttaaaatgagtaaaacggtacatgttgttatatatgttttcagrcattacaaaaaatatgttgtataacactattttgtataacacccatagattgaat

SEQ ID NO: 852911 - DNA, 625 bp, Homo sapiens
aagctttatgagcaaaacggaggtgttggagaagaaaatactctccctcagcactgcagcaactcctcctgggtttccagtctgccagatttccgtataaatttcaaaatgcctaacccccacaattgtgtgagcaaatttcttactgatctttcagtgaccatctattatttccatctctctctctctctaaatatatatttatataaaatctccatatctctctccatatatatgtgtgtgtatatatatatgtaaatatatatatattcttatatgaatgtaaatcctgtagaagaacaccgactgctaaaacatgctacattgtccccaataactataggtgacaggttctaagctttacaaatgatccaattgaagccactcttacttggcttgcagtgaaaagcttgaaacccaccctaagtagttctgaacacataataaacgaatcctttcaaaacattcccctgtactttcccttagcttttttctactttgctggttyagcagagttcatgaacagattcttgactccttaggacaatttcaatttgatcatataacttccttggtatcactgaagtttcttgaacaaagcatgcactttcctgtccttaaatat

SEQ ID NO: 852912 - DNA, 491 bp, Homo sapiens
aggcccaaccccctcatggctttagcccccgagctgtctttgattattcctgggctagctttgggagacatttcattcacagtttaaaggatagtagcccctcccgcaaactcagccacctttgtagagctaacaagaggttgccaggctagaaggagcagaagagcctgaatccggctaaggtgcagacataaacgattgtcagccatcattctggagataataggatatgaaacttctctaattgctcctgcaaatatcatcactattgtagaaactaagattggccttttgagatcctttctgatgtttttgcattgtctaacacccatggctccaccaggacctgatggcttcccatggacctgccaaccctccttctgtggcctcamccagaagagattcaacctgcaggaggacagctttaacctactatgatttcatctctggcccaaccaattagcaggaagcacttgttacctggctaaccc

SEQ ID NO: 852913 - DNA, 631 bp, Homo sapiens
tatacacacacacatatatatacatatatacacgcatatacayacacacacacacatagacacatatgtatacgcacacatataatgtatgtatatgacttaagcactctaatttgctctgtgagaaatatgaagggtgtaaaatctcatttctcctctgagaaatatgtggtaccacaaacctcactaaatcagaatgtcttctgggaaagtaatacttccctgctgctttctgaaggacttcagcaattaaatttgcagggagtaaattcaaacgaagaacaagactgccatacagctcctgactggagccctatttaaagcattaagctgcccaagtttgcagtgacttctacccctctacctctcagcctgcatcctctttcttatctgcagcttctagtccacccattccattcaatgtggttccacaaatggtcactgagggccctgggccaggagctgaacaaatataaagtgagtcataatcctgctcccttcactctggtgctcaatggaatctactatatatgtcttcgtatcactcgccatcaccagattgtgcattcctcaaaggcaagtattatgtcatattcacctctggatccttggatccaaattcagagcccca

SEQ ID NO: 852914 - DNA, 581 bp, Homo sapiens
gcttgagcccaggagacagaaattgcagtgagccaagattgtgccactgcactccagtctggatgacagaaccagaccctgtctcaaamcaaacaaacaaacaacacaaaacaaaaaaaaccatagaggatagatctaccacttccaaagttttcttgtgtccctagtaattccttcttcacctttctctccccacctcaggcaaccactggttgtctttctgtcatagtagatcaatttaaattttctaaagttttttataaatagaatcatatagaatgtacatttttctggtttgattttttcattcagaataattattttgagatgtagacatgttgtcaggtgtatcaatagatcgctctgctatactgctgagtaatatcccacgtgacagatacatcacaatttattttattcattcacctgttcgtggatttggatggcttctggtgttaagactaaagcttctatcaacaaatttgtatggacatatcctttcctttgatttggatgtaatagcagtatcatattgctggacaggtttactattttaagaagctgccaaactgctttataat

SEQ ID NO: 852915 - DNA, 521 bp, Homo sapiens
tgggctcaaccaatcctcccactttggcctcctgaaatgttaggattacaggcataagccaccacactcagccccatctttgaattwaaaaaaaaaaaaaaattagaacgtggaaaaacgcaacaacaaaagattaacaaaatccctatcccatgatagccttatttttctgctcaccttaaaaacaaaacttcttaaaagtattgcgtatatttgctttctccatttcctctcctcccatccttccctccaactcctatcaaattttcatcagactttatcaaacttccaccactgccaaaatggcgtttcaacatcactggtgaccattgctacagtggcccattcttaattctcattttacttgacctatgagcaacatttgagacaatgggtcactcccttcttgaaacacttccttcccttggttttgcagatctaaactctcctacttttccatctacttcatggattattccttctcagtcttctttgttggatcctcttcacctctccgactt

SEQ ID NO: 852916 - DNA, 521 bp, Homo sapiens
tgggctcaaccaatcctcccactttggcctcctgaaatgttaggattacaggcataagccaccacactcagccccatctttgaattaaaaaaaaaaaaaaaattagaacgtggaaaaacgcaacaacaaaagattaacaaaatccctatcccatgatagccttatttttctgctcaccttaaaaacaaaacttcttaaaagtattgcgtatatttgctttctccatttcctctcctcccatccttccctccaactcctatcaaattttcatcagactttatcaaacttccaccactgccaaaatggcgtttcaacatcactggtgaccattgctacagtggcccattcttaattctcattttacttgacctatgagcaacatttgagacaatgggtcactcccttcttgaaacacttccttcccttggttttgcagatctaaactctcctayttttccatctacttcatggattattccttctcagtcttctttgttggatcctcttcacctctccgactt

SEQ ID NO: 852917 - DNA, 545 bp, Homo sapiens
taataagaggtagtgcactgattcaaatccaggcagtctatctctgcagcccacactgttagccactagtatgtcagaaattcaaaacttcaaagtcaatgyctaaccaacccaggagcagtgaacaccaccagatgcctgatcaaggtcttgaaataccatctcccattaaaaagagccaggttccttggagaaatggctgatttaaggtctgggtcaggaaatgaacaagagaaacctgaagcaccttgtcatatagataacaagctattgaagactaataggatcattccaaaagaagaggactctcaagagccaacttaaagaggctcccaatggccaaagatgtgacagtttgaatatcagtagggataacaatagcaatagattgaagcacatcaaacatgtttaaatctatgagttcataatgatgctcaaaaattggtcatgtttaagagataattgggatgttaagttgaaaactggtaaataaatttttttcctgacattcctatgtgaactgtatacctgaataactacatagt

SEQ ID NO: 852918 - DNA, 670 bp, Homo sapiens
ttataaactgtaaagtatatacaaatataagatattttattccagtgtttggagtcaattaaaggaaaacaaacctttaagtggcagacttctagttataatttttctaaaaataagttccagtttcaggagtcttaaagtcattattctataaatcaaacacatgaggaaaaatgtaatagaaagaaaataaaaatacatttaggtaagtagccttgtatgtgccagtgtaaaataaatagcctaacaacattctataatattttcataagatagcccctagaccctaaaacttctgctcacatttgatattagagctttcaggaaaagtctggtggctcttggcagagtttttgattgcatatacaaggctgaaattaaatcttaaatgtggcataaaattcttaagaagtaactaccataatcagaagattaatgaaaacctatgcttcctgtctacttagaattctgaatttgccaaggcattaactctcaccagtttttttttttttcaaacaccccatacagttaatgatttttttttctcaactgttttctgtggtaaaggaaagttgccaaaatgcttagaattttagtgtaattgaaaaaygcatcagagattgcatttgaaccataattcaaaggaaaaaatgagggaaaccatataatc

SEQ ID NO: 852919 - DNA, 501 bp, Homo sapiens
gccttgcttgcttttcttttttgtttcatagaagccatttgggagagaaatatttatatttytacatatatatatttttgtagaagagtagtaattattatcttcaagtttcattttacttttttctaaagtatgatataattatttagtagcttgactgttgggccataaacttattccagtataaaatcccactactaccacacatgtaaaggagctataggaagcataacaactttccgtccctcttctttgtctctctctctcccttttaccctttcctcctcaccctccctccctccaggttatttaagaactgcaactaatattgacttgttttcttggccaaagttgacctgttctgtggtagatacttttccatagttggacctatcactatatactcatgtcaccaacttggggaaatcccaggaccaatatttcagcaaagaacctgtcgtcatctctattacagtctctagaatatcatataagagtttc

SEQ ID NO: 852920 - DNA, 517 bp, Homo sapiens
cagaagagagtgggggccaatattcaacattcttaaagaaaataattttcaacccagaatttcatatccagccaaattaagcttcataagtgaaggagaaataaaatcctttacagacaagcaaatgctgagagattttcacaccaccaggcgtgccttacaagagctcctaaaggaaggactaaacatggaaagaaacaactggtaccagccatgcaaaaacaggccaaattgtaaagaccattgaggctatgaagaaactggatcaattagtgggcaaaataaccagcaatcatcataatgacaggatcaaattcacacacaacaatattaaccttaaatgtaaatgggctagatgatccagttaaaagaaacagactggaaaaatagatagagtcaagacccatcagtgtgctgtattcaggagagccatctcaagtgcaaagacgcacataggcttaaaataaagggatggagggagatamacccagcaaatgtaaagaaaaaaaaaaagcag

SEQ ID NO: 852921 - DNA, 462 bp, Homo sapiens
aatcaccactaaagaacttatctatgtaaaccaaacacacctgtttcccacaaacctattgaaattaaataaataagtacataaattggggggagaaaaaatgaaattacaattagttaaatatatatatatatgtatgtatttatgtcattgatgtattatctattacttaaaaaaaatcagttactgaggaaaagtatcctagatccataaaattgttttctgcttgaagggtcctatgggaagagttgtgtcggtaacagcagtcttctaattacacttggcttttcacatcttcaaaatattacaaaggtgaatttcacattcacacaaagtttacattgataaatagcatattatacttcaaagtgaatttataattcataaatatatgtgagacttgtccaytttggatatccatttagatcagttaaattacttgcaatttaaatttagtagatg

SEQ ID NO: 852922 - DNA, 481 bp, Homo sapiens
agattgaactagtcaattgataggagcagaaataggcagatttactagttaacagtttcctagcatgatatgggaattagtcacttatgacttacaaaggtaatagagtgagttaagtggttagaggttatgtgtagataggcttagacataagctgctgcgcctctccattttaattgactgtgtgtctttctgcctagagtgttttgagggcagagatagtgcctggctattaagggaactattgaagaactcaccagacatttttataatgctatgtaaatcttctcatgagaacaagtataattttaaagaacaaaacagttgtttttaagccatttacactaaggtttatggatctttccagaaaaagccatgtagcagatgcaaatttccttgctaaaagcttctgttagtttcctagggctagcataayaaattggcactaactgggtgactaaaaacaacaaaaacttgttct

SEQ ID NO: 852923 - DNA, 600 bp, Homo sapiens
acttctatgagatcattattttttcttttttttttagctttcacacgtgagtgagaawgtgtagtatttatctttctgtgcctggcttattttacctaacataatgtcctctaagctcgtccatgttgccataaatgacaggatttcattcttttttgcagctgagtagtattctattatgtatatatgctacattttccttatccattcatctgttgatggacacttaggttgattctatatcttgcctattgtgaatagtgttgcaaaaaacgtgggagtgcctttcaacatacttatttactttcctttaaatatatacccaatagtaggattgctggatcatatggtagttctattttaggtttttgaggaacttcaatactgttttccataatggctgtattaatttacattcccgccaccagtgtataacagtgcccctttctccacatcctcaccagcattttttgtcctaaagcagtattttaaagtttatgttgctatacaagttggaaacaggagatcctaatgatggataaggaaatatggccaaatgtcttaaaacagatttctattatatgcattctttctttagtg

SEQ ID NO: 852924 - DNA, 600 bp, Homo sapiens
acttctatgagatcattattttttcttttttttttagctttcacacgtgagtgagaatgtgyagtatttatctttctgtgcctggcttattttacctaacataatgtcctctaagctcgtccatgttgccataaatgacaggatttcattcttttttgcagctgagtagtattctattatgtatatatgctacattttccttatccattcatctgttgatggacacttaggttgattctatatcttgcctattgtgaatagtgttgcaaaaaacgtgggagtgcctttcaacatacttatttactttcctttaaatatatacccaatagtaggattgctggatcatatggtagttctattttaggtttttgaggaacttcaatactgttttccataatggctgtattaatttacattcccgccaccagtgtataacagtgcccctttctccacatcctcaccagcattttttgtcctaaagcagtattttaaagtttatgttgctatacaagttggaaacaggagatcctaatgatggataaggaaatatggccaaatgtcttaaaacagatttctattatatgcattctttctttagtg

SEQ ID NO: 852925 - DNA, 526 bp, Homo sapiens
ataatgattgtctcttattctactcttcaaactcctgtaagtmatttagtactcctgtaagtcaaagtggtatatttaattacttctagtaactccttattgcatttagaataaagttcaaattccatgatctggccactgtttccatcagcctcattctcatttgtcatgcctgagttacactgaccttctttctttttctggaacatgttaagctcattgtcacctcagggccttcatatttctttctgtctggaatggtacatgctactcccccagatctttctgtgatctttctcatcattcacatctcagctccttagagacttatctgatcatcataactagagtagcctcgccttgtatctgatcttctatttcattttgctgttttatatatttttatagtactgttgcaggtggatgcccagggaaccagagagtgagtagtggttttgcatggaagaagttattagaggtactcttgatcaacacctgaagaagggaaggaaaataagaatgctgg

SEQ ID NO: 852926 - DNA, 374 bp, Homo sapiens
atcctccaaacttaactcatcatcttctctccaaaacctgctcccatcctgtcttctgtctcagagaatgaaatcattattcatgcagttgcccagccagaaaccctggagtgtttctgaatgcctccctttccktctccccttcccttcccacactactgactgtatgtctaccatgtgttcccatgtctctcaactttcacagacattcaggtcatcatctctcacctgtatcattagagcagccttctgactagtctttccttattgaatcccttcttacagtatcattattgattgttttaaaatgcaaatctggtcatattacatctctcaaaaaatttttatggctttcccactgcctccaaggtaaa

SEQ ID NO: 852927 - DNA, 303 bp, Homo sapiens
tcatttgcaagctggagaaccagggaagctggtaacttgcttcagtctaagtccaaagggctgagaaacaaagaccagagaacctgaagttctaatgtccaagggtaggagaagacaagtttccctgctccagaagaaagagcaaattcagctttcctttgcctttctgttctatycaggccttcagtggaatggatggtgccacacacattgggtgaggatagatcttcctactcagtctattgattcaaatgccaatctcttcctgaaacaactctacagacatacccagaaataaagctt

SEQ ID NO: 852928 - DNA, 569 bp, Homo sapiens
ttgctgcctgtggttccctgtctgtaatctggaaccatatgtgtctacaaaactactttgagataaataataaaaatggggaatgggaaaagaggtggcagttgccatggaaacacaggagtctttgtatgacttgatttggggcagtgacattcataaaggtgtgtgaaatgggagcattttcctgtgacaccatgtggaagcgggaagattacaggtgagacccccaattcaaagcagtagccggtggacccgggtggaggcatagaaatagcccaggattcggccgggcgcggtggctcacgcctgtaatcccagtactttgggaggccgaggtgggcggatcacaaggtcaagagatggagatcatcgtggacgacatggtgaaaccctgtctctactaaaaacacaaaaattagctgggcgtggtgtcgtgagcctgtagtcccagctacttaggaggctgaggcaggagaagcgtttgaacccgrgaggcggaggttgcagtgagccgagatcccgccattgcgctctagcctgggcaacaagagaaaaactccatctcaaac

SEQ ID NO: 852929 - DNA, 584 bp, Homo sapiens
agaagataattcttgaactggaatatagctccgaagaaatcaacgagaatgcagttcaatgatacaaagagatgaaagataaaattagacctacagrataacataaaaatatcctgcatgcacctattcgagagaatgttattccaggggagagtgatgttcatagacaaacagacatttttttccggttttaaaaaatggatcaaacaacctatatagtcctggcaagacaaataaacacaagtccatacccaagatatcttatatcgataggatagaatatcaaagagaaattcttaaaaggtacaagaaaggaaagtgagatcatcaacaaagggatgactgttagcctgacaactgtcaacctaacattttacacttaggttaaaccataatttggaagtaaaatttacatgaaaacatttgcagacaggaagcagacttgttaactcactggcctcttcaaaaggactataaaagggtgaactgaagtaaaaaggaaactgaaggtaaataaacagtgtgggataaaagagatgacattgagtaaatattattaaattaagtacagttaatgttaaata

SEQ ID NO: 852930 - DNA, 427 bp, Homo sapiens
cacggttggttgtgtgtgcctgtagttccagctacacgggaggcagaggcaggagaatcacttgagcctgggaggcagaggttgcagtgagccaagattgggtctttgcactctagcctgggcgacaggagtgaaacagtctcaaaagaaaaaattaattgacaaacattgtgtatattcaaggtatacaacgtgattatttgatagacgtgtaatgagttatcacaacaagcaaatggtacacaatatagtttcggagggtttatgtataaggggactaattagaaaggtttggaaatggtgtaggagaaccaaagggctagtgcccaagggcaagggaagggagyggttacctgaaactggaagaaaagatagttttgtagagcatctgctttgagagcagcagtgactcttatcaagagataga

SEQ ID NO: 852931 - DNA, 482 bp, Homo sapiens
gttgggaccacagacatgccaacatacccagctaattttttaaaaaactctytgtagagacgaaggtctctctatgttgttcaggctgatcttgaactcctgggctcaagtggtccttccacctcgtcctcccaaagtgctgggattacaggtgtgagccctgcgtctggcccatgactatcatttctttcttatggggtttattgtggtcactgcctagcttgtatctgattgatcagggaactgattcccttgcatctattcctaccattatctccagcatacagaggacagccaccatagagctgcacctttttgaattgggaatcagtcatcatgagcaaaggcacagcactgggaaggtgggaaaagataaactcaagatggtttggcaccctgcccccttcctgccatccagtgggtctctgctccattccttcttttacttgtctataagcatcttcctagaatatccttttgat

SEQ ID NO: 852932 - DNA, 624 bp, Homo sapiens
gcgtggtggctcacacctgtaatcccagcactttgggagttccaggtgggtggattgcttaaggtcaggagttccagaccagcctgaccaacatggtgaaactctgtctctactaaaaatacaaaaactaactgggcatgatggtgggtgcctgtaatcctagctactcaggaggctgaggcaggagaatcacttgaacccaggagggcagaggttgcagtgagcgagatcgtgccattgtactccagcctggacaacaaaagtgaaactccatctcaaaaaaaaaaatttataatggaaaaagaacaagaaatttcctccagaatcctgttggcttaaaatcctttgttccaggctccttgatttcatcagtgtgatgacttatgacttccaaggtggctgggacacatctacagtacacaatagtcccctacacatagaatccaaggatcagggtgaaatgcattatttcaactgtgtaagaaagaaaaacctcaaatcatatgcagaggggagatggggaagggattggggagaatcttggttgtatattaargctttctctttggggaacaattgctagactttgttcatcaaatacaacaaactgtaggaaaagagaga

SEQ ID NO: 852933 - DNA, 576 bp, Homo sapiens
tagtaagtgtcctttgggtagttcttaaatcgaggcaccaagacattaaatggagcaaaattttgtttgtktttttcctgctgaggacttactttctggtacctgcctgcatgaggtgtcatttcctgtttccaagaaaaagatcattatgttacagagtgatatgtatatatatacacataaagccttccaggtagaaaaaacagaatcatcctctttctgttcataaatcagctatggttcagccacctcaagctacagaaataagtcttcggtaggtagaaaaccgagatacgggtgtggttcagctacctagtgatacgtaatatataggttgtagaaataaatctaggatgggtagagaaccaaggcaacttatcacggccactatgcttaacacctcactgagagatttttagagatagtatctctgctccctaagctcaagtgtcaggaaaatgtcgtccaataagagattaggatcccctactgaactttagacttgcaacccaatcacacaaaagggtggaaaagttggaatttgttatttaactgacaagacaatataatgtatat

SEQ ID NO: 852934 - DNA, 645 bp, Homo sapiens
attgtagtcaccattgtatgccaactacatttggggctctaaagctctaagattaggccgggcacagtggctcacgcctgtaatcccagcactttgggagggcgaggtcaggagttcaagaccagcctggccaacatggtgaaaccccgtctcttccaaaaacacaaaaattagccgagtgtggtggcgggcacctataatcccagctactcgggaggttgtggcaggagaaccgcttgaacctgggaggcagaagttgcagtgagccgagattgcaccattacactccagcctaggcaacaagagcaagatgctgtctcaaaaaataaaaataaaaagctgtaagattttataacttcatgaggcagatccttcagctctgccggcatttgggccttaacctgaaatcagtactaagaagtcaagatcaggagaaaggagtatcttaattatgggcatttctttggtatagtcttggattctttattcctaggtagatttcgggcagacaacttgaacaagctgaagaacctatgcagcaagacaatcggagagaaaatgaaggtaagagaactgaatawcaaacagccatgagaacttgagcggagatatttgatcttgctcttagctaatgttcacagaagt

SEQ ID NO: 852935 - DNA, 620 bp, Homo sapiens
tgaacaaaatttaaagttaaaaagtatcaaaatcaataattaaaagatatttcacttcaaatgaaattgattttatagatrtctagcaaataatttgagacaaattaattagtatcctcatagacaataattaaagaataatttctattcaaaaaggtaaacatttattacacagcataggcataactgagcaaaaccttggaaaaaaacaataagagattacgaaaattatcattttaatcattgaaataaaaggacagagagtggtttccagattggcatgtaaggagcttggaagctgtcactccattctaacaagtaaaaatctgaacaaactgcaaaatcaataactcttcttctaagaggtatctacacctcacagaaatgaggtcacagggtcaacaattgcccccaaaactggtgagacagacaggaagttacagagaatcacaactgaccagagctggaacctcacaggaatgaggactgaagtaggaaaatatgaactgtaattgagaaatagagatttcatgaggacaattctaggggttacaatctccaggaagacctagtaatggggaggccaatacatttttgagagctttacctccagaaactac

SEQ ID NO: 852936 - DNA, 664 bp, Homo sapiens
acatcaacaagcatcaggacaatccaggaaaacagacctcaccaaacaaactaaattaaacacccgtgaccaatcctggagttacagataaatgtgaccttttwgagagagaattcaaatgaattgttttgaagaagctcagtgaaattcaagataacacagagaatgaattcagcatcctatcatataaatttaacaaagagacagaaataatgtttaaaaatcaagcagaaatgtcaggagctgaaaaattccactgacacgctgaagaatgagactctcaacagcagaatggaccaaacagaaaaattaaagatcttgaagacaggctatttgaaaatacacagtcaaaggagtcaaatgaaaaacaaaaaatgtagtgaagcatgccaacaagatatagaaaatagcttcaaaaggacaaatatgagacttattggccttaaagaggaggtagagagagagatcaaggtagaaattttattcaaagaaatgctaacagagaacttcccaaagctagagaaagatatcaagattcaagtatgaaaagattatagaacaccaagctgactgagcccaaacaagactatctcagacattgaataatcaaactcccaaaggttaaagacaaagaaaggatcctaaaagcagcaagagaaaagaa

SEQ ID NO: 852937 - DNA, 527 bp, Homo sapiens
gaaatatctccggcatacagactacaattagataataagacaatgttgtgctttattaatgtgkgtacaggggaagcagattcaaccaaactttatttattcatgtgtgttcttccaccacttatatggcagaaggtaatcatgacaatagccatgacttactaaattcccaacaccgttctaaggactttacttgtgttatctcatttaatccttgtttattaccttctggtaggcattaggattattatctctattgtacaggtggggaaattgtgccaggagatgttacatgacttgtccaatgtcacatggtggagtaagtgggagagccaattttgaattcaggaagtctggctcccgagctaggtgttttgctttttgtgttttaaggtgaagagtaatagagagccaccaaaaagcaaatcagcccaggtcagtggctttattctcactaaaaacctcccatttctgcaactaacaacatcttataaaaacagcagtacatcagtggacaagttagtgta

SEQ ID NO: 852938 - DNA, 527 bp, Homo sapiens
gaaatatctccggcatacagactacaattagataataagacaatgttgtgctttattaatgtgtgtacaggggaagcagattcaaccaaactttatttattcatgtgtgttcttccaccacttatatggcagaaggtaatcatgacaatagccatgacttactaaattcccaacaccgttctaaggactttacttgtgttatctcatttaatccttgtttattaccttctggtaggcattaggattattatctctattgtacaggtggggaaattgtgccaggagatgttacatgacttgtccaatgtcacatggtggagtaagtgggagagccaattttgaattcaggaagtctggctcccgagctaggtgttttgctttttgtgttttaaggtgaagagtaatagagagccaccaaaaagcaaatcagcccaggtcagtggctttattctcactaaaaacytcccatttctgcaactaacaacatcttataaaaacagcagtacatcagtggacaagttagtgta

SEQ ID NO: 852939 - DNA, 355 bp, Homo sapiens
aaaaactgccttttatgaagcataattgatttatctttcagtttattcaaatcagtaaaataaattttgatttattgaatgaggttcttaagcaaatagagaagaaatttattctttcataaatttgagggttcaagtttgtggtaacactgggagttacagcatcattttttaatgttgtacatacttgattttaaatactggttcagccgtttgactactctgagctgattttccyatctttaaataggaaaaacatatccccttttcagggttgctgtgtaaaggcaggtgttttagaaatgcaagttctcatagcatgagagctcatagtatctggtggtgttcaagcctg

SEQ ID NO: 852940 - DNA, 529 bp, Homo sapiens
atgaacagtctattaacatgtattttttctgttatatgtattataaactgtattcttacaataaagtgakctagaaaaaagaaaattatattaagaaaatcaaaaggaagagaaagcatatttactattcattaagtggaagtggattctcataaaggttttcatcctcatcatcttcatatggagtcagctgaggaaaagaaggagttcgtcttgctgtctcaaagatggcagaggagggaaaaaagtctgcatagaagtggacccacatagtttaaacccacatctttcaagttaaaattgcaataattttgttgagttgatcttttcaatattgtgaaatgactctctttatctttgataatacttttgtcttaatgtctccttctttcttgatatttgtatggtaattattttactatctttttactttcaacctatatatgtctttatataaaaaggacatctgttttagacaacatacagccgaatattgctcccatattcagactgacatctcttttaattg

SEQ ID NO: 852941 - DNA, 612 bp, Homo sapiens
agccttgaggattttcttatactgtgtttgaatgcacatgactgataatatgcttaatgtttgagaaattataaccttgcaattgaggktaatgatctactaactacctttgtgttgatcagattgtgtacaatctgggagagacaacgactaatccaaagaaatgaaactacagaatttcaggcattgtaattatacctgtaagaagttaacctagcagagaaaacgtttaactatccctcccatcaccatcaccattcattctatttgacaaacaggaggcatccaaatatttgctaggggaaagtcatccctgatcatccataaatcacactgtaacaatctcttctcaacaaagcctgcagtaactaaacctcagaagttcactgttataaactttttctttcaactttacaggggctgtttagaaatatatggccaaatctgtaacccggaaacagcaaaaaacttcttagcaaaggatcactaagtaccctttggatgtactcttccaaccagacaagagtgccagaaacttggcaagcaattcatcctgtggaagttgcaaatactggctgacctgcttaaaaagattctagagttggccggagg

SEQ ID NO: 852942 - DNA, 622 bp, Homo sapiens
gtagtttttaataatataaaatacttaagttgaaatacaaaagtgtggcaacaattattaaatattggctagaattctaggagagttacacaactagtggaagtccatgtttagaaaataaatggcttgtttaaggaaaagtttttgtgtccaaagctccttaaagtcagagagatttctacctggtacttaacatcatatggaaattgatgctttagtgagggtgttggctatcctattgctaatttcctgcatccttttttcttctttatttttgtatagagacagggtctcgctatgttgcccaggctggtcttgttcctgggctcaagcagtcctcccgcctcggtctcccaaagtgctgggattacaggtgtgagccactgtgcccagcttatccttttttcattacacaaaaagactgaatttggttagttctaagttggaagataaagatggtatgcacaggaggcccttgggagccctcagataactttctcattcttccaraatcaggctgggatgcattctgtaaattttccctgcctaggatgtatacctgaggaataaggtaaggaagatgtcagcaagtcagtctctggtttacctgctagctggcatg

SEQ ID NO: 852943 - DNA, 393 bp, Homo sapiens
gctgaacatgtggtggtttgctgcacagatcatcccgtcacctaggtattaaagccyaccatccattagctattcttcctgatgctctctctccctgccacgcaacaggccccagtatgtgttgttccctgccatgtgtccatgtggcctcatcacgcagctcccacttataagtgagaacatgcgctgtttggttttctgttcctatgttagtttgctgaggataacgcctttccgttcaaaggatatgatcttgatccttttaatgactgcatagtattccttggtgtatacatactacattttctttatacaatctatcatcgatgggcatttgggttgattccatgtcgttgctattgtgagtctacaaggaccttgagcaaatctaca

SEQ ID NO: 852944 - DNA, 539 bp, Homo sapiens
aattgttacaaaatgtttacaaaaaactatattcatagaaattctgcatgtccacaaagggcatcccctgaatggcccagagaccagtgtgtgggaaccatgttgagtgggagtggggggcgtccaggcactctggtctgggtggtgggacaggtctagggtctcagaggcccatggtgctccctgggggctcagcccagagcctgggaactgaggcccctaccatgggaggcccaaccaggaagtcggcccaggcagaggtgggctgggggcttggcgcacagtggtaagaggacccatgatccctacggaaccaagacaggatgctcctcatggggctggagtcaggcgtgcttggtcagggccccagaggcagacccagagttcagtgcagaccagcctgacgcctgargctgaagctggggcaggctgctgactgcacggaagcccacctcagatatctcctcccctgcatgctccagagatgctcagacctgcgaaagaggctaaaggaatggaactgcagagaacagaccgat

SEQ ID NO: 852945 - DNA, 627 bp, Homo sapiens
acatcctcacctactcactcataggcaggaacacatacagagtcccatagtgttcccaacatgcctttgataatgccgttgtcttcccctcactctaaatacacagyagtgacctcttaggcaagtcaaccaacatccctcttggcaacatccaagagggaagctcctttcctcactcactgtctcttcactacaaagctgtttccaacctcaaggagggacatggtgggggctgggcagcggggaggggagaaagtgccagggggctgcagtgcccaggaggtagaaggctttcccacccaaccccttccttctctcttcactcaggccccactggaggctccatctatcatttggaggcttagcctaggaggaggcagcggctgggagatggggaattagagcccagaggaaaggaaaataccccaggcttccattccaggttgattgagagcagttgattaatagataaacatataaataagtgggcctgcagccacagagttcctaaatcctaatcatttctgggaaacctttggaacagtggttctccaagcacagaacctggaccagcagctgcagcgtcactttggaactttttagaaatgcacattctcggccccatct

SEQ ID NO: 852946 - DNA, 505 bp, Homo sapiens
attactttatctgaaatgctacctattgaagcttctgattttcaatttttcaattactcaatcttctaaaacaggggtgtccaatctttyggcttccctgtgccacgttggaagaagaaggattgtcttgggccacacataaagcacactaacactaacaatagctgatgagctaaaaaaattgcaaaaaaatttcacaatgttttgagaattttacaaatttgtgttggacctgagcctcaaagctgtcatgagcctcatgtggccgggggccacaggttggacaaccttgttctaaaacattcagcttagtgtggctgaaaccaagttaaaaccaacttttgttctgtgttattatgttttgtttgtttgtttggagatgaccacaacaaggctaagagtaagagtgattcacttaagagaataaagggtaagtgcatggcccaagggactagagaggttgatttcttgtggtgctctggccagcattggctgtagaaggtta

SEQ ID NO: 852947 - DNA, 562 bp, Homo sapiens
gttttaagctactaaattttaaggtaatttgtaacacagcagtaataactactcagtacaatttatcaagtcctatgcttcactaatgagttcatcaaaagttaaattaattccgtcgaaggttttcaagtcttcctaaataatatatattcagattgttattatcaggtaaaattactttctctctgaccttaacatctttcctatttgtattatctctacgaaatgtgttctctttatgtgtgtggcatcttttcagtcagtgtattatgaccctaggtaaagtgttttaaaggttaattactaatttgaatatgagatggaaacagccttatcatttttgcaacacacaaatgggaagagagggatcagctttactcttatctaagttgtgcattgtcaaagtcactttatcctgcatcgtgactttaaacataatctataaatcctatttctctcatatattcctgggcctcttgcatttctttaattgccaratttatatgtaagcactttttgacatcttcaaaagatagcaaattgacacctcaaactaaacatg

SEQ ID NO: 852948 - DNA, 539 bp, Homo sapiens
agtaaatatatttataatttacttaattattcaaattgttatttgtctgaaggagaggacaaatcttgcaattacatcatactctattatggggtggaactcatgtgctatgaatgtattatgtaattggtgtttgtcaaaagtctattcaagcatcttttaagaaaatctcctgtaaaatatatagtacactaatacactttacaatattgtaaaaaatgaagtttctccaaaatcggtttataaacgctactatccaaagaacccaaatgtacctttaaagagaaattacacttggaagaaacaaatgtgtgtatgtttatgtgtgtgtatgtcataagcctttctatcaccatcattttttcagtgtttccaaataagttatccagaattaaaccaataagcctttttttctttmtttatttattattattatactttaaagttttagggtacatgtgcacaatgtgcaggttagttacatatgtatacatgtgccatgctggtgcgctgcacccactaactcgtcatctagcatt

SEQ ID NO: 852949 - DNA, 615 bp, Homo sapiens
tctgggatgactctactgatctcctgtatctataagttwgctgggtgttacaagctgagctaagcttggatcagataggcggctctgcctcaagttactctttgggtgagtttgcctctgggtgctggattgagttctggtctgcttctgtgttcattctgtggtcctaggctgaagggcagtggctgtctaggaaaagacttttaatagagatgataaaagcacaaggaagtggaaacacgtgagaactcttaaagctaaggctcaatagggacacactaccacttcttccctatttcattggccagggaaagccacactgtcaagcccaatatcagtagttaggaaaatataatcctcttttccgagtccatggcaagaatgtggatgcaaaatactatgtaaggaagtgaggaacgtggccaatacgtcagtccactatatcttccaactggaaactacgtttctgtggatatacatgacccattcctttataaaattcctcttggcaaagagtgctggctgttcaccaaacatcactttcctacccttcctggatatacagctaggacacatttcccagcctttttcgtacttagatgtgactatgtgact

SEQ ID NO: 852950 - DNA, 579 bp, Homo sapiens
ccggggcttgggcggccagcgcggcgctcgggctctcggacgggggtgcggggcgttccgggaggctcacggggagcagggggcaccgcgcccccctggcttccgccggggtaagcagtggtgtgggccggggtggcggcgatcccggcgccagggctgctcggcccgggccgggcgccgggggtagagggccggacggacccccgggctgcgtgcgggaggggagcgtcccgggcgccctgcaggcgcgctccatgggcgcagacaaagccgggcgcggacgccccgcgacgactcgggctgccgggagggtgggcaccggggagaggacagaaggctcccgggtgatggcccgaacgccaggagaggctgtgctgacttccccctctgggctccgggcgtccgggtggtccccttggggccccgggcagggtgaggagcagctttctcttaagggccaactaggggctcacgggttgtcccgggcttggcgggagccgggctcgcaragggttcgggtgtgttggagggctcactttgtgggaggggctgagggaagccactgccctggggtagggg

SEQ ID NO: 852951 - DNA, 546 bp, Homo sapiens
atccattgctgcggaatctccaggggctgatgcagggccaggcaagggtgcatcttgggggagacaaaacatacaaatataggtctctctaaggacttctgatgargaggcttggacccagcagagagcagaacagatgtgatggtcattcccattttgcggatgaggaaacggtctttccaagatcactcagagctagaccccattcctgcttcctggctcctgtcctccaagggagcagtcccagcgcagaggttggacctgcagagggtgttgagatgcagagagaaagacggggaggatgcggctgtgtgtgtcggtgtgtgagcaaggttgggcaaggacatctgtgtggcctgaggtgctttgtatgcctggagagcagagggctttgggagctgggcagcagcggggtggagggagacccaagcctaagcccagggtggagggagcttgggcactgcctggccttgtggctgtctctgcctcttcctctccggcactgtcagacctcagtggctgtgggctggccaggaggctgcaact

SEQ ID NO: 852952 - DNA, 535 bp, Homo sapiens
atatatgtatgtaacatagtaaacatatatacacacatacacaaacacacacatatatagtaaaagtgtaacagcatgcttgggaatgctaatactcaatatagagtagtgggacttgcagccagattgcttggatttgcatcctagttccttttcttactagctgtataatcttggagaagttatttaacctctgcaggcctcagcttgcttatgtgttaaatgggaaatgccaattgtatcagccagcaattgctgccctaatgctgtgtaacaaacaacccctaagctcagtggctttcaaccacaagcagttattttctatccacaagcctgtgagttggctgtggctctgctggactgggctccaggaagtggcttaggttcatgtctgctccacgtrtctccaccagcaactatccagggcttgttcttttcagggcagaggtcacatgcatgggtggctgctgaaagcacatgatgccttcttgagtctttggcccagaactggcatattgcttccacccacattcca

SEQ ID NO: 852953 - DNA, 568 bp, Homo sapiens
atcctatctcactgcagcctcagctctagggttcaggtgatcctaccgcctcagcctcccgagtagctgggactacaggcatgcaccaccacacttaagttttaaattttttttgtggagactgggagtctcactatgttgcccaggctggtctcaaactcctggcctcaagtgatcttcccacctcagccttccacaatgccggtattagagtttccagagccaccatgcccagcctccattctacattgagtcctgagttggatggtagaaaagagcacagcctcaggaagcccctagtttgagggcaaagacatactctcaaatccagttgtgaggttcccccctttctgctcacagagtcgtggaaacagttttcttcccagtctttgataccaaaaaggaggtggagatgactgggaattccacctggctggcccagcagaagctcgatgctcaaaggtggacaccaagagctgcaggttaccctrcccacacccacccattcctaaagccagcctgtggtcgctcatgagcagaggtgactgtgttagtcccctccttgtgc

SEQ ID NO: 852954 - DNA, 592 bp, Homo sapiens
tgagtcacatgtgtaattgacagtcttccmgtaaccatattaaaaacataaaaagaaagagatgaaattacttttaatagtgtattctaggccaggtgcagtggctcacacctgtaatcccagcactttgggaggccaaggtgggctgatcacctgaggtcgggagttcgagaccagtctggccaacatggcgaaatcctgtctctacttaaaatacaaaaattagctgagcgtggtggtgcatgcctgtaatcgcagctactcgggaggctgaggcaggagaattgcttgaacctgggagatggaggttgcagtgagccgagattgtgcattgcactccagcttgggcaacaagagcgaaactacatctcgaaaaaaaaagtgtattttatttaacctaatatattaaaaatattattattttgacatgaaaccgatatacacatgattaagttactaaatattaaaaatatgctgtgcattttattctaacagcacatctcaattcagactagtcacatatcaaatgctcaattgccacacgtggttagggtctatcatattggccagtgcacgttaagaccaatcaaga

SEQ ID NO: 852955 - DNA, 592 bp, Homo sapiens
tgagtcacatgtgtaattgacagtcttccagtaaccatattaaaaacataaaaagaaagagatgaaattacttttaatagtgtattctaggccrggtgcagtggctcacacctgtaatcccagcactttgggaggccaaggtgggctgatcacctgaggtcgggagttcgagaccagtctggccaacatggcgaaatcctgtctctacttaaaatacaaaaattagctgagcgtggtggtgcatgcctgtaatcgcagctactcgggaggctgaggcaggagaattgcttgaacctgggagatggaggttgcagtgagccgagattgtgcattgcactccagcttgggcaacaagagcgaaactacatctcgaaaaaaaaagtgtattttatttaacctaatatattaaaaatattattattttgacatgaaaccgatatacacatgattaagttactaaatattaaaaatatgctgtgcattttattctaacagcacatctcaattcagactagtcacatatcaaatgctcaattgccacacgtggttagggtctatcatattggccagtgcacgttaagaccaatcaaga

SEQ ID NO: 852956 - DNA, 666 bp, Homo sapiens
gtggttctttttagtgcaaaatggtaattggaaagcaagagctgggtgctaggtgtgctgattgctatgtgggggtgccgtcattgcttttaggtcctttctttggacagtgttaggaaatttttttttaaattatgagctcctattgatattttttattcagacttaatattataggagttttaaaaaacttctttgatctttaaaaatttgtctcatttctctcactggaaatattggttaatagcaacattatatatcttacaatatacgtaaagtagtttagaaataaacctcctgaatgaaggttaagtttttttttatatattttgtcttgggattttatcctaccataaatatataatcagaatactacattcaaagataattgaaataatgatattttccctaagtggttgctatcaacctgatacatagtcaggtataattatttattaattaattttttttttgtagagatagagttctcgctttgttgcccaggctggtctcaaactccttggctcatgtgatcctcccacctctgtggcctcttaaagtgctgggattacaggtgtaagctaccctgcacagcccatttattttggattgcattcaattttagggtttgyttttttctttttgatttagcttttgaatatgtaa

SEQ ID NO: 852957 - DNA, 697 bp, Homo sapiens
tccaggtgaatgttcttcacactctaatcatcattaacctacaggacacagaggactgtccagctatgtcactgaaccactacccagcagtgtagaaaccaagagtaaatccagactcaaaggaaaaatatatcagaataaattctgattcacaatgacaaaaacataataaggcctacccacaatagtttttaattagtgggaaataatacatttaagggtaatttaagtgtccttggaggcagataaaagtaaacaattgcaacaatgattttgttaaactgaaaatatcatagtcatacccaggctttattttccttaaatttcacttctttgaagtcagtcatctcttcttttgagatattagttactgcttatctgtgcctagagggagtccgtgagttagaagttaccatcgccacctgaaagtggccactggcgctggaggcctcatgctgagctatggattagagtcacttgtggaagtttacactaatactgatgctgggtgccactcccatggtttctgaatcaactggtctgcagtgccatgggggcacctggattttaaaagcttcccacctgaagtgttgtgagtggaccacgggcgtccgcatcacctggkaaccccttagacatgctagaactcaagtcccaccctagacctacagagaatcaaaacctgcattttaacaag

SEQ ID NO: 852958 - DNA, 579 bp, Homo sapiens
atttgtcactgctattaatgtaatcacataaaactttctcttgttctcaagtgcttttaaagtgagctatttgagcttttgattctgcaggttttccttctctttcaaaattagcaaaggtaatatgtaagccctgaaacttttttttttaaatgtaagagcagaagtaaagaaaagagtatggtagttgcttgggtaaattgagaaccgtggcgtatctttcatgggctgttgcccgtaattgtaataaaaatatcctgagaggatcataaaggacattgcaagtgttttctgaatgatatattagtaccagatcatctatgcaggccgtctgcacagccattcttctcctgttgtattttccctctgactgaggaactcctggccgcctcagggagagactccctgctgtgcccccgacagcaggaaaatcttgggatggacacagggtagtcatgggctttgctttggcatggtttctggagcycacagagttctaactatgtcagaggcatgggaaccagagcaactccatcttgaatggggctgggtaaaatgaggctgaaacctactgggctg

SEQ ID NO: 852959 - DNA, 576 bp, Homo sapiens
taatcgctctgattcaatcattacacaatgtatgcatgtatcataacatcacattgtaccccacaagtatgtataattactatgtgtcagtcaaaaataaaagtttaaaaaatctagttctgattaatacctacttaattttcaaagtatacaaaaacttttcttgtatacacctctatttcttccccttcttttgtgctactattgtcaaacagagtacatttttatacatcgtacgttcttcaataccttcataattattgttttatatagttgtcgttttaaatcatgtgaagtgtagagaagaggtacaaacaaaagtacattgatattggtcaggtgcagtagctcacgcctgtagttccagcactttgggaggctgaggcaagcaggtcacttgaggccaggagttccagaccagcctagccaacatggagaaatcctgtttctactaaaaatacaaaaaattgctgggcatrgtggtgcttgcctgtcgtcttagctacttgggaggctgagccacgagaattgcttgaccccaggaggtggaggttgcagtgagctgagtccatgcca

SEQ ID NO: 852960 - DNA, 504 bp, Homo sapiens
ttacagcaaacaaccacgaacgcattacttagatttttrtattaacaattaactctacttgttttatcacatatcgatcacattttcttttgaggtaaaatttacgtatcattaaatgcacaaatcgtaagtgtacatttgatgaactttagcaaatacatccactgtgtgctccaaatcaccatcaaactatagaccactacgttggaaactccctggtgttcagctcatttccagcccccacccagaggcaacgaccattctgatttttttccaccatagattagtcttccttgttcttgagccccacataaatggaatcatataaggcatactcttttgtgtaagacttctttcactcagcataatgtttttgaaattcatctttattgttgtctttatcggtaatttgcttctttttattgcttataagttttccattgcatgagtataccattgtttattcttgtttctggacacctgggatgtttccaggttttgacc

SEQ ID NO: 852961 - DNA, 326 bp, Homo sapiens
agggtgactggtgaagagacatgcccgcactttcttttatkacaagccttctgagggcatgtaagagaagcccaggacagtctgccagattggcttctcccatcctgcacaggaacaggaactgccgggatcaaccagcccatggtgaggctgcagcacatggactcagaagccatactgatggggctaagaggccaggaggccactctgactaagttttcattgtctcctagagtgggtaggattgtgtcctcccaaaagttatattcaagtcctaatacccctatacctgttatcttatttgaaaatagggtctttgctgatgt

SEQ ID NO: 852962 - DNA, 326 bp, Homo sapiens
agggtgactggtgaagagacatgcccgcactttcttttattrcaagccttctgagggcatgtaagagaagcccaggacagtctgccagattggcttctcccatcctgcacaggaacaggaactgccgggatcaaccagcccatggtgaggctgcagcacatggactcagaagccatactgatggggctaagaggccaggaggccactctgactaagttttcattgtctcctagagtgggtaggattgtgtcctcccaaaagttatattcaagtcctaatacccctatacctgttatcttatttgaaaatagggtctttgctgatgt

SEQ ID NO: 852963 - DNA, 596 bp, Homo sapiens
gggaataatgattgcaccttagcgcccagggctgcaagttttaaaagagrgaaggcacccatcacccttatacatcacaaaccatctgggtctcacccaatctcccagacagactggatacctgttgccctaaaggtcaatgacttttatgcccccatccaagatcactaagggtggagtttcagtggctccagtttgcaacctctgagtctcaggctgagtttggagggtctggcctgagggcactgccagaatctggccctccagtcctccttctgaagtttgcatgaaaggtgcactctcctgcttgccaggattcaggatgcacagtctgcctaagctgagtgtttgtttccagcctcaaaaacctgagggcggacctctagctccaccctaagcttactggctgggcacagccaaaagacctcccccctctgccatgtcttcaggctccctgctggcctagctggggttagaggagaggcctgtaacctcacagcctaattgagagagggatttccaaactgtagacaatattttgggggacagtggtccaggcccaagggaggtgcatctttaagtgcacccctacccca

SEQ ID NO: 852964 - DNA, 628 bp, Homo sapiens
tgtatatacataaaaaacatatatatatttgttttttaaccacttgtctcatttaatgaatttattccttaaggccaccatgggaagttgggaggtaagtgttattattttcttgatttttcagatgagcaaatggggtctcagtaggattgagtagcttgcccaagtccgagggctagtaaatggcagagtaaagatttggttacaggtaggttcacaccagtgcctgcgtgcttcaacagtgtaacaaatatttattgagtgtgtattaggttctaactactttttacataatgctttatttaactctcactgtaaccttttgcagcaggtattttcatcctggttttatggatgggggtgtggctgctcaaagaggttaaaggatggacctacaacatcctatggctaagaaatggcagctccagaatttcctctcaggttcccctgaagccaaagagtgtctctccactgtgccctgtgttccagttcaggtccaggctggggaccatcaacagagtattgagatcctggcccacatcaggctagcgggkgtgctgccccccttgcttttgacagtatctgtcacaaccacaggcctccccttccaaagcagggcaacaaagtt

SEQ ID NO: 852965 - DNA, 622 bp, Homo sapiens
atctatattctaaggtggttgaacagtggtctctcccaagagacttggaagtctctgaggcatgtgttcaaaaaacacagctggtggcaggccttgaaatcccagtggggtgagcatggagcctggagcctaggtaggggaggggaggaggctgatgcactgaccatgtctacacagacttggtgccgactcagcaacatggcggcatccggcacgaaccgtagtgaaaggggtgtaatgggaagagggcgaatatggagtagagtggggctgaggtgccataggtatcattcaaagagaaattgagttctctttttcccttgctgtgaccatagactagaatcaaagactgtcagcttctctaggtgaggctctgctcatgttaggtcaagtttatgctaggagacaacagagccatccatccacttccctcccttctccttctcctcctccctcccagctaaagggctctatagaaactgaccacagttgatcactggctggctctggggttactgaggcctgctctttatggggctctaggytcatcaacctctactgcttgctttgctctgccctggattgctctccttgtcaatagggtggattctgtgtctcttgg

SEQ ID NO: 852966 - DNA, 629 bp, Homo sapiens
tgagctctttcctagccaatgaggcaccagtttgtgaaaagagcttagagggtgcaaggatgcaggctgcactcatgcagcaggacagaacaaggcagccccatcagttccaggccccaccagcttcagccgaggcagactgtgaggcaaagcggagttatgtgattctccagcaaggaccatggcatttatggatttatattgccttgcatagttgggaagttcaaggggcagaccagacttcaggccaaccagatccagggtttaaacaatgtcaccagggctcctctttctcccttgtctctgctctgctttcctgagtgtgtcctcattctcaatgcaagcctcaggcttgtatcttcctcatggccagtcccagagaggtactgccatctttctccctcattcttattcatccctgaaaaagactgattggtagacttggatagcataccctcttcaatcatgtgctagggattgagcgcagagtactctcattgtccatcctggaggatagtacttgtggctcctggattgacascccaatcagaaacaggtggtgtaggtacagtaattttctaaagtaagggaagcaaggtggacccaaaagtaagggagattttccatag

SEQ ID NO: 852967 - DNA, 356 bp, Homo sapiens
tgaaatactgatttgtggaaagaatccatacgggacttggatgcagactgggcctgccttagaatctcagcttcactggtagctgtgaacgtgccttgggagagtcacagaactcygctgctcctgtctgtgatgggtgtcattgatcctacctgagatgttggtggaagggtgagtgcctcactgatcatgctgtgcgggtgcctagcagagtgcctggcacgttgtgggtgctcagaaagtgtgtctcgagtgagtggaaaagaaaaggtgccaattgttatagcaacaagaggggactgtcccgccctcctgggtcagtttctttctccctctgcaatgtactcagaggtaag

SEQ ID NO: 852968 - DNA, 567 bp, Homo sapiens
tggggagaactgacatcttaacaatattgagtmtccaacccatgaacaagttatctctttctgcttatttagctcttttattctttcatcactattttgcaactgtcagcatatagattctgcatatttttcgtttgattaaagctaagttttaatttttttggtgttgttagaaatagtgctgttttaaaaattttgaatttcaattattcatttctagtttatagaaatacaattattattttttttagagagagtcttgctctgttgccaggctggagtgcaatggcatgatctcagctcactgcaacctctgcctcctgggttcaagcgattctcttgcctcagccccccaagtagctggggcgacaggtgtgcaccaccacaccggctaattttgtattttttgtagagacggggtttcaccatgttggccaggttggtctcaaactcctgaactcaagtgatccacctgcctcgacctcccaaagtgctgggattacagggctactgcactcagccttatttttgtagcttgacttttgaaaaattccacaacctttaatt

SEQ ID NO: 852969 - DNA, 603 bp, Homo sapiens
aataaagacagccctctatttttgaatactcacatctttatttttcttgtcytactattcttacgtcatttaattatctgaataaataatgaataattaggatgtcataggacatacttttctctgactaatttctcaagtttctgttttctttactagattaaaactgagacttgttcaacaatgacccttaactactctacaatctgctgtcagccagagttaggagtgggtgacaacagagttgctaagagttatatctgtgtagtttttggagagcttccctctatgattaatttatgagtaagggtttcattcttttcactgtagctcacagaagtcatgtcttgttagtattgccttgtgtttatttctttatgcacaaacaacaccttaaaaatgagagagagagagagagagagagagagagagagagagagagagagactgagtttgttaaaaagcttttccaagccttattttcctattttgtagtcagcacctccataatgccttgagaacctctctagtgtccctacactactgtgaggcttatggtgtcactgtaggaactagaaattaagtcatgattaactttggata

SEQ ID NO: 852970 - DNA, 613 bp, Homo sapiens
tatatatctgaaaaaattgaaagtggggtctcataccaattctgtttacaactgrtaagaggtagaaagcaacacacacgtatggaatattttatatatacatatgtatgcatatgtaaatatggaatattatttaatcctaaaagcaaggaaaacctgtcacatgctgcaacatagatgaaacttgtgaaaattatcccaagtaaattgagccaatcacaaaacacaaatactacataatatcacttatatgaggtctagaaagtagttagattcatagaatggtggtttccagagaaggggggaaaagagaattgttgaatggatatatagttccagcactaaaagatgaaaaagttgtggagatctctttcaaaataatgtaaatatgcttaagactactgaactatacacttaaacatgggtaagacaataaattttacaatgtgtgtttattaccataataaaataaaatgcagagtagtggagcatgcacaggacagaatgaaggatggtgaatcccctcttctaatgaccacagaggcctctggctgaggcgccacgaacgtccctgcccactgaacaggcaggttgaaggctgtggcatttgaac

SEQ ID NO: 852971 - DNA, 613 bp, Homo sapiens
tatatatctgaaaaaattgaaagtggggtctcataccaattctgtttacaactggtaagaggtagaaagcaacacacacgtatggaatattttatatatacatatgtatgcatatgtaaatatggaatattattyaatcctaaaagcaaggaaaacctgtcacatgctgcaacatagatgaaacttgtgaaaattatcccaagtaaattgagccaatcacaaaacacaaatactacataatatcacttatatgaggtctagaaagtagttagattcatagaatggtggtttccagagaaggggggaaaagagaattgttgaatggatatatagttccagcactaaaagatgaaaaagttgtggagatctctttcaaaataatgtaaatatgcttaagactactgaactatacacttaaacatgggtaagacaataaattttacaatgtgtgtttattaccataataaaataaaatgcagagtagtggagcatgcacaggacagaatgaaggatggtgaatcccctcttctaatgaccacagaggcctctggctgaggcgccacgaacgtccctgcccactgaacaggcaggttgaaggctgtggcatttgaac

SEQ ID NO: 852972 - DNA, 609 bp, Homo sapiens
aaagagaacagcccaaaagcagcaatggaggttgtgggcagccaaggaggacacttagtcccttccaggtctgggggaaaatcagccactgctagagkgggctgcagggaatgtcatgttggatttagccaagtttgtggtttgccaaggaagtgggagcaaatgagagagggttaagggcaaaagggtacatgcaaaggattaactatgaagtttcagctgcataaggaggggagtgaaaccaccaagaagggcaggagcagtggacagcaacgagatttaagaatcaatgaatcatgggtgtcagtggggtggaaagactcccgaggacctgatttctgtttgaagaacaagaaagtgagagaacattcagagaagagatggcaataagggggatttgtcctctgtgatttgctaggaatccaaatagcacaatggaaggatctcagaattgggggaaaggtggaagagatggacagaatggggatgagcagaccctcacaatgtgggagatgaggggtggccttgcagtttggggcttttgaggtggttttcataaacaggaataaagtgaataatgtggatccaaaggagagggtggggtgaggc

SEQ ID NO: 852973 - DNA, 551 bp, Homo sapiens
acatatgtatacatgcaccatgttggtgtgctgcacccattaacccgtcatttacattaggtattttttaatctaatctgtcagtatctgccttttagttttggtgtttggaccatttacatttaatgtaattatttgtatggttaaatttaagtatctcatcttgctatttgttttctacttatcccatccatggcggttaattttatgtgtcaaattcactgggctatggtatatccagatatttggccaaacattattctgggtttatgaaggtgtttctggatgaaattaacatttgtaccagtagactgagtaaagcaaattgctctcctttatttgaatggattccatccaatcaagtgaatgtctgaatagaacaaaaaagccctcctgtgagtagaggaagactctctctgtctgactgtctttgagcttggacatcagtcttctcctgcctttagatttgctcttggactggaactyaaaccattggcttttctgggtgtccagcttgctgactacagattttggaactactaagtctttgt

SEQ ID NO: 852974 - DNA, 623 bp, Homo sapiens; identical to SEQ ID NO: 849738

SEQ ID NO: 852975 - DNA, 523 bp, Homo sapiens
gtgatgaggcattcgcaaagataccagaccaggggatcaaagacctgagcaagtgcaaagccartgagaactgagtgtaaactcacatgtgaaggtgtattagttagaatgtaggtttggttgctctgacagggaaacttctatttaacaaggtggaagtttaattatcttgcagagacatccaggcaggttgtctgggaatcctaacatcatcagagacccagtttcttttccttctgtgacttaccattctcagcacagcctccatctcatagcgcaagatgactgctccagtccccacattctaaaggaggagaaaaggggaagaaaaaagaacaccccttccctgcaggaccacagcctggaagttacacgcgtcagttctaggcacaccctgttggctagaatttggtcacgatgatgcattcatgcaaaagggtcttggaaatatagtcagtagagctaccatatgccaaacccagaatcccagttatagcaaataaagggagaatggatgtcaggg

SEQ ID NO: 852976 - DNA, 631 bp, Homo sapiens
ctgctgaccctagaagaatatttttactgtcccttttctatgcttagacatgtttagatccacaaatatttaccattgtgttatagttgcctccagtattsagttcagtcacatgctgttcaggtttgtggtccaggtgcaatacgtcataccatatagcctaggtgtgtagtaggctatgccatctaggtttctggaagtacactctatgatgctcacgtgacaaaatcaactaagaacacatttctcagaatgtatacccattgttaagcaatacatgactgtgtgtctgtaggccatatatattaatatatatatagtcatttgagatcagtctatatacagtgttttgtaccctgtattttctttaataatatataatgaatacattttccccattactaggtactgaaagacataattttaaatgactacatagtactcgtatgaaaatgctattatttacttaacctctgtgagactttttggctgttccgtttccccaggattctaaacatcactgtgtcttcttacatgcattcttccacacttcttggttgttgccttaggatatgttactttaggtagaattcctgggctgcgctgaagaatagaaacattttaaagattc

SEQ ID NO: 852977 - DNA, 545 bp, Homo sapiens
agattaggttgtgtgcttcaaggttacaaagctaaagtggttaagctgggattcaaacctgagtttggtgtactaccagtaatattatattaaagacataggataaggaatattatccttgttggtatttaccttagagtttatatgccaaatgctgtgttaggcattggggttcaaagatgaatgcagaagtctctggactggcatacttggttttactgttggcctctacattttatcttgaaaatagccagaataatctctctaaaacttgtcgtgccatgccacttctctgcacacaattatctaatagctttccatcttactcagaatacattcagaattctttattctatgtgccatgggccctggctacttttctaacgttctctcaccttatcttgtaatcttagtgcccactactctccagccrccttgtctttgctgttctttgaacaagccaaggatgttcctgtcttagagctttgtgcttgctattccctctgacgagaattgccttccacaagataatttgaatggcttac

SEQ ID NO: 852978 - DNA, 410 bp, Homo sapiens
aggcagcagactttcctaaaatactcctgaagcagtgtcatttgatcatagaggttaaagtaggtgtaccagtttgcccaccaaattgcaggtgagacacaatcacaatacttttctgttwgttgttgtgaagaatgcaaattaatgaaaaaaaaatcttatggtaagtgatttgctattacagaaattctgtgtcttaaaaaatggtatcatgaaatgggtatacacattatataacataattcattcattttctaaattcatccaactgctgttttccacaagagataattattataatggaaaacatgatctaattctgtttgtctattttaaagataattagactttatttaaaaattctctgaacatattttcttcagtattgtttggtacttaagcaggctgaa

SEQ ID NO: 852979 - DNA, 572 bp, Homo sapiens
tatattttcagtcttctgcctttgtctgatctgtatcctaaacacatatttaaggggtkgttttagtctttcaacaaactactagaaactttgttaaatttattttaataaaatagaaaaaattgcaaacaatcatagagcttaatgatcaacagatttagtaagcagatttagtatacatattttaatcatttcatctgagaaacaatagcacacatattttattacaaatatgttaaaaggattcttcaaatatgtagtccactgactgatgttttgtgacttagagatgcacagaaaacaatttgattataaaatattatgacccctactaattctttcatgctctattttatgaaaagattggactttcttttttctgtatgcttttcaacaggttatagacatatatgttcacagtctagataccatatgtacactaagttcttcaggaagagaaaaaattttttttcttatctgcactttgttttctctcccactttaaaatctttgcataaaatcaccttgcagagtgatattctttactctctctcttcttgtctgagttgttg

SEQ ID NO: 852980 - DNA, 645 bp, Homo sapiens
ggtattttgcaaagcagatagactgcatatttgatttatattacagtgaaaattaatatttatataaagataagagaagttaacaagaaaaggcaactgttartggaaaagtaaaagaatgttggaagtgtacacagatgggtggctggtgaaatcacttttgtttttaatggaatctgttattctctgtcgttgaatcattcttacgtgtgtactaattgattttttaactctttcaatgcatctcataattctcaacatcatttaatctgaataattctgggttgattcagtcctaaatgattccagaaagataatcacttattttattcttttaaaaccttgtctagaaagaaatattacaaactaatttgggttaaattcccatctttcttaagcactggttgcagctgtgctccctgggaagcgaactctgagactgagattacatgcaagattgctctcagagaagagaagggaagggaagatggagaaagggaaagggagaagagggaggagaaagaagggaatgaattggatgtgagagcaaagagaggaaaaggagggaggggatgaaagggagaagtgggggaggcagcaggattgggcagcacaataggctaaatgttttgtgtacccccaaaa

SEQ ID NO: 852981 - DNA, 462 bp, Homo sapiens
tcactaattatcaggaaaatgcaaattaaaaccacagtaagataacaactcacacctgttagaatggcttatatatctaaaaaaagaaaaaaagaaaagaaaagtgttggtgagaatgcagagaaaagggaacacttgtacactgttggtgggaatgtaaattataataaacattatacaaaatgatatggatgttcctgaaaaaactaaaaatagaactaaaatatgattcagcaatcttacttctgaaaatatatccaaggcattgaaatcgttgtatcaaagggatatctacattcccatatttattacagcattaattacagtatctaagatatggaataaacctgtgtctatcaatggagaaagamaatgtagtatacgtacacaatagactactactcagccttataaaataaggaaatcccgtcatttgtgacaacatggatgaacctaaaggac

SEQ ID NO: 852982 - DNA, 651 bp, Homo sapiens
gaaataatgccaacctcatggcacacgatcaatcacactagcaaatctgtctgccaagaaactggaattccaagttactttccyagtagtgaaactgtctggtggaggcaacataactgaaaacacacctcaaacacctgcagccctaggctgccatggatgcaggaaccctgtaaccatgggcttccctgctctgtgtcataactcctatttctcctgctcaaataacatgtcttcagagaggcctggcctagctccatctaaaatccccatacacctctagttaatgtttatacctttattttctttgttttcatcacaacacttttcacggtgtgaaataatctgacttccttgctcactttcttgtctgtcttcactccagaaattgaggtccatgccagcagggccttggtcttatttctggttctgtcccagaaccataaacagtgtctgatggagttgaacagatacataaatgaatgaatctctgcccgtctgatgtgtttccatccttcacacccagcccagatccttcctcccatgaaggcttataaataatccagtccacagtaacttgccctcattcaaagtcgtatcacaatgcctcatctaaactcagttgaatccctagagcagttgcctatgcca

SEQ ID NO: 852983 - DNA, 549 bp, Homo sapiens
cagtcctacagtctcctgtcctcagacccctaccatttctgtttctaaaaggtaagtctgagcctatttaaaacattcaagggctccctattccccacagaggaaaaaaaaaagtcawttcctccacatggtgcctagattcttcataatttggcagcttctacctgcccagccttatgttcctgcaccatatggacactacagccacatcaaattattaccatccctgaatgcgcctgcatgcaccctctgcttagaacaccctttttcctccactcctgcatgttctcaggctcctattctccaggaaaccttctgagacagccccaacactggctcctgtaatggaatgcctccctgtcaaggcgcctggcactctctgggatccccaacaggatcgcctctttgttagattctgagcctctccacagtggggtctgggcactcccccatgatgctgggggatatcacagaggctgtgtatcataaatactcaaaggtgcttggagacagatgctggggttattcatcactgtgtatcctcaaggc

SEQ ID NO: 852984 - DNA, 507 bp, Homo sapiens
tccaggtagaaagaggatgataatattcttaatatcgcagggggtgtacaaccttcctatgatgtttttcctaatatccagaaagggaataaatgatatcactcccaatatcgcaggggctggacactccccctgtgatattgtttctaatattcaggggaaaaagatgatattacttccaatgtcacagggtgtgtatgctcccactgtgatattgttcctaatatccagattagaagaggataatattgctcctaatatcgcagggggtgtatgccatttctgtgatattgtttttaatattcagagggggagaggataatattacttccaatttcgcagggggtgtacaccccactgtgatattattcataatatccaggggggaagaagatgatactgctttcaatattgcagakagtgtacagcctccctgtgatattgttcctaatatccaggtggggagaggatgacattactcccattatcacagaaagtgtacacgtc

SEQ ID NO: 852985 - DNA, 446 bp, Homo sapiens
gtggggagaggatgacattactcccattatcacagaaagtgtacacgtcccctgttatattattcctaacattcaagaggagagacgatgatattactcccaatatcaaggggggtggtcaccacccctgtaatattttgttaaatatccagaagggagaagatgttattactcccaatatggcaaagggtgtacaccctctcagtaatattgttcctaacttccagggggagagaggatattactactttcaatgtcgcaaaaggagtacaacctttttgtgatactgtccctaatatccaggaagggacaaaatgatattactacaaatattatagagggtktcaaacccccctgtgatattgttcctaatatccagggaaagagataatgatattactttcaatatcacagggcgggcatacagctccctgtgatattgttcc

SEQ ID NO: 852986 - DNA, 500 bp, Homo sapiens
tttaaggtaatggcagtttagctatccaattgcccaggccaaaagccatggcattatccctaactctttgttttctaccctacatmaaattcattagcaaagcctttgagttagaccttgaaaatatatctagggttaaatcacttctcaccatttccattactatcatcttggttcaagccagtaacatctcacctaaattactgcaagtttccaaacacatttttccactttcatccttgtcttcctaaaaggtcttttaaaatcagcagcaagtgtgatacccttgaaattaaagtcaaatcactcttcagctcaaagccccttattcatttagtagttattacctaccatgtgccggccagagggatactagcgtgtacaaaataaacaagtttcttgccttcctggagcttgcagtatatcaagaaagatggataataattacacaattagtccataataattctaacaaatgtcataagggataagcacaagga

SEQ ID NO: 852987 - DNA, 593 bp, Homo sapiens
atgatcaatcaggtgcaccgctcaaagttctggccactgggaagatttttcaccttcatccttcagggatgtgtcagaaaagggctctagtgctgcagctgtccacttttaagcagtgcctgcatatcatgcagaaatatctataaagcaggtctgatctaagggaatgccccataaagccataggtgcaggcttagagagaaaactcagggtagcaggaatgagaaacgtggacatttggaccacttcttcatggaattcatttgtgtcgttagggcctgcttgggcccagtcatatatataccccttccatttgatgatggagtgcttctgtgattgcccaaatttatgacttcatgggtcaaaaaacacacaggtcatgatgggcagctccagtcccatggtaacttggtggcccatggttaagtactcagtctctactaagacctagtgttaggcaaatactgtttttcaaaaggagagtatctgtggaggatgrttgggctttgcttcaaaattctagtggtctgtgctgcaattcaactatagagatctgccaaagaattcatatgtcatccttatctgcctttgat

SEQ ID NO: 852988 - DNA, 549 bp, Homo sapiens
acgcacaaactggaacactggtttttatgtggattatactctcatgcacttctctaaagcctacagttttccatgtgctttttcttgtatttgaaaaggtatattttagataccttgacttcattaaattctttgcatccttttgtatccaacaaaagtgtcattttctccatgaagtcttccacctctgcctcctgctgagcccgtttttgtcccttctctgttccgtagttctttgtttctacaacaaatcttacatacgctatattgtatactacttacttgtttatctgctatttttctcagcagactgagagcatatgaaaggcaggaaccacatctcaatcacttttgattgagcttctcagtacctctgtaagataatatatctcctcattctcgtatagactgaaatattctgtatctgacagacatgtgatttagacctcactttttgtcccaaatttaatccttcaaaaagctagagttatcataagactattaragtaatgaattgcctttaccagtttggcattacttgaaccatgt

SEQ ID NO: 852989 - DNA, 637 bp, Homo sapiens
tgtttacaccaacatccctccaaacacatgagtaatgcattgcactacsatgccactgggcaataggaatttttcagctccattataatcttacaggactggcattttatatgaagtccattgttaaccaaaacattgtcaggcagtgcatgactgtatgtaagttcaaaagacagttatatttctctaatgtaattattttgagggtgcaattttataaaggcagaagttagatatagagggttttttaacggtgcaatgtcataaagtgactcttatatgtattatctttataggttcattcaaagaagataacaattttagcataatatggttacatgccacaattttgggttcaaattggtgttttaagagaataaaatgtacatgaaaacataaatacatagtataactaaaggaagatgtagaagtgagatgatacattactaagatcttcgtatacctctgggtgaacttctgcttactcggagacagtaactgatgtgtgatgtgtcagaatttcagtgatataataatagaatgaaataatgagctctccatcaacagaactgttcaagcatgagctaaataaccatctagcaaggaggttatagactggattctttcacaagtggga

SEQ ID NO: 852990 - DNA, 638 bp, Homo sapiens
tagatttaatttagaggtaataagagagttttgtttgataagtgcatattttggtttcacactagctcttattctccaacaactgtcattttgcttccttttcagggacagctttctactctcatccagaaactgattcatttactggtttcctttcttttttttttttttttttttttttttttgagacggagtcttgctctgtggcccaggcgggagtgccgtggagcaatctcggctcactgcaagctccgcctcccgggttcacgccattctcctgcctcagcctcccgagtagctgggactacaggcgcccgccatcacgcccggctaattttttttgtatttttttagtagagacggggtttcaccgtgttagccaggatggtctcgatctcctgacctcgtgatccacccgcctcggcctcccaaagtgctgggattacaagcgtgagccaccgcgcccggccggtttcctttctttgtggcagatgaaattccaatgatatcaaccatcctgaaaggtcattaatatcaagcattagagtgagaacagaagtcctaaaagtcattattctctgacagatcatccgtttgtgcctaatgaatcagtttagggactrtccactgcctgtgat

SEQ ID NO: 852991 - DNA, 636 bp, Homo sapiens
aaagtccgtggtacacagagagtaacaaaaacaacaagaaaacataaaccctgctcaattccagactaaaatgactcaacccctctcacaaaagscttagcataaggagaggcagacccatttagagcacaaatacgactgtcaggaactactatcctatacatgatgtccagttttcaactaaaaattaccttacacatgaagaaacaaacaaacaaaaaaagccagagaaaaaccgatagaatcaaaatcacagatgaaccctatgttggaactataaaataatttaaaataactgtgattaacatgtcaagagttaatagctgaaaaggcagacaacatacataaacagatggaaattttcagcaaaagtaagaaactgtaaagaagaaacaatggtagaaataaaaaatacagtaaaagaaatgatatgccttcaatggacttatcaaaagactcaatgaagccaaggaaagactcagtgaatttgaagataggccaataaaatatagacatattaaaacaaaaagaaaaaagaatatatacacactcaaacggagtgtgcacattggtgcattcaaaagctattaaacagtatcaaataattttatataaatgtgattggagtcacagaaa

SEQ ID NO: 852992 - DNA, 480 bp, Homo sapiens
caagattccatggtacctagagaccagcagtgcctactcaagagaagctcctgtagtcctgacccacatcgctcagtcccagatgacagtgacgaggagctgggtcccctgtcttgccgtggcgctctgaggaggccatgtcttctgcagcagccacagcatgatgcccatcaatgcccggagattttgtctcctcctgtgccatgcaaggtggtgcccattcagtaccaaggtcctggcatccagctcccaggactgtgggctgctgaggctgatggcaagtgcctccgtgcagtgcctgggggtggccctgcaggggagccctgcccagctaccactgggtctgggggcacaagccccactcctctgcttcagtgagggctgctctgaagggcccttccagtcctgagcctccgtggaagctgtcgggatccmcttgtgggcattgtctgccctccacgagagcctccccagaacctc

SEQ ID NO: 852993 - DNA, 631 bp, Homo sapiens
cgattgactgagtagactcgcaaaacatcgcatacatgcacagtttttgtaatgaatagggtatacttctagaacaccagcaaatcaggtttgcccctaaaaagcaaaagtaggttgacatmcaggtaaccctgttgaatcatcaatccagctggaaaggtaaagctccaggcagcgtcggaaaagtcactgaagctgtgtgcgtgtgggtaggtgagccagcagcatcagacttacagagtttgttcttggggcagcttcatggttaaaatgcattttggaaaagagatgttcagaggttctagggaagtggtaggaacccagtgctactaactaggcatgtaatctgacatgtcaagagccattttttatggagtgactccccttcagagggcacaagaagaaagtgttgcttttttcatgaaagtgtcagtgcttgcaacttatgaaagacactgctaaaagcagaggctctatttttattctccacagcctggccactgtggtgccggggctttgctgccaaagaggaaacatgcacaagtctggtcagtaaatatcaccagctagacagtcccagctgttgttccaggatgtgttttctcattgctatctgacaggttatccttcc

SEQ ID NO: 852994 - DNA, 617 bp, Homo sapiens
taattctcttgtcaaatatgttgagatgcttcacgatcattcagagtttttcaaaataaaaattcatggaattaatcatasaggagacaaattttgtaaaaagaatttaattttagggtttaaaagcaacaaattctccacatagggaagtgaagattcagaaggcatgtagtaagtaaagaatttgggcttgctcaaagagaaggcctagccttataggattgtctgtttgtctgggggacttgggtcaaagtaggtatctagcaatgtgatttagggtggggactagccacacatatacagttttatgtttggggctagacaaccaaaaataccaacaacataacttaagtgaggagctttgggtcacacagtgtcacagtatcaatggtcctggattctaagattaaccaaatgggcaacaatcaatcaattatgcctatatgatgaagctccccccaaaaaaccactcacaatactcaggtaaacttccctgatttgcaatactatatgcatactgtcacacgtagatgacagaacagtgatatcctgatttcatggctagaagtcaagtgaaatttcatatttaaaactctcctggacaacgttctatgtgt

SEQ ID NO: 852995 - DNA, 617 bp, Homo sapiens
taattctcttgtcaaatatgttgagatgcttcacgatcattcagagtttttcaaaataaaaattcatggaattaatcatacaggagacaaattttgtaaaargaatttaattttagggtttaaaagcaacaaattctccacatagggaagtgaagattcagaaggcatgtagtaagtaaagaatttgggcttgctcaaagagaaggcctagccttataggattgtctgtttgtctgggggacttgggtcaaagtaggtatctagcaatgtgatttagggtggggactagccacacatatacagttttatgtttggggctagacaaccaaaaataccaacaacataacttaagtgaggagctttgggtcacacagtgtcacagtatcaatggtcctggattctaagattaaccaaatgggcaacaatcaatcaattatgcctatatgatgaagctccccccaaaaaaccactcacaatactcaggtaaacttccctgatttgcaatactatatgcatactgtcacacgtagatgacagaacagtgatatcctgatttcatggctagaagtcaagtgaaatttcatatttaaaactctcctggacaacgttctatgtgt

SEQ ID NO: 852996 - DNA, 633 bp, Homo sapiens
attttctcttgtgatgagttaaaatctggccaattacctctgaccatgcctcattgtaatcagtatttattttaaggtatgactcctagaatttaaataaagtattggcgatgtggtgtaattagtgtagagtagaatgagaccttgccctgttgtacacttcataggtttgttgtgtttacttttttgagccatatgctctagaatgttttaaatatgtagcatcacatcatctaccatttagaggaccagaatatctattctgagtacacaaagtagactcatgaactaatatgtgaatgttttcccctctgaaggagaaatattgggagtttaacagcttgagtagaaatttccttttgaatggttaaccaaactggtatcacttttaaggtcctaaatcccaatctgtttttctagggaaacatgttggcagctgttcgaaataactagtggtttaaagacaattgttagtgtggttttctacacacttaaagcttagacctgctctgtyacttgtctttgatgctaaggagttgtctaagtagttgagttaaataatttcagattagttttatgcattaaatggtttggttttatttttaaaaacctctgttattatttaactctgta

SEQ ID NO: 852997 - DNA, 524 bp, Homo sapiens
cctatttgaatctgtaaagacccttaagagcactttgaatttgttcatctataagctgttaacccaaattcatgtcccaggtttttaagagaataagcaatagaatataggcgtttccaaagaggaagacgtacagaagcagataggtgtatagttcattcattcacagataggcactaggttagatccagtagttggcgtgcatgcatcaacatgttaatcggaattaaaggctgctacatttaggcttggctagatcatctataaattgaaacccaaaagagaattgttaactaggaaagtagctgtccaggttccttaaagtttaaatacagggatccaactagtattctccaaaatttttcaggaatatcagactttactgctgtggaacacttggctgttgtaagaggagtgtttcatctctcataaggatgtaaygaaaggaaattaggagccagtgggagagtgcagggacttaggtgtaaatcataggtgaatctttttttttttttcagatggag

SEQ ID NO: 852998 - DNA, 524 bp, Homo sapiens
cctatttgaatctgtaaagacccttaagagcactttgaatttgttcatctataagctgttaacccaaattcatgtcccaggtttttaagagaataagcaatagaatataggcgtttccaaagaggaagacgtacagaagcagataggtgtatagttcattcattcacagataggcactaggttagatccagtagttggcgtgcatgcatcaacatgttaatcggaattaaaggctgctacatttaggcttggctagatcatctataaattgaaacccaaaagagaattgttaactaggaaagtagctgtccaggttccttaaagtttaaatacagggatccaactagtattctccaaaatttttcaggaatatcagactttactgctgtggaacacttggctgttgtaagaggagtgtttcatctctcataaggatgtaatgaaaggaaattaggagccagtgggagagtgcagggacttaggtgtaaatsataggtgaatctttttttttttttcagatggag

SEQ ID NO: 852999 - DNA, 599 bp, Homo sapiens
tggcatggtaactactttgttctttggagaaatactcactgttgattcaaggttattataaaagtctcggaagctcatgactggttttgaaattccttgtcatatattagcgtaaaacaataattaccaaattatgtgatagtctcaggaaccactcttaggagccttggaatcaaaatagctccatcagtatcaacagattcgatgtgtggcttagttttaattgcacttaggagaacctatttgtttttaacacttgaaagcaagtctaaattgtgtccagtgggggcacttagagtagcaggctttggcacctgcctcaggtaagaaaagtttttgtttatttcattagcgcttgattctttgacagactgtggctttccacttactgcatgaagagctgccagccattcctgctgggagaagctagtatgggactagcaatgaacttctgaaagaagttattatgccttatatggttgatctcccatgcaaataaaagaagcgtctcatactgtagctaaayggaattggtatttcatccaatgtaaatgtatgccagcgtgctttctggcttttatcaaccactgcatctctct

SEQ ID NO: 853000 - DNA, 654 bp, Homo sapiens
attgccctggtgttagagaaaccagtgtagagatcagtagtccaggcaaggtataatgggtgtttgaattaaagtataataaggtataatcagagaacatgctaaagagatatttgttatagtttggttagtcataaatttaatgacctacaatggaacctcttaggtatcccatcataacaaaaataaaatgcagtattctcctcatgccctatgtagtcctgcatggtatggtcactgcctgcttcccagcctcatctctgaataatgtctcctgctcccctttctactgagcaccaaccacagtgatcttctcacctctaaacacaaggtcattgcctcctcagagactttgtacttgctgttcctttagcctaaatgctctttaggtgtatcttctcatcatttaggtttaagttcagataccaactctttggctccttctcatcagttaggtttcagttcagataccaactctttggagagctctttcctaacaatgctcctgcccagccttgctatcacattatcgtttctgtttagcatgtatcacaatctaaggktatctgtttactattttatgtaatccattactaccactacaatgtaaattttataagagtaccttaactgtaatattctccagtgaaatcc

SEQ ID NO: 853001 - DNA, 568 bp, Homo sapiens
acagccgaatttgaacaaaggtacaaagaggagctggcaccattccttctgaaactactccaaaaaacagaaaaagaaggaatcctccctaactcattttaagaggctgccatcatcctaataccataacctagcagagacacaatacaaaaagaaaatttcaggccaatatccctgatgaacgttaatgtaaaactcctcagtaaaatactggcaaaccgaatccagcagcatatcaaaaagcttatacaccacgatcaagttggcttcatccctggaatgcaaggctggttcaacacatgcaaatcaataaacataatccatcacataaacagaaccaatgacaaaaaccacatgattaccttaatagatatagaaaaggcctttgacaaaattcaacagcccttcatgctaaaaactcacaataaactaagtattgatggaacrtatctcaaaataataagagctattcatgacaaacccacagccaatatcatactgaatggcaaaaactggaaacattctctttgaaaaccggcacaagacaaggatgccctctcccaccact

SEQ ID NO: 853002 - DNA, 568 bp, Homo sapiens
acagccgaatttgaacaaaggtacaaagaggagctggcaccattccttctgaaactactccaaaaaacagaaaaagaaggaatcctccctaactcattttaagaggctgccatcatcctaataccataacctagcagagacacaatacaaaaagaaaatttcaggccaatatccctgatgaacgttaatgtaaaactcctcagtaaaatactggcaaaccgaatccagcagcatatcaaaaagcttatacaccacgatcaagttggcttcatccctggaatgcaaggctggttcaacacatgcaaatcaataaacataatccatcacataaacagaaccaatgacaaaaaccacatgattaccttaatagatatagaaaaggcctttgacaaaattcaacagcccttcatgctaaaaactcacaataaactaagtattgatggaacatatctcaaaataataagagctattcatgwcaaacccacagccaatatcatactgaatggcaaaaactggaaacattctctttgaaaaccggcacaagacaaggatgccctctcccaccact

SEQ ID NO: 853003 - DNA, 547 bp, Homo sapiens
aagttaatgtattatagataaaatactggatttttttaacagtacagtatcacactgctcattcatcttaagcttattgtttaaaaagtttatgtttgtgatgtacttttttaaaatttttttacaagtatccctgattaatatcttttacttacagttggtctaattttctaattaaaaccacttggggcctaattctatcatcaactgttattattaacttattcaacatctaatgtatcaaggtaatttactaatattacaaaggtatgtgaaatgtgtttctttaccttctgcctttaggtcatattcagttttgcttttatatctaagtcagtgataaaaatcataagccagaaagagttaaagaccaagcaaagctttagaccataacctcatagataccccactggagtctgtccctattgttaaactaggtaatggtcttcttaattattctagctaacagtttatagattcccatyatttctacaggaatgtcactgtaaaccttttcatatgcttgactaagtccagaagttctatg

SEQ ID NO: 853004 - DNA, 576 bp, Homo sapiens
tcggaatcacttggagggcttgtaaagcacagaggactgggctccatccccagagtttataatctagtaggtccagagtgggcatgagaatttatgtctccaacagtttaccaattgttgctgaacaaatgtgggtagatacttctaaactgtcttatagtattactcatttctgtttactctttacacttttcaaagtaagggaaaaaatacatttctttaacagtgaaagtctccatctgaatcatcttgaaaattttgctgatggttgaaaatgggtgatattttagcagcccagaacatacacctttaatgacaaaaaaactacagagttcacagatcattataattgcaatcttttttttcctcattattttctttcttctaattagctgtttcaaaatcaagttaagggctataggtgacagggatggacaagaatytctgtcatcctgtcaataaaaataaatgtctagcataaaaatgtcatacatttttggcaatgactgaaatccagtgatatatttaaaggggtcacatgaaaacaaaagagcattttgatattttggacccctg

SEQ ID NO: 853005 - DNA, 568 bp, Homo sapiens
ccttaaggagacaggaactaacgccccagctatagttactgggtgaacttggaaaagtcacataacctctctacatctcattttctttcactataaaatgaactcttaatgattcaacattrgcattttctaattcaaatatttgcattattctataaaggactgagatgtgtgttttttgctccctccctctttcttcccttcctcccaggcatggcctctgtaccacatcattttcaaatgtattattcaaattatatttttgtctagttactatggtgatcagtgcaactcaaatccttagataggagtgctgaatttttctctcatcaaaaataatacttattgttcctgctgcatcttttgaggagcagagaaacctaagagctggttgctgaaggtacttgagaatctgaatctgaatgctgaaatcttctgcagcaggggaaatagaggcatagaagaagaatttcaaggtagtagcatccttaataattggaaagtaacattgtacagaggatcagggattctatgtgactgtggaggaatttatctctcgcttaatttc

SEQ ID NO: 853006 - DNA, 547 bp, Homo sapiens
gtggttcacgcctgtaatcccaacacattgggaggccaaggcaggaggatcgcttgaggctaggagtccaagackagcctgggcaacacagcaagaccctgtctctaaaaaaaaaaaaaaggtaaaacaaaaagaaaggaggtgatgagtgtagttgtggcctcaagacaagaggcagtggcaggggtaatttttcctatacttcctcttgtaagtttactttaatgaaagacgtcacctgaatcctgaagaagtggcttccagaacatatatgaagcaagtgaatccaagtgactcatgggaaaagctgctgtggatgctgtgtggcaccttctaatccccccacttcagaactgaagttcttattcctctaactgcacatggttttggagactaatattttacacgtgtatcctccagatcttgccttcggctgaatagaaacaccttgcccaacatcgtaccctcttctctgggggcaaatgtggaaatataaaggcccaacacagctgtacccaaatttagaaaaacttcagagagtctttcc
